United States Patent Application Publication US 2011/0014706 A2 - sequence listing, part 36

SEQ ID NO: 92651 - DNA, 802 bp, Arabidopsis thaliana columbia
  unsure (1)..(802): unsure at all n locations
ggcacctaccccttctttaattttcgggtcgacccacccgtccgcttatgaaagaagtgagtgacgaactttgccagatggtaccagatagctggaaagtagaaataactgatactattgatctggacattctctcacagttgctcaactccggcaccttggatatcgattaccttggaaagatgcttgagtttgcgttggctactctgcggaaactctctgccccagctaatgaccgtgagaatgaaagcacccaccgggatttactcaaggaacttcacaggttgtgtgaagctgaagatgagtctggtaacttccgtgctgttgcaatagtcaaggggatccgcttcattcttgagcaaattcagggacttaagcgagagattaggcataggtcgcataacaatcatggaaccccttttttgcaagggccagcaggctttgtttaccttaccaaaagcatttgaaaagcgttatggacctcccactcaagcctacgaatcactaccagtgacacgaaggtggatatcaactcttttgtctagcaaagaagagtgggaagaacacaacaatacgctttcagccttgaatgtggttgagagatcctccatgggtatttctctcaaaacgggtggaagcctttctatccccaagtcaataccacgtccaagatcaactggttatggacacctgcaggtccacttatcagcaatgcaaggggaggaagaagttgattctggcagtaaggctttgggtttgtttgnaagctggtgantcagggtngctgggtttaacaccctga

SEQ ID NO: 92652 - DNA, 481 bp, Arabidopsis thaliana columbia
gactttattagggaaagctggtacgcctgcaggtaccggtccggaattcccgggtcgacccacgcgtgcgctttcagaatcgtctgatattgatgcggttaggaggattgatctcacacacttgaaggtttatgcaattgatgttgatgaggctgatgagcttgatgatgccctcagtgcaacgagattgcaggatggacggataaagatctggatacatgttgctgatcctgctagatatgttacacctgggagtaaagtggacagagaggcaaggagaaggggaacttctgtctttctgccaacggctacttatccaatgtttccagagaaacttgccatggaaggaatgagcttaagacaaggagaaaactgtaatgctgtctctgtgtctgttgtcctgcgttctgatggctgtattacagaatattcaggagataattcaatcatcagaccgacctatatgttgacgtatgaaagt

SEQ ID NO: 92653 - DNA, 556 bp, Arabidopsis thaliana columbia
atgttttaggtgcactatagaagagctatgacgtcgcatgcacgcgtacgtaagctcggaattcggctcgagatccaaagaacctggtaccgagagtgctgatgtgtctttacaccaattagctgatatccagcccgggccatccattttggttgatcaaatggatactgaaaaatccaaagaacctggtaccgagagtgctgatgtgtctttacaccaattagctgatatccagcccgggccatccattttggttgatcaaatggatactgaagaattcaaaaatcctgatgtgtctttacaccaattagctgatattgagccctcactgtctatttcagctgtgcaaaagaatattgaggataaggatcaaagtcacgttgaaactgctggatctgagttagttgatgtctctgccgaatgttcaacagaacctcaagttcaattaccgccatcttcagagccagtgggagatatgcacgttcatttaggggcaagcaaatcagaaatagttgccgaaggtactgacttctcttcatctctcccgaagacggag

SEQ ID NO: 92654 - DNA, 1451 bp, Arabidopsis thaliana columbia
  unsure (1)..(1451): unsure at all n locations
aatacgcttcactatagggacagctggtacgcctgcaggtaccggtccggtattcccgggtcgacccacgcgtccggcccgggccatccattttggttgatcaaatggatactgaaatatccaaagaacctggtaccgagagtgctgatgtgtctttacaccaattagctgatatccagcccgggccatccattttggttgatcaaatggatactgaagaattcaaaaatcctgatgtgtctttacaccaattagctgatattgagccctcactgtctatttcagctgtgcaaaagaatattgaggataaggatcaaagtcacgttgaaactgctggatctgagttagttgatgtctctgccgaatgttcaacagaacctcaagttcaattaccgccatcttcagagccagggggagatatgcacgttcatttaggggcaagcaaatcagaaatagtggccgaaggtactgacttctcttcatctctcccgaagacggggggagaaaatgccaagagccaattagctggcaccgagcccatcatcgtctcttacagctgtgcaaaagaacattgaagatcaagttgaaactgctggatgtgaatttgttgttgtctctaccggatgttcaacagaaccacaagttcaattaccgccgtccgcagagccagtggttgctgaaggtacagaattcccttcttccctcctaatgaccggggtagataattcttcccatctaatgaccggggtagataatgccaagacccatctcgctgatgttgtgccttcatcgtcacctacaactatggaaaagaacattgaagctcaaggtcaagatcaaggtacaactggtggatgtgggctagttgatgtcttgaccgaatgttcgtcagaacctcaacttcaactgccgccatccgcagaaccagtgatttctgaaggtacagaactcgctacactcccattgacggaggaagaaaatgctgatagccaattagctaatattgagccctcatcgtctccttcagttgtggaaaagaacattgaggctcaagatcaagatcaagttaaaacngctggatgtgagttagtctcgactggatgttcgtcagaaccacaagttcatttaccgccctccgcagagccagatggagatatacacgttcacttaaaggaaacagagaaatctgaaagcatggttgtggttggcgaaggtacagcattcccttcatctctcccagtgacagaggaaggaaatgctgagagccaattagctgacactgagncctttacgtctcctacagttgtggaaagaccattaaggtcaagaccaagttgaacnactggatgtgggtagtgatgatcancgggtgtngnagaccccaagtcaatnccgcancgangccatggagtgtnaacgatttgggnaggnaatgaacggggtngttttgc

SEQ ID NO: 92655 - DNA, 303 bp, Arabidopsis thaliana columbia
aggacaaatctaacagattttgttaacgtgcctcggtcccattctcttgagacattccacaaaatggtggttgaaaacggagggaagttttcaatgaacttaaacaactcactgacgcggtgcattgcagcacaaagcactggtacgtacgtgcttaccattacatattgatttttccccaacccttttgtacacatgagtgagtctcaaaacaattttaataatacgagcatgacaatgagatactatttcaggaataaagtatcaggcagcaaagcgtcagcgagatgtcatccacttttc

SEQ ID NO: 92656 - DNA, 348 bp, Arabidopsis thaliana columbia
gacgatgcaatttatggacgtgatggttatgattttgatgggtgtcgacttcgggttgagattgcacatggtggtcgtagattttcaccatcagttgataggtacagcagcagctacagtgcgagccgtgcaccttcaagacgctctgactaccgcgtgcttgtgaccggattaccgccttctgcttcgtggcaggaccttaaggatcacatgcgcaaagctggagatgtctgcttctctgaagttttccctgaccgtaaaggcatgtctggggtttgtggattatagcaactatgatgatatgaagtacgcaataaggaaacttgatgccactgaatttcgaaatgc

SEQ ID NO: 92657 - DNA, 400 bp, Arabidopsis thaliana columbia
  unsure (1)..(400): unsure at all n locations
ctggggaaaattcgtagcgtttgtgaagaaaatgggtgaagggagagactcacatagatgtcgggaaagaagttgacccgtgaggctgagcattttgtgcacgttactcagccgctggttcaagaagctgcagtggctctcactcactagagagatagattgtggcatggttctatggtttatgtttgtatgcgattataatgaaatggttatatgacaatgccaaaaaagatgtttaggcttgttggagcttgtgtatgtattgttagtaaaactgaaatgtatgccacagctctggtttttttccggtcaggttgtggcatgctactacttttcatatatgctaaaagatgtacatgttctttaatgaagccaaaataaatagcatttctttnataaa

SEQ ID NO: 92658 - DNA, 776 bp, Arabidopsis thaliana columbia
  unsure (1)..(776): unsure at all n locations
gctggtacgcctgcaggtaccggtccggtattcccgggtcgacccacgcgtccggccactctagccgcagaagttcctctagctggtgaaaacgcattgcctaggtacgacgactatgcacacgagcagattctcaaggcctccgcgctgaaccttgatcaaaacaatgagggagaacctcgagagatgtgtgcatttacttacctaaggatgaatccggagttgtttcaggcggataactggggaaaattcgtagcgtttgtgaagaaaatgggtgaagggagagactcacatagatgtcgggaagaagttgagcgtgaggctgagcattttgtgcacgttactcagccgctggttcaagaagctgcagtggctctcactcactagagagaatagattggggcatgggtcctaatggtttatgttcggtatgcgattataatgaaatgggtatatgacaatgccaaaaaagatgtttaggcctgggggagcttggtgtatgtattggtagtaaaactgaaatgtatgccacagctctggttttttccggcaaaaaaaaaaaaaggggggccgtttaaagatccagtttacgtcgggggatgcgaggnaaagctcnctttggggcccaaaataaattacgggccgggtttaacaagggggaagggaaaaccctggcgtccacattaatggcttggaaaatcccctttcccagtggggaaaacaaaagggccccccgaccccttccaaaaatgcgcacctgaggggaaaggacgccc

SEQ ID NO: 92659 - DNA, 513 bp, Arabidopsis thaliana columbia
  unsure (1)..(513): unsure at all n locations
ctatacgactcactatatggaaagctggtacgcctgcaggtcccggtccggaattcccggggtcgaccacgcgtccgcggacgcgtgggcggacgcgtgggcgcagattgtgctggagctttggatataactgacgatctccagaacttgctggctggggatgagcttactggtctatactgcttccgccatcttcgggatcatgttactagttccatagattccataaacagtattctcacttcagaattcatgcgtatctccatacatgatactggggagatagatgtactgattttatctgcagcaaatatacggggatccatttcatctaaacggaataccggcgaggaagtaaagtaagaagaagaggatacctctaccttatgtgatcggttctttccttaagtattggattgctaagaacggcaagntcccgtcaattttgaggatgtatcgtgatacactcacatccgaaatgaaaaatgccatcagaaagcagttgctgatctg

SEQ ID NO: 92660 - DNA, 486 bp, Arabidopsis thaliana columbia
caatttagaagaaactcactattccatcttctgagcaacctctttgtcagccgagcacattgtttcttcttaaatccagagtcctttgggtttcatgaccacagaatcctgagtaacatacagcttttctctcatccctgtggcattggatgatcatgcgaatatggtggatctccatctgatgagttacaagcagataaatcaattatagattcaacatgaggaagaagtatgcaatcgaggttcaagaagctgggcaactattcagctgtttacgaagttacactgaagtgggcaagtgtgcgttaagaagaagacctatatttcaagctattcaactgtttacaagttacgctgaaatcacaagctgagcaagtgtgtattaactctcttattatttttcctaggattaagtttgtaattatgcttgatattatcatcataacacaaaaattcaatggtaaataatatattattctgaggttg

SEQ ID NO: 92661 - DNA, 756 bp, Arabidopsis thaliana columbia
  unsure (1)..(756): unsure at all n locations
nnnnnnnnnnnnnnnnnnnnnnnnnnnnnnnnnnnnnnnnnnnnnnnnnnnnnnnnnnnnnnnnnnnnnnnnnnnnccacgcgtccgcgttttcaagtgggggctaaacggtgcagcggctgcatttgatgtctcggcttggggaatcgcgatcgcgcaggttgtttatgttgtagggtggtgtaaagacggttggaaagggctgtcttggttagcgtttcaagacgtttggccgtttttgaaactgtcgtttgcgtctgcggttatgctttgtctagagatttggtacttcatgacgatcattgtcttaactggacatcttgaagaccctgtcatagccgttggatctctctcaatctgtatgaacattaatggatgggaaggaatgttgttcataggaatcaatgcagctataagtgttagggtgtcgaatgagctaggatcgggacatccacgagctgcgaaatactccgtgatcgtaacggtgatagagtctctcgtcattggagtagtgtgtgcaattgtaattctgataacacgagatgactttgctgtgatttttacggagagtgaagagatgagaaaggcggtagctgatcttgcgtacctgctcggtataacgatgattctcaacagtttacaaccaggtatatcaggagttgcattaagggggaggatggcaagcacccggggctttataaacctggtttggtaccaccccttgcgattacctctaggggttttgttaaggtataa

SEQ ID NO: 92662 - DNA, 711 bp, Arabidopsis thaliana columbia
  unsure (1)..(711): unsure at all n locations
aanttttggaacatgcataccttgcttttgcggcccccagagttactgnacggctcggntctgantcttcagnacttcggcctgcncgtcatctggntgattcggntttatgaagnggcggaggaaattttacaaggcccgggaaggcaggaggccacccaagcttgccatctgcaggagtagtagcaggagaaaatggaccataaccctgcttctgctgcattacccacagacttcatgaagaaccatgtccaagagttttgcgcaagttgtccgcttggacgaaggcagcaaagaagcagtcaaggccagttcatctccagatgcaattacaacagcagcagtctcttctggtcaatccaactagtaagtaaaagacatcaattagcaaagactatgttttcaaattccataatatgatcttttgtttgttctaagaaggtatttcaaatgaaattttacgtcagaccgggtctggtttttgtgtaaagtaagcctctttcctacgcccttatctgcttcaggggtatttagccagaatccgagtcatttcccctgtatacaatgttccataaaaccctcactgttttaggttaataaaagaagaagattaagaagataatgtatcaaaggcaatataatgtttttcttgtaaagtcggcagcatttatcttcgcagccagtttttcataatcaaaatgcagattacac

SEQ ID NO: 92663 - DNA, 827 bp, Arabidopsis thaliana columbia
gacaaagaaccgtgtccactttttcttctgttctcggtaaatgccagctctcaattctgtggtgtagcatatatggttggacctgttgattttgataagagcgttgattactggcaacaagatagatggagtggacagttcccagtgaagtggcacattatcaaagatgttccaaacagccagttccgccacattatattggaaaacaatgacaataagcctgtgactaatagtcgagacacccaagaagtaagtagcaatttgtgcctatcaagctttcttgtccataagatacctcttttaagccacaccataaccacaaccaaaaactacaggtaaaactggaacagggcatcgagatgctgaagatcttcaagaactacgacgctgacacgtcaatcttgggatgatttccgggttttatgaagagccgggagaaaattatacaagacccggaaggccaagaagacagccaagccttgccatctgcaggaggtagtagccggagaaaatgaacataaacctgcttctgctgcattacccacagacttcatgaagaacatggccaagagttttgcgcaagttgtccgcttggacgaaggcagcaaagaagcagtcaaggccagttcatctccagatgcaattacaacagcagcagtctcttctggtcaatccaacgggtctggtttttgtgtaaagtaagcctctttcctccgcccttttctgcttcaggggtatttagccaaaatttgattcatttccctcttttcaatgttctataataccctcactcttctgagttgatagaagaagaagatgaagaagat

SEQ ID NO: 92664 - DNA, 876 bp, Arabidopsis thaliana columbia
  unsure (1)..(876): unsure at all n locations
nnnnnnnnnnnnnnnnnnnnnnnnnnnnnnnnnnnnnnnnnnnnnnnnnnnnnnnnnnnnnnnnnnnnnnnnnnnnnccacgcgtccgcacaattcggaggacttcctcaatgggctgttgttggtgacacattccctgttggatgtgcatttgatgaatctaacgtacatcacaagtactttgtggaaaacccagattttcacaacgaaacctacaacactaaaaatgggatttactctgaagggtgtggattaaacaatgtcatgatgtcttggggccatgacgactacatgtacctggtggctaaagaaaacggaagtaccttgccgtcggctggacagtttatcataagataccattccttttaccctttgcacacggctggagaatacacccatcttatgaacgaggaagacaaggagaatctgaagtggctacacgttttcaacaagtacgacttgtacagtaagagcaaagttcacgttgatgtggagaaggtcaagccttactacatgtctcttatcaagaaatatttcccggaaaacttgaggtggtgaattcggtggagtaaaaaagtgcccatggaggattagtcgttttatttacttacaaatatttttacacattttcgagttaatgtgaatctattgtaattgtgttatatatatcttatgttaatcatattcaggctgtctctgaaatgtaatcacaatcaaccctcgtgaatgctaaagagtttgtacgtcgggtgatataagatcttaaataatgaagtttatttataataaaaaaaaaaaaaaagnnnnnnnnnnnnnnnnnnnnnnnnnnnnnnnnnnnnnnnnnnnnnnnnnnnnnnnnnnnnnnnnnnnnnnnnn

SEQ ID NO: 92665 - DNA, 645 bp, Arabidopsis thaliana columbia
aggcaaagatcagaggtttggtctctggtttgatccaacaaaagattaccattcctacagttttctttggaaccctaatcaacttgtgttttatgttgacgatccaccgatcagggtgtacagcaagaatccagatgtttactacccatcggtgcagacaatgttcctaatgggaagtgtgcaaaacggatcgataattgacccgaagcagatgccttacattgctaagttccaggcatcaaagattgaagggtgtaagactgagttcatgggaatagataaatgcactgatcctaagttctggtggaatcgcaaacagctaagctctaaagagaagacactgtacctaaacgcaaggaagacgtacctggattatgactattgttctgacagacagcgatatccaaaggtgcctcaagaatgtggaagttacacttagagaaagatcaatacctgtcacagggttaagcctacaaaacaattatcttgaaaaaataacttatgttactgtaagatgctttatgataagccttttctatcaaataacaacattattgtcatcaaaaaaaaaaaaaaaagggcggccgctctagaggatccaagcttacgtacgcgtgcatgcggcgtcatagctcaactatagtg

SEQ ID NO: 92666 - DNA, 866 bp, Arabidopsis thaliana columbia
  unsure (1)..(866): unsure at all n locations
tgatgaaaccaaatggacccatatgattgggagatttggataacagagaatccacaaaagtgtatccttcacaaaaccaaaacacactctccattttcttcagacaactctttctcctttcttctctcttctctgtctcatcacaaaccagaaatgggaggagtgtccttcctctccactgttccttccttcaccaacacaaccaatcatcaacatctcactacactctcttcttcttctcatcgctctgctgttatacgatgttccaagattgaacctcaagtttccggtgaaagtttagctttccaccgccgtgatgttctcaaactcgccggcactgcagtcggaatggaattaataggcaacggtttcattaacaatgtgggtgatgcaaaagctgctgacttgaatcaacgtagacaacgatccgagtttcaatcaaagatcaagattttgctttcaaccaccattaaggctaaaccggagcttgtaccttccttactcaaactagctctcaatgatgctatgacttatgataaggctactaaatcccggggagccaatggttccatacggttcagctctgagctaagtagagcagagaatgagggactttntnatgggttgagtttgatagaggaagtgaagaaggagattgactctatctcgaagggaggtcctatttcatatgcagatatcattcaattagcaggacaatcagcggtcaagtttacgtatttagcatcggctatccgaaaatgtggtgggaatgaagagaagggggacttcctttaccacagcatatgggttcagccttggtcagtggggggtgtttgtttgtagtaaatgattgaaggggggtgatt

SEQ ID NO: 92667 - DNA, 641 bp, Arabidopsis thaliana columbia
  unsure (1)..(641): unsure at all n locations
acgccagccctaatacgacttatatagggaaagctggtacgcctgcaggtaccggtccggtattcccgggtcgacccacgcgtccgcctagatttgctgcttaagctggtaagaatgtatgggtcacaaatttactcgtcgctttccgctccctcatctgttggtgtagatattgaggctgagcaaaggatggagcggtacagttgttgctttgtcgagttcgagaaaatcaaggcttgccttccctctttagcaagaagaggaaatttggtggccaagactctccatgaactcaacttaacatttcaagaagtttcatcgtgatactttttggatgtggatttggttccaatgtggagtttaacagtactaaagcctaactctaccaagctaaccaatagagtctatggaagactaactaaccctccgcgtattgcgtatggcccactgctcgggtccggaacctttgcccttgcggatggatacgggactggctctcgtttcaagctaacttgggagcgtaaagagccatttccggtggctgtatggaactaggttattcatttcttcccacactggcttacactactcgggcttaagaggcaaaaaaaagaaccccatnatttaacaaaatgttttgg

SEQ ID NO: 92668 - DNA, 535 bp, Arabidopsis thaliana columbia
  unsure (1)..(535): unsure at all n locations
nntgcttnnnnnnnnnnnnnnnnnnnnnnnnnnnnnnnnnnnnnnnnnnnnnnnnnnnnnnnnnnnnnnnnnnnnnnnnnnnnccacgcgtccggtaacgagccacggacaccgcaacaaatcttggagtcacatcagatttatctgaaacctgcattgcttccatctctagagccatggagggctacggagtctcgagaaacgccactagtttctgcggtttgggaaccaagatccttgttaagtatgactgtgacggtcgaaccactgttacacaaatgcatcagtctccgggatttggacatgtttcaagaaactgcagactcccattttcgccgggacaccaatgcagaaagtgtttgaactctggcatcacttaccttcgtaatctcataggtgcagagactaataacattactctgtgtacttgtcgtgatgcgacttatgctacattagcaagccgaatagacgatacatcagctcttgaactccttagttgtttctttcaagtgacagagcttaacattccttcaga

SEQ ID NO: 92669 - DNA, 494 bp, Arabidopsis thaliana columbia
gcgatagatgtgggggtgtgtggcgggcgcatgttttcctcgcggagccgctttttccgctttcccgcgccctttttttggctccttataagaaaagttttgatgcctccagggccgggccggattttcgggtggaccccccggttcccccacgggtgggtgttgccaaggaagaagtcattgaaaagagctcagattcatcgtcaacctaaacatgtttgtactattttatgagcagagtgatgtaaatcataccgtgatttaattacggattacaacgaagagcttggacaaaatgtttgcacggaagcattgttaatttattgtacaaggtgtgatacttacagaaaggcaaaacagtgtaacaaatgtagtaagtgccttgcatttcacggttttgcaaattgttggagaataataaaaaaaaaaaaaaaagggcggccgctatagaggatccaagcttacgtacgcgtgcgtgcgacgtcataatcttc

SEQ ID NO: 92670 - DNA, 479 bp, Arabidopsis thaliana columbia
ggaaggcgggcccgcctgcaggtaccggcccggaattcccgggtcgacccacgcgtccggtgctggaggactgagtttgctgcaattctgcaacctgaatagcttcaggacattattcatactgggcttctcaatcttcctaggcctatcaattccacaatatttcaacgagcacacagccatcaaaggctatggtccagttcataccggggcaagatggttcaacgacatggtcaatgtgcccttctcgtccaaggcctttgtgggaggatgtgtggcttacttgttggacacgacgcttcacaagaaagatggttcgatcaggaaagaccgaggtaaacactggtgggacagattctggactttcaagaacgacccgagaacagaagagttctatgctcttccgttaacctcaacaatatttcccttctgtctgaaaaaaatccttccaaactttatggaatgcctgtttgctagtt

SEQ ID NO: 92671 - DNA, 640 bp, Arabidopsis thaliana columbia
tctagctttactatgacgacccatgcacgcgtacgtaagctcgggggtcgtgtacgtgaagagaatcaatctgacagcaaatagttttggcgtctttctaactcaacccatcatctctgttgcattttatcgagagaatatttgaggtggatatggcctcgacccttttctccagaactttcttggctgctagtcaccgactgattactccttctcttccgcaaaagatctttaatccagccacctttctcagtaggtcactccactctcagttaggctccgcttctacagcctataaatcaactacttgggctcgtcgagctatggcttctactggagttgagacaaaagccggttactccacatcatccgtatcaaccagtgaacctgttgtttctgttgattggcttcatgctaatcttagagagcctgatttgaagattttggatgcttcatggtatatgccggatgagcagagaaatccgatccaagaatatcaggttgctcatattccccgcgctctcttctttgatttggatggaatatcagatcgaaaaactagtttgccacatatgttgcccactgagggaagcttttgctgctggttgttctgctcttggaattgataacaaagatgaag

SEQ ID NO: 92672 - DNA, 415 bp, Arabidopsis thaliana columbia
gacgaccagaggaactatttattaaactttggtcgtaaaccatcagcagtgtagtgagtcggcatctcatgcaaggggtggacagatcaactctgaatctgtgaggggttaataaaaaagaaagagaaaccatgtacttggaagattccaattcttggttttcatggctgtggtgtggactcaggagacaaacttgtaagtaacctggtggtgtaggaatcttttcacaagggtttcaggtgaaaagtgcttttagattctgctcttcgtcttcgttttttaactttgaactcttttatatttccgattatcttttatggtggacaaatgcatattctgcttggtttgtgtattggatgatgggaaagaatgtgaaacatggagtagtttggttatctgaataagtaatgtcttc

SEQ ID NO: 92673 - DNA, 718 bp, Arabidopsis thaliana columbia
  unsure (1)..(718): unsure at all n locations
nnnnnnnnnnnnnnnnnnnnnnnnnnnnnnnnnnnnnnnnnnnnnnnnnnnnnnnnnnnnnnnnnnnnccacgcgtccgctcttcttgagagagctgcggaagtagtggtggttcctcgagtcatgcatgggaattctaatgatggtctctggagagcgtcatttgatgaattcttcaaccttcttaccaaatactgcagaagcaagtatgacacaatccgtggacagaaccaagggagtgcagcggatgttttggagctggcgataaagagggaaatgcccgctgagcttttacgtgcgagtctgcgtcacaccaatgacgaccagaggaactatttattaaactttggtcgtaaaccatcagcaattagtgagtcggcatctcatgcaaggggtggacagatcaactctgaatctgtgaggggttaataaaaaagaaagagaaaccatgtgcttggaagattccaattcttggttttcatggctgtggtgtggactcaggagacaaacttgtaagtaacctggtggtgtaggaatcttttcacaagggtttcaggtgaaaagtgcttttagattctgctcttcgtcttcgttttttaactttgaactcttttatatttcgtattatcttttatggtgggcaaaaaaaaaaaaaaaaaaaaaagggcggccgctctagaggatccaagcttacgtacgcgtgcatgcgtcgtcatag

SEQ ID NO: 92674 - DNA, 794 bp, Arabidopsis thaliana columbia
  unsure (1)..(794): unsure at all n locations
ccccccgacttactatggggaacgctggtacgcctgcaggtaccggtccggatttcccgggtcgacccacgcgtccgcagatctctacttcctctttctctctcacacacatatacacattctctatatatatagaagagaaccaaaaagtaggagaagaagaagctaaaacatataagaatggtttcgagagaacacaagagaggttcctctctgcgtgagaagtttcatttgcttcgttcaatcactgattctcatgctgagagcgaaacatctatcatagtggatgcatcaaaatatatcaaaaagcttaagcagaaggtagaaaaaatcaacaatgcgaccacgtctgagcaatctttccgtgaatcttccgatccaaatcctatggttacagtggaaaccctagagaaggggttcatgataaaggtaatgtcaaggaagaatgaggcacgcttggtggtttgtgttcttgaaacctttgaagaacttggaactggtgttgttaaagcaagggtttcatgttcctgcacaattagcttggctcccttggttcataaaatatggagggggaaactgctaaaatgctaaaccaagaaaaagggcaggggcaaaaccaaagggccccggagggatagccctgcctgatctacaaagggtgaaccttattgaccaagtttcataaaattttcatataaataataacctgggttcaccaaaaaaagcctttaatgcacctggtccagggaaaaattcattggttgcctctgnnnnnnnnnnnnnnnnnnnnnnnn

SEQ ID NO: 92675 - DNA, 702 bp, Arabidopsis thaliana columbia
  unsure (1)..(702): unsure at all n locations
cccgacttnatatggggaacgctggtacgcctgcaggtaccggtccggaattcccgggtcgacccatgcgtccgatcggtggagccgtcaactacgtagctatatcaaatgctcttggagttacaccatcggttttagctgctggactggctgctgataatgttatatgcgctgtatatttcacgacattgtttgctttgggctccaaaatacctgcagaagctgtaccgccaccgactactattgtagatgcagagacgaacgaagcttctgaaactaaaaataaaattcctgtgctactgatagctactggaattgctgtgtcattagctatctgcaaggctggggctctgctaacaaagtacttcggaattttcggggggagcttaccggctatacagcgggtgtgttattttagcactggctttcctcccagttggtcgtcttgctccatctgagaagcatggcttaattttatgcaggggttttcacagggggggtgcagcggaaacattggatgggatcacccgggccgacatatcttgtgtgcattgttaaaaggggacactttggctggaattgggctaggaaagctcttacatcgagtagggtactggtctaaatcaatcgtaatgcggggaccccaacccactggattggaaccgaaagggtggaactcgttatagtcccggatttggccga

SEQ ID NO: 92676 - DNA, 537 bp, Arabidopsis thaliana columbia
  unsure (1)..(537): unsure at all n locations
tatagggacagctggtacgcctgcaggtaccggtccggaattcccgggtcgacccacgcgtccgggatttaccagctgcagagatcaaaaacttcgtgattcattcgaacaatctaattttaccagctgcagagatcaaaaacttcgtgattcattcgaacaatctaattcagatttattattgggtctggttatctttttcttaccatattttttgtttcctcgttaagacgattgtttggtaatgtcgtcaccagacattgtcggaattttggaaaacacgaaggaacttgatcggttaaggaaagaccaagaagaagttttggttgagatcaataagatgcataaaaagcttcaagcttctcctgagatagttgagaagcctggtgatatttcattagcaaagcttaagatattggtacattcaagcgaaagagctctcagaaaatgaagtaaccctatcgaacattttggctacctcaggggggatntgcttgcttccatttggccccacagggcaacaaaagaaaaaagtta

SEQ ID NO: 92677 - DNA, 575 bp, Arabidopsis thaliana columbia
  unsure (1)..(575): unsure at all n locations
ccggtccggaattcccgggtcgacccacgcgtgcgcgacaactttctctcttcccttctctcttcctctggttcacatggaacttcaataacattcactactttaagggtttcctcattctccgaaaaaggcagggtgggtactactaaattgtggattttcgttcacttagaacagtggctggtttgatctttgattcctcaagttataacttttggttttcttttatatcttatgacatgataatatgaggggcttaaatcttcctcttctgttgatcctgttggaaaattctttgatttggggggttttgtggcttagataaccctaaaaggggttgaatttggacctttgggggattccttaatctctgtttttatcaatagatgtggttaatatatggcctaattgttgggggtatctgacattaaaaatgtgggtttngtatagaccaattttaacttgggggtgttggtgattctaaattacaaaaattttttgaggggatattaaagccttttctagggaggtttaaaaaaaagcctttaggcgtgaattttttttttcctgggggt

SEQ ID NO: 92678 - DNA, 548 bp, Arabidopsis thaliana columbia
acgcgtccgctcttcctcgtcctcttccttctctctctcttcgcattctcctcatacgctataaggagaacatctcagagagagactgatggctaagcaatgagggagagatgcaatgtgggtccatgttgtttaagcaagaggagctacaagagatgagtggggtcaatgttggtggcgattacgttgaggtcatgtgtggttgtaccagtcaccgatacggcgatgctgttgctagacttagggttttccccaccggtgaccttgaaatcacctgcgaatgcacacctggttgcgatgaaggtctctctttttttgtctctactgtctctttctcgtgtctttctgatgcttttgggaaaatgggttttgatttgtgtgcatgttacatgtgaatgtgtgtgagattaaacgtttgtctctgtctagctactatcacattgggctggtaaagctagggtctttagcatgattacatatttatcaatgagtcttagtgtatgctagctagatccgttcttgtagaaaatgaaatgacttgatttgcc

SEQ ID NO: 92679 - DNA, 685 bp, Arabidopsis thaliana columbia
actcactttagggagaagctggcccgcctgcaggtaccggtccggaattcccgggtcgacccacgcgtccgcccacgcgtacggtgctttctggatggggttggaccaaaattcaaggcgtcgaatgtcccgagagaaaatggatgtgattctaaaaatagttgtaaaacacttctttgtcgagaaggaagttacatctactttggtgatggattccttgtatagtggattgaaggctcttgaaggccaaaataagaacaaggagagtaggccgagactaatggatactgaagaatccacagctccaattgttagcgtggacaaagattcgtttgcattagttgatgatgtgttattactcttagagaaggctgctctggagccattgcctaaaaaagaggaaaagagttctcaaaaccgtacgaaggatgggaatgctggagaggaattcagtagagaagccgttgagcgtgatgataggcgtttaactgaattgggtagacggactgtggagatatttgttcttgcacatatctgcagcaacaaaattgaagttgcattccaagaagctattgcatggaaaaggcaagaagaacttattcgtgaaaaagaggaagcgtggctggcagaaagcgaacagaagggcaaaagaggagcatctgaaaaagagaagaaatctaagaag

SEQ ID NO: 92680 - DNA, 448 bp, Arabidopsis thaliana columbia
gatccgggcaccacgcgtccgggacgcggggcggttgatcgtttttgtgtgttgaaaatcaaaatggcgtcgagcgatgagcgtccaggagcgtatccggcacgtgacggatcagagaacttacctccgggagatccaaagacgatgaagacggtggtgatggataaaggagcggcgatgatgcaatcgttgaaaccgatcaaacagatgagtctccatttgtgttctttcgcttgttatggtcacgatcctagccgtcagattgaagtcaacttctatgttcatcgactcaaccaagactttcttcaatgtgctgtttacgattgcgactcctctaaaccccatctcatcgggatcgagtatattgtgtcggagaggttatttgagagtcttgatccggaggagcaaaagctttggcactctcatgactatgagatccaaacaggcc

SEQ ID NO: 92681 - DNA, 361 bp, Arabidopsis thaliana columbia
acccacgcgtccgctttctcaatcccacatagagagaaagagagagagagagatgagtcggaggaacaagaacggccctaagctcgagctgaggctgaatctttcgccgcctccttctcaagccagccagatgagtcttgttcgatcaccaaaccgatccaacacgacttcaccaagctcatgcgtttcatctgaaactaaccaggaggagaacgagacaataacctcaatggttcttgtgggttgccctcgttgccttatgtacgttatgctttctgatgatgaccctaaatgtcctaaatgcaaaagcaccgttcttcttgatttcctccaagaaaacgcttttgccgctacaaccgct

SEQ ID NO: 92682 - DNA, 1027 bp, Arabidopsis thaliana columbia
cccacgcgtccgccagactttctcgagggttattgagaacgctaatgtcatcatggctacatacgaggatcctctccttggtgatgttcaggtttacccagagaagggaactgtggcgttttctgctggtctccatggatgggcgtttacactgaccaacttcgccaagatgtatgcttccaagttcggtgttgttgaatctaagatgatggagaggctctggggtgagaatttctttgaccctgccaccaggaagtggagtggcaaaaacactggttccccgacctgcaagcgtgggtttgttcagttctgctatgaacccatcaagcaaattattgctacttgcatgaatgaccagaaggataagttgtggcctatgttggcgaagcttggtgtctcaatgaagaatgatgagaaggagcttatgggtaaacctctaatgaagcgtgttatgcagacttggctccctgcaagtactgcactacttgagatgatgatctttcatttgccatctccccacactggcccagaggtaccgtgttgagaatctgtatgaaaggtcctccttgatgatcagtatgcaaatgccatcaggaactgtgaccccaatggacctctcatgctctacgtatccaagatgattccagcctctgacaagggtagattctttgccttcggtcgtgtctttgctggtaaggtttctactggtatgaaggtcagaatcatgggtcccaactatatccctggtgagaagaaggatctgtacactaagagtgttcagaggactgtcatttggatgggtaagaggcaagagacagtggaggatgtcccttgtggtaacactgttgctatggttgggctggatcaggtcatcaccaagaatgctacattgactaatgagaaggaagttgatgctcaccccattcgtgctatgaagttttatgtgacatctgttgtttgtttttaattatttttatgtttacattattttttacaattttttttttatttataattttattttatt

SEQ ID NO: 92683 - DNA, 777 bp, Arabidopsis thaliana columbia
  unsure (1)..(777): unsure at all n locations
gngnattantgggcccccntncnccccnaggnggggcagttccccccccangggtaaatccgcncnaaccccagnaaacccnagctttnggcccggttnccatgnttnaancaggcnccaggggngcccttggggggatctccagtgtctaaaccaganccnggccccgttttcgaggagatccaaggccaggaacccccttgtacaacattcaaggcatacctgccctgtttgtggagtcttncggattctcaagtcagcttagggcagcaacctcaggacaggcattcccacagtgtgtgtttgatcattgggaaatgatgtcttctgaccctcttgagccaggtactcaggcttcagttttggtggctgatatcaggaagaggaagggattgaaggaagcgatgactcccctatctgagttcgaagacaagctttaagcttcaccaagactcgtactagcctttttcccaatggttgctactctctctatcttaattttgtcttgttttattaatactcttatggtatgacggattgtgaagacttttctctcgccatcccctgaatgttttttacttttttcctagttgagaactttgttattgtgttcgcaaatatcttggttttgattctgtcttgctctttttttttttttnnnnnnnnnnnnnnnnnnnnnnnnnnnnnnnnnnnnnnnnnnnnnnnnnnnnnnnnnnnnnnnnnnnnnnnnnnnnnnnnnnnnnnnnnnnnnnnnnnnnnnnnnnnnnnnnnnnnnnn

SEQ ID NO: 92684 - DNA, 1005 bp, Arabidopsis thaliana columbia
  unsure (1)..(1005): unsure at all n locations
agctagacgcctgcctccttgcacctcttttctttctctcgttctcatctttctctctaagagattttgtaggtgacaatcaaaagtttgacaaaatggtgaagtttacagctgatgagcttcgaaggattatggactacaaacacaacatccgtaatatgtctgttattgctcatgtcgaccacgggaaatccactcttactgattctttggttgctgctgctggtatcattgcccaagaggttgctggtgatgttcgtatgactgataccagagctgatgaggctgaacgtggtatcactatcaagtccactggtatttctctctactacgagatgactgatgaatccttgaagagtttcactggagccagagacggaaacgagtacctcatcaatcttattgattcacctgggcacgttgacttttcttctgaggttactgctgctctccgtattactgatggtgctcttgtggtggtcgactgcattgagggtgtgtgtgttcagactgagactgttctacgtcaggctcttggtgagaggattcgacctgtcttgactgtcaacaagatggacaggtgtttccttgagcttcaggttgatggtgaggaggcttaccagactttctcgagggttattgagaacgctaatgtcatcatggctacatacgaggatcctctccttggtgatgttcaggtttacccagagaagggaactgtggcgttttctgctggtctccatggatgggcgtttacactgaccaacttcgccaagatgtatgcttccaagttcggtgttgttgaatctaagatgatggagaggctctggggtgagaatttctttgaccctgccaccaggaagtggagtggcaaaaacactggttccccgacctgcaagcgtgggtttgttcagttctgctatgaacccatcaagcaaattattgcatgtatcccgaaggacaagtttgncnattttggnagttggngtnaataaaattttaaag

SEQ ID NO: 92685 - DNA, 1967 bp, Arabidopsis thaliana columbia
atgatactccagctctctacgactcactattgggaaagctggcacgcctgcaggtaccggtccggaattcccgggtcgacccacgcgtccggaatgatgagaaggagcttatgggtaaacctctaatgaagcgtgttatgcagacttggctccctgcaagtactgcactacttgagatgatgatctttcatttgccatctccccacactgcccagaggtaccgtgttgagaatctgtatgaaggtcctcttgatgatcagtatgcaaatgccatcaggaactgtgaccccaatggacctctcatgctctacgtatccaagatgattccagcctctgacaagggtagattctttgccttcggtcgtgtctttgctggtaaggtttctactggtatgaaggtcagaatcatgggtcccaactatatccctggtgagaagaaggatctgtacactaagagtgttcagaggactgtcatttggatgggtaagaggcaagagacagtggaggatgtcccttgtggtaacactgttgctatggttgggctggatcagttcatcaccaagaatgctacattgactaatgagaaggaagttgatgctcaccccattcgtgctatgaagttttctgtgtctcctgttgttcgtgttgctgttcagtgtaaggttgcgtctgaccttcccaagttggttgagggtctcaagaggttggccaagtctgatcctatggttgtgtgtacaatggaggaatcaggtgagcacattgttgctggtgcaggagaactccatcttgagatttgtcttaaggatcttcaggatgatttcatgggtggtgctgaaattatcaagtcagaccctgtggtctccttccgtgagacagtttgtgatagatctactcgcacagttatgagtaagtctcctaacaagcataaccgtctgtacatggaagcaagacccatggaggaaggtctagctgaggctattgatgatggacgtattggcccaagggatgaccctaagatcagatccaagatcttggctgaggagtttggatgggacaaggatcttgcaaagaagatctgggcttttggacctgaaaccacagggcctaacatggttgtcgatatgtgtaagggagttcagtaccttaacgaaatcaaggattcagttgttgctggtttccagtgggcgtccaaggaaggtcctcttgctgaagagaacatgagaggtatctgttttgaggtatgtgatgtggtgcttcactctgatgccatccacagaggaggtggtcaggttatccccacagccagaagggtcatatacgcttcccagatcacagctaagcccagacttttggagccggtttacatggttgagatccaggcaccagagggagctcttggaggaatctacagtgtgctgaatcagaagcgtggacacgtgttcgaggagatgcagaggccaggaactcccttgtacaacatcaaggcatacctgcctgttgtggagtctttcggattctcaagtcagcttagggcagcaacctcaggacaggcattcccacagtgtgtgtttgatcattgggaaatgatgtcttctgaccctcttgagccaggtactcaggcttcagttttggtggctgatatcaggaagaggaagggattgaaggaagcgatgactccactatctgagttcgaagacaagctttaagcttcaccaagactcgtactagcctttttcccaatggttgctactctctctatcttaattttgtcttgttttattaatactcttatggtatgacggattgtgaagacttttctctcgccatcccctgaatgttttttacttttttcctagttgagaactttgttattgtgttcgcaaatatcttggttttgattcaaaaaaaaaaaaaaagggcggccgctctagaggatccaagcgtacgtacgcgtgcaaacgaagtca

SEQ ID NO: 92686 - DNA, 470 bp, Arabidopsis thaliana columbia
  unsure (1)..(470): unsure at all n locations
cagtccagcagtaccggcgagaacttttagtttttcttccggatccacatctcctaaatctcgattgataattaccccacaaagttattgggaggatcaatggagagttctacacaaagccgccgaggaagagaaaaagagtccttctccaatacagaagaaaaagccttggttcagggtgaaaagacttttcagagcagagtctgagccaactcatagcgccaagtcaccaaatgggaaaagtgaagtcaagatatcatcagttgcgcgaaacttgcttgaagattttaatcggcagcttgtttctgaacctgtggaagctaatccaatagatgttgtgaacaatgaagatagctcaattcgagaaaccgaggatataaacacggattttaaaactcctgctgaagagagtatagtaatggnggagaattctcctnacctttnctnagatccaaacagtcctctcagag

SEQ ID NO: 92687 - DNA, 908 bp, Arabidopsis thaliana columbia
tagggaaacctggtacgcctgcaggtaccggtccggaatttccgggtcgacccacgcctccggatgcggataacaatacaaaccagagctacaagatctttgattctcctcggggagctctaatctcgggaatggcagtttcgatgatattatgtttaagatcatcattgcttgctactgaaaacgcattttcttgtctggggagactattgaatttcccagagaagattgatgggaggaagatattagagaaagctaagcccttacaaactttgggctgtggatgatgattgacgatcctcacctctatcgataaatggtgggttttgatcagaacatcaccccagcgagtccggaaaaactaacatttttcttccggacccacactcctaatctccatgggtatcccccccacaaagttttgggagggacaatggaaggttctccccaagcccccggggaagaaaaaaaacttcttctccaaaaaaaaaaaaacccctggttcgggggaaaaaacttttcaagagaaggctggccctcttttgccccaatccccaagggggaaggggggccatatttttcgggcggcgaacttgcttaaaaatttaacgggcggtttgtttttgaccgggagaattcacccataggtggtggacaatagaaattcccttttctaaaacgggggtataaacccgcttcttaaacgggggttgaaaaaattatcaattgggggaaattcttttttttttttaaacacagggtctttaaaactaaaccatttaaaagtccgttggctccgggctttttttccggaaacaaaaaaaaaaaacgcgctattctcctttcctttttacagggggttttttccttctaaaaacaaaatggttctctttcttttttacggagag

SEQ ID NO: 92688 - DNA, 736 bp, Arabidopsis thaliana columbia
  unsure (1)..(736): unsure at all n locations
cnnnnnnnnnnnnnnnnnnnnnnnnnnnnnnnnnnnnnnnnnnnnnnnnnnnnnnnnnnnnnnnnnnnnnnnnnnnnnncccacgcgtccgctctgcaattgtcttcttctcttcaactccatcatctccaccaccggcattctcgccggaatccaatggagcttaccagcttccatcgctcttctctcttattcctcatctcactaacattgatcattctcccgacgacaacaacttcaatcggagtaaactacggtcaaatcggagacaacctcccctccccaaccgacgtaatcccactaataaaatcaatcggagcaacaaaagtaaaactctacgacgcaaatccacaaatcctcaaagctttctccaacaccggaatcgaattcatcatcggactcggcaacgaatacctctccaaaatgaaagatccttcaaaagccttaacatggatcaaacaaaacgttactccatttttacctgcgactaacatcacatgcctaactatcggtaaccgaatcctcgctcttaacgactcttcactcactaccaatctcctcccaaggatgcaaggaggtcactctgttttatcaccgccggtctttccgatcaatttccggaaccacgcgcatctctttggaccctaaaaccccattcccaccttccgccgggaagttaacccggactacccgattcgctaccccgatcttaaaattccccgaaaactgattttcg

SEQ ID NO: 92689 - DNA, 945 bp, Arabidopsis thaliana columbia
  unsure (1)..(945): unsure at all n locations
nnnnnnnnnnnnnnnnnatgatctatactcataagtgataagttccacagataaagtttatacatcataaacacaccaaaataccacgcgtccgcaaatgttgataagcaggaagaaaaccccttgaatcagaacttaaaagttccaacaaaaattcaactttatatatgtgtatatagatatggtattcaagaaatagagtgtctccgatcttttggtggtttggttctgcctctaccgttgtatggtgtgatgctaaaagggtttagcttaccgagtttcttggaaacagagtttatgaatgactttcttggcaatggaggcttacccgtggaagcagttgagattggtgaacttggattcgtgctgatggttgatgatgatgttttcttctcactctctttctcaaactcttttagcttcattttcattttgagaagttcgagcttcaagtcctgattttcgcgtttaagcttggagagttcgtcggtgtaggagctaagtttgggaggaagaacagctgctggttgtggtggtggtggggctggagaatctgaatcgttagtgacttctcctcgtagacgttgttgctcgtagtaaaggacttgaacaatggtctgaacaggaagacgatcattctgagctgcatgagcgcaggcttctcgtgatagtttttggcagtccattaagctgcacactttcttcctctctacatcactcatattgggatgcgcctgcaagaaaaaaccatagttgttcactagagctctcttaaagtttttcaaaatctctaagataatgggaacttgatcatctccttaaccacaagatgtcaaatatttaccnnnnnnnnnnnnnnnnnnnnnnnnnnnnnnnnnnnnnnnnnnnnnnnnnnnnnnnnnnnnnnnnnnnnnnnnnnnnnnnnnnnnnnnnnnnnnnnnnnnn

SEQ ID NO: 92690 - DNA, 545 bp, Arabidopsis thaliana columbia
  unsure (1)..(545): unsure at all n locations
aattatcctgagactctccaccaaatgtttattatcaatgcagggcctggatttaggctactctggaacactgtcaagagctttcttgaccctaagacatctgctaaaattcatgtactcggatacaagtatctaagcaaattgcttgaagtcattgatgtcaacgagttgcctgagttcttgggaggtgcatgtacttgcgcagatcaaggcggttgcatgctttctgacaagggaccttggaaaaacccggaaattgtgaagatggtgcttcatggaggagcacatcgagcgaggcaggtggtgaaagttttgaacagcgaagggaaagtcattgcttatgcaaaaccttcatatacatgggtaaagggaagtgacacatccactgcagagtcaggatctnacgctgaagatatcggttctncgnagctataaagagtttctctcatcttccgttgacaacctgttcgttagggagggcnaaagttagcttggtggaancaaggtttggcttggtaggttttcccgggntttnccgggttttt

SEQ ID NO: 92691 - DNA, 754 bp, Arabidopsis thaliana columbia
tgacgagtatgtacctatggtggacaaagccgttgacgccacctggaaggtgaaacccgccatccagagagttgcctcaagaggagctttaatgtctcccaccgttccaaaagatcatgaaggcatcaaggctcgagtcctagtaatgttcatggcattcttgatggcggttttcacattcttccgcactgtaacaaagaaacttccagcgactactacttcttccccagcagaaacccaaggaaacgcaatagaacttggttctaacggtgaaggagttaaagaggagtgtcgtcctccttctcctgtaccagacctcacggaaactgatctactaaactgtgtgacgaagaaactgacagagctggaaggtaaaatcggaacgctccaatcaaagccaaatgagatgccatacgagaaagaagaactgttaaacgcagccgtctgcagagtaggcggcacttgtaggcagagctcatagcttacttaaaaggccctttacgaagctttgatgagacaggaagagttacttgcttacattgatcgtcaagaagaagctcagttccagaagatgaagaagaagaagaagaaacatctcttttgcttctgaagcaaagccaagaaaaaccagcaccaggcatcaaaatctccctctttcgtaattcgctgttcttaagtataaacaacaaaacaaaacaaaaactcttatatctgatttgatgttaaagctaatacagagagctctgtttccttc

SEQ ID NO: 92692 - DNA, 831 bp, Arabidopsis thaliana columbia
  unsure (1)..(831): unsure at all n locations
cccccgactcactatggggacagctggtacgcctgcaggtaccggtccggatttcccgggtcgacccacgcgtccgcataaacatagataaagggaagtgacacatccactgcagagtcaggatctgacgctgaagatatcggttctccgaaggctataaagagtttctctcatctccgcttgacacctgttcgtgaggttgcaaagataggtggtgaaacaagcttggctggtagttttccgggttatgacgagtatgtacctatgggtggacaaagcccggtgaccccccctggaaggtgaacccccgcctccagagagttgcctacagagggagcttaattgtctcccacccgctcaaaagatcatgaagggcttcaaggctcgagccctaaaaatggtcatggcattcttgaggggggttttcacattcttccgcctggaacaaaaaaacttccaggactactatttttccccacgaaaacccaaggaacccataaaacttggtttatacgggaaggggttaaagagggagggngttcttcttttcctgtaccaaccccanggaacggatttctataggggngacaanaaacagccaaagtggagggaaaatcgaaccctacaaaaacccaggagtgccctcaagaaaaaaaactgtaacccccccttgcaagtaacccccttgaagaactctatctcataaaggcctttcgaatttgagaaaagaaagttctttctctcttcccaaaaaaccccccccaaaaaaaaaaaaaaagactttttttctttggcacccaaaaccccccgccaaacccctttaaagcggtt

SEQ ID NO: 92693 - DNA, 414 bp, Arabidopsis thaliana columbia
atggggaaaggagatgggtgtgaaatatggttgcccggtaaaggatgtaataactggtttgacgattcagtgtcgcggatggaaatcagcctacctgaacccggaaaagcaagcatttctcggggtagcgccgaccaatttgcatcaaatgctagtgcagcagaggagatggtcagagggagactttcagattatgctttcgaagtatagtccggtttggtatggaaaaggaaagatcagtttaggactgatacttggttactgttgctattgtctttgggctccatcttcactacctgtgctcatttactctgttttgacttctctctgtctcttcaaaggcattcctctgtttccaaaggtctcgagctcgtggtttattccgtttggatacgtcactgttgcagctaccgc

SEQ ID NO: 92694 - DNA, 468 bp, Arabidopsis thaliana columbia
atcaacccacgcgtccgcggacgcgtggggtcgcgaagcagtctccgtcgccgatcgcatgacggagaagatgattcagtgggagacgatcttcgacaccggctggcggaaaccgaagcccggctgagaagagcaatggcgatagaaactgatctaaccccgggggcggggcatatgaggagattcgtttcggtgatggagatcattgagactttcgtggcaagaccattccaagagcagaaagatcgaattgctcgccttttctctcctgtatccacgaaataaaaaaggcttcttcttccttttgtttgtttcttctttttgttgtgggatctctttagttttggttgtcccttgtcgtttgtgtttgatagtagctaatttcgaagaaccatagattttgttttgttgaagcttaaggtaaaatgaaaagctatgtgctttatgtccaaaaaaaaaaaaaaaaaa

SEQ ID NO: 92695 - DNA, 595 bp, Arabidopsis thaliana columbia
cccgactttattagggaacgctggtacgcctgcaggtaccggtccggaattcccgggtcgacccacgcgtccgcggacgcgtgggatttgcgccttgtcaggaggtgtagactctactgttgccgcaactcttgttcacaaggcaattggagataggcttcattgcatctttgttgataacgggctattaaggtataagtgagcaagaacgtgtgatggatacctttgagagagacttgcatctacctggtacttgtgttgatgcatccgagccggttttgagtgaacttaaaggcgttgtggatcccgagacaaagagaaagataatcggggagggagttcatcaacttttttgatcaatttgcccaagagttagagaaaaagcatgggaaagaaacccgcttttcttagttcaagggacttctgtcccctgatggtgattgagtcgcgcccttcccccgggtactgataggactcattctcacacctttaaaagtcaccatagtggtggagggaccccctaaagacatgaaattgaagctcatcgaacccctcaagcttctttttaaaaatgagggtccggaggcccggaaaa

SEQ ID NO: 92696 - DNA, 408 bp, Arabidopsis thaliana columbia
aacacaattctgagaggttccttcatctgcaaatgctactactgattcggtgatggaatcgatcggcgacgacgatgagctccgaagcaaaacagtttctcttccgagaagaatctcgtttacgattcttcttcttcttctgttaatctccttgagtacaagggtctctggttcgttagacaaatctggaagaagagtgattgaagcgagaactgggcaagacttgatttgggttgttcagctatccgatctccatttcagtgtccatcatcctgaaagagccattgatttcaaaaacattgtgggtcctgctctggctcttatcaacccttctctcgtcttaatcaccggtgatctcacagatgggaaaagcaaagacatgttaacaatgaagttaaatgaagatga

SEQ ID NO: 92697 - DNA, 869 bp, Arabidopsis thaliana columbia
  unsure (1)..(869): unsure at all n locations
ttaggtgccactatagaagagtctatgacgtcgcatgcacgcgtacgtaagctcggaattcggctcgaggattaagtatggcagaagagtacaagaacaccgttccagagcaggagacccctaaggttgcaacagaggaatcatcggcgccagagattaaggagcggggaatgttcgatttcttgaagaaaaaggaggaagttaaacctcaagaaacgacgactctcgcgtctgagtttgagcacaagactcagatctctgaaccagagtcgtttgtggccaagcacgaagaagaggaacataagcctactcttctcgagcagcttcaccagaagcacgaggaggaagaagaaaacaagccaagtctcctcgacaaactccaccgatccaacagctcttcttcctcttcgagtgatgaagaaggtgaagacggtgagaagaagaagaaggagaaaaagaagaagattgttgaaggagatcatgtgaaaacagtggaagaagagaatcaaggagtaatggacaggattaaggagaagtttccactcggagagaaaccagggggtgatgatgtaccantcgtcaccaccatgccagcaccacattcggtagaggatcacaaaccagaggaagaagagaagaaagggtttatggataagatcaaggagaagcttccaggccacagcaagaaaccagaggattcacaagtcgtcaacaccacaccgctggttgaaacagcaacaccgattnctgacatnccggaggagaaggaaggggttttnttgncaagatcaaagnngaagnttttcccggtttttacggccaggcccccttttnggggntggggangaaggnaaaantttntttttttt

SEQ ID NO: 92698 - DNA, 1168 bp, Arabidopsis thaliana columbia
  unsure (1)..(1168): unsure at all n locations
ccctcgcgtccgcccacgcgtccgaccatcttaaagcaactcaaagctcaaatcgaaatttctagtttctctttatcattcacgctaagtgttcaatcgaatcaagattaagtatggcagaagagtacaagaacaccgttccagagcaggagacccctaaggttgcaacagaggaatcatcggcgccagagattaaggagcggggaatgttcgatttcttgaagaaaaaggaggaagttaaacctcaagaaacgacgactctcgcgtctgagtttgagcacaagactcagatctctgaaccagagtcgtttgtggccaagcacgaagaagaggaacataagcctactcttctcgagcagcttcaccagaagcacgaggaggaagaagaaaacaagccaagtctcctcgacaaactccaccgatccaacagctcttcttcctcttcgagtgatgaagaaggtgaagacggtgagaagaagaagaaggagaaaaagaagaagattgttgaaggagatcatgtgaaaacagtggaagaagagaatcaaggagtaatggacaggattaaggagaagtttccactcggagagaaaccagggggtgatgatgtaccagtcgtcaccaccatgccagcaccacattcggtagaggatcacaaaccagaggaagaagagaagaaagggtttatggataagatcaaggagaagcttccaggccacagcaagaaaccagaggattcacaagtcgtcaacaccacaccgctggttgaaacagcaacaccgattgctgacatcccggaggagaagaagggatttatggacaagatcaaagagaagcttccaggttatcacgccaagaccactggagaggaagagaagaaagaaaaagtgtctgattaagagaaaaatatgataagagtgaataataatgatgtgggagtgggacttatgttgttttttgttttttgttgatcattgtctcttttattttgtctttctagctgttctccaagtttgtgtttagagttagatcatttgtgtctaaaatctataaaattattttatctatggggaaacacttgtttactcaatggagcttcaatggatccgttctcatgnnnnnnnnnnnnnnnnnnnnnnnnnnnnnnnnnnnnnnnnnnnnnnnnnnnnnn

SEQ ID NO: 92699 - DNA, 1064 bp, Arabidopsis thaliana columbia
  unsure (1)..(1064): unsure at all n locations
tttattacaactcactattgggaaagctggcacgcctgcaggtaccggtccggaattcccgggtcgacccacgcgtccggctccttcaaagagaaatggtgtagttaaagtgactaaagttgatggaaagaaggaaatggtgacccctgtgattagagcaagcttaacgaagcagggctataaaattatcgggtcgcatagtggggttaagatatgtagatggacaaagtcacaacttagaggcaggggaggttgctacaagcactccttttatggcattgagagtcacaggtgcatggagacaacacctagtttggcttgtgcaaacaaatgtgtgttctgttggaggcatcacacaaatcctgtgggaaagagctggcagtggaagatggatgagccttcagtgattgtgaaaggcgctcttgatcttcataaaaatatgattaagcaaatgaaaggagttccaggtggtaactccagagaaattacaagaaggtcttaacccaagacattgtgcgttatcacttgttggtgagccgattatgtatccggagatcaatgcccttgtagatgagctacatggaaggcgtatttctacgtttttggttacaaatgcacaattccccgaaaagattttgatgatgaagcctatcacccagttgtacgtaagtntagatgctgccaccaaagagagcttgaaggccattgatagncctctctttgctgacttttggggacggttcattgactccttgaaagctctncaagnggaagcagcagcgaacccgtttaccgttttaacacttgtcaaagggattggacacagaggngcttgnttncttattttcaacccttttaagcatttggggaaaccctgnttttttcggggtccaaaggggncanatnctttggggtcctttgaacggnaaaaggtntcaattggggatttccctgggacaaaggttttaagngntnttagnaggcttttnttttagggaattggggacggggtttttggaccccnctttttngtntttgggncggaatnaagggtgaanggttta

SEQ ID NO: 92700 - DNA, 428 bp, Arabidopsis thaliana columbia
atcaggaaccatataaatcatctcccatggcggaaatcgaagtcttttactttagatgaagaagaagacaaagctttgggatttatagaatggcgtgtgtatcgacatgcttgattctctcccctaggttaactcaagtgggtttatcatcaaagaagccttttttgattcggctcagatctcctgttgatcgctactcttttcccagaatgttaacggagaggtgtttgagcactcgtcggaaggttaatcgccatggaatcgctggggtgaaggctgccagtttagataaggttagcggcgcaatcaaaccaggtggattggtggagagtgacaagttgcccgctggatgtacggaaacgagccgatggatgcggtagatgagtgtggcccgaagagtaactgttggggatgttgctagtagaggt

SEQ ID NO: 92701 - DNA, 503 bp, Arabidopsis thaliana columbia
ctaatacgactcactatatggaaagcgggacgcctgcaggtacccgtcccgaatttccggggtcgaccacgcgttccggtggtccttttacttacttttgggaattaggggttatgatttctgggttttagattagataaattggtttccttttttggttaatcaatttaaaaatctcttatttctgttaaagactggtaattttggagtttttaatgcatggacggaagagaagcaatggcttttccaggctcgcattctcagtactatcttcaaagaggagcctttactaatctcgcaccttcccaagtcgcgagtgggcttcacgcgccgccgcccatacgggattgaggccaatgtctaaccttaacattcatcaccctcaggctaacaatccaggacctcctttctcggattttggacacaccattcacatgggagtggtctcctctgcttctgatgctgatgtgcaaccggcacctgcaccggcaccacccagagga

SEQ ID NO: 92702 - DNA, 492 bp, Arabidopsis thaliana columbia
gaaggcgggcccccctgcaggacccggcccggaattcccgggtcgacccacgcgtccggaagttttaaggattaggaggattataaggatgaagaagatggcgacccacatggatttaactgagataggggatttagaatacgtgcctcgggttgataggaagagggatcgtggtaagttaagccaagaaatgtatatggaagacgaggattttgaactgtatgattttgataaggaccggatgccgaggagcttcaagaaagggcagatttgggcgatatatgatggtggtgatgacaaaatgcctcggagttactgtttagttagtgaagtagtctctttgaatccttttaaggtatggatcagctggttggattttgagagcgagaaactaatctctcggatgaagattaattcttctcatatgccttggggtaggttccgggtttcagagatagctttgatagaacaagtgaaaccattctctcacct

SEQ ID NO: 92703 - DNA, 586 bp, Arabidopsis thaliana columbia
cgggtggaccacgcgtccgttcacttataaaaattcaataattgaacctcctctctctctctctcttctctcccttcttcttctccgatttcgactttgaatcatttcttcgagagaggtagcgagaaagggatcgccttttctcactctctgcggattctcaattttgggcaagaaggcaagaacagtttttatcgcaattgagtcttgaagaccacaaggatttgatcacattggtgcttctgcctgtttatctgagtttgaggacaagaacttctggggcgtttataatttgccatggctagtaatgagaatctaccacccaatgttatcaagcagcttgccaaggagctgaagagtcttgacgaatcccctccagatggcatcaaggttgtggtaaatgacgaggatttctcacaaatatgtgctgatattgaaggaccagttggtactccttatgagaacggacttttccgtatgaagttggccttgtcacatgattttccacattcgcctcccaaaggctacttcatgacaaagatttttcatcctaatgttgcttctaatggagagatatgtgttacac

SEQ ID NO: 92704 - DNA, 747 bp, Arabidopsis thaliana columbia
ccccccgactcactatggggaacgctggtacgcctgcaggtaccggtccggaattcccgggtcgacccacgcgtccgagaaaaacataaggctttgttctctgcgtttctagagtactatcaggcatggcttgagatgacaatccaagtgagggaggagatggaaccatctcatgtgagagccaattgtgaagcacaacacaagtacctgacatggcgagcacaaaaggatcctggacatggtcttcttaaaagattagtaggtgaagcaaaggcaaaggagctgctaagggatttcctgttcaatggggtgggatgagttaggcacaaaaacattcattgattactttccagagtaccaaacagaagatggaactgtaagcgataaacgaagtatcattgggaagtcatatgaaactcgtccatgggatttaacaggacaatttatcggctaacaatgatatatgtgaacaagtcagatttcagagtcatcaacacaagaggacgtgaacttagggaagtaggaataagaaagagcagcatgaggagtctctcaggtctatctgcatttcaagatgattgtttgagttaccatgcattgtagttttacaagtgtagctctcagcccttcatcaaaatgagaatcctcgagtatgatatggttttatggaaaaaaaaaaaaaaaaaaaaccaagcgcggccgctatagaggatccaagcttacgtacgcgtgcatggtacgtcatag

SEQ ID NO: 92705 - DNA, 567 bp, Arabidopsis thaliana columbia
gaagcaaaataagagggaatattaagatgacatctactatggttctattcctccttcttcttcttgtgtttccgcatatggataaagccctaggcgcacacgaggaatcccagaaacaaggtgcagaaaagacttaccatgatgcacgctttactattcctattaagccaaaatatattcctaaggttatacgccctacgccaaaagatccgcctattccggaatgtcttcgaaaaggcacatgtagtcgtcttcatttatctcctcctccgccccagaggtctttcaaaggcacaaacgaacctggtcattgacctcaatctagcttcgaatgcgtgtgtgtgtgcatgtttcttacattgtggtttggtttgtggcttctgtctttgtttacctatgcatgtgtttgtcatattttatagtttgtcgaacggccgctataataaataaaacttgtatttccttttgtgttataaaaaaaaaaaaaaaaaaaaaaaaacaaagcggccgctctagaggatccaagcttacgtacgcgtgcatgggacgtcaagtaattctatagtg

SEQ ID NO: 92706 - DNA, 960 bp, Arabidopsis thaliana columbia
  unsure (1)..(960): unsure at all n locations
cgccnnnnnnctatacgacttctatagggaacgctggtacgcctgcaggtaccggtccggaattcccgggtcgacccacgcgtccgcggacgcgtgggcggacgcgtgggtggtggttcaagttcagacatggacattgcttctgattcagatgaagagatattcgagaggcaacactctcctcaagattatagaattcatcttggtttgcctcacgtcgcagctcaaaatggacttggacgtaatggtgctaaggtctttggtgctgctgatgatttatctgactcagctactagcactgaagtttcatatgaagcagaagcttgtggtgtgcggaacaatatatcttcacataatgaatttgaaagacgaaatgttgaggctggaacttcaggaaggactctgaacgggacaagcacttcaacaagttcattgcctcgtttccccacctttcatgcgagtgagcagggcccatggcctgcgatgattgcctatgaagcctgtgaacggttatggcttcattcatgggcaacgggataggggcagcgaggcttcttacttcctcaacaatgaatgcaccattatgcggaatggcattagcttggcagaggcttttctttcattctgaacaagagttactgggcaacggcacctcttggggtgggttctcaaaccgctcgcccacaatccgcaaaagcacatcggagaaagaaactccgcaggtcgcagacctaaaggcgatcagcgcaccccctggggttagcatgcgaccttggggcccccaaggacacctccaccgtgccgccccaactcgcggagctcantcagctgtgcgctgcgaccgaggacggggcgaggcgttgaactggcagcgggccgaaaggcgaacccgcgcgcgggcgccccgaggcgcgactcgccccacccaaccgcccgcgacgcacgaacacgccgtgcgcc

SEQ ID NO: 92707 - DNA, 399 bp, Arabidopsis thaliana columbia
aggcctcaaccaaccaacatgatggttcctacctcagggcaacagtcttatccttggtcaagagcttcttttattgccagccctcgttggcaagatccgtctagctacgcttccttaatcatgcctcaaggagttgtcccggttcaaggatggaacccttacagtggtcagctcggctcagtttctccttcaggtaccggaaatgatcaaaactacagaaatttacagcagaacgagacaatagagtcaggctctcagtctcaaggatcattctcgggttacaatccgggatcctctgttccgctaggagggtattatgcattgccgagggaaaatgtgttcccggagagaccaggacaacccgaatgccaattctacatgaagacaggtgactgcaaa

SEQ ID NO: 92708 - DNA, 850 bp, Arabidopsis thaliana columbia
  unsure (1)..(850): unsure at all n locations
cggtggttcaaatccgctgccagagccgtaactggagtcgtcgcaaatccggctttaagcgggcaacttccatttgctaaacccaacggcgcaaaccttcctgtaagcaacggagttccgtctaacaacaaccacaatgggattgtcaacaacaacaatgtccctttcctcgttggactcggcggaaccacagctaacattctccagaacaacaataacggaaacaacattttaaatggtttccctgttgctagtggcggtcagctcccgagcggttctgctcttcagatgctaatgttcgggacaatgacagtaatcgatgatgaactaactgaaggccatgagctcggatctggcttactcgggaaagcgcagggatattatgtggcgagtgcaattgacggaactagccagacaatggctttcaccgcgatgtttgaaagcggcggttatgaagatagtataagcttctttggggttctcagaacagcggtatcagaatcgcatataggagtaatgggaggtaccggaaagtatgtgaatgcgaggggattcgcgattctgaagacgtttacaggatctagcgggacgcagcagaatcagccgcatcagttcactgatgggcttgagactgttgttgagtgtaccgtttatctttcttactagttttatttttcttcttttgttggggtttgggaatgtttggtgtgtatgttatgtgtgtcatttgtaatctaaatatgaaatttgtgtaaaaaaaaaaaaaaagctnnnnnnnnnnnnnnnnnnnnnnnnnnnnnnnnnnnnnnnnnnnnnnnnnnnnnnnnnnnnnnnncgtctcaatcagccg

SEQ ID NO: 92709 - DNA, 1093 bp, Arabidopsis thaliana columbia
gggaaggcgggaccccctgcaggacccggcccggatttcccgggtcgacccacccgtccgttaaccctcgtattaaaaggagaaaaacacaggcggagcattttacgccttttccttccaccatcgttttttcaggtttatcatggtttatcgcatctttctggaggatctagccgctgctatcatgaagttcttggagtacactaacctagacagatggaatgtttttctgggtcatcttaatctcggggaaaggactatcaaaggttgcttggaagcttattcttgcaaacatgcaggaagtgataaaagattgtctcttagtttggagaatgagatgcttgattatcttgggaaatcttctgacaccgactcttcttcacccgttgatctcttgttaagcagatcaagtcgaaaggctttgatctacttggttcttacgctctatcaaatgtatccggactacgatttcagcgctggcaaagcacatcagtttttctcggaggaaagctgggacacctttaagcagatttttaacaactatatgtttgaagcttctaaggaatggactgagaggaatgaggatggttcccttcttgaggtgatctacaaggctcttgatgaggtcgtaaaagtagctgaatgtgagatatatgtttacaatccaaatcctaatgctgatcctttcctcgaggaaggagcaatatggtctttctgtttcttattctacaaccgaaaactgaagcgcgttgcgggttttcgtttctcctgcacgagtaacctggcaaatgatgcatttctcactgacagtcctccatatgaagaggatgaagagatctttgccgacatggatatgtgatctctgtatcgttatgctgagtcacatattctgtagaaacctgtatctatgtgactatgtgtgatctctagtctctaggcttgtatgagtcagtcgaagtccaaggttaagctcttcgctttcctttatctgtgtagttgacgtgactactaataatactctgcactatgtcatgtgcaaatacttatcaaaaaatgtcgtgaaaaaaaaaaaaaaaaaaaaaaaagggcggcc

SEQ ID NO: 92710 - DNA, 898 bp, Arabidopsis thaliana columbia
tctgcagtaccggtccggaattcccgggtcgacccacgcgtccggaagaaaaggacgagtagattgatttcttagacgacggagaaatgcgagtgatgagatcattgcgcggtaattccggtgctggattggttttccggccggcgaggttaaattctcttcggagcgtctttaccggttgccgtgctgtgattttgccccgctttggtggtccggaggtttttgagctccgggagaatgttccggtgccgaatctgaatccaaatgaggttcttgtcaaggcgaaagctgtctccgttaatcctcttgattgcagaatacgagctggatatggacgttctgtattccaaccgcatctacctattatagttggacgtgatgtcagtggtgaagttgcggcaattgggacttcagtaaagtcacttaaagtaggccaagaagttttttggtgcgttgcatcccacggcgttaagaggtacttttactgcctttggaattctttcggaagacgaacttacggaaaagccatcatcaatttcacatgtgggagcaagtgccattccttttgcagctttgactgcttggcgtgctttgaagagtaatgcaaggataactgacgctgagaatggagaagcaggggaagcgcgtaagcgtaagcatgatgatagcagtgatagccctgctcctgtaacaaccaagaaatcttaaaccaaagaagttgaaggagaagaggctgaagagaaggtgaagtcttctaagaagaagaagaaggataaggaagaggagaaagaagaggaagccgggtctgagaagaaggaaaagaagaagaagaaagataagaaggaggaggttatagaagaggtagcttcaccaaagtctgagaagaagatgaaaaaga

SEQ ID NO: 92711 - DNA, 699 bp, Arabidopsis thaliana columbia
ggaatagtggagatttgcattcttttgggataaggatcaaaaatggaggaagcaaaggggcctgtgaagcacgtattgcttgctagtttcaaagatggggttagtcctgagaaaatcgaagagctcatcaaaggttacgccaatctcgtcaatctcatcgaacctatgaaagctttccactggggaaaagatgtgagcattgagaatctgcatcaaggttacacacacatctttgaatccacatttgagagtaaagaagctgttgcagagtacattgctcatcctgctcacgttgaattcgccaccatcttccttggcagcttggataaagttttggttattgactacaagcctacctctgtctctctctaattatcttgtagcagcattttcatcattgatctttttctcggggatgcatcttgttaatgttgaataaagtatattccttttgagttttcctgcattgttctcatgtttctctgtgaatttctctcttttttgtttgtttgtttgtttccctctgttgtattaaacttgatctgtaaaaagatcatgagtttattaagagtgtttgatttcagactcctctttgttataagtctattactagttaaaaaaaaaaaaaaagggcggccgctctagaggatcccagcttacgtacgcgtgcatgcgacgtcatagattcttctatagtgt

SEQ ID NO: 92712 - DNA, 398 bp, Arabidopsis thaliana columbia
atcaggggagcttcctgctgtagagcttactactcttcccctaatactgaaggttttataattctacactgaccctatacttttgtgatggtttatttctttaaaacagtattctttacctatcccatgtctggggaaaagtgcaaaatatttatgaaggcatcattttattgttttcgcctctcgaatgttttgtggtgccttttttccattattattggcctttttactgtctggaggattaatattatttgacaaatctacttctatccatttgtgactcccataattagaatggtctttctcactgttatatttatcctctcagtgtgtatcagtctgtggaagtttcttgtttactaataatgtctacttatgctctgaatttgatcctggga

SEQ ID NO: 92713 - DNA, 621 bp, Arabidopsis thaliana columbia
atcaaaaatccgatggggaggaagaagggattgctcggagttcgaagagtcggcgccggatggggtcgatcctgagaatccgtacaaggatccggttgcgatggtggagatgagagaacacattgttcgtgagaaatggatccatatcgagaaggctaagatcttacgtgagaaggtcaaatggtgttaccgcgtcgaaggcgttaaccattaccagaagtgtcgtcatcttgttcagcagtatctcgatgccactcgcggcgttggttggggcaaagaccaccgtcctatctctcttcacggtcctaagccagtagctgttgaagaagctgaatgatgttgtgtgcgtgattgatctttggtgagtgagagctttgattaccatacatgaatggagtctctgttgcaagttaatgctccacatcaaggttgttacttgatttatgcttttctgtttcgtaaaacatatattactaattggacttgggagttccaattggttaagctcagcttcgtttttcaaatgatttatatatatttttggcttgttgtacattgcgtccctgtttatcgaaataatgaaattcccaagtacctttttgcaaaaaaaaaaaaaaaaga

SEQ ID NO: 92714 - DNA, 649 bp, Arabidopsis thaliana columbia
gaatcacgaagacgacgagtgaagaagaagaagaagcaatggggagaaagaagggattgccggagttcgaagagtcggcgccggatggctttgatccggagaatccgtacaaggatccggtggcgatggtggagatgagagagcacatcgttcgtgagaaatggatccatatcgagaaggctaagatcttgcgtgagaaggtcaaatggtgttaccgcgtcgaaggagtcaatcactatcagaaatgtcgtcatcttgttcagcagtatctcgattccactcgcggcgtcggttggggaaaggatcatcgtcctatttcgctccacggtcccaaaccggaggctgttgaagctgaataatgttgtgtgcctcattgagatgtctgaggttttgatatgggacatagaatggaatcatttcacaagctaatggctccctgatatcttccaaactctgtagatttctcttgttcttagaaacttgtcggtctttggaccaacggattcatgtaattgagctttgagtattgttacactccacagtatcagtttctgatgatcaaataagtcccattttcattaaaaaaaaaaaaaaggcgcgcccgctctagaggatccaagcttacgtacgcgtgcatgcgacgtcatag

SEQ ID NO: 92715 - DNA, 939 bp, Arabidopsis thaliana columbia
  unsure (1)..(939): unsure at all n locations
nnnnnnnnnnnnnnnnnnnnnnnnnnnnnnnnnnnnnnnnnnnnnnnnnnnnnnnnnnnnnnnnnnnnnnnccacgcgtccgggaagaagaagaagcggtagagagaaaaccgatgctcacagcgtttgcaagtcacgcgcgttctcacgttttcgcgtttgttaccgtcccaacaatcacgcgccgcctccgtataaatatcttacgccaatcacctctctcctcttctcttctcctaaacgaaaccttctctaatcgacccaattctgtttctcgtcgttgttattgttcgagctctgcgataatgggttcttcttcggtgtttggcgagcaattacagtatcctgcgactcggcgtgatgattccgtcgtcgatgactatcacggcgtcaagatcggagatccgtaccgttggttagaggatcctgatgctgaagaagtgaaggagtttgtgcagagccaagtgaaattgacagattctgtacttgaaaagtgtgaaacaaaggagaagctccgtcagaatataacgaaacttattgatcatcctcgttacgattcaccattcaggcaaggggataagtacttttacttccataacactggtctacaggctcaaagtgtgctttatatgcaggataatctggatgctgagccagaggttttgcttgatccgaacactcttagtgatgatggaacagtggccttaaacaccttttctgtcagcgaggatgctaagtacttggcctatggtcttagttcaagtggtagcgactgggtgacgattaagctgatgaaaatcgaggataagaaagtggagcctgatactttatcatgggttaagtttaccggcattacatggacgcacgacagtaaaggatttttctatggtcgctacccagctcccaaagaaggagaggatattgatgctggcactgaga

SEQ ID NO: 92716 - DNA, 456 bp, Arabidopsis thaliana columbia
cggacgcgtgggctcgtaagagatctgggcttgaatatgagtctccattgtcggcagagaagggtagatatgctgagactctgattcgccctggaaaaaagcaagtgcagaaaagagaggctcatgaaattatctacattgatgaagatgagccattcaactgtcctgatccagactttcacgattttaacaacacaatgagctctttcgctgtaggtcaagtatgggctctatatgatcctgtagatgatatgcctagatactatgctgagatcaggaaagtattgcaacctcagctgagtttacgggtgacatggctcgaatcattacagaccacagaggaaccaattcctgcttgtggggagattcgaacatggaaaatcagagaccagtagccctttgatgttttctcatgagatgtatcacaccatacgaggccaatatgtcactataaac

SEQ ID NO: 92717 - DNA, 896 bp, Arabidopsis thaliana columbia
  unsure (1)..(896): unsure at all n locations
nnnnnnnnnnnnnnnnnnnnnnnnnnnnnnnnnnnnnnnnnnnnnnnnnnnnnnnnnnnnnnnnnnnnnnnnnnnnnnnnnnnccacgcgtccgcagggtttttacttttctagggtttatctatctcattccgcaatcatggagtctctggggaagctacagctacatcaccagccatttcacctttccttcactcacacctcttcttcaacattccccaaaaacctcttcaaatcctcaattcaaccaatttcatctctcaaatccgcttcaattaaagcttcgtcctccaaatttcaaaactctatcacccctctcccaaagtccacacctttccgtctcttcaaatccacatgcatcactctaacaaccgccgcggctctgcttttggcgaatctccatctcaaatcgccggcgattgcagctcccatcgcgcctccgccgtcagttgaaagcatagaaaacgttaccttggaagaagaagagagagcgcttgatgagcatttgattactcacccttctgatgtcgacgctcttcgttcattgatggaggtaaagatcaaatctcgaaagcttacagaagcagtagaagtgatcgatcgtttgataaaattggaacctgaagaaaaagaatggccagttttgaaagctaacatctttacctacagtggagatctagacttggctaaactggatttgaagagattctggctaaagatccgcttcgtgttgaagcttatcacggcttgcttatggcttattcagatgcaggtcttgatttgaaagatgtggagagtagaattgaagaagcatgttgaagtgcaaaaagagataatcaaaacgattttcggattntagctactcgtggcgcagattcggtattgaaggaaacata

SEQ ID NO: 92718 - DNA, 992 bp, Arabidopsis thaliana columbia
tccattttagctttaaatcacaaaaaaaagagataaatttctcaaaagaaattataagtagacaccgccctttttataaacaaccctaaaagtagtaaaaataatatcgagacgagacgggtttgtttcttctctctatctctatatctaccaaaatcctttgccccccgaatctagttctctcgatcgaccctgtgacgatggctaataaccaagcaagccttcttctgcagaaacagcttaaagatctgtgtaagaaacctgttgatggtttctctgctggcctcgttgatgagaagaacgttttccaatggagcgtctctattatgggtcctcctgatactttgtatgaaggtggcttttttaatgcaattatgtcgtttccggagaattatccagtttcaccaccaactgtgacgtttacctcggagatgtggcatcctaatgtttattctgatggaaaagtttgcatttctattcttcatcctcctggtgatgatcctcatggatacgagcttgcctctgaacgttggacccctgtccatacggtagaaagcattgtgttgagtatcatatcgatgctctcaggtcccaacgatgagtcaccagcgaatgtggaagctgcaaaggaatggagagacaacagagcagagtttaggaagaaagtgagtcgctgtgtgagaagatcgcaagagatgctatgaacatctctccagcgtttttttcgtgttgtagaaatatcgattctaatcttcttatgagaaagcctaagcagaaccaaccatcttcaagcagcagccagatgaatctgactttgcaaaagcttctctttctttttcctttttgggttttgttctctaaggtttggtttggaatattggtgtggaatcaaatccgctccatattttaggattatattattgcactcgttaatggattcgtttgatctggctttttaactttattctggttttgggttaaaaaaaaaaaaa

SEQ ID NO: 92719 - DNA, 351 bp, Arabidopsis thaliana columbia
gctggaagaacacgaccggcagctccaagatttcaccagacagaaagcaaaacactgcagaaactaaatcacgtatctgaatgattttgctgggagtcttttatcagaggacaaaaacagagaaccattcaagtcttgttgtatcaagaagagtcttatttggttcgtagattttgaaaaatttgtttgtaatatatagagattaaaagattgttgttggcttataaaaagctaagctctgtggttatagagtgatgtgtataacatttatacagactcatcatagagtttggttccttgtgtatattacatgtatgtacacttcttcatatattacagagatgtgtacat

SEQ ID NO: 92720 - DNA, 529 bp, Arabidopsis thaliana columbia
  unsure (1)..(529): unsure at all n locations
nnnnnnnnnnnnnnnnnnnnnnnnnnnnnnnnnnnnnnnnnnnnnnnnnnnnnnnnnnnnnnnnnncgtccccacgcgtccgctctcacagtgactattcgtcgcttcagatctaaaagagaggaagataaaccatttggattcaatatcgattaaggaaaccttttgacttcacaagaatggcagtgacagaagcagaaaatcctcttcttggtgaaatcacttgtggcaccttactacagaagttgcaggaaatctgggatgaggttggggagagtgatgaagaacgagacaaactgcttctacagattgaggaagagtgtctgaatgtttacaaaaagaaagttgagctagccgcaaaatctcgtgcagagcttcttcagactttgtcagatgccactgttgaactttccaatctcacaactgctctcggggaaaaaagctatatcgacattcctgataagacttcaggaacgatcaaagaacaactttctgcaatagcacctgcgcttgacacctttggcaacag

SEQ ID NO: 92721 - DNA, 526 bp, Arabidopsis thaliana columbia
  unsure (1)..(526): unsure at all n locations
annnnnnnnnnnnnnnnnnnnnnnnnnnnnnnnnnnnnnnnnnnnnnnnnnnnnnnnnnnnnnnnnnnccacgcgtccgcttaacatgacaaaatcgtttgaaagggctgccgcctgtatggcgcgcgccattatcatactaccaacgaaaggtgatcggtatgaagttgatacagacgcatttctttctgtattggcccttgaacctatacaaaagatggaatccatcccaaccattgtagaggtatcaagctctaatatgtatgatcttctcaagtccatatcggggttgaaagtggagccggttgaaaattctacatccaaattgtttgtccaatgctcacgtcaaaaggacctgataaagatctacaggcacctactaaattactcaaaaaatgtatttaacctttgcagcttccccaatctaactgggatgaagtatagacagttaagactggggttccaggaggttgtggtctgtgggattttaagagatgggaaagtanatttccatccaaatgatgat

SEQ ID NO: 92722 - DNA, 654 bp, Arabidopsis thaliana columbia
  unsure (1)..(654): unsure at all n locations
cttggncaatttggaanttccaagtttnctagaatggaaanctnancaaaaggangaancncaggagctggtgggnggaaaccacttaccttggtgtggtgggaggcacgatgatatcgttgcttgttacttcggtgatgatcaaacttgcattggtgtggagacggcgaaagcaagaagaagctacttatgagcctgtaaatgctgctattaaagaacaagaacttcagcctctctcctctgaaacatctaatgcctgagcctcctcatcactcatagagtctctttacggtctctcgctctttatatatatttatatatttgatagaaagaaaatgaaaccccagaacacaggaaacaagattcctcaaattaaaaacacttttgatttcaagtaaattgatgtagttattacgctattttgatgtacaaggaaagaaagaaaatagagagaaaaatggttggaatgtatttggaaggcttattggcgtgagggtttaatttggtttgtgagagatatgtgtttaagtgatattttatgattttattgagaaattaaatttagtgaaaaaaaaaaaaaaaaaaaaaagggcgcccgctctagaggatccaagcttacgtacgcgtgcatgcgaggtcatagctctaagtata

SEQ ID NO: 92723 - DNA, 715 bp, Arabidopsis thaliana columbia
  unsure (1)..(715): unsure at all n locations
nnnnnnnnnnnnnnnnnnnnnnnnnnnnnnnnnnnnnnnnnnnnnnnnnnnnnnnnnnnnnnnnnnnnnnnnnnnnnnnnnnnccacgcgtccgcggacgcgtgggcggacgcgtggggttcgcttgctgaatttctcgtctagtggaaatgagtatcgcctgaaatggggagtctttcccccacaatcttccgagtacatttccaacactacggcattgaacataatgttgcttctgaaagaaaaccggttacgcctacctggacaatttggaagctacaagttgctagaatggaaagctgagcaaaagaagaaacagagctggtgggagaaacacttacttggtgtggtgggaggagcgatgatatcgttgcttgttacttcggtgatgatcaaacttgcattggtgtggagacggcgaaagcaagaagaagctacttatgagcctgtaaatgctgctattaaagaacaagaacttcagcctctctcctctgaaacatctaatgcctgagcctcctcatcactcatagagtctctttacggtctctcgctctttatatatatttatatatttgatagaaagaaaatgaaaccccagaacacaggaaacaagattcctcaaattaaaaacacttttgatttcaaaaaaaaaaaaaaaaaagggcggccgctctagaggatccaagcttacgtacgcgtgcatgcgacgtcatag

SEQ ID NO: 92724 - DNA, 820 bp, Arabidopsis thaliana columbia
  unsure (1)..(820): unsure at all n locations
ttagtaacaaacgggtttgtgcccgtgcaatgnagagtantgtgtctcacttgcaaaagcaaacacttataaccaatttgcaagctttagatgcgcaaaccagccttgggacaaaagttacagaaactgaacatcactaagaacatattcagtgtttgtcatataagtctcaaggacttctctcttcaagttggaaaccaagaatctggttgtctattaccgagcctaccatcggatgcgatatttgataaagacccggggataagcttcacttgtgacctcaatgacctcattcccgctccggggccctcatcttctctatcctcagcctctccctgtaaaaaccctgttagaattcctgctcttccagctgctgcctcctcgcaacctcgtctccacgatgaaggagtgacacgtttggtgatctttgtcttgtctatgcttcttgtgatgcttctgtcatagtaccagaactaagccggatccagtcttctcttataccggtttactagtcaataggtgtgtttgtgtagatcaaactggtacagtcagctacaaaagtcggatgttgacatgaccggttcaagtgtatgagttgttgaggtataagtttcggaaagtctttttatctttattgatttatgattcttgaaaacctttttaatgtaaagaaaaggtcttgtagggtttataacgtaaggttataatatatttatttatagcctgtcgatttcataaaaaaaaaaaaaaaaggccggccgctctagaggatccaagcttacgtacgcgtgcatgcggcgtcatagctcatctatagtgc

SEQ ID NO: 92725 - DNA, 358 bp, Arabidopsis thaliana columbia
atactcacattccgtgaagcgtgttgagattggagcagtgagaggttcatattatggtggacaaacaataaagcaagaacaattcaagagaaccaagtctcaaactgaaagagtgcatgtcctggggagtcatggttcaccactatgtagcatagatttgaaggatgttttcaactttgatgagttcatagaacaattcacagaggaagaacagaagaaactgatgaacttgcttcctcagattgactctgatgaccttcctcatagcctcagaatgatgtttgaaagtgctcagttcaaggacaacttctctttgtttcagcagctcattgctgatggtgtctttgatgtgtcttct

SEQ ID NO: 92726 - DNA, 545 bp, Arabidopsis thaliana columbia
  unsure (1)..(545): unsure at all n locations
ccnnnnnnnnnnnnnnnnnnnnnnnnnnnnnnnnnnnnnnnnnnnnnnnnnnnnnnnnnnnnnnnnnnnnnnnccacgcgtccgctaaaagcgaatttagggtttagtcatctctccgacatggttggtgccgcgattttggaatctcccggcgaaggaattggatctaacagcattctctcgcaaaagagacaactttcttctagtgatgcagctaagagagacgctaagaaacgctcgacaatgctaatggatctggagattctcgattgtcccatttgctacgaagctttcacaattcccatcttccagtgtgataatggacatttggcttgttcttcttgctgtcccaaactaaataacaaatgccctgcgtgtacttcgcctgttggccacaatcgctgcagagcaatggagagtgttcttgaatcgatcttgatcccgtgtccgaacgccaagttaggttgcaaaaagaatgtatcttatgggaaagagttaactcatgaaaaggaatgcatgttctctcattgcgcctgccctgcatt

SEQ ID NO: 92727 - DNA, 512 bp, Arabidopsis thaliana columbia
atacgactcactttagggaaagctcgtacgcctgcaggtaccggtccggaattcccgggtcgacccacgcgtccggttttcaagggttttgcttccgaggctgacatgttactgcaagatctccaaagtagccttaacaaacaggaagagaagcttattacatttgcacagcagcaacggaaggcacactcgcgagctgtggatacagcaaggtcagtttcaaaagtaacagtagaattcttcaagactctagacacacatgctaccaaattaaccgggatagtagaagaggcacagacagttaaccacaagaaattgagcgaatttgaaaacaagtttgaggaatgtgctgcaaatgaagagagacaattgctagagaaagtagcagagcttcttgcaattctaatgctaggaagaaaaaccttgtccaaatggctgtacacgatctacgcgagagcgcatccaccagaactactaccctacagcatgagatggcaacattgcaggattca

SEQ ID NO: 92728 - DNA, 493 bp, Arabidopsis thaliana columbia
  unsure (1)..(493): unsure at all n locations
gtaaactctctctgattctctctttctctctttctctcgctctctatctctctctcctctgtttgttatatcaattaatcaagaagatttcttgtgttttttttttttctgttaaagaagatttcttgggagaaaataaggtggattgaaggattagtctttaggaatggtggtggaggaggagaatagaagcatggaggaaggacttcttcagcatcaaaacgacagagatgatcgtcgtatcacagcttgtgtcatcctcagcacttttgtcgctgtttgtagtgccttcagctacggatgtgccgctggttatacttcaggcgctgagactgctatcatgaaggagttagacctttctatggcacaattttcagcgtttggctcctttctgaatgtgggaggtgcggtgggggccttnttcaacnggtcaattggcaagtcaacctcggcanaagacggancctttttggggnatngaatttttttctcc

SEQ ID NO: 92729 - DNA, 531 bp, Arabidopsis thaliana columbia
  unsure (1)..(531): unsure at all n locations
nnnnnnnnnnnnnnnnnnnnnnnnnnnnnnnnnnnnnnnnnnnnnnnnnnnnnnnnnnnnnnnnccacgcgtccgcaaaacttgttgtaactcatcttcttcttcttcttctccatcacagactcataacaaatgggagaagtttcagtggtggagaacaagaaagtgatactaaagaattatgtagatggtattcctacagaaacagacatggaagtgaaactcggagaaacaattgagctaaaagcaccaaaaggatcttcttgtttcctcgtcaaaaatctatacttgtcttgtgatccttacatgagaggtcgtatgcgtgattttcacggttcctatctcccgccttttgttcctggccaacgtatcgaagggtttggtttagcaagagtgatagattctgatgatactaattataagcccggcgatatagtctctggtatcattggttgggaagaatacagtttgctacgtagttcagataacctacagttgagaaatattcagttagacgacgacattccgctt

SEQ ID NO: 92730 - DNA, 534 bp, Arabidopsis thaliana columbia
  unsure (1)..(534): unsure at all n locations
nnnnnnnnnnnnnnnnnnnnnnnnnnnnnnnnnnnnnnnnnnnnnnnnnnnnnnnnnnnnnnnnnnnnnnnccacgcgtccgcggacgcgtccgcccacgcgtccgtggagaactcgttaactgcaaaagagaagattatttcggagcttaatatggagattcacaatgttgagacagctttagctaatgagcgagaaagtcatgttgccgagataaagaaattgaattctttgctcaataaaaaggatactatcattgaagagatgaagaaagagcttcaagaaagaccatcagcaaaattagttgatgatttgcgcaaaaaagtgaaaattctgcaggctgtaggttacaattcaattgaggctgaagactgggatgctgctaccactggtgaagagatgagcaaaatggagtcgcttcttcttgataaaaacagaaaaatggaacatgaggtcactccgttaaaggttcaactttctgagaaagcttccttgcttgagaaggctgaagccaagggagaagaactgacagct

SEQ ID NO: 92731 - DNA, 492 bp, Arabidopsis thaliana columbia
tttagctgtttatatttagagttgagactaattcggcgttgcgcaccaacctaacttcggttctacttcacacacaaaactcgtgtcgtctcttgttataaagggtctctttgtttcagtgtctttggtctcgtgtttgtgtagagatggagaacaagaccgataatggaaacgaggatggtccaataatacatagccaagttgagaagataaagaaagagtttgagaagataagacaaccgtcgctgcagcaaccggagatgaggagggttcttagcgagatcaaaaggcgtcaacgttcacgttctcctcttggtttaggggagagatctatttccgttgggaattgatccatgtttgactttatagtcgagagagatagataaaaaaaaagaggtagaggtggttatgtggttcctaatagttaacaggttttgttgtatatattatgctatataaatactctttcgtttgaaaaaaaaaaaaaaagga

SEQ ID NO: 92732 - DNA, 330 bp, Arabidopsis thaliana columbia
attagtccttttaagcaaattaatcccaaagattgatactttgttttcctgagattcttcttttacttcactgtttctgggttttgtaatttgatggtgatggatgataaagataaatatcgcgaagtagtagaacattggtcttgcgaaggtacttctccagctctaatggttggagattctactgagataacagaaatgctatcaccgagccaacatcaacgatggcgaggccttgtgttagatatacaatcgagagaagctcatggcgatttcttgagagcaaatggttccttaattcatagccccgtttccaaaaggttcaagttt

SEQ ID NO: 92733 - DNA, 1278 bp, Arabidopsis thaliana columbia
  unsure (1)..(1278): unsure at all n locations
nnnnnnnnnnnnnnnnnnnnnnnnnnnnnnnnnnnnnnnnnnnnnnnnnnnnnnnnnnnnnnnnnnnnnnnnnnnnnnnnnnnccacgcgtccggagccaacatgacaatacctgcactttgctctgtaacatcgtcaaatctaactggaggttcctgtccagtaacagatgtcacaacgttcgagaaagttgttaacagtagcaaattactggatgcctgtcgcacagttgatcctctgaaggagtgttgtaggccaatttgccaacctgcaattatggaagctgcgctaattatttcgggacaccaaatgacagttggtgataagatccctttagcaggatcaaataacgtcaacgcaattaacgactgcaaaaatgtggtgttttcatatctttccaggaagcttcccgcagacaaagcaaacgctgcatttagaatcttatcgtactgcaaagttaacaaagcttgcccgttggaatttaaggagccaacggaagtgatcaagggcttgccgtaatgtggctgctccaagcccttcctgctgtaggctcgttgaatgcatacatttctgggatacagaaccaaatgctattaacatacaggcaggccatagtctgtgcaacagtcatacggttctatgttaaggataggtggtgttatgacaaatatctatgagctttgtgatgtcgatctcaaagatttcagtgtccaagcatatggaatgcaacaaggttgtcttctgagaagctatcctgcagacttgatatttgataacacatcaggctacagctttacatgtgatttgacagacaacattgctgctccatggccatcttcatcgtcaatgtcttctttgtctctatgtgctcctgagatgtcattacctgccttgccaacatcccagactattaaaaatcacgggttttgcaatggtggggttggagcgttgcgtctcattgttttggtatttcttctgtatgttgttgttgtgagacattaaaaagaggtttaggagggttttgtttttggtagtcagtgaggactttggataaaacaatggtaagctcaattttctcttgtgtagatgtatgacaatagggcaagtgttatgtagtagtaatatcttctcaatcttcatgtatagtggcatctctgcttctgtttgttaatgcgtttggttttattaaaaaaaaaaaaaaaaaagggcggccgctctagaggatccaagcttacgtacgcgtgcatgcgacgtcatagatcttctaagttcgtccta

SEQ ID NO: 92734 - DNA, 535 bp, Arabidopsis thaliana columbia
  unsure (1)..(535): unsure at all n locations
cnnnnnnnnnnnnnnnnnnnnnnnnnnnnnnnnnnnnnnnnnnnnnnnnnnnnnnnnnnnnnnnnnnnnnnnccacgcgtccgtctttttgttaaagactcagtgacgaccctctcctaaaaaacactcataaataaactcgctggagacgccggaaccaaaaacagagttctaatggagaagaaagaaaatggtctcgatggaaagcaatcgggtcgggtcattaacggacccactaacccgatggtcacacctctgctcaacgatctttaccaattcaccatggcttatgcttattggaaagctggcaaacaatctgagcgatctgtgtttgatctgtattttcgtaagaatccttttggtggagaatacactatctttgctggtttagaagaatgcatcaaactttctcgctaatttcaatttgactgatggagagatcgatttcgttcgtgattcgttacctggatgtgaggaagctttctgtgattatcttcgagggcttgattgttctgacattgaagtgtatgccatt

SEQ ID NO: 92735 - DNA, 507 bp, Arabidopsis thaliana columbia
  unsure (1)..(507): unsure at all n locations
ctcttcttcaatcggaaaaacttcttcgctctatagatcctcgattccttcgttttctcgcttatcagtgcgatcaatggcggattcagctttcaggaaaattcagatccaaagagatgacactacatttgatgcctatgtggtcggtaaagatgatgcgcctgggattgtggtgattcaagaatggtggggtgttgactttgagatcaagaaccatgctattaaaatctcacaacttgagcctggattcaaagcccttatacctgacttgtatcgaggaaaggttggtttggatactgcagaggcacagcatctaatggatggccttgattggccaggtgctatcaaagatatccgcgcttctgttaattggctaaaatccaatggctcaaaaagggttggtgccactggaatgtcctggggaggtgcattagctatagctagctctgtattggggccccggngggtgctgttntttggtttttggaccccttcnnanngctcgag

SEQ ID NO: 92736 - DNA, 443 bp, Arabidopsis thaliana columbia
ggtggtattcaacaaatttgtctcgaatttatagagctcgaagcttcaaggaagttataatggctagtgaagatgaatcgattgaacaaaaagctgctgctcgtaaagaggcacttaaagctctaagggcagctcaggaactgtctgagaccaaggaagacggagaggatgaagctgtcgaagaagatggtccagccatgaagtttagaaactatgttccccaagctaaggagcttcaggatggtaaactagcgccaccagagctacccaaattcgaagatccgatcgttgcacttccacctgctgtagagaagaaagaggacccatttgttaacatcgctccaaagaagccaaactgggacctccgaagagatgtgcagaagaagcttgataagctcgaaaggcggactcaaaaggcaatgcataaactcatggtggagcaa

SEQ ID NO: 92737 - DNA, 852 bp, Arabidopsis thaliana columbia
  unsure (1)..(852): unsure at all n locations
atgatactccnnnnnnnnnnnnnnnnnnnnnnnnnnnnnnnnnnnnnnnnnnnnnnnnnnnnnnnnnnnnnnnnnnnnnnnccacgcgtccggagaaattgaagtcacagctgaagaaattgagatgggtcttatcgagtccaacactacaaatgctcagcttcacattgcacttttgaagggggataccaccggtgaataaaacgcttgacgatgcaaatgcatggatcacggtgttgtgtaagaaactagctccatggtggccatggattgctaagggtgaaattcatattactgttaacaaaggggaggaaatatctgaataccaaggacttgactctattaaccgcctgaagattttgaaggcactttgtgagcttcgagttcaacaagatgatgcacgttcgtatattcaagataataccaaggaaggagactgggattctagtttacgcaagaggaagctaggaggagatggaaagaagacttcttattggtttgatggtaatgatatccaaggttacagattattatagggaagtcaatgggaatctcaaagaagaatgctggctcagatttatcttgtttgagctgggaaactgaagccaccaatctagatgaatttcagagtgtcgctagagagttatcatcaagcanagcttcttctttggctgcaactgggcagatgattgagaacagaagctatacccgttgntgagaaatatcataaaaagagagaaagggccatanaaaagaaatgaaggagagatggtcggtaatgtcaattctcgcgtctctccgactactcgtncttgtcgaaccacatgccggtactacacctttgcagataca

SEQ ID NO: 92738 - DNA, 708 bp, Arabidopsis thaliana columbia
  unsure (1)..(708): unsure at all n locations
tttnnnnnnnnnnnnnnnnnnnnnnnnnnnnnnnnnnnnnnnnnnnnnnnnnnnnnnnnnncccacgcgtccgcccaaccacgaagtgacacgctctcaaacgaaatggtggttttgatttcaagtacagtgacgatttgcaatgttaaaccaaagcttgaagacggaaactttcgcgttagccggttgatacacagacccgaggttccatttttctcaggattgagtaatgagaagaagaagaaatgtgcagtttcggttatgtgtttagctgtgaagaaagaacaagttgttcaaagcgtggagagtgttaacgggacgatttttccgaagaaatcaaaaaatcttatcatgagcgaaggaagagatgaagatgaggactatgggaagattatttgtccaggttgtgggatttttatgcaggacaatgatccagatttacccggatattatcagaagagaaaggtcattgcgaataacttggaaggtgatgaacatgtggaaaatgatgagcttgctgggtttgaaatggttgatgatgatgctgatgaggaggaggaaggggaagataatgaaatggatgatgagatcaagaatgcgatacaaggtagccactcttgaagggagagtgggtttgtatgggaatcaaatgactgggaagaaaagaaaggagtgaatgatgctcnattggatgggtttgctcccgct

SEQ ID NO: 92739 - DNA, 568 bp, Arabidopsis thaliana columbia
gctctttcgattttggagatatttacagataaaaaatgggagcttcgaaactttccgggatgcaaaagcaagtcttgagtctctacagaggatttctaagagcagctcgttcaagaccaatagaagacaggaagagaatagagatgattgtgtcaacagagttccgccacaactctaaggaggtcgaccgtaagaattttcagtacatcgagtatttgcttcggttaggtactaaacagcttgatcaactcaaaagccctgccatagttagcctctcctcgatcaaggtcgttacatctaaaacctgataccttattttatagcttgttgctctagtgaccatagataacaaagctgaggaaattgattcgttttcctctttttacatttagttatgtatgtattattatggatgttcaaggtcccttattaaataaaaaaaattgtggtccccattgaaaataaataaaccccttccccccaaaaaaaaaaaaaaaaaaaaaaaaaaaaaaaaaagggcggccggtttaaaggattccaggctaaggaaggggggcatgcaagttaa

SEQ ID NO: 92740 - DNA, 469 bp, Arabidopsis thaliana columbia
cactctctcaaaaatcaccaaaccaaactcttcactctctccaacaatggccaagaagatgagttctctcatcatcatcttcaacattctccttgtcctcacaactcaaacccacgcgcacaacgtcacgcgcctcctagcaaaccacccatcattctcttccttcagccatttcctaacacaaacacacctcgccgacgaaatcaaccggagaagaaccataaccgtttgcgccgtcgataacgccgccatgtcagcattaacctcaaaaggctacacaatctcaactctcaaaaacattctctccctccacgtccttttagattacttcggaaccaaaaaactccaccagatccgtgacggctctgctctcgccgctactctgtttcaagccaccggagctgctcctggaacctcaggattcgttaacataacggatctgagaggtggtaaagttgggtttggtcct

SEQ ID NO: 92741 - DNA, 769 bp, Arabidopsis thaliana columbia
  unsure (1)..(769): unsure at all n locations
agcagcaagttcccagccgcctgtgcatagatttatggtcctgtgaagttcccacttttcaagcctaaataacgatggttaaatcgatgagtaaaacgnaaaagctcatttcataggaaggaagttgcagggagcaactatctcactccctagtggctattctggctttgtgcttagacaagcgagtaacttgaatgctaatggaaagagaaaagctttctatgccctcaggaagataaccatgtgttgggaagtgaaggcgaaattcaataacctggcatactggaatcccgatagtcttccttcaaaggacgatactctctttcgctcttttcattggtttagcactgcaaaagcgctgcataaaccacgtgagagttgaagacttggttgcagtttcacatggtggaaagaataaaatatgaagtggcaattaccgtttcgggttttgagcaaaacctcttgtgaaactagcaagtaagtgatctatgccatgaaattctcaaggcttgttggcttcaggcttgttcgagcctggatcatgtatttcttctgtaagcggttttttataaagaaatgaaaatcatattattctttagagaaaccagttcaatttcctttaagaccggtcattacaagcattgggttttttaaaaaaaaaaaaaaaaaaaaaaaaaaaaaaaaaaaaaaaaaaaaaagggcggccgctctagaggatccaagcttacgtacgcgtgcatgcgacgtcaagactcttctatagtgcacc

SEQ ID NO: 92742 - DNA, 885 bp, Arabidopsis thaliana columbia
  unsure (1)..(885): unsure at all n locations
atgatatnnnnnnnnnnnnnnnnnnnnnnnnnnnnnnnnnnnnnnnnnnnnnnnnnnnnnnnnnnnnnnnnnnnnnnnnnnnccacgcgtccgcggacgcgtccgcccacgcgtccgcccacgcgtccgcggacgcgtgggctcagagaccaattctctcaatctccgtcgtgcgcttttgcttgattttgtaataaggaatctgaggaattgatacaagtgggctctgatgggaaccatagactttagagctgctgcagatgaaaactccattgtggatctcagcagtcaagttcaccagctcccttgctgcattagatttgatggtcctgttgaagtttcccactatttcaagcctaaatctagcgatgttgaaatcgatggagtaaaaacggaagaagctcatttcagaggaaggaagttgcagggagcaactatctcactccctagaggctattctggctttgtgcttagacaagcgagtaacttgaatgctaatggaaagagaaaagcttctatgcccacagaagataaccagtgttgggaagtgaaggcgaaattcaataacctgacatactggaatcacgatagtcttccttcaaaggacgatactttctttcgctcttttcattggtttagcattgcagaagcgctgcataaaccagtgaaagttgaagacttggttgcagtttcacatggtggaaagataaaatatgaagtggcattaccgtttcgggttttgaacaaacatcttgtgaactagcagtaagtgatctatgacatggattctcaggcttgttgctcaggctgttcagcctgatatgattcctctgtagctgttttatagaatgaaatctatatcttagagagcagtcattccttata

SEQ ID NO: 92743 - DNA, 584 bp, Arabidopsis thaliana columbia
atcagcaagactatatgggaacaaaagttttgtagatgaaagacaccgacacagatatgaggtgaatccagccatggttccacgttttgagagctctggactcacattcacaggaaaagacgagacagggcagcgaatggagatcattgaactgcctaaccatccgttttacgtcggagctcagttccatcccgagtacaaatcaagacccggaaaaccatctcctctgtttctaggactaattggagcagctagtggagaactagacactgttctgctacaaagctaccaagaaaccgtcgttccacgttctctacccaacggaaaactagagagagtttactggaaaggtgcagcgaagaagccagtcagtgttgggtacagtttatgtgatcgtgtctactcgtggaccaccgtatctgcatcaacaatgacttctctcgaaaaaagctatttagccggaatttttaacatggatttcttcacctgtggagggagagagaaggcaatgagtttgtacagtttgaagactggctttttatgagatgcttttcttaagattatgaagtaaaagatgaacacta

SEQ ID NO: 92744 - DNA, 793 bp, Arabidopsis thaliana columbia
  unsure (1)..(793): unsure at all n locations
cgcgtgggcggacgcgtgggcctcacttaacacagcagaaaccctttcttcagtcttctcctgcgttctccttcttcacttcccaactaagtctcgccggacgatcgtaaccggagagcttccgtcgaccggtcaagtgtttgatatctaaagaagatgttgaagtttctatcaaaagtaagaattgagttcaacacattagatccaagacttgcgtcttgtgttgaattcttagctcaatgcaatgcaaggaaggccaaagaatcgaatcccaattgtcaggttttggtgaaacgtagaaccgatgagcagccgccgcagatcactgtcacttttgttaatggtgttgaggaagcttttgatgcagctgcaacctcggctcagtcgattagaaagatgattcttgataaaggtcagtatcttgagacagagcaaatgtttcgtgaagctggagaacaatggcctgtgattatccctgatgaagaacttctccaagaggctcctggtgttaagccgagaaaagcagaagacaagaagtgatgctgcaccaagcacgatcaatatctcttggtgtaatctcattgatttgacaaatctagcttttcggaatgtaagatcgtttgctgtgtgcaactcgatatgtgtctcaagcttagggtttcgactgatacatttgtattgttttctcgttctatgtgaaccgcaatggatgaacttttggtcaggaaccgggactatgacactgttatggaagctattgaagctctgggaatnaaaaccaatttttataggc

SEQ ID NO: 92745 - DNA, 434 bp, Arabidopsis thaliana columbia
agaaagagagggaagaaactatggaaagatttatgtacaaatcaacggtgttcccaatttgctgtctgttgtttgccttgttcgatcgcggtaatgctctctatggatcttcgtcgcctgtgcttcaactcactccttctaatttcaagtctaaggttcttaattcaaatggagtcgttttggtagagttctttgcgccatggtgcggtcattgtcaatctctaacaccaacttgggagaaagttgccagtactttgaaaggtattgctactgtggcagccattgatgctgacgctcacaagtctgtctctcaggattatggtgtgaggggtttcccaaccattaaagtattcgttcccgggaagcctccaattgattaccaaggagcaagggatgccaaatccatttctcaatttgctatcaagcagataaag

SEQ ID NO: 92746 - DNA, 759 bp, Arabidopsis thaliana columbia
  unsure (1)..(759): unsure at all n locations
gtcgacacacgcgtctacattcactctcactactctcttctctttgtgtaagcaaagaaccaatctttagataatttaggaaactcttcattattcctcttgcaagctcgaatgatcgccgccttgttcccttgatacctcgaatccttttcttcttccagcctcagtatcacttcaatcttctcggcttgatagttaaatggatcctgttcctgttcgatgtcttcttctcggtatatctcggtatcttcatctggttgcgtgccagactataagatttaatcctattcaaacatgtattggaaatatggttctcttgttgaagctcttgaaaccgttgctcgatgaagttgttgattgcaagataccttctgatgactgtttatataaaggatgtgaagaccttgattctgttgttaaccaggctcgggagttcttagaggactggtcaccaaagttgagcaagttgtttggtgtgtttcaatgcgaggttttgttgggaaaggtccagacttgttccgttggagattagtcgcatacttcttcagttatcacagtcaagtccgggtacttcaagcgnacaaagtggtgancgcngcgtgcaggagnctgagaggtttaaagcaagagggggcattaatggnacncatgngaaatgnctttncggnancagaaaganggattacccccttggggaacaacannngggagganaaatcaaagggtggggtggnncaacnaggctcctaaaggaggnnc

SEQ ID NO: 92747 - DNA, 531 bp, Arabidopsis thaliana columbia
  unsure (1)..(531): unsure at all n locations
nnnnnnnnnnnnnnnnnnnnnnnnnnnnnnnnnnnnnnnnnnnnnnnnnnnnncatattctttacccacgcgtccgtgaccatgcagcacttctacaccggtgtatcggaatacttctccagaaagttaatgatagagcatatgttcgtgacaagattgactggatgtacgaacaggctgacatttctatacctgcaaatagactgggtttggcgaaggccatggggctggtcgcggcttctcacttggacactgtactggaaaagctgaaaatcatcgtggataatgttgggcagagtattttccaaaggatcttatctctcttctctgagagctataaaacagaagacagtgatgatatacacgctgctttggctttgatgtatggatatgctgcaaaatatgcaccctcatcagttattgaagccagaatagatgcacttgtcggcacccaatatgctttcacggcttcttcatgtgcggcaacaaacagcaaaacaagctgttataactgctattgatttattaggt

SEQ ID NO: 92748 - DNA, 1183 bp, Arabidopsis thaliana columbia
ctcttccgataatcctcgcatcctctccactgcgaaacctaaccaaaccttgttcaacttctcaaatcccaaaacccattcaaaattctacaaaacaacctccaatacatctcctaaccaaaaccaatctctctgtaaccatttcccaactaattatcacttcccctgttctcgcatctgaatcattcgactcaatttcatcagacccatcttctggaaaaatcgatttagagtcaattttggtcacaattgataatttcttcaacaagtatccatttttcgtagcgggatgtacttttacctatcttgttgtttatccagctgtgatgttttacttgaggaagtataaaccaatatccgccatgaacgcgtttcgtaagcttaagaatgaatctgattctcagcttttggatattagagatgtcaagactttggctttgttagcatcaccgaatcttaagtttttgggtaagagttctgttcaggttccgtttagtgagaatgatgaagaagggtttttgacgaaagttaaaggaagcttctctgatgctgagaatacagttgtttgtgttcttgataattttgatggtaactcgtcgaaagtagctgaattgctgatcaagaatggtttcaaagaggcttattatattagaggcggcgcgagagggaagaatggttggttggctattcaagaagagcttttgcctccaccggtgcatatgtacactgcgaaaaacgtaaaatcttcaaacaacaatgaagcgtctgttgttggaactgagaactagttcaagaacatagcgtaatgtggcaggacatggtactaccatgtcactggaacatgagaaagcttctttaggtggaagagtagctatatattgaaagacttgtttagacctcaagacaactctatgcttagcaaaaaagctaaccttgtctactacatattgatttctcagaccattccaataaaatgagacttgttattattatgaagttttttgtgcttttgtaccttttctattgcattgtgtgacagataatgattatgtgtaatgctcttcctgagattgtttgaaacaatttacctgcgaaaaaaaaaaaaaaaaagggcggccgctctagaggatccaagcttacgtacgcgtgcatgcgacgtcatagcttttgctagggtgtaagc

SEQ ID NO: 92749 - DNA, 323 bp, Arabidopsis thaliana columbia
acgatgatgaattgtctcaatttttagggttcatcaaaatttgaacaaaagggacctgttttgctcaatttttgatagcagaagacgaatctggatctggggtcacttcaagattgaattaagaggtttttaagtaagttgagatgtcagttaaagcaaggagaatttctggtagattagagactgtagtaactaaggttaattatgcatttgatcctgttgacgatgacaaaatcataagaaaccggcttctaacccgaaccacgaccactcgaggcgagcctccattgaagaaacttcacaagaagttcacttcttttgta

SEQ ID NO: 92750 - DNA, 590 bp, Arabidopsis thaliana columbia
cttagggttaagcaagagagaaactagagatgaggttgataacgcacaacatgctttcctgcaacatcaaaggagtcaccagtggatttcctctacggatcgaagctgggaacgtgattgagaaggaagtcgatttcaatcccgattttatcaggcacatgttcgcgaagattgagtggaaagctctggtggaaggtgcgcgttccatgggatacgctgagttaccggaggaatctccggacgccgcggtgctgaaatcagatgagcccttccttaagaaactccaccacgcgttgctcgagctccaccttgaggaaggcgcgcttgtttgccctgagactggacggaagtttccggttaataaaggaatcccaaatatgcttctccatgaagacgaggtttaattgattgtgagatttttccttgtaagtttcaatctatgatgtttctgatgatgtgaaccttttagtgagatatgcaattgaatgattccatttgaatcatccattgttgtcgttttgaatcctttaattgtgttttatcaaagaatggtgcctgattgcaaaaaagtttataccctaaaaaaaaaa

SEQ ID NO: 92751 - DNA, 406 bp, Arabidopsis thaliana columbia
gacgcctatgcatattggaaagggaacccttttgttgcatctccttcaagagaagatctcctcacttgcaatttatcctcactacatgattggaattctagaattttcattcaggattggatatcagaaggacaaagaggatttgagaattcgaatgtagcaaatcaatgcacttacaggtacaagatctatatagaagggtatgcgtggtcagtgagtgagaaatacatattagcatgtgactcagtcacattgatggtgaaaccttattactatgatttcttctcaagaactcttcaacctctccaacactattggcccattagggataaacgataaatgtagatccatccaaatttgctgttgattggcttaataatcacactcaaaaggctcaagagatagg

SEQ ID NO: 92752 - DNA, 786 bp, Arabidopsis thaliana columbia
ccaaggtttggttttaagaccgccttcatgcccagctaaaattccttttgaaaattggtttgccggggaaaacatatttccttgaaaaggccagagattgaaattgtcagggtaggtaaggcctggaagactgccccatgccttagaataatagtccaacaaagcgtgaaatgaagctaaggttctaaagagccctcgcgtccgaaacttttgggaagttcattgcgcagcacggttctttcgtctctgatcttgcaaagttacgggtagagctagaaggaacccgattgttggttctagaagctgctgatcatcttgataaatttggaaacaaaaaagctcgaggaattctcgcaatggccaaggttgcagctccaaacatggcattgaaggtactagacacggcaatacaagttcatggagcagccggtgtatcctcggacacagttttagcgcatttgtgggctacagctagaacactgaggattgctgatggacctgatgaggttcatcttgggaccattggcaagttagaactgcaaagagcttcaaagctttaaagcgttttgggatatgcgaattcgattctcagaataagatatcagttttttttttttacatcattaataaaggttgttcttgggtcttttagtacaaacagtaaatctgaataaatttactactagatcttaaaaaaaaaaaaaaaaaaaaaaaaaaaaaagggcggccgctatagaggatccaagcttacgtacgcgtgcatgggacgtcatagtaagtctatag

SEQ ID NO: 92753 - DNA, 773 bp, Arabidopsis thaliana columbia
  unsure (1)..(773): unsure at all n locations
aatctagatagctccgtaaaaaagaaagaaaaaaaacgttctctcgtttctttctattattcaaaatattttcaccaactaaaaaaagatacatcgaaacaaatctctctaatcatatctaagttataacttttctttataaacaataaacaatagctttgatttgaagcaagaggagcaacaatggagatcaccactatcatattcctcatcatatcctctctcaccttctccatcttccttaaactcatcttcttcttctcaactcacaaactcccaccgggaccacctcgttttccggtcatcggaaacatcatctggcttaagaaaaacaacttctccgatttccaaggcgttctccgtgacttagcctcccgtcacggaccaatcataacactccacgtaggctccaaaccttccatctgggtcacagacagatcactcgctcaccaagcccttgtccaaaacggtgccgttttctccgaccgttctctcgctctccctaccaccaaagtcatcaccagcaaccaacacgacatccactcctccggctatggctctctctggagaaccctccgccgcaacctcacctccgaaattctccagccctcgcgcgtgaaagcacacgngccgtcgaggaaatggtctctcgagattctcgtggatctnttcgagacagagcagagagagaaaggncatatntccgacgntttagatcattttacgtcacgctatgttttatttgttggctctgatgtntttcggagagaaac

SEQ ID NO: 92754 - DNA, 518 bp, Arabidopsis thaliana columbia
atacgactcactttagggaaagctcgtacgcctgcaggtaccggtccggaattcccgggtcgacccacgcgtccgcccacgcgtccgtacggctctctccgcgcttgaggttggcgtcggagattaccaacaagagctctctccaatcgtcgtctctttgatatatggcgtctcagcctgcaggtggcagtcctcctaaaccttgggaaaaagaaggaaatacatctggtcctaatcctttcaggcctccttctaatactagcacggctggttcagttgaggcttctggcacagctaatcctggtgaagtagttcctccgcccgtgaacaggcctaatacagctgctaatatgaattcactcagtaggcctgtaccggctagaccttgggaacagcagaattatgggagcactatggggggaggttatggttcaaatctaggtatgacctctgggtatgggtcaggtacatatggttcagcattaggtgggtatggttcatcatatggtggtgggatg

SEQ ID NO: 92755 - DNA, 323 bp, Arabidopsis thaliana columbia
ggcggacgcgtgggttggaatctgacttcagaacgctctgagacaagaatgaataagtactcccgggcgtcgtttcatcctatcagccagaagattcacttcttctcatttctcaactcgataactggtgttgttttgttaattggacttatatcttttctcttcatgcgccatctcaagaatgaactaagaagttactctatcggagatgaagaagagagaaaggaagcaggttggaaactcgtacatagtgatgtatttcgatgtcctcggaacatcagctggctttgtgcaatcttaggaactggtactcagttgctaat

SEQ ID NO: 92756 - DNA, 1547 bp, Arabidopsis thaliana columbia
  unsure (1)..(1547): unsure at all n locations
atagtattaaaaaacgaaaccccaattttacgtttccacatcaaagtgaaatagagaacttcattctctttttttttcatttcatgcctattggcgttccaaaagtaccttttcgaagtcctggagaaggagatacatcttgggttgacatatagtgcgacttgtcagatatatcgggctatatgggatttccccattttctccctcgatcgagatatcctctgtttcgctcaaaaagattgattgaattatcaaaaatttgtaacgcgaagcgcaaaaaataaagtggaattaaatgcagggagtatttagattgatattagattatcaaaatttttttatggtttacgtgatcggactaataaaatgaagtatccaggctccgtttagcaaaaacccaattgataattaatatataatatttttataattactacttctattatatgcaaaattatgataaaaactctataaaaaaaattgaaacagggcgatctaaaactgttgctcaaatcaaatacaaataatatataatataattcaaaatttgttgactatttgacagaagacaagtgaaagaactgaattgaaaaaaaagaaggagtagtaaaaaaagacgcggtatttggttcatttgtcctatatgtgcaaatcaaaatcgggcaaatttttccttttactcggggtagagcataaacctaaaaaatggaataaaaaaaggaagaagcccgttcaggaacaagaaaaaaccatcgccatttcaactgaatctcgatgaaaaaaaaaaatatcaatgaatcaatcatttttttagaggattttaatatctaataaaaggcgccaaaactcaaaatttcttttacttttggggcaagcccttccgttataagttagaaagaaaaaccctctatgaaaaaagggtaggttggaatcaacacattgattttttcacaatttttattgaaccgtatgcaccaaaaggtgcctgtacggctcctaaggaataaaaaattatcctaatcaaccgactttatcgagaaagattattttttttaggccaagaggttgataccgaaatcccgaatcaacttattagtcttatgatatatcccagtatagaaaggatcccaaggaccttnattggttaataacncncctggtggatgggtaatatctggaatggctatttatgatactatgcaatttgtgcgacccgatgtacagacaatatgcatgggattggccgcttcaatagcatcctttatcctagtcggaggagcaattaccaaacgtatagcattccctcacgcttggcgccaatgagtttttttattttcgagaaaaaaatactatgccttcgccatttgaaatatgaattagttaagtaataatagcatggcacttcgaattcaatatgaaattttttagattaaaaaaaaattcgattatatattgaaagagtagtatgagataaggaagaggtttttcaaatgatatcttacctattcgggcacatttcagcgtcacaaactttgttttcacaccgt

SEQ ID NO: 92757 - DNA, 675 bp, Arabidopsis thaliana columbia
acgactcactatagggtttgctggtacgcctgcaggtaccggtccggaattcccgggttgtttcgctcaaaaagattgattgaattatcaaaaatttgtaacgcgaagcgcaaaaaataaagtggaattaaatgcagggagtatttagattgatattagattatcaaaatttttttatggtttacgtgatcggactaataaaatgaagtatccaggctccgtttagcaaaaacccaattgataattaatatataatatttttataattactacttctattatatgcaaaattatgataaaaactctataaaaaaaattgaaacagggcgatctaaaactgttgctcaaatcaaatacaaataatatataatataattcaaaatttgttgactatttgacagaagacaagtgaaagaactgaattgaaaaaaaagaaggagtagtaaaaaaagacgcggtatttggttcatttgtcctatatgtgcaaatcaaaatcgggcaaatttttccttttacttgggggtagagcattaacccctattttatactttaggaaagaggggaaggttcctttcacatagaaattttttataattttaacaaaaatatcaaaatatggtggtggggtgggtgttttctatataaaaaaccctttcctccttggggggcgggggc

SEQ ID NO: 92758 - DNA, 584 bp, Arabidopsis thaliana columbia
  unsure (1)..(584): unsure at all n locations
aggaaaaaaggataatagtattaaaaaacgaaaccccaattttacgtttccacatcaaagtgaaatagagaacttcattctctttttttttcatttcatgcctattggcgttccaaaagtaccttttcgaagtcctggagaaggagatacatcttgggttgacatatacaaccgactttatcgagaaagattattttttttaggccaagaggttgataccgaaatctcgaatcaacttattagtcttatgatatatctcagtatagaaaaggataccaaagatctttatttgtttataaactctcctggtggatgggtaatatctggaatggctatttatgatactatgcaatttgtgcgacccgatgtacagacaatatgcatgggattggccgcttcaatagcatcctttatcctagtcggaggagcaattacccaacgtataggattccctcacggtttgggccaatnagttttttantttcgggggaaaaaatcctttgccttcgccctttnaaanttggatnggtnggaaanaangngtgggcctnggntnaaattgnattttttgggtnaaaaaatgc

SEQ ID NO: 92759 - DNA, 537 bp, Arabidopsis thaliana columbia
  unsure (1)..(537): unsure at all n locations
cnnnnnnnnnnnnnnnnnnnnnnnnnnnnnnnnnnnnnnnnnnnnnnnnnnnnnnnnnnnnnnnnnnnnnccacgcgtccggatttgagttagctccaatggtaattcaactcatgacagagaggaacattcacctgcggggtttggcacatcccatgctatttaagaatctccaagactcattagtcgacacgaagatgtttgacaaatataagataatgggtggagttccagtctcccatttcaatatctacaaactactgcgtgaaaaggctcatgtgcttctgtatcctggaggtgtccgtgaagctttgcatagaaaaggtgaagaatacaagctgttttggccagaacggtcccagtttgtgagagttgcatctaaatttggagccaaaattgttccttttggtgttgttggagaagacgatatctgcnaaattgccctggattctaatgatcaaaggaacatccctatcctcaaggatttaatggaaaaggaacaaagggcgctggcaacataagggaaggcgatgagag

SEQ ID NO: 92760 - DNA, 712 bp, Arabidopsis thaliana columbia
cggacgcgtccgcccacgcgtccgctcaaaagcaccttccttttttttcctattctttctcatcatctttcttattatgaactaaaataaatgttcagacaaaggagccatttctaccatttataattttatattacacaactatatgtgtgtttgtgtgtgtgtgtagccgtggggatttatatatacatataacatatattgacaacctctactactgtcatttagcctgcaaagcccacaaacaaagggctacacaagtcttccttctctctctccctcttcctctctttagatggaataatggatcaatgcttgtaaaggtttgaaatttgatcaagttttggagaagcaaattgaaaaagaaaagaaaagagaagacatggaggtggagaagaggattgtagtgaatggaggaatgaaattgccaataggatacagatttcacccaaccgagcaagagcttatccttcattacttgctcccaaaggcctttgcttctcctttgccttcctccatcatccctgtctttgacctcttcttctctcatcctcttagtttcccaggggaccaaaaggagaagcagaggtacttcttttgcaagaagagagaagtgtcaagtaatgagcatagaatcaagatttcctctggtgatggttattggaaacctattggtaaagagagaccaatcattgcctgtggtaaaacattt

SEQ ID NO: 92761 - DNA, 544 bp, Arabidopsis thaliana columbia
  unsure (1)..(544): unsure at all n locations
nnnnnnnnnnnnnnnnnnnnnnnnnnnnnnnnnnnnnnnnnnnnnnnnnnnnnnnnnnnnnnnnnnnnnnnnnnnnnnnnnnnccacgcgtccgcggacgcgtgggttgcttttctccgtcactgagtaccttgcctctcgagctcccaatcttaaggtacaattgatcttcactatagtcgttcagaatctgatctgcttatagaaatattcagaagtgtgagatagctgctaattggtctttactttgtttttttctcttgcttcacatcagaaaatttaggatcttagagcttttcatagtgaacttaagaacgcttttcgaattagtcagtcttagctctattttgtctgtgtgtgtattttctggacacgagacctttgtttcaatttctataagtgatttcggtttacattttaaaagcttgatttattcccattgaaataaatattcatgatgagtaaatctgtgcatttgtatcaaatttttagtgctttgcagattttattttaacgcacgctcttgtttggtggttgaccttgt

SEQ ID NO: 92762 - DNA, 784 bp, Arabidopsis thaliana columbia
tatacgactcacttagggaaagctggtacgcctgcaggtaccggtccggaattcccgggtcgacccacgcgtccggtttctctggtggagacaaagacataaccagaacacattctttgatgttaaagatgggaatcatcatgaggaagtttcacttggaaacctgaggagatttggtttcagggagcttcagattgcgaccaataacttcagcagtaagaacttattggggaaaggtggctatggaaatgtatacaaaggaatacttggagatagtacagtggttgcagtgaaaaggcttaaagatggaggagcattgggaggagagattcagtttcagacagaagttgaaatgatcagtttagctgttcatcgaaatctcttaagactctacggtttctgcatcacacaaactgagaagcttctagtttatccttatatgtctaatggaagcgttgcatctcgaatgaaagcaaaacctgttcttgactggagcataaggaagaggatagccataggagctgcaagagggcttgtgtatctccatgagcaatgtgatccgaagattatccaccgcgatgtcaaagcagcgaatatacttcttgatgactactgtgaagctgtggttggcgattttggtttagctaaactcttggatcatcaagattctcatgtgacaaccgcggttagaggcacggtgggtcacattgctccagagtatctctcaactggtcaatcctctgaaaaaacagatgtttctggcttccggattctttctcttgag

SEQ ID NO: 92763 - DNA, 717 bp, Arabidopsis thaliana columbia
  unsure (1)..(717): unsure at all n locations
gcctgcgggcacgggtccggaattccggggtcgcccctcgcgtccggaagaaacatgactggtgttaatgatgatgatgataagaacttcaaagaagaaccagagattcaagttttaagcgacgacgatagtgatgaagaacaagttaaagacgtaggtgaagaagttagcgacgaagacgatgatgatggaagtgaaggagatgatgatgatgatgaggaagaagaagaagatgacgatgacgatgatgatgttcaggttttgcagtctttaggtggtcctcctgtacaatcagcggaagatgaagatgaagaaggtgatgaagatgggaacggtgatgacgatgatgatgatggagatgatgatgatgacgaccatgatgatgaggatgaggatgttgaagatgagggggatcttgggacagagtacttagtgaggccagttggtagagctgaagatgaggaggatgcaagtgattttgagccggaagaaaatggtgtgggagaggatatagacnaaggagaagacgatgagaatgataactcgggtggtgctgggaagtcagaggcttcgccgaagaagaagagagctcctgaagaagatgaagaggatagtggtgatgaagatgatgacagacctccaaagaggtagtttttggatctgacacaacacaatgagaccagagagctttttatgttttttttctaaaaaaaattt

SEQ ID NO: 92764 - DNA, 478 bp, Arabidopsis thaliana columbia
tacgactcacttagggaaagctggtacgcctgcaggtaccggtccggaattcccgggtcgacccacgcgtccggcagcttggtggatttatatgcattcgaacagtcgaggcatgggaatttcgctgatatcgataagaagatagtggaaactggtgaagatatcgttttctttggcaataagagtacttcatggtctggaaattctagtaaagggaactccgggtcgaaaataaaggaaccaaatgagattcatcggcttgttgaaaactctggaaagcatgacagctataaggggtagcattcttttaagatctgaagatgtcgtagatacctcagcgaactggagagagggttctgttaagactctttttcaatcttcgagaggggatgcgtcaaacagttacaatctgggtagcagctccgacaagagagagggaaagaagaaggcccactttagtgatgtgagggtggcaatc

SEQ ID NO: 92765 - DNA, 990 bp, Arabidopsis thaliana columbia
  unsure (1)..(990): unsure at all n locations
ctggagtggctttgctggtgccacagagctagataaatttttgggacccaagggtccagcaaaaaggagtggactgagaggagcggagattcagagtcaaaggcctatggttggtgtgcacgtgcagacgactttgaatctcaaggtccaataggtgagtacctctccaaggagggacagctaagaacagtttcagatatttcgcaaaaaaatgtgcaggatagaaacactgttctggaagaactttcagatatgattgctatgacaaacgaagatctgaacaaggtccaatacagttacaacaggacggcaatgtcactgcaaagggtcctagatgagaaaaaaaacttgcaccaagcttttgctgacgaaacaaagaagatgcagcagatgtcacttcgccatatccagaaaatcctatatgataaagagaagctaagcaatgaactggatcgtaagatgcgggacttggagtctcgggccaaacaattggaaaaacatgaagcactaactgaactggataggcaaaagcttgatgaagacaagagaaagagtgatgctatgaacaaatccctacagttagcctcacgtgagcagaaaaaggctgacgaaagcgtcttgagacttgtagaagaacatcagaggcaaaaagaagatgctttgaacaagatccttctgcttgagaagcagctagacaccaaacagacactggaaatggagattcaagagctaaaaggcaaattacaagtgatgaagcatctgggggatgatgatgatgaggcggtccagaagaaaatgaaagagatgaatgatgagctggatgacaagaaagctgagttagaagggctagaaagtatgacctcagtcttgatgacaaaagaccgccaaagcaatgatgagatacaagcagcgcggaaaaanatgattgcgggtttgacaggattgttgggtgccgagaccgatatgggagtaaaaaggatgggagaactt

SEQ ID NO: 92766 - DNA, 832 bp, Arabidopsis thaliana columbia
  unsure (1)..(832): unsure at all n locations
nnnnnnnnnnnnnnnnnnnnnnnnnnnnnnnnnnnnnnnnnnnnnnnnnnnnnnnnnnnnnnnnnngggccgacccacgcgtccggtcgagacagatagagagagctgaaatttctgtgagaagattttcttccgacattttctctttccaaacactgttctacacgtagtcggaaatctcggaaaaaccaatctccgagtcagagagagagagagaggcgttcactgttgtaaaggattaagctttgggtaagaagaagatgaagaacaagaccaatttaggtctctcagtcttcttcttctttatatgtctcgtttccgtgacatcagatctagaagctgatcgacgagctctaatcgcacttcgtgacggtgttcatgggcgtccattgctgtggaatctaacagcaccaccgtgtacttggggaggagtccaatgtgagtcgggtcgtgtcacagcactccgattacccggtgtgggtttatcgggtccattaccaatcgccatcggaaaccttacanagctcgaaactttatcattccgattcaatgctcttaacggtcctctcccgccggatttcgcaaacctaactcttctccgttacttgtatcttcaaggaaacgcattttccggcgagattccttcgtttctcttcactctaccaaacattattcggatcaatctcgcccagaataatttcttgggtcggatcccggataatgtcaattctgcaacccggttagctactctttacttgcaggataatcaactcaccggtccaatcccggagattaagaattaagctcaacagtttaatgtctcatccaatca

SEQ ID NO: 92767 - DNA, 843 bp, Arabidopsis thaliana columbia
ggcgtgctttttttacatttcaaagttctctaagctttggccgttcgcagtaccggtccggaattcccgacacaatcgaaacgaagaatcatttgaagaagaagaagatcgtgagaagcttaatgggttggatcccgtgttctgggaaatcgagtgggaggaataagacaaggaggaacggtgaccacaaactcgacaggaagtcttctgattgttctgtgtctacttcagagaaatctagggccaagtcgtccttgagtgaatccaaaagtaaaggctctgatcacattgtggcacaaacgtttacattctctgagttagctactgccactagaaacttcagaaaagaatgtcttataggagaaggaggatttggtagagtttacaaaggatacttggccagcactagccagacagcggctatcaagcaacttgatcataatggtttacaaggaaacagggagttcctcgtcgaggttctcatgttgagtcttcttcatcacccgaatcttgttaacttaataggatattgtgctgatggagatcaaaggcttctagtctacgagtacatgcccctaggttcacttgaagatcatttgcacgacatttcacctggtgagcagccacttgactggaacaccagaatgaaaatagctgccggtgctgcaaaaagttttaagtatctgcatgacaaaaccatgcctccagtgatctatcgagatttgaaatgctcaaatattttgctcgatgatgattacttttcaaaactattcgacttcgggtgggcttaaacttggccccaattggggaacaaagtttcatgtgttcccactccgggtttat

SEQ ID NO: 92768 - DNA, 377 bp, Arabidopsis thaliana columbia
atgataaacaatacattgatgtgagattcactggtagtgaatatcagtcgtctcgttcaatgattacggtcaatgttacagaagagtttcatcaatggcggattttttgtcttgtagcgggattgattgtgattttgttagcacctgttgttagcagttggctaccgttttactatacgagttctatggcggttggtgtttttctcgttgttttgattattatcttccaggttatgaggttattacctactgggaggaagaatgttatgtatcttgcgttttatggatctgttgttggtgctggatctttcattctacatcaattctcaatgatggtgaatatgattcttgttaattttgggttgagtgaggatatg

SEQ ID NO: 92769 - DNA, 358 bp, Arabidopsis thaliana columbia
gcgcgcatgttttggctggaggaagtgcttgtctctgggcttcactccagcaattcttgttacactggtcactatgtcgtgatatgtggctatgatgctgttagggatgagttcgagatcagagatcccgccagttccaagtaatgttctgttatatctcattgcttcaatacttacaaatcggtgctctacagcattttcttggaaatgttatatctggttgccatgttcatcgatcagcaatacacattgaaactgtttagtaatgagttaaaatctaaacataatgggaagagagatttaggttggtttatactaagatattccatcttttagatgcgagttctcattactattt

SEQ ID NO: 92770 - DNA, 786 bp, Arabidopsis thaliana columbia
  unsure (1)..(786): unsure at all n locations
atgtcccttaccctagactttctcttccaaaatggaacccccagtttcacatccttgattaatttttatgttgataatcctgttataatcattggaactccgggaacttatgaagccaagatcagccaaaaagactgttctttaactaccgaaagcttaaatctagaagcacaacgggtaaagactacattagcaaaatttcttacatcaacttgtttccttcatgtttccaataggtcactatgtcgtgatatgtggctatgatgctgttagggatgagttcgagatcagagatcccgccagttccaagatacatgagaggatctcgtcaaaatgcctggagaatgcccggaaatcgtttggcacagacgaagatcttctcctgataaacttggagaatatgaggaaccagaacggatattagaatagttgtcatcatcatcatcaaatcagttctggatgagaatgaaacctgagtgttttctcccagaagaacatgaggtgaaaagtatacgtctctatacatacgtctttacatatggatgctgccaaagaagaaggaaaagatatacatatgtcatgaaatatctcagtatctgtttgcgtttatgagattcttgtgttggcagttataattccttgttgtacaaattggtgaatagaaaagatttgattgattaaagtgttcgaaaaaaaaaaaaaaagccaccnnnnnnnnnnnnnnnnnnnnnnnnnnnnnnnnnnnnnnnnnnnnnnnnnnnnnnnnnnnnnnnnnnnnnnnnnnnn

SEQ ID NO: 92771 - DNA, 332 bp, Arabidopsis thaliana columbia
aatacagacggatgactaagattctgaaggaactccataagtcttgtcaaaaggaagatggaactgatgatcagaagaaaggaagtcagctgcttgaggtttatgcaattgaaattcagatttacactgaaacgaaggacaacaaaaagcttaagcaactataccataaggcacttgccatcaagtctgccatacctcatcctaggatcatgggtataatccgcgagtgtggtggaaaaatgcacatggcagaacgtcagtgggaagaagcagcgacagacttctttgaggcttttaaaaattacgatgaagctggcaaccaaagacgtata

SEQ ID NO: 92772 - DNA, 623 bp, Arabidopsis thaliana columbia
  unsure (1)..(623): unsure at all n locations
nnnnnnnnnnnnnnnnnnnnnnnnnnnnnnnnnnnnnnnnnnnnnnnnnnnnnnnnnnnnnnnnnnnnccacgcgtccgaaaaaatatgcaatcactactcttgccgccggcgagttcctccggcgtatccgccgtcgcgctacggccaggtttccagcactcatttaaccaccaaagcctctctactcgctccctgccattgtttaatccacttctcttagctccgaagaagaaaaccaccatctcctcatatcaatcgccaccgtctctgtccgtctacggtttccaaatcggaggatctaaacctagtttcacaccatccacggtggcattttcatatccgacttctccgtcttccgttcccggtgataatgaggtcgacaaagcaaaactcgctcaggttgcaaagagattggagaagacttcaaggtactttaagagactagggagtattggtttctgggggcagcttgtgtcaactgtggttgcagctgtgattctatccttctccattggtgtaactgggaaacctacttcacctgctactttctatgctactggtagnggggattgctgctgcgtttgtctcgggtttctgggcgtttgggtatattccggctct

SEQ ID NO: 92773 - DNA, 492 bp, Arabidopsis thaliana columbia
cttacgcgcgggctctgttcttcattctctggctccattatcttccccaacaaacccatcttcatcccccgctcttttcctcaaccactccgtcactcttctgctctctcgtactcctccttgaaaatgaccgatacccatatcccaggaaaccctaattcgtcccctatccaatctcccaccaaacccgagtcgcttcgttccctcgaatttcaattgggttcttctttcaccgccgatccaatcatcccgccgccgaatcagatcgtcatcgttattagcggtccaagcggagttggtaaagacgcagtgatcaacaagcttcgtgaggttcgtgaaggtcttcattttgttgttaccgccactagtcgtccgatgcgacctggggaagttgatggtaaagactatttctttgtctcgagagatcagttcttgtcaatggtggagaacgaagagcttcttgaatacgcacttgtttatggagaatacaaa

SEQ ID NO: 92774 - DNA, 804 bp, Arabidopsis thaliana columbia
  unsure (1)..(804): unsure at all n locations
nnnnnnnnnnnnnnnnnnnnnnnnnnnnnnnnnnnnnnnnnnnnnnnnnnnnnnnnnnnnnnnnnnnnnnnnnnnnnnnnnnnccacgcgtccgagagaatccagattcttcagatgtcataactctgttgatcgttcatagcacttagaatctttagatggatctgctgttaaaggagaagttgtagtaccattagttgaagatctaaataaagaagcttctttggaagatgaagaaaaaacttctgttgaacctcttctgagctgccacagatcatgaagttcgatagccaaacttctgagcatagtgattcaccttgcactgaagatgttgttattgaagcttcatctgatcctcctcgaggagccattggttcgtcatccgaggatgtcacgatgggacttcagaatatgcttgttgttcgggaggggaatgacactcctgtgtgtggacgtttgatctcagatgccactgagcttgtaagatttcgatctccgaatgatcctgaggcttttagatgcttggtcgataaaatatcaagctcagaaagacggntctgtgctggtgtcaagtctacaaagcggcctgatatcaacaaagatattccagccaatggatctagtaatgaaaatcagcctttggctgtgcttcctacaaacgagtctgtctttaacttgcttcgtggtggcatgaaagacgctgccttgactttgagatgccagngaaacggaagaaggatattgttngtgatcagcantctgtgtgtgacaataatgtggctgggtgatcttcctcgagctgtg

SEQ ID NO: 92775 - DNA, 536 bp, Arabidopsis thaliana columbia
tttaggtccactatagaagagctatgacgtcgcatgcacgcgtacgtaagctcggaattcggctcgagctccaaaactctatctctctctctcctccacacaccaatttcttcatgaccttcttcttctagcagagaagattaaagaaacccccaaatccagcttatactaaatgggtcatgataacatcacaaagctcgggagtctactcgtaaagctacacaaaggtccttcaagttggctttgtcttcatcctcgaccagaccgaaccagcaacggcggacgaatcaagctcgtcagatccgacggttctttacaagtctacgatcgtcccgtagtagtctcagagctaacaaaagacttcccaaaacacaaaatctgtagatcagacttactctacatcggacagaaaacccctgttctgtctgaaaccgaaacacttaagctaggtctcaactacttcctcctcccatcagatttcttcaagaacgatctctctttcctcaccatcgccacccttaaaaccccacaaaacg

SEQ ID NO: 92776 - DNA, 533 bp, Arabidopsis thaliana columbia
taatacgactcactttagggaaagcacgtacgcctgcaggtaccggtccggaattcccgggtcgacccacgcgtccattctcttgtaaagttacaaaatgtccttttggctaagtttgatcttttgctttttcacatttgcttcctcatctccaccggatgatcctgtcaactgtgaattcggaaacacaatgtgcacggtgacgaactcgtacggcgcctttcctgaccgctctatatgcaaagcagcaaaggtggagtacccaaggacggaggctgagctggtctctatagtggctgcagccactagagccggccaaaaaatgcgggtcgtgactaggtactctcacagcttccccaagctggtttgtactgatggtaaagacgggactctcataagcaccaagtttctaaaccatgtggtgaccaccaacccggaggccaagactttgacggttgagagcggcgtgactctaaggcacctgatcgaagattcagctaagtttgatctggctttgcctacgcaccgtattg

SEQ ID NO: 92777 - DNA, 494 bp, Arabidopsis thaliana columbia
acgactcaccttagggaaagctcgtacgcctgcaggtaccggtccggaattcccgggttgacccacgcgttcgcgccacgcgttcgcggacgcgtgggtttcaagcttctctgtgtgtgatctccgttggtcaacaacaactacgacagcttattgagcagagatggatcatcaatttggatatggtgttgaagttactgggttatctccatctgttactcataatgatcttatcgatttcttctctttctctggtactatccaagatattgatattgtcaggtcgggtgagcaagcttgtactgcttatgtgatgtttaaggattcttattctcaagaaactgctgttttactcactggcgcaacgatattggatcagcgtgtttgtataactcgttggggacaacatcacgaagagttcgatttctgggatgcggctttccccgaggttttgaagatgaatcggactcacaacattatgctcaacgaagcga

SEQ ID NO: 92778 - DNA, 444 bp, Arabidopsis thaliana columbia
cgctaacattctctctctcagtgaacctttagaagttaaatctgtttcatcaccggaaagtttcactaactcttcttctctctctcggagtattgattcccggcgtttagcaatggaagaaagtagacaactcgaatcgtcgattgatcggctgctgaacgaagagaaacagatgaggctcgcagaaaatgtcgccggaactagaaaagcagctaccgagattcttaagctttgtttcgaagctaaggattggaaacttctcaacgaacagattttgaatctctcgaagaaacgtggtcagcttaagcaggctgtacaatccatggtgcaacaagcaatgcagtatattgatcagacactagacatagaaactcggattgagcctattaagactctaaacaatgtagcttgctggaaagatatatgtcgaaatcgagagagctc

SEQ ID NO: 92779 - DNA, 524 bp, Arabidopsis thaliana columbia
  unsure (1)..(524): unsure at all n locations
nnnnnnnnnnnnnnnnnnnnnnnnnnnnnnnnnnnnnnnnnnnnnnnnnnnnnnnnnnnnnnnnnnnnnnnccacgcgtgcggggaccagtgagctgattggaggagatgttaaagccaacaatctttgtgagattcccaatctcaggaggaatttcaccagtaaaattgttgttagctagacgcagtctttccaaattcttcagctttcccaggtctgcagatatattccctgagggccagttttggtgaagctctaatgcagtaaggttctgaagattaaataattcaatgggaaggcttcctgttagctggttatcgcctagcattagctttgtcagtgacttgcaggttttcagatcacgagggatgtttcctgataacttgtttgaaccaagactcagaagtattagcgtctgaaatctgcagaagtgggcaggaattggaccagacagagaattggcagacatgtcaagaacagaaaaattgctatagaaaccgattaagggaggatctttccttcaa

SEQ ID NO: 92780 - DNA, 387 bp, Arabidopsis thaliana columbia
aaatccccacttcacgaatcgcaaaagatcaaggtttattgatctattgcgaaattagggtttgtgaattcgaatcggagattaataatagattttgtgatggagtgttcatcacgcatagaagaatcttgatttcgatctcgatgaaattaggaatcgagggattttatttataattgagatggtgaatattaaaagccctttacggctattcatagaggagtcgattaaggaattaattaggggtttcaggagacaaaggatcaaatggagaaatgcgtttcttcttggttctataatgactaccattgttgttctgcttcaatacacaacgtttttaattcttctctgatgaagaagaaaccgagtcttcttcttcttcgccta

SEQ ID NO: 92781 - DNA, 389 bp, Arabidopsis thaliana columbia
cccacgcgtccgcccacgcgtgcgggaaagcgccttgatgctggatttggatagccttggtttcaatgttaaggctactcttcaagggaacaccttcaaactccgagttccgtttccaagacgcgcacaagacagaaaggatgtcaagacattgattgtggaaatgcttcaagctgccaagtccaattagttgctaaaataaagatggaaaagctcttccatctgaatcctgctacaacaagaaaagcttcctccaatacacattttatcttatctatcagttgcaaaaagaacactcatttagtcctgtatatatctcaacaagactagaactagatgtatacatgaaaaaaagttatcaataaagatttctgaagttgtattggctc

SEQ ID NO: 92782 - DNA, 337 bp, Arabidopsis thaliana columbia
acccacgcgtccgcccacgcgtccgctcctccctcctgacgctctccttgttccgttcgataaccgaaccttaaaagctaaagcttgggctaaacaaaatcacatgccagtaccaaagaaacttccttgtccagataactgcggagtcagcattaactggcacgttagcacggattacaaaaatggttggaccgcaagggtaaccgtttttaattggagagatttcgcgtttgaggattggtttgtggcgattgatatgggaaaggcaggtccaggatatgaaaacgtttactcctttaatggaacacgtgttccaccaagcaatcgaaccgttatc

SEQ ID NO: 92783 - DNA, 490 bp, Arabidopsis thaliana columbia
  unsure (1)..(490): unsure at all n locations
nnnnnnnnnnnnnnnnnnnnnnnnnnnnnnnnnnnnnnnnnnnnnnnnnnnnnnnnnnnnnnnnnnnnnnnnnnccacgcgtccggttcttccccaacgaccaatcttatgttgcatcaatttcacaacagaagccttaccttttcattacacgcatattgcttcttcaaagtttccttttagataaattcttagtctgagtaacatctctttcttgtcttgggggtttctctgtaattgcagctgaatcggatcttgggcaatttttaaattccgagtcaacgagtttctcatctaagggtttgattccttttctttttcatctttgtttagtcaaatctgaagactttgttaggtttcaatgtgctgagaagtagaagaagcttcgttggcaagtccgaatcttttcttcttctttttctggggttatattcttgccaacatgtttagcttgcaagcattattnctttgagtagctgtttatcctaca

SEQ ID NO: 92784 - DNA, 921 bp, Arabidopsis thaliana columbia
  unsure (1)..(921): unsure at all n locations
gaagagcaagtgtttagcagactgctcgagtgagagagagacaacatgtttgaatacagtttgtctcccctttcagttcgcgagtcagctcgtccagagaaatccaaacattgcgagagtcagattccttcgaatcgagtactagcgtaggcttttctaaccagcttatggccactctctnacgtcatcgaaagaagcaatgcagtaatctccagtaactccgtccctccggtaccttccgttatcctcngatccttaacactatcaccaaacatcgtcgttgctcagacagaggatgtgccngtaacgacgcgccgttccaaacgcagtgattcattcgcttcaataccacacttctctgcntgagtctcttgatgctaatcagaaccaggacgattcgagtatcgagaggttttgggttcaaccatcgatagagaagctgttgatgaaacgacaccgttggattgaaagatctccaccgtggagaatcttgtttacacaatgtgggttttctccggcgagtntgagtcagatggcggaagctcaggcggagtgtttgttgcagagaaatccggtgagagggtttcacgttgagaaaaggcagtcttcacttgtcatgtgttggcaaaggaaagaacttgttactgtctctgcttggaaatgttagacgaagaagaaaccacaaatctctctctcgcttagctaatttctctgtttttctttgtcagattttaaaatgttgttatgttgttcaatgatgttcttagtttcgagactgttgtgttttaacattttaaggaagtcagaatatataatcaaaatctccttttgtaaaaaaaaaaaaaaaaaaaaagnnnnnnnnnnnnnnnnnnnnnnnnnnnnnnnnnnnnnnnnnnnnnnnnnnnnnnnnnnnnnnnnnnn

SEQ ID NO: 92785 - DNA, 934 bp, Arabidopsis thaliana columbia
  unsure (1)..(934): unsure at all n locations
nnnnnnnnnnnnnnnnnnnnnnnnnnnnnnnnnnnnnnnnnnnnnnnnnnnnnnnnnnnnnnnnnnnnnnnnnnnnnnnnnnccacgcgtccggtaaccacaagtctccgtttcaaagagcagcttctcacatcgctgaagctctcctctcactcatccacaacgaatcatcaccaccgttaatcacgccggagaatctgattctccgaatcgccgcttacagatccttctccgaaacctcgccgtttctccaattcgttaacttcacagcgaatcaatcgattcttgagtcctgcaacgaatcagggtttgatcggatccacattatcgatttcgacgttggatatggaggacaatggtcgtctctaatgcaagaactcgcttccggagttggaggaagaagaagaaacagagcatcgtctctgaaattaacagtctttgctcctccaccttctacagtctccgacgagttcgagcttcgtttcacagaggaaaatctcannacattcgccggagaagtcaagattcctttcgaaatcgagttactaagcgtagagcttcttctaaacccagcttattggccactctctctacgttcatcggaaaaagaggcaatcgcagtgaatcttccagtaaactccgtcgcctccggttaccttccgttaatcctccgattccttaaacaactatcaccaaacatcgtcgtttgctcagacagaggatgtgaccgtaacgacgcgccgtttcaaacgcagtgattcattcgcttaataccacacttctctgctggagtctctggatgctaatcagaaccaggacgattcgagtatcgagagggtttgggttcaccatcatagagaagctgtgtatgaaactgacaccgttggattgaaagatctccaccgtggagaatcttgttacaaatgtggttctc

SEQ ID NO: 92786 - DNA, 623 bp, Arabidopsis thaliana columbia
aatacgactcactttagggaaagctcgtacgcctgcaggtaccggtccggaattcccgggtcgacccacgcgggcggggaggtacaggttttacaccggagaaaccgtatacgccttcgcagacgcgcttacctacactaaattcgaccatcagctaatcaaagcgccaagactcgtctctctcagtctcgacgagaaccacccttgccgatcatcggagtgccaatctttggacgcgatcggacctcactgcgagaacgccgttgagggaggatcggatttcgaggttcatttgaatgtaaagaacaccggagacagagcgggaagccacacggtgtttctgttcacgacgtcgccgcaagtacacggatctccgattaagcaactactaggatttgagaagattcgtctgggaaagaggaagaaacggggggttagggtttaacgtcaatgggggtaaggatctgggtgtggttgatgagaccgggaaaaggaaaatcgcgttaggtcatcatcttctccatgtaggaagcttgaaacactctttgaacattagtgtttgattcgacggctcgttttgtttttaacttaagatattaattatggtaataaaatgagacagc

SEQ ID NO: 92787 - DNA, 536 bp, Arabidopsis thaliana columbia
  unsure (1)..(536): unsure at all n locations
nnnnnnnnnnnnnnnnnnnnnnnnnnnnnnnnnnnnnnnnnnnnnnnnnnnnnnnnnnnnnnnnnnnnnnnnnnnnnnnnnnnccacgcgtccggaagttttgctttttgctgctagagcttcaagagttgagaaccaagatgctattgatgctgctatggttggaatgctcgctgatccaaaagaggcaagagctggaatcagagagattcacttcctaccattcaatccagttgataagcgaaccgctttgacgtttatcgacagcaacggaaactggcaccgagtaagcaaaggagctcccgagcagattcttgatctctgtaacgcgagagctgatctgaggaagagagtccactctacaatcgataagtacgctgagcgtggacttaggtcattagctgtttcaagacagactgtaccagagaaaacaaaagaaagctctggtagtccatgggaatttgttggtgtgttgcctctgtttgatcctccaagacatgatagtgccgaaaccattagaagagctctagacctcg

SEQ ID NO: 92788 - DNA, 660 bp, Arabidopsis thaliana columbia
tttaaacaaaacttaaaccggttgttaatacaaaataaagccgaggtaggcttgcaagagtaatgaacaggttttgatgcggtttatgtacatgacacatggcaaaacatgattggctacatgaacgattttatctaacaagcaagatagagatgagattaggagacaaggagcaatgtcgatttcttcgttggggtctccacgcgcccagccaacttcttcatcatcttcatatacgtacttaggaagctcttctcgcatctttgggctagttacgtcttctttgttatggacaaagagtaaatctcaccacacaaacacaaagctcaagaagcaaaagctatgtgttagaaattcagctcaagagattccaaagacacttgaggaagattccaagtttgtacctttagatcctcaagatcctcgattcggccctccagttttgctgttgcttggccttcaacttcatgaagcacaaaagatacaagaacttctcaaggaactcgatggcgaattcatggagattgtgttctgtacagacgatatgatcaagcgttcgttatgggaagcagttaccacaaaacagcctgacctgaagagagtgaaaatcgcggaatcactgcctcggatctgcttcttatctggtttgacaggagagga

SEQ ID NO: 92789 - DNA, 503 bp, Arabidopsis thaliana columbia
  unsure (1)..(503): unsure at all n locations
antttcctgggtttttcctccaaaaaaggagggnggtnnaccncggggtttangnaaggaaaccccggncccgancccggnttnncccccccggtgaggttgcccccgccgagggggggaaaagaaaagggggctgaaagatcagagagtaatgaaaagaaaaaccagaaacgaaatcggagtcaatctcacagtgaatatgacactgacgaagaggataggagaaaagggaaaacaagaaagtccaagttggaaagtgctgatagagaaggcaaggatgatgaaaacttcgatgaatacatggaggggatgttcccgggtaatgggtgatattcgagactttcaagtttcaaaaggtgaccatctacatcgcaagaatatcttttatatcataggctagattgagtttgaaccctgaaatgtaaacacttacatagccccttattcactgaaagaaattgaattttaatatcgagaccataacatcaaatacttttattatc

SEQ ID NO: 92790 - DNA, 381 bp, Arabidopsis thaliana columbia
gacccacgcgtctagcaaagcctctcagcacggtgagagattccggtgataacgtcctccgatggcgacaactcaaccatgtcttatcggccaaataatcgctgttcctcaatttcacatcctcttcagccccagaaattctctaaagccggagctctcgaccaacaaacgcacaaatttctccgtatctatcggtctacgacattccttcgcttcttctatatcaacctgtaaccctaaagccccatctttaagctgtctgcgaaattgcgccgctgttgatggagctgatactagttcgagtgaggataagtgggattgggattgggatcgttggaaccgtcacttctccgagattgaagaagtcgagagcgttgtttc

SEQ ID NO: 92791 - DNA, 526 bp, Arabidopsis thaliana columbia
atacgactcactttagggaaagctcgtacgcctgcaggtaccaggtccggaattcccgggtcgacccacgcgtccgcggacgcgtggggttatattcattctctcttttctctttccattttggctcccaccgacgtcatcaatctctaccggagacttccgccgattctcacaccgttcttcttctctccttccgattccggattccaatttcgttccttttttgttttctctcaaaacccctaaattttcttcctttcttcgatctggattttttgtgttccccaaatttcaagactttgatctgattccttctaagatttctccaaagcaaagatcttttttttgttttttgggatctctgtattgggtgatgggcacaactagggtctgctcggaggtttcttctggatcttcgaaatcgcttagccaatctctcacggtatcgacctctaccacagaaacagggaatgggttccatgaattcaagaactgggggaccctctcgctaaagggggtgggggcg

SEQ ID NO: 92792 - DNA, 534 bp, Arabidopsis thaliana columbia
  unsure (1)..(534): unsure at all n locations
tnnnnnnnnnnnnnnnnnnnnnnnnnnnnnnnnnnnnnnnnnnnnnnnnnnnnnnnnnnnnnnnnccacgcgtccgcacaagtgattaattttggagaaaaccacttctaccagaaatttttagcatggggagtgaagtcaaccgtccactagctgattttccagcaaatatctgggaagatccattaacttctttctcaaagtctgacctcggaactgagacgttcaaagagaagcatagtacgctaaaggaggcggtgaaggaagcttttatgtcttccaaagcgaatccgatagagaacatcaaattcatcgatgctctatgtcgccttggtgtctcctatcactttgagaaagatatcgtagaacaattggataagtcatttgattgtcttgattttcctcagatggtaagacaagagggatgcgatttgtacacggttggaataattttccaagttttcaggcaattcggctttaaactttctgccgatgtgtttgagaangtcaaggacgaaaatgggaagtcaaagg

SEQ ID NO: 92793 - DNA, 366 bp, Arabidopsis thaliana columbia
ggcaagcagcaggctctggttaaaggatcaggtgcaccgatcagacatggttcagtccacgttaagttccctgagccagacaccgaaggcaacaagatcttcgagaccttagaaaatgagttccagaagcttggaaatgaccagaagatctgagtgatctacaacccttataacacgaattgcccataagaaaccggaatttgtctctggttgatgagcagtatttaagataagaatcaatcacctttacgtgtattactagtttcgcttgcatcagctcgatgcaggttttgtttaaaaagaagatggaacacaattccctcggaatggatattttgccctagtaccattatatatatagaactc

SEQ ID NO: 92794 - DNA, 793 bp, Arabidopsis thaliana columbia
  unsure (1)..(793): unsure at all n locations
cagcatctatcgactcactatagggaaagctggtacgcctgcaggtacccggtccggaattcccgggtcgacccacgcgtccgcatcaaatcatctccgatactcacaaccgaaataactaacccctcctcaacaaaaaacaacaaaacatgtacactccatcatacttaaaatattcaataatctcaattatatccgtattattcctccaaggaactcatggagacgacggaggttggcaaggtggtcacgccacgttttacggcggcgaagatgcttccggcaccatgggcggagcttgtggctatggaaatttgtatggccaaggttacgggacgaacacggcggctttaagtacggctctattcaacaacggactcacgtgtggcgcgtgctatgagatgaagtgtaacgatgacccgaggtggtgtctcgggtcaacccatcaccgtcacagctacaaacttttgcccacctaaccctggcctctccaacggttatcggaggttggtgcaatcctcctcttcagcatttcgacctcgccgggccagcttttcttcagttcgctcagtatcgtgccggcattgttcctgtctctttccaanaagaccatgtatgaagataggaggaataaggtttacgatcaacggacactcatacttcaacctcgttctgatctccaacgtaggaggagcaggagacgtacacgccgtctcaatcatagggctaaaaacacagtcgtggcaagcgatgtctagatactggggaccaaactgcagagcaattatacatg

SEQ ID NO: 92795 - DNA, 519 bp, Arabidopsis thaliana columbia
  unsure (1)..(519): unsure at all n locations
ctaatcttcgatcttgagctctatttccgggtttatacatttccttcaattcaaaaccttttctttcattgacaaatgatttgaaccaaaaaagttgtttcctttgccaaaatctgaagcgccatgactgaagttcttcactttccttcatctccaagcgcttctcattcatcttcttcttcttcttcttctccttcaccttcttctttatcttacgcctctcgctctaatgcgactctcttgattagctctgaccacaaccggagaaacccagttgctagattcgatcaagatgttgactttcatgcctcaatcgaagaacaagatttgagaagacggagcagtaccgatggaggagaagaagacgatggtggggaagatcagatttcgttgttggctcttcttgttgccattttnaggngatctttgatttcttgcaagagtaaccggaggaggcttttttagcatggagattgggatggccntccaattttaaganacgnggngcaggtnancntt

SEQ ID NO: 92796 - DNA, 818 bp, Arabidopsis thaliana columbia
ccggctctatacgactcttatagggaaagctggtacgcctgcaggtaccggtccggaattcccgggtcgacccacgcgtccgtacggctgcgagaagacgacagaagggttagggcaaaaggcaaacaaagagttcaattccgtcggtgacgatttcaattcattgtctaacagtattgaaggaggtaccaagtggttagtcaacaaactcaaaggaaaaatgcagaagccattacctgaattgttgaaggaatttggtctaccagttgggatcttcccacaggatgctacaaactatgaattcaacgaagagacgggtaaattgactgtattcatccctgagacatgtgaagttgggtacagagattcatcggttctgcggttttcaactacggtaacgggttacttggagaaagggaagctagcagaagtggaaggcatgaagacaaaggttatgatatgggtgaaagtgacttgtatctcagctgattcatcaaaggtatatttcccagccgggattaagaaaagcagaagcagagatgcttatgaggtaatacgacctggtgttggtgttgataaattctaaaacttatagctcaatttttatgggccaattaaagttccaacttcctaagtaatgtttttgtgtgtatgttgtagtacttcttgtgtaaaaaaaaatctgattcatcaaacctttactttttaatgtataagaatgttggtaaaaaaaaaaaaaaaaaaaaaaaaaaaaaagcggccgctctagaggatccaagcttacgtacgcgtgcatgtgacgtcaagtaattctatag

SEQ ID NO: 92797 - DNA, 404 bp, Arabidopsis thaliana columbia
agttttccgattgcaagggttaaacggagatgagagggctgcaccatttcaagagaatctcaatctctcgatctctcttctccttctctaatgccacttctcctggggcagtaacgactaggaggtctctttattctttgagcaggtcgttgttgtcatcaaccccgtacgccgccggtggatgctgccgagaaacgcctccgcttcattctccgtggtctgctctgcaacgccgcggtgttaaggttaacgcgattcagctaagggcaggaaatgtaattgagcgaacagggcgtacttttcgggttgtagaagcagagcataagcaacaaggtagaggaggagcttccatacaggttgagcttcgtgatgttgacactgggaataagcttaacttgcgtctt

SEQ ID NO: 92798 - DNA, 355 bp, Arabidopsis thaliana columbia
tgagccggcgaaatctcctttctcatccctaaaattgtcgggtccatcttgcctcctccgattatccaaggtcacaattcgtcttctccttcttcagattcctctctaaaccctagctctgagcatggcaacaactcttcttcttctctctctcctcttccctcctctcctccttcccggatctcttcttccaccggaactcgattctccggacactctgaatcctctcacaatttctccggtggctctagggaaccgagtgttgcagctgaggagggacatagccgtggatcttccaaagagatgacacaaaatggagcagggaaggagagtttttccccacctaatgcagata

SEQ ID NO: 92799 - DNA, 2323 bp, Arabidopsis thaliana columbia
  unsure (1)..(2323): unsure at all n locations
aacagatcgagtttctctttccctcctcgaaatttcctaaatccacacatcacgaagccgaagcagccatgagtaatcttcactgatctctctacacattcaccgtcggcttctcaaatgcaggatattctcggatcggttcgccgatccttggttttccggtcgtctttggccggagacgatggtactagcggcggaggtcttagcggattcgtcgggaagattaactctagtatccgtagctctcgaattgggctcttttctaagccgcctccagggcttcctgctcctagaaaagaagaagcgccgtcgattcggtggaggaaaggggaattaatcggttgcggtgcttttggaagagtttacatgggaatgaacctcgattccggcgagcttcttgcaattaaacaggttttaatcgctccaagcagtgcttcaaaggagaagactcagggtcacatccgagagcttgaggaagaagtacaacttcttaagaatctttcacatccgaacatcgttagatacttgggtactgtaagagagagtgattcgttgaatattttgatggagtttgttcctggtggatcaatatcatctttgttggagaagtttggatcttttcctgagcctgtgattattatgtacacaaagcaacttctgcttgggctggaatatcttcacaacaatgggatcatgcatcgagatattaagggggcaaatattttggtcgataacaaaggttgcatcagactcgcagattttggtgcttccaagaaagttgtagagctagctactgtaaatggtgccaaatctatgaaggggacgccttattggatggctcctgaagtcattctccagactggtcatagcttctctgctgatatatggagtgttgggtgcactgtgattgagatggctacggggaagcctccctggagcgagcagtatcagcagtttgctgctgtccttcatattggtagaacaaaagctcatcctccaattccagaagacctctcaccagaggctaaagactttctaatgaaatgcttacacaaagaaccaagcttgagactctctgcaaccgaattgcttcagcacccgtttgtcactggaaagcgccaggaaccttatccagcttaccgtaattctcttacggaatgtggaaacccaataactactcaaggaatgaatgttcggagttcaataaattcgttgatcaggaggtcgacatgttcaggcttgaaggatgtctgtgaactgggaagcttgaggagttccattatatacccacagaagtcaaataactcaggatttggttggcgagatggagactctgatgacctttgtcagaccgatatggatgatctctgcaacattgaatcagtcagaaacaatgttttgtcacagtccaccgatttaaacaagagttttaatcccatgtgtgattccacggataactggtcttgcaagtttgatgaaagcccaaaagtgatgaaaagcaaatctaacctgctttcttaccaagcttctcaactccaaactggagttccatgtgatgaggaaaccagcttaacatttgctggtggctcttccgttgcagaggatgattataaaggcacagagttgaaaataaaatcatttttggatgagaaggctcaggatttgaaaaggttgcagacccctctgcttgaagaattccacaatgctatgaatccaggaataccccaaggtgcacttggagacaccaatatctacaatttaccaaacttaccaagtataagcaagacacctaaacgacttccgagtagacgactctcagcaatcagtgatgctatgcccagcccactcaaaagctccaaacgtacactgaacacaagcagagtgatgcagtcaggaactgaaccaactcaagtcaacgagtcgaccaagaagggagtaaataatagccgttgtttctcagagatacgtcggaagtgggaagaagaactctatgaagagcttgagaggcatcgagagaatctgcgacacgctggtgcaggagggaagactccattatcaggccacaaaggatagtgaacggctaaagagaaactgtatgtttctttcttatgtttcaaaattacttcttcgtatttttttttgttggtggggtaatttcatgagctagtatgatatatgtagatagttcttcaacggttacatagtattattatttattattaatttaattgccaaaaaaaaaaaaaagnnnnnnnnnnnnnnnnnnnnnnnnnnnnnnnnnnnnnnnnnnnnnnnnnnnnnnnnnnnnnnnnnnnnnnnnnna

SEQ ID NO: 92800 - DNA, 462 bp, Arabidopsis thaliana columbia
ctctcatattctaagtttgctatatatgtaactttcttccttgtagactttcatttgcagcaaaaatagtttctcatatggagaggcaaatcataaacaggaagaaacgagtgttttctcttgaaccaaacaagaaccctagtgcagttttcacgagaaaatacacaagccacttggttcctgcactcaagaagctcaacatgaacaagaactcttcaaaacaaaccgtgaagcatgaagtagatatggctttggccttgtctgctcaagaatttgcatggagccgtttcttgctgcagaagctatcgtcctcatcgaatccaaccactaccactagttcttcttccgatggaattcggattcttgaaagacccgataaagaaggcggaaacgaagaaggagggattagaggagagactgagggaaatgaagaagcttttgccaggtggggaagagatgaat

SEQ ID NO: 92801 - DNA, 437 bp, Arabidopsis thaliana columbia
acacctatcacttaaattttattcaccatgttctctctcaaatccttaatctcctcacctttcacacaagcgcaccactcatggattattcaccaacccgattacccgacccgttaatccattaccacgtaccgtttccttcaccgttaccgcttccatgatacccaaaagatcctcagctaacatgattcccaaaaaccctccggcgaggcaacagctctaccaaccgttccgaccaccgtcatctcccattccaacccaattccgttcactcgactccgccggtaaaatcgaaatcctcgccggtcgaatggctctctggttcgaatacgcacctcttatctcttctctttacacctatggtttcacttcttcaaccatcgaagaactcaccggaatctcaagcattgaacagaaccgtttaatcttttgtgctc

SEQ ID NO: 92802 - DNA, 422 bp, Arabidopsis thaliana columbia
  unsure (1)..(422): unsure at all n locations
ggtgtcagtctcatagttttctggttttaaaacggaaaatatatgcgttagggtattgttggataacgaggaaggagtaaacgaaggaagaagagggagatgaaggcgttggggtattggttaatggtggttggttcactgagactagcttctgtttggtttggtttcttcaacatttgggctcttcgtctcgctgtcttctctcagaccaccatgagtgaagttcatggacgtacattcggagtatggacactcttgacctgcactctctgctttctttgtgcattcaacctcgaaaacaaaccattatacttggctacgtttctatcattnatctatgcgttaggccattttntgnctgaatacntcttttnccaaacaatgaccatcgggatctntnaantgtggggtttnttttcaag

SEQ ID NO: 92803 - DNA, 930 bp, Arabidopsis thaliana columbia
  unsure (1)..(930): unsure at all n locations
atgnnnnnnnnnnnnnnnnnnnnnnnnnnnnnnnnnnnnnnnnnnnnnnnnnnnncccacgcgtccgcccacgcgtccgcccacgcgtccgcggacgcgtgggaatcaaaattcatttttttttcctctgatcatcatcgaaccctagtttcgtcttttgggtacgtttgatttcgcctctccactttgtcaatttcgagtttttgtggtttgggtttttttcccgatttagcctaacagataaagtttcgagttttgtttctcttaatcatcgtagatactaaccgaatcatcatggagaagaactccttcaagctttctaatcctctggagatgagaatggctgagtctactcgtatcagagcgaaataccctggaagagttcccgtgattgtggaaaaagctggacagagtgatgttcctgacattgacaagaagaagtatcttgtaccagctgatctaaccattggccaatttgtgtacgttgtgaggaaaagaatcaagcttggagctgaaaaagccatctttgtctttgtcaagaacacattaccaccaactgcggcattgatgtctgcaatctacgaagaacacaaagacgaagacgggtttctctacatgacatacagtggagagaacacatttggtggatctttctactgctaattacctcagcttctacgtctgatcctcttgatgattgtacattctcgtcgaccttaataatgtcattttactttcttggtttaaccttttgagctctcttactatctcttgcatttgaagatggtatttgaaacaagattctaatttgactctctagtttctttgttttaaaaaaaaaaaaaaagnnnnnnnnnnnnnnnnnnnnnnnnnnnnnnnnnnnnnnnnnnnnnnnnnnnnnnnnnnnnnnnnnnnnnnnnnnnnnnnnnn

SEQ ID NO: 92804 - DNA, 761 bp, Arabidopsis thaliana columbia
aatacgactcactttagggaaagccggtacgcctgcaggtaccggtccggaattcccgggttgttctccagtttcaatcaaactcaatttcttctcaacgaaccctaatttccaacaaatcggattcagtttcttcttcggagactaatcgaatcgcaatggctaagagttccttcaagatctctaaccctctcgaggcaaggatgagtgaatcttctcgaatcagagagaagtaccctgacagaattcccgtgattgtggagaaggctggacaaagtgatgttcctgacattgacaagaagaagtatcttgtaccagctgatctaacagtgggacaatttgtatacgtggttcgtaaaagaatcaagcttggagctgagaaagctatttttgtctttgttaagaacacattgcctccaactgctgcattgatgtctgcgatctatgaagaacacaaagatgaggatgggttcctctacatgacttacagtggagagaacacttttggatctcttaccgttgcttgaataaaaatcgatctttggatgactttgatgtacatacataaatcaggaagataaagatgtacattgcttccttcttttctctggcttttaactttgctttggatgtttggatatctttccctttgggtttattaatcgtcagaaacttctcctaaaaaaaaaaaaaaagggcggccgctctagaggatccaagcttacgtacgcgtgcaggcgacgtcataactcttctatagt

SEQ ID NO: 92805 - DNA, 677 bp, Arabidopsis thaliana columbia
  unsure (1)..(677): unsure at all n locations
cgcgaagaggaagcaccacagcttcaacatcagccttcgagggtacaattggatacttagctccagagtttgcttatatgaggaaagtgacaacaaaagccgatgtattcagcttcgggatcataatgatggagctgatgacgaaacagagaccaacttcgttgaatgatgaagattcacaagacatgactttgcgccaattggtggagaaatcgattggaaatggaagaaaagggatggttagggttcttgatatggaactcggggactctattgtttctctgaaacaggaagaggctattgaagactttctgaagctttgtttgttctgtacaagctctagacctgaagatcgacctgatatgaacgagattcttacacatctgatgaaacttagaggcaaagcgaattcatttcgagaagatcgtaacgaggatcgagaagtttagcagcaaagcttttttgatgacattttttcgactttgccaaactctgttacgaaggttgaatactttggacgtaaaacgttctgattttgcttttcgttatgtatttctgttttatataaggttgaaatttggttttaaaaaaaaaaaaaaagnnnnnnnnnnnnnnnnnnnnnnnnnnnnnnnnnnnnnnnnnnnnnnnnnnnnnnnnnnnnnnnnnnngtcctaaat

SEQ ID NO: 92806 - DNA, 622 bp, Arabidopsis thaliana columbia
  unsure (1)..(622): unsure at all n locations
tctacgactttctatagggaacgctggtacgcctgcaggtaccggtccggaattcccgggtcgacccacgcgtccgcatatttcgaaatcgtcacactttgttgcgtgtcgtcttctctctctcataattcttgagtttcacgtctcaagatttgatcacttctgccaattttccagattgatctctctaattatggcttccatgagtttcgccttgaatcgcttctctggactctcctctaaaaccaccttatcagctgacttcgatccatcctctcgccggagttttctaccgccgactagagttggacttaagatctcttccgccgccgaatcggagcctgatctcagtgtcactgtaaatggcctgaaaatgcccaatcctttcgtgatcgggtcgggtccaccgggtaccaactacaccgtcatgaagagagcctttgatgaaggttggggggccgtcatcgccaaaaccgtatctttagatgcatccaaagttatcaacgtgacacctagatatgctcggctacgaaccggatccaatggctcagccaaaacagatgtaattggggggcagaacatagactttttaatgaacccctttnaacatnttaaggggggc

SEQ ID NO: 92807 - DNA, 481 bp, Arabidopsis thaliana columbia
ggcgcaaaaaaatggggaggaagcggaagcacagtgagacggaagctccggcgccggtgaaaaagagcgatgagcctgctccggatagacccaaaaggactctattgggatggaaagataagagtgaaggtgaagctgagaaagctaaagctttgacttcatctggattcaagaacaaagagaaggttttggtgacttgttctcgtcgtatcagtttcaggtatcggagtttgatgttgaacattgtttcacttctaccacactgtaagaaagacagtaaagttgaagcaaagagtagcaaaggcgcgactttgaatgagctcattgagcttaagaattctaattcctgcttgttcttcgagtgtaggaaacataaagatctttacatgtggatggtcaaatcccctaatggaccatctgtgaaatttttggtaaagctgtgcacgcaatggaagagatgaaactcacttgaaattatttt

SEQ ID NO: 92808 - DNA, 789 bp, Arabidopsis thaliana columbia
  unsure (1)..(789): unsure at all n locations
ctcatttggcgtcaaatgcttgcaaagagcgaaagcgaaacagaaagtatggcaaagaaattgttggagttgttagatggaaaggaaggagcaggactaacggagataatcgaaacaacaatgagtgaagaagatggagagaagaagaagatgatgagaggattattggggaagagtttgggagaaggtaacacagtgtatgagagagttacaagttgtatatacaaagcggctcgaggagctttattggctgggaatggagaaaatgggaagagaatggttgaaacagagatgaagaaagtaggaggaggtggaggattgaaagaaagggttttagagacagctcgagcccttggtgttgtagcttgtgtctcagtcagagttcatggtccatggttgactcagctcatgccacaacattgaaccaaaccaaaccactcggtaaacttgtatagcctcttgtatatattatgatatatatcaataataattacacgtgtaatgtaagatgcattttgatttgaagatgcattatgctgatttgtaaaacataaacggctttggtccctttttagtgtgtccgaatgaataaggtgttcaaaatagcgtgtgatttgtaatttgtaatttgtaattagtctgaaacgttgtatatatgaatattcttcaattatataaaagcttgctttcaaatttnnnnnnnnnnnnnnnnnnnnnnnnnnnnnnnnnnnnnnnnnnnnnnnnnnnnnnnnnnnnnnnnnnnnnnnnnnnnnnnnnnnnnnnnnnnnn

SEQ ID NO: 92809 - DNA, 519 bp, Arabidopsis thaliana columbia
cgactcactattttggaagctggtccgcctgcaggtaccggtccggaattcccgggtcgacccacgcgtgcgagaattgagacttttgggaggaagaagaaagaaatttgttttctgaagaaggtggaggtgccaagagaattatcttaatccttgttcctcctcctcctcttcttcttcctcattggttgtttatgtttttatatataatctaggttttgttagtccaactctatctttctctctcttgatttcaacaacttggtttcaagttcataaacaagagagagaaagaattgttagtctccatgagtaggttatgttatcccataaccccaattggctatctatttatcacctccatccatttatactcctagaaacaacaaatctaaaggcaacacaacacaaatagtaccttctaaatgcttctatactggctcatcacttgcctctctttcttcttcttttccaaatccttatcctttcctaattggcatctaaaccaaaatttgctct

SEQ ID NO: 92810 - DNA, 564 bp, Arabidopsis thaliana columbia
  unsure (1)..(564): unsure at all n locations
nnnnnnnnnnnnnnnnnnnnnnnnnnnnnnnnnnnnnnnnnnnnnnnnnnnnnnnnnnnnnnnnnnnnnnnnnnnnnnnnnnnnccacgcgtccgcggacgcgtgggcggacgcgtgggcggacgcgtgggcgcaacgtcctctctattacttccaactccattctcatctcgattaacccctcttcctcacttgtcctctcagaccaatcttgcttccgcgtccctcctgggattttccttcacaaacagagattgatctttgtgtgtggcattcacatgacgagagggtggtactgacaagaatggcgagaatctacaatagtcggttgcctcgagaagtcaaggaagctttacaagctatagcatcagagtgggaagatgtgattgattcacaggctctgcgtgttattcctttaagaggtgcagtgacaactgaggtgtctcagatcaaatggcccactagggaaaaaggtccttctggctaggttatgggtaggattcatggtgaacgtgtggagattgtctttgatcgcgaggatgagagcaggacattcgagttcat

SEQ ID NO: 92811 - DNA, 437 bp, Arabidopsis thaliana columbia
  unsure (1)..(437): unsure at all n locations
gactcgcgggtcgacgcacgcgtccactgtgagacgacgaaagaagggggagggtttcttactctgctgcttcttcttcttcttcagtagagcgagattctctcgcgctctctatcgctacatataaccatgggtttatcaacgaatctccatagcctcgacctccgttcaactttcttcgccggtctacgtacatctccaatcccttccaatttcatcaaaatctcttccatttccaaccctagacgcgatatctccaccatcagagcccaagtctccaccatcagcctcgagacctccgttaaacagcgtcaagacgaaatcgaatctcttttctcgaagcaaccctctcagcaggactccgatcggaaacgaaacgggaagagttccanaaacggagcttctgggatatcttcaggtgtgaagctagagaacat

SEQ ID NO: 92812 - DNA, 364 bp, Arabidopsis thaliana columbia
acatgaatgttgttaacaatcttgagaataagaagatgaagaaaataggtcttcacgcaagagcacttggagaaaaccgtgagaaagtaagaaatgctttcaaaagtttttgcaagaagtttggtggttatctaggaggtaaaactcaccgaagagaactaactgaagctaaatacaacgcggattctcacgttggtgctgacgtaaaaggatttgaatccattatcgataagttttctgacttctttaatggttatcttggaggtcaccgaagagaactcttttaccaagtaccagcaggcgaattcgccgatgaaaaaattgctattcatgcttctttggacgccaaagctcacggaagaaa

SEQ ID NO: 92813 - DNA, 532 bp, Arabidopsis thaliana columbia
attctcttcatgtccgaaagtttccaccctgttgggcttgagtacatgtgcccgccagcggagagattctttgctctgggtcgggttttgggaaatatggttacttcaccttgcagaaggaccgtccgctaggctactaaagcacatcatacgctgctatctttcgcttgacagatacccccagagcatgcgatgcacttggaagttgccttccagatcttctgagggatgctactttcagtggttgtctctatgatgacccacctgcaatgcaatggctgcagcaactgctccacaacgttaacgttggcgggagagcacctcaagggttggctcatatgtttgtgaattaaatcgaacccttatagtctgggcagaaactgttattcattggacaaaaaaagttagttggaaacagaattacagatgagaaacagaaacccaaccaaagattttgagtttgatggatatatgtatttggatttcttgaccgtcttatgatgttgcaatcaatataactaaaattccattg

SEQ ID NO: 92814 - DNA, 458 bp, Arabidopsis thaliana columbia
accccaacaaccacactcattacttttctttcttcatccgccttctattcttcgaatctgatcaggagatcatacaggagcaaataactagagtgctgttggaacggctaattgtgaacaggccacatccatggggacttctaatcacattcattgagctaataaagaacccaagatatagcttctggaaacaagccttcatcagatgtgcgcctgagattgagaagctgtttgaatcggtagccagatcctgtggtggcctgaagcctgtcgacgagggaatggtttcgggaggttgggtctcagacaattctcactagctctttagctttcaacttgtatatatgtatgcgtattttgatattatgttgtaacaattatacatacagtaggagagattttaggagtcttagtttatttatttaacttcaagattcacaaacatgttttctaattac

SEQ ID NO: 92815 - DNA, 608 bp, Arabidopsis thaliana columbia
  unsure (1)..(608): unsure at all n locations
tgattctgccccnnnnnnnnnnnnnnnnnnnnnnnnnnnnnnnnnnnnnnnnnnnnnnnnnnnnnnnnnnnnnnnnnnnnnnccacgcgtccgtttcactaaggaaaaggaatcagtttttggtggaagtaattgatccgatctaggaaaaatgggaggaggtgatcatggacatggagcagaaggaggcgatttcagagccaaagtctggggtatgactggtgggcctaactgtaggcccaaacattggcgtcggaacaccgccattgctatgttcggcgttttccttgtgtgcatccccatcgccaagctatctgctaagcttgagcaaagcccacacttgccagtacgcccaattccttcacagatctggtgcaagaactttgggaaccagggccgattaccaaaaagagcattaaaagtttttttctgggtttggagagaacccttttatgggtcttcttttttgcagacaatgggagcctaaaaaaagcccttctaccttggtctatggatttcagagtcctgtgaacataataatatgtctttttccttgccttgtagaacaacaccctggaatctttccaaattaagaaatttcatgtttt

SEQ ID NO: 92816 - DNA, 648 bp, Arabidopsis thaliana columbia
  unsure (1)..(648): unsure at all n locations
accncccangaannaaccccagcccnccgaaaaaaaccaanccnagnnaggaaanatgccgcccccnngccctcgattaaacccggtgggatggaaaattgaaantnagatnaattggttgggccccaaatgattagagttgaacctagtaagaggaatcatccggcggcgaggttgatgtcggcgttgatggatttggagttggaagtgaatcacgcgagtatgtcggtggttaacgatttgatgattcaacaagcgacggtgaagatgggttttaggatctatacgcaagaacagctcagagcaagtttgatttcaaaaatcggttaaaagggtgtgttttgggaagtttagaaagttatggggtcaaatcataattaattcgttttagtggcttcagtaattttgtagattttagttttgtaagaaaaaaatcttaaaatagagcgacaagtttcttcttttgctctatgtttgagtctgtatcgttttattgttgtatctcctcaatgagtaaacttgtatatattgatatgagtaatatgagttagttactgaaaaaaaaaaaaaaaaaaaaagggcggccgctctagaggatccaagcttacgtacgcgtgcatgcgacgtcaagactcttctatagtggtc

SEQ ID NO: 92817 - DNA, 534 bp, Arabidopsis thaliana columbia
  unsure (1)..(534): unsure at all n locations
tcgactcactatanggaaagctggcacgcctgcaggtaccggtccggaattcccgggtcgacccacgcgtgcgcggcgtttcactcgcaagactgactcgaaaacaccatcccagcctctggtatcccgtcgctctgcaaactatcaaccgtctctttggcagcacgaatatctcctctcgctcggtaatacatatgtgaaagaggacaacgtcgagagagttacgttattgaagcaggaagtgagtaaaatgctcaatgaaacggaaggtttactcgaacagctagagctcatcgacactttacaaaggcttggagtttcttaccattttgaacaagaaatcaagaagacactaacgaatgtgcatgttaaaaatgtgcgagcacacaaaaaccggatagatcgaaaccgatggggagatttatacgcgaccgcccttgagttccgactcctaaggcaacatggtttcagtatcgcacaagatgtttttgacggaaatattggagttgatttggatgataaagacatcaaggg

SEQ ID NO: 92818 - DNA, 2743 bp, Arabidopsis thaliana columbia
  unsure (1)..(2743): unsure at all n locations
nnnnnnnnnnnnnnnnnnnnnnnnnnnnnnnnnnnnnnnnnnnnnnnnnnnnnnnnnnnnnnnnnnactttctcctatctctctctctctcattaaaaacgtgtttttttttaccggtcaccggtttatggaatgactgattaccggctacaaccaacgatgaatctttggaccaccgacgacaacgcttctatgatggaagctttcatgagctcttccgatatctcaactttatggcctccggcgtcgacgacaaccacgacggcgacgactgaaacaactccgacgccggcgatggagattccggcacaggcgggatttaatcaagagactcttcagcaacgtttacaagctttgattgaaggaacacacgaaggttggacctacgctatattctggcaaccgtcgtatgatttctccggcgcctccgtgctcggatggggagatggttattacaaaggtgaagaagataaagcaaacccgagacggagatcgagttcgccgccgttttctactccggcggatcaggagtacaggaaaaaagtgttgagagagcttaactcgttgatctccggtggtgttgctccgtcggatgacgctgttgatgaggaggtgacggatacggaatggtttttcttggtttcgatgacgcagagcttcgcttgcggtgcgggattagctggtaaagcgtttgcaacgggtaacgcggtttgggtttccgggtcagatcaattatccgggtcgggttgtgaacgggctaagcaaggaggagtgtttgggatgcatactattgcgtgtattccttcggcgaacggagttgtggaagtcgggtcaacggagccgatccgacagagttcggaccttattaacaaggttcgaattcttttcaatttcgacggcggagctggagatttatcgggtcttaattggaatcttgacccggatcaaggtgagaacgacccgtctatgtggattaatgacccgattggaacacctggatctaacgaaccgggtaacggagctccaagttctagctcccagcttttttcaaagtctattcagtttgagaacggtagctcaagcacaataaccgaaaacccgaatctggatccgactccgagtccggttcattctcagacccagaatccgaaattcaataacactttctcccgagaacttaatttttcgacgtcaagttctactttagtgaaaccaagatccggcgagatattaaacttcggcgatgaaggtaaacgaagctccggaaacccggatccaagttcttattcgggtcaaacacaattcgaaaacaaaagaaagaggtcgatggttttgaacgaagataaagttctatcattcggagataaaaccgccggagaatcagatcactccgatctagaagcttccgtcgtgaaagaagtagcagtagagaaacgtccaaagaaacgaggaagaaagccagcaaacggtagagaagagccactaaaccacgtcgaagcagagagacaaagacgcgagaaactaaaccaaagattctacgcgttacgagcggttgtaccaaacgtttcaaaaatggataaagcttcgttactcggtgacgcaatcgcttacatcaacgagcttaaatccaaagtagtcaaaacagagtcagagaaactccaaatcaagaaccagctcgaggaagtgaaactcgagctcgccggaagaaaagcgagtgctagtggaggagatatgtcgtcttcgtgttcttcgattaaaccggtggggatggagattgaagtgaagataattggttgggacgcaatgattagagttgaatctagtaagaggaatcatccggcggcgaggttgatgtcggcgttgatggatttggagttggaagtgaatcacgcgagtatgtcggtggttaacgatttgatgattcaacaagcgacggtgaagatgggttttaggatctatacgcaagaacagctcagagcaagtttgatttcaaaaatcggttaaaagggtgtgttttgggaagtttagaaagttatggggtcaaatcataattaattcgttttagtggcttcagtaattttgtagattttagttttgtaagaaaaaaatcttaaaatagagcgacaagtttcttcttttgctctatgtttgagtctgtatcgttttattgttgtatctcctcaatgagtaaacttgtatatattgatatgagcccgggggaaaaggaatcagtttttggtggaagtaattgatccgatctaggaaaaatgggaggaggtgatcatggacatggagcagaaggaggcgatttcagagccaaagtctggagtatgactggtgggccctaactgtaggcccaaacattggcgtcggaacaccgccattgctatgttcggccgttttccttgtgtgcatccccatcgccaagctatctgctaagcttgagcaaaggccacacatgccagtacgcccaattccttcacagatctggtgcaagaactttggaaccaaggacgattacgaaaaagagcattaaaagtttttttcttggtttggagagaaccctttaattggtcttcttatttgcagacaatgtgagcataaaaaaagcgcaactagctttgtctatggatttcagagtactgtgaacataataatatgtctttttccttgccatgtagaacaacaccatggaatctttccaaattaagaaatttcatgtttttttccatattaaaaaaaa

SEQ ID NO: 92819 - DNA, 441 bp, Arabidopsis thaliana columbia
  unsure (1)..(441): unsure at all n locations
caatcaacgccgggnttgatacaagaaagcgagcgagagaagtttcttcggtgattgatttagatatcacggcggctccgatgaaccctccgccgcaaactccaccgcaagttataggacgtcgacaaaatccgaatgttgtatcaaccggtctacgtttgtctcgtgaacagtcgcagaatcaagaacaacggtttttgtcttttccgataaccggagatgtcgccggagaaatcaaaagccaaacggacgaattaaatagatttcttcaaatccagggagagcagcttaagcgcatgttagctgaaaacagtgagaggaactatcgtgagcttcttgaggacaacgggaggatcagtaaggcggagattaaggtgggaaaagaagcggagtccgggaaagccacacgtcggcatgtcgagctagaagcacgtgcgactc

SEQ ID NO: 92820 - DNA, 647 bp, Arabidopsis thaliana columbia
gaaagtttttaaaggaagaatttgggtttccaggtacagatttctgtcagaatgttttaccaggaagacctccggcgaagaagatacccccagaagccgtcggagacaatcatcatcgtcttcaacccaagaagcgattcgtcacacccgttgattccaacgcatcctctcgccggcggtcaatcgatagaccaccccttcacctacagccgccacggtcatcgtgttcatacccagcagctccaccgataataacggcagctgcggcggttggggaacaagagggtagccggagctaataaggtacagccaccagtgctgccacgttgcaaatcggaaccgaggaagtcagcgtcgaagctagcgccgaaagcttgtttttggaaaaataggaagcttgagccacaccctccggcaaccgtcggtgtcggcggcgccggagtagggttctagaagaagaagacgtgagtgggaataaaggaaactatttgggtgtaatagtaatttcagaatactatttgtccttgtttgtaaatttgttttgttagtcataattcattttctaaaaaaaaaaaaaaaaaaagggcggccgctctagaggatccaagcttacgtacgcgtgcatgcgacgtcatagctcgtctatg

SEQ ID NO: 92821 - DNA, 573 bp, Arabidopsis thaliana columbia
  unsure (1)..(573): unsure at all n locations
gcccctncgcaccncccccccctggtgtctnctttctggcnacccaacccccaaagnagggggccngttttnttccggaagnacnctntgaccntncncctcggggtttcccgagccgttgttcccaatgggntggggaattncgcttcncagaggggggancaaggagtgaaggcccaagcagcattggttatgctagcggatgagtgggatgaaggaatatgaccgagggaagaaaaagaagataaggattaaagaggagagctatagagggcctaacccgttccagatgcttgcatcgaagagacaaaaagagacaaagaagaaatggacacaaagcataactgacgcaaagacagcctacaggatatgaataaggactataatcttatacatatatgtaatccacatgctgctgtatctggcgtaaagtaatgttaacaaatgaggaaaagataggctatagacagtagtagacattgttcgttatctcttttcctctcagttttgttctctttgggataaacagagaaagacccctatcccctgttttgtgngnttnttttcactttt

SEQ ID NO: 92822 - DNA, 426 bp, Arabidopsis thaliana columbia
attatgttctttctactgtcgccgtaaaggatattcaaaagcggtagaggcggcgatggcggatcttttaccacctcttacggcggcacaagtcgatgctaagactaaagtcgatgagaaagtcgattactcgaacctcccttctcctgttccctatgaggaactccaccgtgaagctctcatgtctttaaagtcggacaattttgagggtttacgcttcgactttaccagggcgttgaatcagaagttttctctcagtcatagtgtaatgatggggccaaccgaagttcctgctcagtcacctgaaactactatcaaaattccaacagcccattatgagtttggtgccaattattatgacccaaagttgctgctcatcggaagggtaatgactgatggtagactaaatgcgagactgaaagcaga

SEQ ID NO: 92823 - DNA, 387 bp, Arabidopsis thaliana columbia
gattgatatcttgttgcaggggaactctggttccatgtgttaggtattttcctttcgtcgacctgattcatcttgtgcatgtcgattctgaataatgaacgaagaaggctgcgtcccgcacaactctgatgttgttaaacaaaagtctatagatcaaagagcccctctttccggggaacctaaatgtgttatctgcagtcgttatggtgagtacatatgtgacgagaccaatgatgacgtctgcagcctcgagtgtaagcaagcactcctgagaagggttgacagcgctagagtttttcctgccacagatgagtgcttctatgttagagacccaggatcttcttcccacgatgctcaactacttagaagaaagcttgatattcatgt

SEQ ID NO: 92824 - DNA, 521 bp, Arabidopsis thaliana columbia
  unsure (1)..(521): unsure at all n locations
nnnnnnnnnnnnnnnnnnnnnnnnnnnnnnnnnnnnnnnnnnnnnnnnnnnnnnnnnnnnnnnnnnnnnnnccacgcgtccgcccacgcgtccgggagcaaacacggcaaggtacctatccacatgcgaaaactgtgtatggattgaatatccaaaggcactcgctgcaaggagatggtactcaacacaagccactcttcctgatggaactttcatcgttgttggaggccgtgacgctctcaactacgagtatatccttccggaaggacaaaacaacaagaaactctatgactcacaacttcttagacaaacagatgatccagaagaaaacaatctttacccttttgtttggcttaacactgatggtaacctcttcattttcgccaacaaccgatccattcttcttagccccgaaaacaaacaaagggctcaaagaggtccctcaacttcccggtggtgcgcgtaactaccctgggtccgctcctcgggtttttncccatcccgctctacgtgcaaaaccc

SEQ ID NO: 92825 - DNA, 548 bp, Arabidopsis thaliana columbia
  unsure (1)..(548): unsure at all n locations
nnnnnnnnnnnnnnnnnnnnnnnnnnnnnnnnnnnnnnnnnnnnnnnnnnnnnnnnnnnnnnnnnnnnnnnnnnnnnnnnnnnccacgcgtccgctctcttccttttgctttcgcatcttcttcttcgtcaacgaatcctcggactctccggcgatgccccgtcgattaaacgacggcgagcctggccgttttaccgccaccgttcttcttttaatcggtttaatctcttgtgttatcgtctacgctgttttctcttctgtcctccgtccatcccaagatcctacactcgttgattccgcggttcgattcaaagaggagccgcgagatcacgatgcaactgaagacggtgaaggtgggtgttgccgtggaattgataatctggagctttggggcccggcggtgaagtggggcacggattctaagtttaattcgtctgatgggtggtgtaaagcttggaaaggtatgtggagggcgaacaagggaccttggcttggggaaggatgggcgcgcccgcccgatgcgcgaggggtggcggcggagtgcgggg

SEQ ID NO: 92826 - DNA, 532 bp, Arabidopsis thaliana columbia
aatacgactcactttagggaaagctcgtacgcctgcaggtaccggtccggaattcccgggtcgacccacgcgtccgcgaattctcgacactaagaatttctctggggtttctctcctcaaactcgatctgattcttttgttctagggttttcactcaattggatctttctcaatctcctctctctcaatttgattattttgttctccgtgatggttgctggaaaggggaaatcaagtagaggccatggtgggagaaccgaaggaggtgagagaactggtgggagaaccggaggaggtgagagaaccgaatgaggatcgtcatctcatgcctccaacccttattcttcgaacgcgactaattcagtgactcaatcatctagagcaacgcttccttctcagtacccagcgaggtcacaaacaccgactcctatttctttgccatcaccgcatgtcgctcaacaacatcctcttaattatcaacagccgcctcctttatcaacatctgcatccttatcaaatttctcagcatcaa

SEQ ID NO: 92827 - DNA, 528 bp, Arabidopsis thaliana columbia
  unsure (1)..(528): unsure at all n locations
nnnnnnnnnnnnnnnnnnnnnnnnnnnnnnnnnnnnnnnnnnnnnnnnnnnnnnnnnnnnnnnnccacgcgtccggtgaaacgcttataaaaataaaccggtttaatttcaccggtttaccttccgccgtagatatcagccgcaatgtacattctcgacaccggagctcgattctccgccgtcagattctcaccggtattcaatcctcctccaacatctctccgtagacgatacttcatcgtaagagctaatcttccattcccaaagcatcaagctaagtatcataaagagcttgaggtcgccattgatgctgttgatcgagcttgtcgtctctgtgttgatgtcaaaagatctcttttttcttctaaagagaagattgttgagaagaatgatcaaactccagttacaattgcagattttggagttcaagctttagtcagcttggagctttcgaaattgtttccttcaatacccattagtggctgaggaagactctcatttttgtgcgtgctaataaccttgtaagct

SEQ ID NO: 92828 - DNA, 530 bp, Arabidopsis thaliana columbia
  unsure (1)..(530): unsure at all n locations
nnnnnnnnnnnnnnnnnnnnnnnnnnnnnnnnnnnnnnnnnnnnnnnnnnnnnnnnnnnnnnnnnnccacgcgtccggtggcatatgacttttatagacaccttatcaaaatatcttgatttttatttacattattaatttttttcttgttttttcactaccggccacgccatttaaaaagtttggtgactttattttactggttgttttattattgaataatatttcttagttaattttgtcactactaatccggtaatcccaaatctacttaagtatttatgtaagattcaatgttctttttcttcttataatctgaagattccaaaattaaaataatttttgaacttaattttaggatcacaaaagaaaaggagtggggagggtgtgcaaataaaaaaaagtgctagatggaatgtgacacanatctagataaggatgatgagtcattgaagtgggacctatnaaataaagtattctagcctcgaactttgtgaaattatacaaggaggccattttgggatcgaagt

SEQ ID NO: 92829 - DNA, 507 bp, Arabidopsis thaliana columbia
atacgactcactttagggaaagctcgtacgcctgcaggtaccggtccggaattcccgggtcgacccacgcgtccgggtggtggttcgtacacaggacagatgttgaacgatcatagtggtgccacgtataatgttaatgggatccgacggcggtatttgatccagtggttatggagccacgttgttagttactgtaccggacccaatgcgcttgattagtgaatgaatggtatggtttgtgtttaaatttgggaagggtaattttgtcttttggaatttgagctcgacattgtggaattattatgatcaagaatgggtttgttgtgtcgatgcataattaaaattagttaatgatagttatgaggaaagtcacgtatgttgcttatctttcttcttcttgttaaaacaaagccaatcttaatgcataatatatctttgggtgcaaaaaaaaaaaaaaaaaagggcgggccgttctaaaagatccaagcttacgtacgcgtgcatgcg

SEQ ID NO: 92830 - DNA, 540 bp, Arabidopsis thaliana columbia
  unsure (1)..(540): unsure at all n locations
agcttttcaaagttaaaaccttttttncccgaagaagaatcaatacgactcaaatcaatcaattgaatctatggcgatggctatgagacttccagcgatatctagagctgtgacggaagtagcttcagctccggttggtttgagacgactgtcctgttcaaatgcttcaaggttctcttttttgtctccacaagctgaatcccaaacaccggctcgtcctcaggctgaacctagcaccaatctcttcgtctccgggcttagtaagcgcaccacttctgaaggactaaggactgcttttttnctcagttttggagaaggttgctgatgctaagggttgtcacaggcaggggctttcagggttcattccaaaaggggtttngggtttgttaaccgatatgccacttttagaaaggattcttnnccaaaggcattaggcttggaaattngnccgggaaaggtttntttaccggtttgggggncataattngnaagnggtnttcaaagnncccccgnggggcaatncacaggtcattttaaccc

SEQ ID NO: 92831 - DNA, 880 bp, Arabidopsis thaliana columbia
  unsure (1)..(880): unsure at all n locations
tactaccnnnnnnnnnnnnnnnnnnnnnnnnnnnnnnnnnnnnnnnnnnnnnnnnnaaatcaatcaattgaatctatggcgatggctatgagacttccagcgatatctagagctgtgacggaagtagcttcagctccggttggtttgagacgactgttctgttcaaatgcttcaaggttctcttttttgtctccacaagctgaatcccaaacaccggctcgtcctcaggctgaacctagcaccaatctcttcgtctccgggcttagtaagcgcaccacttctgaaggactaaggactgcttttgctcagtttggagaagttgctgatgctaaggttgtcacagacagagtatcaggatattccaaagggtttggatttgttagatatgccactttagaagattctgccaaaggcatagctggaatggacgggaagtttcttgacggttgggtcatattcgcagagtatgcaagaccgagagagcaatcacagtcatatcaacctcagaacaacatgtctcgtcctccatactatggtaaccgctagagaaacagttttcttcggttcttatgaatcttttatattcatatttatgcttcattctatcctcttctatgatcgaactgtgttgtgcttcgtctcgtgttattacctttagaagattaaaaacttcaaattatattttgaaggaataatcagaaactgtcatttacaaaaccaaagtattaagtgtaatagttttttaagaggaagaggattttgcttacatggttaactcggaaatccttnnnnnnnnnnnnnnnnnnnnnnnnnnnnnnnnnnnnnnnnnnnnnnnnnnnnnnnnnnnnnnnnnnnnnnnnnnnnnnnnnnnnnnnnnnnn

SEQ ID NO: 92832 - DNA, 825 bp, Arabidopsis thaliana columbia
  unsure (1)..(825): unsure at all n locations
atgatactnnnnnnnnnnnnnnnnnnnnnnnnnnnnnnnnnnnnnnnnnnnnnnnnnnnnnnnnnnnnnnnnnnnnnnnnnnnnccacgcgtccggttaaataagaaaaatatcattcaaaagaaacaataatcatgaaactcttagaacaaatggtataccgtagaatgttttatgataataatggctacattgttagtgtccatgagttacggtcatcgagcgatgattaatgatgtagccgaagcacccgtgattgacaatgtaggcagcccaaccaacggactcgacagttcttggtatgatgcacgagcaacattttacggtgatatccatggtggagatactcaacagggagcctgtggatacggtgatttattcaaacaaggctatggtctagagacagcggcattgagcacagcactcttcaacgaagggtatacatgtggggcttgttaccagatcatgtgtgtgcacgacccacantggtgtttacccggaacatcangatacagcacatatttctgtcaccagatactccaaaccgaaggcgtttggtgcacccacccaaaagcctttgacctctcctaccaatgttcctcaagatcgcccatacaaagctggagttgtcccagttaaatacagacgtatttcttggcaagaactggtggtgtcaagttgaaccaaagaaacccttattcttaatgtcttgcctacaatgaggagggctggaatataagtgatcaagtaaagaacagaccggtggtacatgcaaaactgngacaactgacactgtgtattgactgcaggattattaggtacaca

SEQ ID NO: 92833 - DNA, 321 bp, Arabidopsis thaliana columbia
cgcttttctccgtaaacaatttctcagtttccaatttcaacgtaaccggtccggttttctccgcgcaatggacggcgaatctcacaatcgagaatcaaaacacgaaattgaaaggctactttgatcgaatccaaggtttagtataccaccaaaacgcggtcggagaagacgaatttttagcgacggcgttttttcaaccggttttcgtggagaccaagaaatcggttgtgatcggagaaactttgaccgcgggagataaagaacaaccgaaagttcccagttgggttgttgatgagatgaagaaagagagagagaccggaa

SEQ ID NO: 92834 - DNA, 556 bp, Arabidopsis thaliana columbia
  unsure (1)..(556): unsure at all n locations
cgcgtcaggttattctcatctccaatttcactctctcagtctcagatctgagagaactccaccggatcagattcatcgccgccaccgttcacggcaccaatcatcatcagaacaaatcttatttcgcatggtccaatttccgatttctcatcggagaaatccctaattcaatcccgtttcatcgttataaccaatcggagaaatcaccgctcaaactttgttgctagggatttgagtgagtgagagaggaagatggagcagctaaagacaattggaagagagctagcgatgggatcacaaggaggatttggtcagtcgaaagagtttctcgatctggtcaaatcaatcggagaagcacgatctaaagctgaagaagatcggatcgttctaagcgaggtcggtatactaaaacgaagattattagagccagatattccccagagggagatgaaagagtccttatcgnnncggttacatngagatncnaggcacgangcttctttnggtanattttcncgngantgcccccggggaaacttttttcncaangnanngg

SEQ ID NO: 92835 - DNA, 453 bp, Arabidopsis thaliana columbia
  unsure (1)..(453): unsure at all n locations
gatatactgtcagccccgatgcaatgttcgacattcagatcaagcgtatacatgagtacaagcgacaactgctaaatatcttgggaattgtttaccgctacaaaaagatgaaggaaatgagtgctagtgagagagagaaagcatttgttccaagagtttgcatatttgggggaaaagcatttgccacatatgtgcaagctaagagaattgttaaatttatcacagatgttgcgtctacaattaaccatgatccagaaataggtgacctccttaaggttatctttgttcctgattacaatgtcagtgttgctgaattgctcattccagcaagtgagctttctcagcacatcagtactgctgggatggaagctagtgggacaagcaacatgaaattttcgatgaacggttgcgttttgattggaaccttggatggngcgaatgtcgagattagag

SEQ ID NO: 92836 - DNA, 681 bp, Arabidopsis thaliana columbia
aggtgacactatagcaagactatgacgtcgcatgcacgcgtacgtaagctcggaattcggctcgagctcactgtattcgtctgctaggtactgtgtgaaaggtgaaaagcttatctcccaagactgcaagaaagtcaaggcaaccactaacgtatggcttcaagttgaaggtcaacagtttgaccctaacgcctctaagcttgccttcgagcgtgtctttaaaggcatgttcgtcatgagcgctgaccctgccgctgtccaagagctcgaaggtaagctccagaaagtcttggatgtctacgaggctaggctcgccaaatctgagttcttggctggggattccttcactcttgctgatcttcaccacctcccagccatccattacttgttgggtactgactccaaggtgctctttgactctcgcccctaaggttagcgagtggattaagaagatctctgccaggcctgcttgggctaaggttattgacctccagaagcagtagtgaccctctctcattcttcacttcttttcttttccttttgcccaaataaacgagtccagtgattttcttttcttggcttatgtacttgtgttttcagtattatttatgtcatcatcatcctcctcttttgtgttattgttgggttcattcacatttgtgcaattaaaaaccagagttt

SEQ ID NO: 92837 - DNA, 404 bp, Arabidopsis thaliana columbia
gctcatccccgtcgatatgagagccggtgcccacaagcaagaggcccaccttgccctcaacgtaacccctttctccctctctctctttacgaacaaacaaaactgaaaacactttatgtttggtttttccaattatctgacaatgatctttgttttgtttcagcccttcggtcaaattcctgctctcgaggacggtgatttgacgcttttcggtcagtttacttttgcgttgatcaatgatttgacttttttagatttacagaaacatcattacgccttagtcactttgtattggataacgatttatctgaaatgacagactgtgatgattatttttgatgctgaaagtttttgttggtaatatatttgcagagtcaagagccatcacacagtacctagcagag

SEQ ID NO: 92838 - DNA, 593 bp, Arabidopsis thaliana columbia
  unsure (1)..(593): unsure at all n locations
agattctggaaaaatgggagcaattcaagctcgtcttcccttgttcctttctcccccttctatgaaacaccataccttccttcattcttcttcatccaattccaatttcaaaatcagatccaacaaatcttcttcttcttcttcttcttcgatcatcatggccagtatcaaggttcacggagttcccatgtccaccgccacaatgcgcgtcctcgctactctttacgagaaagatctccagttcgagctcatccccgtcgatatgagagccggtgcccacaagcaagaggcccaccttgccctcaaccccttcggtcaaattcctgctctcgaggacggtgatttgacgcttttcgagtcaagagccatcacacagtacctagcagaggaatacagtgagaaaggtgaaaagcttatctccccaggactgcaagaaagtcaagggcaacccacttaacgtttgggcttcaaggttgaagggtcaacaagttttgacccttaacgggctttaaagggttgcctttcggggggggtcnttttaaaggggttttttggggattccccttttccccttnggggtttccaagggtttt

SEQ ID NO: 92839 - DNA, 1036 bp, Arabidopsis thaliana columbia
  unsure (1)..(1036): unsure at all n locations
tttaggtcacactatagaagagctatgacgtcgcatgcacgcgtacgtaagctcggaattcggctcgagtttcaaaatcagatccaacaaatcttcttcttcttcttcttcttcgatcatcatggccagtatcaaggttcacggagttcccatgtccaccgccacaatgcgcgtcctcgctactctttacgagaaagatctccagttcgagctcatccccgtcgatatgagagccggtgcccacaagcaagaggcccaccttgccctcaaccccttcggtcaaattcctgctctcgaggacggtgatttgacgcttttcgagtcaagagccatcacacagtacctagcagaggaatacagtgagaaaggtgaaaagcttatctcccaagactgcaagaaagtcaaggcaaccactaacgtatggcttcaagttgaaggtcaacagtttgaccctaacgcctctaagcttgccttcgagcgtgtctttaaaggcatgttcggcatgaccactgaccctgccgctgtccaagagctcgaaggtaagctccagaaagtcttggatgtctacgaggctaggctcgccaaatctgagttcttggctggtgattccttcactcttgctgatcttcaccacctcccagccatccattacttgttgggtactgactccaaggtgctctttgactctcgccctaaggttagcgagtggattaagaagatctctgccaggcctgcttgggctaaggttattgacctccagaagcagtagtgaccctctctctttcttcacttcttttcttttccttttgcccaaataaacgagtccagtgattttcttttcttggcttatgtacttgtgttttcagtattatttatgtcatcatcatcctcctcttttgtgttaaaaaaaaaaaaaaaaaagaaaaggcgctcgcgatctatnnnnnnnnnnnnnnnnnnnnnnnnnnnnnnnnnnnnnnnnnnnnnnnnnnnnnnnnnnnnnnnnnnnnnnnnnnnnnnnnnnnnnnnnnnnnnn

SEQ ID NO: 92840 - DNA, 967 bp, Arabidopsis thaliana columbia
  unsure (1)..(967): unsure at all n locations
attttgtgagaaaagaatcttcttttgcaaatgcttcgctcctcaattcgacttctctatataagaagaaccagtcctctgcttcgaagtttatcatcatcatcatcatcatcatcatcatcatcatcaaaacgattcgattctgcgaaaccacttttcaattctcatcggattatttctcttccaatttctacaacgggagctaaactatctagatcggagcattcaatggctgcttcttccgaacccaaatctctttacgatttcaccgtcaaggatgctaagggaaacgatgttgatctaagcatctacaaagggaaggttcttttgattgtgaacgttgcttctcaatgtggcttgactaattcgaattatactgagcttgcgcagctgtatgagaagtacaaaggccatggtttcgagattcttgcgtttccgtgtaaccagtttgggaatcaagagcctggtactaatgaagagattgttcagtttgcttgtactcgtttcaaggctgagtacccgattttcgacaaggttgatgttaacggtgacaaagctgccccagtctacaagtttctgaaatcaagcaaaggcgggctctttggagacggcattaagtggaacttcgcaaagttcttggttgacaaagatggaaatgttgtcgatcgtttcgcaccaactacctcacctctcagcattgagaaggatgtgaagaagttgttgggagttactgcttaagcaaggcaagattgcataattagacaaataaaagctcattagtattgtattaccaatactgtgtagtaagctgagttcgtgagtgtgtgcctttgggaccgcgtacaattataatccgttttttagcggccaaactatgtaataatcgtagatctaaatatcagatttcccgttaccttacaaaaannnnnnnnnnnnnnnnnnnnnnnnnnnnnnnnnnnnnnnnnna

SEQ ID NO: 92841 - DNA, 632 bp, Arabidopsis thaliana columbia
  unsure (1)..(632): unsure at all n locations
atcatcaacgttaagtcatttatcgacaaaaaagcttggccctatgttcagaacgatctccgtttaagagcatcgtacctccgttacgatctcaacaccgttatctccgctaagcctaaggaagagaagcaaacccttaaagatctccccgcaaagcttttccaacccattgacaacttggactatgcggcgagatcaaagagtagcccagatgctgagaagtattactcagaaactgtctcgagtttgaacaatgttcttgcccaagctcggttaatgaagaaagacttgcgttgtaatctgttgatgtcgatgttattataattactgctatccaagtactttgtctttctccttctcttcttgtctgatcaaatcggttatctctaatttcagtttcaagttttaaccaatatattggctggctctttagcaaaacattatatattcgtcctcgagctgaccactttgtaagttcatgttctgattctgggccnnnnnnnnnnnnnnnnnnnnnnnnnnnnnnnnnnnnnnnnnnnnnnnnnnnnnnnnnnnnnnnnnnnnnnnnnnnnnnnnnnnnnnnnnnnnnnnnnnnnnnnnnnnnnnnnnnnnnnnnnnnnnnnnnnnnnnnn

SEQ ID NO: 92842 - DNA, 659 bp, Arabidopsis thaliana columbia
  unsure (1)..(659): unsure at all n locations
cgggatttccgggttggccccacccgtccgattcggtaaaagcggtttcggccaaactttttccgtccaaggtggggggccctccacttccttccgggggcctaccgggaccagttacctaaacccaggcaggagacttttaatgggcattggaaggatagattttacatacaaccatggtacaccaacagaagctgcagcttggagccaaagattctgctaaggagaccatcaacgttaagtcatttttcgcacaaaaaagctgggccctatgttcagaacgacctccgtttaagagcatcgtacctccgttacgatctcaacaccgttatctccgctaagcctaaggaggagaagcaaagccttaaggatctcaccgcaaagcttttccaaaccattgacaacttggactatgcggcgagatcaaagagtagcccagatgctgagaagtattactcagaaactgtctcgagtttgaacaatgttcttgccaagctcggttaatgangnaagncttgcggtgtaatctgttgntgtcgntgttattataattactgctatccagnatttggcttcnccggcnctcttgnctntcaatcggtacnntanttcagttaaggtttaccatntttggtggtttngnaaaatntttnttnntc

SEQ ID NO: 92843 - DNA, 802 bp, Arabidopsis thaliana columbia
  unsure (1)..(802): unsure at all n locations
tgatctnnnnnnnnnnnnnnnnnnnnnnnnnnnnnnnnnnnnnnnnnnnnnnnnnnnnnnnnnnnnnnnnnnnnnnnnnnnccacgcgtccgtgcggctgcgagaaacgacagaagggtacggctgcgataagacgacagaagggtacggctgcgagaagacgacagaaggggaaagcagataaaaaaaatggctcaagcagtgacttcgatggctggcttacgtggagcatctcaggctgtccttgaaggaagtttacagatcaacggctcaaaccgtttgaacatctcaagagtctcggttgggtctcagagaaccggacttgtgatcagggctcagcagaacgtgtcagtaccagaaagtagtcgccggtcagtgattggactcgtggcggctggtttagccggtggttcattcgttaaagctgttttcgccgaagctattccgatcaaagttggtggtcctccactttccttccggtggcctacctggaacagataactcagaccaagcaagagacttttcattggcattgaaagatagattttacatacaaccattgtcaccaacagaagctgcagcttggagccaaagattttgctaaaggggtnatnaacggtnaggccattttttcggcaaaaaaggtttgnccntttnttaagaccggtttccgtttaaaggnattgtnccnccgttanggtttaanaccgttatttcngtaagctttggngggnggaaaccttaaggtttcccgaaaggtttccancnttgnanttggntttggggggnaaaggtncccatt

SEQ ID NO: 92844 - DNA, 1005 bp, Arabidopsis thaliana columbia
ttaggtcacactttggagggctatgacgtcgcctgcacgcgtacgtaagctcggaaagcagataaaaaaaaaatggctcaagcagtgacttcgatggctggcttacgtggagcatctcaggctgtccttgaaggaagtttacagatcaacggctcaaaccgtttgaacatctcaagagtctcggttgggtctcagagaaccggacttgtgatcagggctcagcagaacgtgtcagtaccagaaagtagtcgccggtcagtgattggactcgtggcggctggtttagccggtggttcattcgttaaagctgttttcgccgaagctattccgatcaaagttggtggtcctccacttccttccggtggcctacctggaacagataactcagaccaagcaagagacttttcattggcattgaaagatagattttacatacaaccattgtcaccaacagaagctgcagctagagccaaagattctgctaaagagatcatcaacgttaagtcatttatcgacaaaaaagcttggccctatgttcagaacgatctccgtttaagagcatcgtacctccgttacgatctcaacaccgttatctccgctaagcctaaggaagagaagcaaagccttaaagatctcaccgcaaagcttttccaaaccattgacaacttggactatgcggcgagatcaaagagtagcccagatgctgagaagtattactcagaaactgtctcgagtttgaacaatgttcttgccaagctcggttaatgaagaaagacttgcgttgtaatctgttgatgtcgatgttattataattactgctatccaagtactttgtctttctccttctcttcttgtctgatcaaatcggttatctctaatttcagtttcaagttttcccccataaaaaaaaaaaaaaaaaaaaaaaaaaaaaaaaaaaaaagggcggccgctatagaggatccaagcttacgtacgcgtgcatggtacgtcatagtaatctatagt

SEQ ID NO: 92845 - DNA, 510 bp, Arabidopsis thaliana columbia
gtcacacactcttcacctaaacagcatcaatggcgacttctctctccgtttctagattcatgtcctcctccgccaccgttatctccgtcgctaagccgttactttcccccaccgtatccttcaccgcgccgctctccttcacacgctctctcgctcctaatctctctctcaaattccgcaaccgccgcaccaattccgcctccgccaccaccagatccttcgctacgacacccgtcaccgcctccatttccgtcggagacaagctcccagactccactctctcctacctcgatccatccaccggagacgtcaaaacagtaaccgtctcatccctaaccgccgggaagaaaacaatcctattcgccgttcccggcgcattcacaccaacatgctcacaaaaacacgtccctggattcgtatccaaagccggagaactcagatctaaaggcatcgatgtaatcgcatgtatctccgtcaacgacgcgttcgtgatggaagcgtggaggaaag

SEQ ID NO: 92846 - DNA, 332 bp, Arabidopsis thaliana columbia
cttctctcatcgctcgtctctccaacacgcttctcgacggtcgttccttcaccctcaagtaccagttacctagcgaagaccttgactctcgcatctccgtcactaccgacgaagatctcgacaacatgatcgaagagtatgaccgtaccatttccgcttccaattccaccaaaccttcgcgtctccggttgtttctatgcacctccaagcctgaggctactcaatctatgggtcagatccgtgagagctctgccaagagcgacgattggttcctcaacgcactcaatagcgccggtcttctcaatcgacgattctcagattctgataccaac

SEQ ID NO: 92847 - DNA, 548 bp, Arabidopsis thaliana columbia
agcatcggcggtggtaaagagttcgcaacaaatccgtcgtcatgtagctgatgcttgtttcccgacgtttaatcgtgcgaactgttcttcaaattcccagatttctctgatctggcaaagtccttactccgcctggttcctctacatggacacggatcggaggcaaattggcgagcgagggagacgaagaagtggagccgaaagaagaggatgtatctaacatcggagaatccggtaagcagttcacatcttggcctccttgctgttgttcttgctgctgcggcggtggaggttgctgttgcttggcgcttttaacagagtatgaccgtaccatttccgcttccaattccaccaaaccttcgcgtctccggttgtttctattcacctccaagcctgaggctactcaatctatgggtcagatccttgagagctctgccaagagcgacgattggttcctcaacgcactcaatagcgccggtcttctcgagccgaattccgagcttacgtacgcgtgcatgcgacgtcaagctcttctatagtgcacctaa

SEQ ID NO: 92848 - DNA, 913 bp, Arabidopsis thaliana columbia
  unsure (1)..(913): unsure at all n locations
nnnnnnnnnnnnnnnnnnnnnnnnnnnnnnnnnnnnnnnnnnnnnnnnnnnnnnnnnnnnnnnnnnnnnnnnnnnnnnnnnnnccacgcgtccgtggactttcccattcggttggagaatccccatgttatatcctcaaatcagctatgggctggagttgtaagtactggtccatcagggtacgttcttaattctagctaccgcaatcgtgatgtcccagagtacaaacaagaacttgggaatgccatagttaacttttctcgagtcgtgcctgaaggactgctgatatttttcccttcctattaccttatggactcttgcattacattttggaaaaatgggtgttacagaaactcaatgacagtatgggaaagaatttgcaagctcaagatacctgtcattgaacccaaggattcctccctctttcctgcagcaatgcgggacttttcagaaaaattgcaagacagagcaacttcgggtgtggtgttttttgccgtttgtcgcggtaaggtcagcgaaggactggattttgctgacggtgctggcagagctgtcgtcattactgggttaccttatgccagggtgacagatcctagggttaaattgaaacgagagtttctggatgaacaatcacaacttgcagatgttaagcttccaagatcaaccctactatctggaagcatgtggtacagtcaagaagccggaccggctgtgaatcaagcaattggacgtgtaatcccgcatcgtcatgattatggagctatcatcttttgtgatgacagatttgaacaacatnccagaatccaagatatcactttggatacgacctaacgtcaagtgctactctagatatggagagggtatttctgaccttgctcgattttttcggactgaaagatcaattttcctgcaa

SEQ ID NO: 92849 - DNA, 1364 bp, Arabidopsis thaliana columbia
  unsure (1)..(1364): unsure at all n locations
cagcactatacgactcacttagggaaagctggtacgcctgcaggtaccggtccggaattcccgggtcgacccacgcgtccgtttgctgaaagcatctgttggactcttttaaatcagcaagatgagacagttgtctggaaaaagactatcaacaccaaatgttatagttcccggaaacctggagtgggcccttctgtgtgtaccaaagggcacgatgttgagtctccttattacaggccgcttcagatgtgtataggtggaacacgtagccggaggtggattcccattgaaggcaggacaagatggcctagccggtctaacatgaacaagactgaactttcattatatggtcttcaccccgaggtgcttggagaggatgctgagaactggaagataacagtgagagaatactggtctctcttgtctcctctgatattctctgatcatccaaaaagacccggcgatgaagatccatcaccgccttataacatgctcagaaacgtactggatatgaatgctcaattcggtggtctcaattccgccttgttggaagcaagaaaatcagtctgggtcatgaatgtggtccctacagctggacctaaccacctccccatgatacttgaccgtggctttgtcggagttttgcacaactggtgtgaaccattcccgacttacccgagaacatatgacctgggtacatgcagacaatctcttgtcgcttcagacaagtcagccccgaaaaacatgtctacttattgatatattcacagagattgaccgattgcttcggccagagggatgggggataatccgtgacacgggacagcttggtggaaaaggcgagaaagacgataacgcagttgaagtgggaagctcgagtaatagaggttgaaagcagcagtggacaaagacttctcatctgccaaaaaccattcaccaagcgacaatccatctgaagaagaagaagaacatagncccagggttttctccacttttttaatttttttgttccaatgcctcacattttggaatcaaatcatccaacttgtgttggcgatacggggaagaaaggaggaagagatgnaatatatatcccgccggggacgtaagaccgccggtgaaatttctttatctggttccgtgagctcccntataacagaatctagattttttttttctttacaactttggttctataacaactcttattatacagcgaaaaaagaatatgattcaatatttgtgaagatgtttatgaaataagttcaaaggtttttagtaaattttcactgagttagaaaaaaaaaaacaaggaaggccgctctagaggatccaagcttacgtacgcggcgatgcgacgtcaa

SEQ ID NO: 92850 - DNA, 437 bp, Arabidopsis thaliana columbia
  unsure (1)..(437): unsure at all n locations
ccaaaatcaaaagctgagagctctcttacattgaagctactttcgaagatagcattcagctgattggtaaagagttctagaagcgacgagcatcttctttagttcccgagttttctgcgtttgagaagtctgttctagaaagtaatgggtgacagcgaggccatggtttccgagggttatacttctgctccatatggagactataatgcttctgctgctactgtggaatcgaccgggcaagagactgcaccaattgttgatgcatcacactcggtcaacaatgattctttggtcaatggtactgcgccagttgagaacggaagtgcaacagataatgtggctgtgactgctccagcagcggagcatggagacaatactggctctacactctcaacggaagaggagcgcttgtggaatatngtaagggcaaattcttt

SEQ ID NO: 92851 - DNA, 233 bp, Arabidopsis thaliana columbia
gtccgcccacgcgtccgcggacgcgtgggtaaattacttctgcaagctgcagatgcttcattcaaaacattatagctttaatgggaaggggtagtttcacatctgtcataacttaaaatggattcttgttaagtctctgagtcaatgcaatctttgtactgtatcattttctttatgatcaatgagagctttatttgctccaacaattttagtaaaagaggaagcggtgcccc

SEQ ID NO: 92852 - DNA, 589 bp, Arabidopsis thaliana columbia
gtttttcagaggagtccatcacgcaatcaaactaattgattgatcttattaagaaatcgatgtcttactccatgacttttttttaggaaaaaagaggagaacaacagcctgacattaggtcctattaaagtaccccgttaggtagggaatgaatagaacccatcattgatttgagatattgatagggtgaatacccagtctactcaatgctaggtagaatgagtataaggaactcaaaaatgatcttttcgtcctatgaaccttaaggtgtatcaagtttcatgtttgattttttaatcaggatgttagagactatatttaacttaagttgatctagaccaaaagcaaacctacgtcaagagaacccttctttgaaacactttgggtagttcttctgtattgtattagaattcaaaaataatcaatcagagtacttggaaccatttcttatctttttttaagaaaaaatatggtagactaactgatctttcgatcagttaatgaaagagcccaatgcaaaaaaaaatgcatgttgggtctttgaaagagttcgaatcattttgataataataagttcgaactcttttac

SEQ ID NO: 92853 - DNA, 531 bp, Arabidopsis thaliana columbia
atacgactcactttagggaaagcacgtacgcctgcaggtaccggtccggaattcccgggtcgacccacgcgtccgcccacgcgtccggtaacatcagaaaatttgctttgactcgcacacatcaaggttactcatagtccagggctgtgaaattgagcttgtgatgtcgcatagtatgtcccatttcagttataacaatcagtctgcatgaaaaattaagctactgttttgatacgattgccaacgtgagagtgagaaactaagatgtgtgtctacattaaaacaaaacaaaaaaaaacgggtctacgcacgtccaaagtatcattaacctatcttcatttggttccccatgatatccacatctcagattaggacattaccactttgtgttgcaactttgctttgatgcatactccatgcatgttttatttgatttttcagtcatctgctgcaaccccttgtggattgtactctgacacttggaagaatactcgagaaaaagttttgcctcgggactgggcgatacggaaa

SEQ ID NO: 92854 - DNA, 535 bp, Arabidopsis thaliana columbia
  unsure (1)..(535): unsure at all n locations
cannnnnnnnnnnnnnnnnnnnnnnnnnnnnnnnnnnnnnnnnnnnnnnnnnnnnnnnnnnnnnnnnnnccacgcgtccgataaaacaaagttttgttcttgtcttcttcacaagagaagagatatgtctctcttactctgtttttcttctttctctcaataaaccagcagatacggcgacaagggcatctgaccagtagcgaagggttggaggaaatggctcgatatcttcttctgggtcttcaggcactccttcaagatctctcccgtcccacacatcgtttctagttgcacatttggaatggacagcataatgacattctttattacaagaatattgcccgtagttgatgtcaacggtttggcgacaaactccgcaagagaaatcaccagaaggaagggaggatgtgagagagagacgatgagagtgtcgggtgatctgaatgacacgaggtaaatagatacatgatctgtggaccatgtggctgcaagggagacaagagtaaacangatcttcagcgtcgcttaaagacag

SEQ ID NO: 92855 - DNA, 849 bp, Arabidopsis thaliana columbia
  unsure (1)..(849): unsure at all n locations
agttcgactgaacgcagtaggcacgaatatgtagtagtcctcatagccccaggcttcccttatgctcggctgtatgtgttgaatgtagcgatacaattcaccagaacagctatgacatatacgcaagctctatcgctcnctataggaagctggtcgcctgcaggtccggtccgaattccgggtcgacccacgcgtccgcccacgcgtccgcggacgcgtgggttcgtttccgatcgcacttcttctcaagtaaatttaatagacgtttgttgggtgatttaagaagatgggtcagatccagtactccgacaaatatttcgatgatactttcgaatacaggcacgttgtacttcctccggaagttgctaagcttttacctaagaatcgtattctttcggaaagtgaatggagagccatcggagtgcagcaaagtcgtggatgggttcattacgcgattcatcgtcctgagccacatatcatgctctttaggaggcctcttaactaccagcaggagcaccaagctcagattgctaagtagaagaattatgcaaaattctccctaatctctgtttatgtctctcgtaaacgaggttttaaaatactactctgatgttttgttcctgtagttttttttattgtgttcatgaattctcttcagtggagaatcatgtgagtttggtagaacaacttttaatgttatgttaagtctggtcctttgctagactttggttggatccacgtttgaacttcttcatggttaagaatgaaaaaaaaaaacaaagnnnnnnnnnnnnnnnnnnnnnnnnnnnnnnnnnnnnnnnnnnnnnnnnnnnnnnnnnnnnnnnnnnn

SEQ ID NO: 92856 - DNA, 366 bp, Arabidopsis thaliana columbia
agccgaagtagagacgttgggtcgggtcagacatggaaacatcgtgaaacttcttatgtgctgcaacggcgaggagtttcggttcttagtgtacgagctcatggaaaacggcagcttaggtgacgttttgcattcggagaaagaacatcgtgccgtttctccacttgattggacgacacgattttcgatcgcggttggtgctgctcaaggactttcttatctacatcatgactctgttccgcctattgttcaccgtgacgtcaaaagcaataatatattgttggaccatgagatgaagccacgtgtcgccgatttcggtttagctaaaccgttgaagagagaagacaatgatggtgtctccgatgt

SEQ ID NO: 92857 - DNA, 524 bp, Arabidopsis thaliana columbia
  unsure (1)..(524): unsure at all n locations
agctcagggcataaacccggtatcagtgtctcaatgtccttggttttcgcaccattcgcggctttggcactaatgatgattaattactgaggagataactatacttaccattcttgatcagtttttttgatcttcaaattcttaagattggtgttttgatgatgttgctgaccagaggaaggatcaaaaggagcagattgttatatgattgatctaagttggaaaaatattgacaatgttgtattaatacttttgtttggtctataaaagtattaaagtgtatgttgttctctagtaatcccaaaatctcagattagtgttggccttttttttggcatgaagaagatcttagtactttgatttgatgtttttgtgaaatctctcttcgttcttgaagatctttatccgaaaagtaataataaaatataccccaaaaaaaaaaaaaaaaagnnnnnnnnnnnnnnnnnnnnnnnnnnnnnnnnnnnnnnnnnnnnnnnnnnnnnnnnnnnnnnnnnnnnnnnnnn

SEQ ID NO: 92858 - DNA, 530 bp, Arabidopsis thaliana columbia
aagaacaaatccattaagagaccctcccgtgcccggaaagcaacaatctgtcatctccttcaccaagaaaaacatcaaaggactgaatattcccgaaggcgacggtttcccaacaaagcttttcttcaatggagaagaatgtgcgcttccaaaacatttccctaagaagagctcagggcatagacgcggtatcagtgtctcaatgtcctttgttttcgcaacaatcgcggcttttgcactaatgatgattaattactgaggagataactatacttaccattcttgatcagtttttttgatcttcaaattcttaagattggtgttttgatgatgttgctgaacagaggaaggatccaaaggagccgattggtatatgattggtctaagttggaaaaatattggccatggtggattaaaacctttgtttggtccaataaaggaataaagggtatggtggtctctagtaaaaaaaaaaaaaaagggcggccgctttaaaggatcccagcctacggaagggggccagccacgtc

SEQ ID NO: 92859 - DNA, 762 bp, Arabidopsis thaliana columbia
  unsure (1)..(762): unsure at all n locations
cagcactnnnnnnnnatcgactcctataggaagctgtacgccgcaggtccggtccggaatcccgggtcgacccacgcgtccgattcagccagagaatcccacgaagatatataccgtgctattgatatgtatctcgaggctcacacaggaacaactgatggcgaaaaactcaacttgatacgaactttaagttacgagaagctttcaggagaatcaagagctcacatttcgcgtaaccaaaagtttcaggctattgagacactagatgaacaacaacaacaacaacaacaacaacaacaacagaagcagctcatactcagaatggagaaggttgagacttcaggagaaaacgagaagctgaaggaacatatcgaagggattcaatggagggtaatggaattggagagagcttgtttgaaaatgcagaatcaaatggaagttatcaagaagagatccaagagctcgagcaaaggaagtaatagatcacttcctaagctctgttcttgattagtgaagctgtaagcttacgatcatatttgtacatagagtgatagagagcataaggagtcaattattagttaccatttggttcttatgtttcagagtatttatcttttcttgggttgttttctttgccccaaagttgtgcgtaatgaaaagtaaagataaattcgttttaaaaaaaaaaaaaaaaggggcggcgtctagaggatccaagctacgtacgcgtgcatgcnnnnnnnnnnnnnnnnnnnnnnnnnn

SEQ ID NO: 92860 - DNA, 572 bp, Arabidopsis thaliana columbia
cagagttgaatcagttctacaatgatctctgtctctcgattcttgtcgcctcatattctacgcaattccaaggagcttcgtaaaaatgtctgcttcagcgactcaaacggccggagaagtttcaatggggatcaagcctccttcacaccctacttacgatttgaaagctgttatcaaactagccctagctgaagatgctggtcatacaggagatgtaacgtgtatggctacgataccgtttgatatggaagtggaagcttatttcttggccaaggaagatggtattgttgctggagttgctcttgctgacatgatttttgaacatgttgatccctccttgaaggttgaatggatgcgaaaggatggagattatgttcataaaggattgaagtttgggaaagtatcagggaatgcacataagattgttgttgctgaaagagttttgctcaactttatgcagaggatgagtggaattgcaacccttaccaagttaatggcagatgctgcatcccctgcatgtatactggagacaaagaaaaactgctcctgcgtttgcgcgtgcgtagataaat

SEQ ID NO: 92861 - DNA, 483 bp, Arabidopsis thaliana columbia
  unsure (1)..(483): unsure at all n locations
gtgaaccaagctcaggttttgtcttctctttgatcattcctttctcagcaatataaattagagttatatcctttataaaggattttcctttttcaccaacaaaccctaaattcggtgtctcagcaagaatcacgtgattctcgttcctcttcctcacgaaacccatcatcttctatctcatttgagaaatgggtcaaaagttttgggagaatcaagaagatcgagcgatggttgaatccaccataggctctgaagcttgcgactttttcatctcaacagcttcagcttccaacactgccttgtccaagcttgtctcaccaccaagtgattccaatctccaacaagggttacgtcacgttgttgaaggatctgattgggattatgctcttttctggctagcgtccaacgttaatagctctgatggttgtgtcttgatctggggggatggcaattccgtntaaaaaaggntttcnaggnngggtt

SEQ ID NO: 92862 - DNA, 545 bp, Arabidopsis thaliana columbia
ctaaatcatcgtcgccgtgttcttctccgcttccaccgtcgttgtattcgtcttccgcctcctctcccatcggttttgaacagcttggcagaagaagtgaaacttgagagagtaatggagaacttggaagatctgaaaattctggctgagcagtggtcgcatcaaggaattgaatatcttcagaagataccaccgaatcagctgtatgccgccattggtgttttgttgtttacaaccatcttgctcttcctatccattcgcctggtcagacgtaccaaatccaacactgtactcctttctgggctgaccggaagtggaaagactgtgctcttttaccaactccgagatggatcgtcgcatcagggcactgtaacatcaatggaaccaaatgaaggcacttttgttcttcacagtgaaaatactaagaaaggaaaaatcaagcctgttcatcttgttgatgttcctgggcactctcggcttcgacccaagctagaagaattcttgccccaagcagctgccattgtgttcgtagtggatgccttgga

SEQ ID NO: 92863 - DNA, 501 bp, Arabidopsis thaliana columbia
cgatttgatagtggttctaaaagttttaggaggtgtactaacaaagcagaacattttcgtatcgatgctgatgggttaccatctgttggacagaaattatatccagatgagccgtattgtagtatctatgatgaggtaactaacaaaacaaggcacatgaagcgtaaaggtaccgaccctgtcatagttgactttgtctctgtcgacatgaaaagcaagaaacatcctcaaagggcgaatatatcgtttccggcatgccagaaaccccataatcggtgacaagttcagcagtagacatgggcaaaagggtgtttgttctcaattgtggcctgatattgacatgccatttaatggagttactggaatgcgtccagatctcatcattaacccgcatgctttcccatcaagaatgacaattgctatgcttttggaatctattgctgctaagggaggtagtttgcatggaaagtttgtagatgcaacaccgtttcgtgatgcagt

SEQ ID NO: 92864 - DNA, 607 bp, Arabidopsis thaliana columbia
  unsure (1)..(607): unsure at all n locations
cgnnnnnnnnnnnnnnnnnnnnnnnnnnnnnnnnnnnnnnnnnnnnnnnnnnnnnncgtccgcttttgagtccacgcgtcaagaagaagaagattaaaattcactaaaaacccgagaaaagtggaagaagaaggaaggaagaagaagacaagagagcattctgattcatgtgactctggtttcgtttctttctgtgtctctgctgtgtcgttttctcggcatatttctgatctttcgttctcggttggtttttggtttctgggtattgattgattgattcaaaagtcttcaactttcctggaaactggatctgggtttatccgtttttactcgtctgagaagagaaaaaaggatgaatccttatgatgcgaaagacagaagatggattctctctatgttcttcttcgtcgttttgttctgcaacaacgtttcgacttcgtcttcttcatctgaagttatcacgattaagccaagacatttatccttgctaaagagtgctttacaacggtcaagtggagaccagtctgatcttcgtttggcggccatttaccttntccaaggatgggggcccttgaattnnttttgggaaanccccntcattncccgg

SEQ ID NO: 92865 - DNA, 594 bp, Arabidopsis thaliana columbia
  unsure (1)..(594): unsure at all n locations
gactcattgctcatatctncttctcaattccaattttgtaatccttatctcaaattaatttctattttnataactacttaatctcaattagaagaagcctgctctctaataacaaaaaaaaaaaagccgtttgggatttcttttacacgaacacattcttccgatctttcttgtttttaacttaccggtaataacgaagatatgcagaggtttttctccgccagatcgattctcggttacgccgtcaagacgcggaggaggtctttctcttctcgttcttcgtctctcctattcgacgacactcagttacagtttaaagaaagtgtatccaagtttgcgcaagataatatcgctcctcatgcagaacgaattgatagaactaattcatttccacaggatgtaaacttatggaagctaatgggtgagtttaatctccatggaatcactgcgccagaggaatatggagggctaggtcttggttacttgtatcattgtattgcaatggaggaaatcagtcgggcctcgggttcagttgctttgtcttatggtgctcattccaacctttgcatcaatcaattggtgaggaatggaact

SEQ ID NO: 92866 - DNA, 1017 bp, Arabidopsis thaliana columbia
  unsure (1)..(1017): unsure at all n locations
cggcactatnnnnnnnnnnnnnnnnnnnnnnnnnnnnnnnnnnnnnnnnnnnnnnnnnnnnnnnnnnnnnccacgcgtccgccagactactcatatctaaagagacttttccgagacttgtttatccgtgaaggttatcagtttgattatgtattcgactggactgcattgaaacaccctcagagtagtgccaggtcccattccagtacacatgaaaggcatcgtaccggtaaaccagggatgggtgcgggaccgtctgctgaaaaacctgaaaggatttcagtagggaacatccgcgataaattctcaggtgcggtcgaagcatttgcgagaaggaacgttagaggacccagtccccatcaaaaccataccagacatcgaactcttgacgaaattccttcaatgaaacctgctgtgaatatggtatctgagaaaggaagaaacacttccagatacggcagtgcttcgaggagaggcagtagcctcaggaagtagaccaagctcatcaggtgaacaaagggagagccgggactcgacccgcgtaccttcaaccggtgccggtgtccgaccatcagtcttccaaagaacccaagcagcagctcctgtgagtggatacgagtcaaagacagcatctgcctttaaccccgaccgagtagccgcttcaagaacagcacgagacgaggctctcagaagcttcgagcttctttcgatccgcaaatgaagccttcatcaattggctctttgctgtaaattggattcttctttacatatgttgtttggtcctttgtttccccgaaactcccaatttttcatgtattatcaaattctctggattttgtatcaatttttacaccctttattgtaatcatcacaatttgttgagtttaattcaatgttccagttttaaaaaaaaaaaaaaaaaggcnnnnnnnnnnnnnnnnnnnnnnnnnnnnnnnnnnnnnnnnnnnnnnnnnnnnnnnnnnnnnnnnnnnnnnnnnnnnnnnnnnnnnnnnnnnn

SEQ ID NO: 92867 - DNA, 813 bp, Arabidopsis thaliana columbia
  unsure (1)..(813): unsure at all n locations
ctttccaactgttaccgtgagtaacagttaataggttgactgactcatgaacacctaaataggccagtccattcagaacaataagggcctgaccgtaaccaaggatggtggggccgttgcttaaaacctaaaggatncagtaggaacaccccgataattctcaggcgggccaacgaatgctagaaagacggtaaaggaccagtccccatccaaccatcacaacctcgaactcttacggaattcctcaatgaacctgctgtaataatggatctaaaaaggaaagaaccctcccagaacgccagtgcttcgaggagaccagagcctcaggaaataaaccaacgtcatcaggtgaacaaaagggagacccgggactcgagccgcgtagcctcaaagggtgcggggggccgcccatcagtcttccagaaaaaccaaagcgcagctgctgtgagtggataaagtcaaagacagcatctgcctttaaccccgaccgagtagccgcttcaagaacagcacgagacgaggctctcagaagcttcgagcttctttcgatccgccaaatgaagccttcaatcaatgggctctttgctgtaaaccgcattcttctttacatatgttgtttggtcctttgtttccacgaaactcccaatttttcatgtattatcaaattctctggattttgtatcaatttttacacactttattgtaatcatgacaatttgttgagttaaaaaaaaaaaaaaaaaaagcccggccgctctagaggatccaagcttacgtacgcgtgcatgggacgtcatagctattctatagtgt

SEQ ID NO: 92868 - DNA, 1529 bp, Arabidopsis thaliana columbia
gaatcggcggccgcggatccaacctcgccggcgacggaaaatggctttcgcgtctccttcgctccgtcttcttcctcagtctccgttaggtcgaataacatctaaactacaccgtttcagtactgcgaaactctcactcttctcctttcaccatgattcttcatcttctttggctgtcagaactccggtatcttccttcgtcgtcggcgctatctccggaaaatcctctaccggaacgaaatcgaaatccaaaaccaaacggaaaccacctcctcctccgccagtcactactgtggctgaagagcaacacattgctgagtcagagacagtcaacattgccgaagatgtcactcaattgattggaagcacaccaatggtctatctcaatagagtcacagatggttgtttggctgacattgctgccaagctcgaatcaatggagccctgtagaagcgtcaaagataggatcggtctgagcatgatcaacgaggcagaaaacagcggagctataactccgaggaagactgtattagtagaaccaacaaccggaaacactggccttgggattgcatttgtggctgcagctaaaggctacaagcttatagtgacaatgccagcttctatcaatattgaaaggaggatgcttttacgtgcactaggagcagagattgtgctaacgaatccagagaagggtctcaaaggagcagtggataaagccaaagagattgttctcaagacaaagaacgcatatatgtttcagcaattcgacaatacagcaaatacaaagatccactttgaaactacaggaccagaaatctgggaagatacaatgggtaatgtcgatatattcgttgccggaataggaactggtggtactgtaactggtactggaggtttcttgaaaatgatgaacaaggatattaaggtagttggcgttgaaccatcagaaagaagtgtgatttctggagacaaccctggttacttaccgggaatcttggatgttaaattacttgatgaagtgtttaaggttagcaacggggaagcgattgagatggcgaggagactagctttagaggaaggattgctggttgggatttcatctggagctgctgcagtagcagcagtcagcttggctaaaagagcagagaatgccggtaaactaatcacggttctgtttccaagccatggcgagcggtatatcacaacggctctgtttagttccatcaacagagaagtccaagagatgagatattagtagcagccattagaaaagcccccaaagtttggtccttttggagagtgtaaacaacaaatctctttgcaatacagaaaagagaggtttcagaagactgtgaggttagagctcacacgagaactgagagataaacatgtctcgagcccaaccagttttattcaaagatttgtgaatgtatagaagatcatagaccttgttgcattattcttcttcttctcactcatatgtcagggaagtatgctgaacaaataaaagtttgatcatctaaaccctg

SEQ ID NO: 92869 - DNA, 537 bp, Arabidopsis thaliana columbia
cggcactatacgactcacttagggaaagctggtacgcctgcaggtaccggtccggaattcccgggtcgacccacgcgtccgggcgaaatcaatggcgacgctagattctggcaccacatgttcctcctggaatcaatccggcgaccgtttagccgccggatctctcaacggaaaactttctatatacgaatcctctacttcgtcttcttcgactttcagttgcacttccaaagttagggttagtgaatcgagtatcgtaaagatcgtttggttgccttcagagtacggcgacgcagtagcctgcgtttccgaagacgggagcttatcgatttgggaggagctctctgaagacgcacatggtcttgaatggaaattgtgtaagagtatgaagaataagtctagccaagtgctcgatgttcaatttggagtttccagaaagagtctaaagatgggttgctgcatattctgatgggtaccttaggggttttgagctcttgaatccattggagctaaagatttggaacttcaggcttagtt

SEQ ID NO: 92870 - DNA, 523 bp, Arabidopsis thaliana columbia
taaacggaaaaaatcgctgaagctcatcggaggcgaaaatggcgaaatcaatggcgacgctagattctggcaccacatgttcctcctggaatcaatccggcgaccgtttagccgccggatctctcaacggaaaactttctatatacgaatcctctacttcgtcttcttcgactttcagttgcacttccaaagttagggttagtgaatcgagtatcgtaaagatcgtttggttgccttcagagtacggcgacgcagtagcctgcgtttgcgaagacgggagcttatcgatttgggaggagctctctgaagacgcacatggtcttgagtggaaattgtgtaagagtatgaagaataagtctagccaagtgctcgatgttcaatttggtgtctccagacagagttttttgtttgatgcagcatattctttttgttctttttggttttttatttttttattcctattagttttttttttttatcttcataattattttatttttgtataactaatttattttttttt

SEQ ID NO: 92871 - DNA, 613 bp, Arabidopsis thaliana columbia
  unsure (1)..(613): unsure at all n locations
nnnnnnnnnnnnnnnnnnnnnnnnnnnnnnnnnnnnnnnnnnnnnnnnnnnnnnnnnnnnnnnnnnnnnnnnnnnnnnnnnnnccacgcgtccgcggacgcgtgggtccggacagtatcgccggtggttaaggagctttgtaagaagcataatctaccgtataggagtctttcgtggtgggaagctaatgtgtggacgattaggactttgaagaacgcggcgattcaagctagagatgcgactaatcctgtgttgaagaacttgctttgggaagctgtgaacacgcatggctaaatatgtagttttttatcacggtagagttacacctaaaacagttcaatctaattaaaaagtacatatttattttgattttctgctgagtttataattttctaatcgctaagcctaagaatctatttttgataaacaaatttgtcagacatgcgtgcttgttctacgtttaagacggatcgtgcgggtctaatatacatgacaaagtactccaccgaaaaacccgagcttttgaaccaaattgtttgagttcccgtcaatgtaaagttttatctggaagggttcatgctttttatccaacaaatgaaagacccttttgccc

SEQ ID NO: 92872 - DNA, 381 bp, Arabidopsis thaliana columbia
aatgtattgggtagaggtggttttggtaaagtgtataagggacgtttagccgatggcaatctagtggctgtcaaaaggctaaaagaagaacgtaccaagggtggggaactgcagtttccaacccaagttgagatgatcagtatggccgttcataggaacttgcttccgcttcctggcttttgcatgactccaactgaaagattacctgtttatccctacatggctaatggaagtgttgcttcctgtttaagagagcgtcctgaaggcaatccagcacttgattggccaaaaagaaagcatattgctctgggatcagcaagggggcttgcgtatttacatgatcattgcgaccaaaaaatcattcaccgggatgttaaagct

SEQ ID NO: 92873 - DNA, 862 bp, Arabidopsis thaliana columbia
  unsure (1)..(862): unsure at all n locations
nnnnnnnnnnnnnnnnnnnnnnnnnnnnnnnnnnnnnnnnnnnnnnnnnnnnnnnnnnnnnnnnnnnnnnnnnnnnnnnnnnnccacgcgtccggctatttgcaaagttgtatttggagcttaaaaccctaaacccagaaatccccaactcttaaacttgagaagatgatggctgatgacactgaactcgtcagtaacactgaccagaagatggaagacgcttcagccgaaaaccctgcccgagctgatcccccctcatcggatgattccggcgattctgattccgactcagaagatgaagccgagtcgaatcagcagattgtaaccttggagtcggagctctccgctaatccttacaactacgatgcttatgtccaatacattaagcttctcaggaaaacagccaaccttgaaaagctaagacaagcaagggaagctatgagtgccatatttccgttgagtccttccttgtggcttgaatgggcaagggatgaagcgtctttagccgctagtgagaatgtgcctgaaattgtgatgctttatgaacggggactttctgattatcagtctgtatctctntggtgggactacctgagctttatgctagaatttgatccatcagtgcgtggatacccatctgaaggtatttccaaaatgcggagtctttttgaacgtgctattccggctgcgggcttccatgttactgaagggcatagaatatgggaaggatatagagaatttgagcaaggtgtcttagccactatcgacgaaggctgcattganggagagaataagcagatccaaggatcagatgcatattcaccgtcacctgtctggtcctttagaaacttgagctccaccc

SEQ ID NO: 92874 - DNA, 351 bp, Arabidopsis thaliana columbia
accacgcgtccggccgccactgcatccttggactccttcggaagcttgatactgttcttcagcttctctctcttgctcgccaccgacggcgactcctctagcatcctctgaagacctccgccagctcttggatccaccatctccgccacaatctccttctgaaactaataattcacgagattcttcactgacagctgaagatacagagcaagactgtccacaatccttcgtaagactatcgtccagtaagatgctatcctcatcttcatatcgaaggcttgctgcaggagatgagcatgatacttccgtaggtgagagatcttcacaattccaccaaatccagtcaacgag

SEQ ID NO: 92875 - DNA, 380 bp, Arabidopsis thaliana columbia
attcttgctccaaccaggtaacctcaaatctctccaaacgcttctcttgtctcacattatccccaaacgagtcgggtcaaaccaatggcctgaggagaattcgggtcgggtcaaacacgtcacgttagggcatgaccaagtgctgcatttgagtaaactcaaaggaacaaatggaaagagattggtgaattccgctgtaattacccgacccgatgatttaacccgacccgacgggttgatccacggaatcgaacggcttttaatccctcgttccgttcaagaagatttcaaccgacggagaaatctccgatcaatctccgccgtattacccgaaggagctccggaaatcgacccgagaaccaaccgtctcaagaaatctg

SEQ ID NO: 92876 - DNA, 544 bp, Arabidopsis thaliana columbia
  unsure (1)..(544): unsure at all n locations
nnnnnnnnnnnnnnnnnnnnnnnnnnnnnnnnnnnnnnnnnnnnnnnnnnnnnnnnnnnnnnnnnnnnnnnnnnnnnnnnnnnccacgcgtccggagagaatggcgagtaatcaacaaccaccgtcgaatctacagacctacggtgtaccaatttacgccgtcgactggattctagaggaagctgtcagatccaaaatcactaaggatcaggatgatgatgatgatgatggatcgtcgtcgtcgtcgtacatcgttttatccggcggaggaggagaaggacgaagtggaatacctaatgtcatcttaatctgtcgtgttgatctccacaccaattctctctctgaacaacctattggtaggcgtgtgattggcactgatctaccttatcgtatggctattcatcctcgtcaaggtggtcttatttgtgcattgcctaacagttgcagactgtttgattgggaaaacattatagaggatgataatgaggaagagtcagagaaagttgttaaagagttaaaagatgttggacaacagttgtctctc

SEQ ID NO: 92877 - DNA, 546 bp, Arabidopsis thaliana columbia
  unsure (1)..(546): unsure at all n locations
nnnnnnnnnnnnnnnnnnnnnnnnnnnnnnnnnnnnnnnnnnnnnnnnnnnnnnnnnnnnnnnnnnnnnnnnnnnnnnnnnnnccacgcgtccgcccacgcgtccgcccacgcgtccgggtgatggtgttgaggcaatggctgatgttggtggaagcgttctcaccggaattaatgggaatccgcttggggttttggcgaggcaacttggtttgcctcttcataaggttagagatatttgtcctttgtatcttcccaatggagagcttgctgatgctagtgttgattctaagattgaggcatcgtttaataagttgttggatagagtttgtaagcttagacagtcgatgatagaggagaataaatcagttgatgtgcctttgggagaagcgcttgaaacatttcgattggtttatggggttgctgaggatcagcaagagagaatgctcttagattggcatttagcaaacttggaatatgcaaatgctacattgttggggaatctgtcaatggcgtattggatcaagatgatccgtatgagatgggt

SEQ ID NO: 92878 - DNA, 526 bp, Arabidopsis thaliana columbia
  unsure (1)..(526): unsure at all n locations
cggcannnnnnnnnnnnnnnnnnnnnnnnnnnnnnnnnnnnnnnnnnnnnnnnnnnnnnnnnnnnnnnnnnnnccacgcgtccgttttgttcaacttcaatgactaccccaatggaatggtcacactcttcaatctgctagttatgggtaactggcaagtatggatggagagctacaaagatttgacgggcacgtggtggagcattacatatttcggcagtttctatgtcatcactattttacttctgttgaatttggttgttgcctttgtcttggaggcgttctttactgagctggatcttgaagaagaagaaaaatgtcaaggacaggattctcaagaaaaaagaaacaggcgtcgatctgcacggtcgaagtctcggagtcagagagttgatacacttcttcatcacatgttgggtgatgaactcagcaaaccagagtgttccacttctgacacataaaacaaaacaagatcggtaagagcttatttatacgtttatactgggaatctttgattctatatgga

SEQ ID NO: 92879 - DNA, 1119 bp, Arabidopsis thaliana columbia
  unsure (1)..(1119): unsure at all n locations
tctgantgttttaggaaccgctgaactgctactctcatgtgttttccctgtcttctctcacgggttctatttcccaaatcagatataaaaatttcttcatctcatttctccgtaggtctttggagggcttgtgaatgctgggaacaaaaagctctttgaaaccgaattggctgaggatgagtatcctttttaactttctgaaaaacttttaatgcactcaacacagtcttagtacaccttctctgttcctgtgattgctagtgtggttttaattttttaattactgggggtaaaaacggtttcagtataagatccgttcctttgacgggaaaaactcagctaccttttgttcaacttcaatgactaccccaatggaatggtcacactcttcaatctgctagttatgggtaactggcaagtatggatggagagctacaaagatttgacgggcacgtggtggagcattacatatttcgtcagtttctatgtcatcacccttttactcctggtgaatttggggagttccactgacgccaactcctaggagcccgatcaaccagagcccatgattgttgtaaggaaccttaactctgcttcttagatcgacttataatgcgtgtttgtttcaggttgttgcctttgtcttggaggcgttctttactgagctggatcttgaagaagaagaaaaatgtcaaggacaggattctcaagaaaaaagaaacaggcgtcgatctgcagggtcgaagtctcggagtcagagagttgatacacttcttcatcacatgttgggtgatgaactcagcaaaccagagtgttccacttctgacacataaaacaaaacaagatcgttaagagcttatttatacgtttatactgtgaatctttgattctatatggagagatcaatagaatctagaaggtgactaaattttttcttcttttgggtgaagatttaatataagacgattgtgttataatttgtcatgaaaacatatgactatatgactatatgagcatcaatttctttaacacttttgtaatgtttacccaaagggcggccgctctagaggatccaagcttacgtacgcgtgcatgcgacgtcatagatacttctatagg

SEQ ID NO: 92880 - DNA, 499 bp, Arabidopsis thaliana columbia
  unsure (1)..(499): unsure at all n locations
nnnnnnnnnnnnnnnnnnnnnnnnnnnnnnnnnnnnnnnnnnnnnnnnnnnnnnnnnnnnnnnnnccacgcgtccgcgagagtgagagagagagacacacacacagcgagtgaaaatgtctccggagaagaagagtcaaaacttccctccaataacggaatgcagagacggagagtacgattcgatagccgccgatcttgacgggactctgcttctctcaagaagctccttcccttacttcatgctcgtcgctgttgaagctggaagccttttacgtggactaatcctccttctctcgttaccattcgtcattatctcttacctattcgtatccgaatctcttggtatccagatcctcatcttcatctcattcgctggtctcaaaatccgcgatatcgaacttgtctctcgcgcagttcttccacggttttacgcggcggatgtgaggaaagacagttttgaggtgtttgataagtgtaagagaaaagtggtagtgacg

SEQ ID NO: 92881 - DNA, 478 bp, Arabidopsis thaliana columbia
agaacaaatgctatatctctgtaacttcagacacaagaaaaccaaaacactaaagatgagaacacttgaagcttttgctctgtccctgtttcttgtcttcgtagtaaaatgggtcaattctgactctagttcttctcctagtaaagatcaatttctgagttgcatgtcgacacattctgattccagcttcataaaccctaaaagcttcatccacaaaccagattcaagagtctacaccgatttctcgcagtctttaatatcacaaaactacagatttctgaccttgaatttcacaagccagaagccgattctgatcgttacaccaagaactgatactgaaatccagagatcattactctgtagcaggaaacttggggtgaaagtaagaaccaaaagcggtggtcatgactatgaaggcctttcttatctctcattacactcgcctttcatcatactcgatctcgttaatgttcgatcg

SEQ ID NO: 92882 - DNA, 538 bp, Arabidopsis thaliana columbia
atcgactcatttagggaaagctcgtacgcctgcaggtaccggtccggaattcccgggtcgacccacgcgtccggattgacaagataaaatgtgagaacctagcgaaaagactactttcgttaatgctgaaactagctgcagtttttcgttatactccgcttgagcttctgagaagccagactacagtcagcccttcaagtctaacagaagatgacagtcggtgcagcctcatctcaccacctcctagagagcccacaatgaaagaccggattcttccatgtttggaacgtattcagaaactggagaaaagttatgaggatattcggaacaaacccgttgcaatacctggagagaaggagagaatgttgatggattctttagatagaatcaagtcaggtgaagtttgatctcgacaaaacaaagagggcttttacacgccacgggggatgaaacagatggagataacctgaaatgctgcaaaatatacgagaactcccaactttcacaaaagaaagaggattggttttgttaataaacc

SEQ ID NO: 92883 - DNA, 415 bp, Arabidopsis thaliana columbia
gtcgtttaaagtctgatccttttcatttttctttagtgtgtgaaaagagaaatacagttatggcggagatctcgggaaacggtggtgatgctagagacggagctgtggtggtcaatctcaaggaagaagacgaacaacaacaacaacaacaagctattcataaacccttgaagaaacaagactctctcctctctatctctgtccctttcttacaaaagttgatggcggaggttttgggaacatacttcttgatattcgccggttgtgccgcggtggctgtaaacacacaacatgacaaagccgtgactcttccagggatcgccatcgtttggggacttaccgtcatggtccttgtttactctctcggtcacatctccggtgctcatttcaatccggccgtcacaatcgcattcgc

SEQ ID NO: 92884 - DNA, 1063 bp, Arabidopsis thaliana columbia
  unsure (1)..(1063): unsure at all n locations
nnnnnnnnnnnnnnnnnnnnnnnnnnnnnnnnnnnnnnnnnnnnnnnnnnnnnnnnnnnnnnnnnnnnnnnnnnccacgcgtccggtaaaacactattatagaagctcttacaaagaaaaaatatgaagaaagctacggcattgatgaaacatatcgttgcattgttgagttccatggcgaaggcaaaatctatagccataaagaacaaaacgagtgctttcaagacacgagtactcatgttgtctctagtgaaacacaagaaactcgggttccgttccatttccaacaagattcaccacctcttgggccatgcggatcaagacgacgataacgaccaggaccaagacaagaacaaggctatagtcctctacaacagcaaggcatccacaatggctcatcatgaggaatatgacgttcacgaggaggaaagcgacaagtatcctgatctgaggcacacgttgttcgaaggagaggaggacttcggggacttggaggaggaaggtcaaggtagttctgtgatagatatggtgaggacctcgaaggaagaagaaggagagaatttcaagctagaagatgagatcgaccatgtcgcggatctctttatttctaggtttcataagcagatgaagcttcagaaactcttgtccttcaagaggtatcaagaaatgctagcccgaggcacctaaacccatatccatatatatatataaacatgttggcaatagatatgaataatagattcatattatgatctttgctaacgtacgttcttattttgtgttgtctatgataaatccttcgagttctcttattttctaggatcgaaatattacggtctcttagatctgttttcatttaatatgttgaagttgaaggaaggatctgctttgcggaatatgttttcttcctccttgagaccgtactgtgtagatcttttaagtgttccaatatagagcattattttttggcttaaaaaaaaaaaaaaaagnnnnnnnnnnnnnnnnnnnnnnnnnnnnnnnnnnnnnnnnnnnnnnnnnnnnnnnnnnnnnnnnnnnngtccta

SEQ ID NO: 92885 - DNA, 1345 bp, Arabidopsis thaliana columbia
  unsure (1)..(1345): unsure at all n locations
atgattctccaagctactatacngactcactatagggaaagctggtacgcctgcaggtaccggtccggaattccgggtcgacccacgcgtccgctgactcccaaaatcgatcagatttttagctacgattcaaccgctgccgttagattacaggcgaatgaatctctagagaagctatcggaatcggtgaatgcaatgatgacggagtttcaatcgtcgattacgaaggaatcgtcgaaatcggcgatttctggcggcggagttcatcagctcacgaggtatgtgatgaacttcatcgtcttcctcgcagactacagcgattctctcgccaccattctcaaggagtcatcgttacctttaccggaggattacttcagtagcagcggcgaagagaatccaggatccggtgatcgttctccgatggcggcgagactcgcgtggttgattctcgtcttgctctgtaaaatcgacgccaaatctcggctctacaacgactcggctctatcgtatctcttcctagcgaacaacctccattacgttgtgacccaaggtccgtacatcgaatctcagactcgtactcggagacgattgggtagcgaatcacgaggttaaagtgaatcaatacctcgagaaatacgaaaaaatggcctggggggatgtgatagcgtcgctccccggtgattcaacggcggggacggaggcggaggagtctctagacggttcaacgaggcgttcgaagaggcttacaagaagcacaagacatgggtcgtacccgacccgaacctgagagacgagatccaagcgtccatagcgagaaaactaatgcccgggtatacgggtttctataagaaacccccggtcgggtcatgcaatattgtcagatttacccctgaagatctaaataattacataaccgaccctatatgttggtttaggaagatccgtgccgttatccaaaactaagaagtatatggttagcccaagcccatacgacggatttgaagtaatagctccatgtaaaaagccctcatacgtgtaactctgtgaaatcaacgaatcataggccggtcttaggctaaaagcccatatatcaattttgggcttcaaattatagaccatagatataaaagtctacatttcatttgccatattcagaatcagtgtgtacttgtgcttgcttttgttctctattgatctgatcttcttgtacgtgtgttgttcacactcacgcctaaatcacattcttctttataaaaaaaaaaaaaaaaaagnnnnnnnnnnnnnnnnnnnnnnnnnnnnnnnnnnnnnnnnnnnnnnnnnnnnnnnnnnnnnnnnnnnnnnnnnn

SEQ ID NO: 92886 - DNA, 631 bp, Arabidopsis thaliana columbia
  unsure (1)..(631): unsure at all n locations
atacgactcactttaggggaagctggtacgcctgcaggtaccggtccggaattcccgggtcgacccacgcgtccggtggagattctggctaagctatccccggagtatcctcttccgaccaagtgcaaggacgagaagaaccctagagccaagccatacaaattcactaaccagaagattaaggacttaggcttagagttcacttccaccaagcaaagcctctacgacacagtcaagagcttacaagagaaaggccatcttgctcctcctcctcctcctccttcagcatcgcaagaatccgtggaaaatggcattaagatcgggtcttgaaaagcttattaattccctcaagtatcccccttaagtatccttaaccattgaagttgcttttgtttgttgtctctggttatgtgaaacctctgtttcaatatgtctcgtctggttatgaatctgtacactcagttctttggccaaaccgtttgatggattttgtagtcaagtcttcatgtttgatctatgtaatagattacacttaagtaaacaacttcattttgttttttaggaggagattatcttgccagcacaactgagtggggcgcgtttaccaagatccatattnnnnnnnnnnnca

SEQ ID NO: 92887 - DNA, 825 bp, Arabidopsis thaliana columbia
  unsure (1)..(825): unsure at all n locations
atgatctgccnnnnnnnnnnnnnnnnnnnnnnnnnnnnnnnnnnnnnnnnnnnnnnnnnnnnnnnnnnnnnnnnnnnnnnnccacgcgtccgcggacgcgtgggttttggtttcgccaataatggaactcttcttccaccattttcctggaaaatctcggtatcgagaagatgaatccctagacagataaatctagaatcactcaaatctctgctcttcttccgattcagatcgtatcgaattttgaattttgtatctcgctacactgttcgattgagaattctttttttccgattgattcgaatcggattttgtttttttcctcgatatagaatgacttcgaatcaacgtatgttgttctactcctgcattgcgaaaggaacagtgattctcgcagaattcgcttcaaaggaagagccaggaatcgaagatctagctttgagatgcattgagaacgtacctccacatcattcgatgatctctcacacagtccataagagaacctacgctttgatcatcgatggattgttttcgtttttcgcggatttagatgagggcgtagcgatatcggagtctgtatggctattcaatcgattgaaatcagctacagagtctctaatggaagaccgatctactgcggattcgttggtaatccgactcacactgtctccatcaaagctagatccagtttcgctgaaatgctgctattgggggatcataaaaggtttggattggagttggataccgagagttaccaggggataaagtatatcaagttggatctcaaggcgaaagcgggcgtgtgcgtttagaagcgtgagtgtg

SEQ ID NO: 92888 - DNA, 353 bp, Arabidopsis thaliana columbia
caaaagaagagtagacttcccatcatcctccgctataatgcgccactctccgcgttatctataatacgctagtattccgtgcccgctataatgcgcaagtctccgtctcagcctctcttcgccgtctgatgtctgatcttctaggtcacctccacaaattcgaacaagaatttgtctttatgtgcaaaaccaaaatgggagtcaatgcttcagagccaaaacgaacacgatcgcgaccaagtcaatcgcaggggaggcatccgtcgacgagacgatctccgtcaacgagcaacaccggcacaacaacaaccacgacgacatcgaattctaacaaaactggtgcctcctcttcc

SEQ ID NO: 92889 - DNA, 535 bp, Arabidopsis thaliana columbia
  unsure (1)..(535): unsure at all n locations
ccccccccgcccccggcccgcgggagggtagtttgccnnnnnnnnnnnnnnnnnnnnnnnnnnnnnnnnnnnnnnnnnnnnnnnnnnnnnnnnnnnnnnnnnnnnnnccacgcgtccgaggactatttggaattttgatattgtggatgtacgctaatttttggatcactggaacattatttatagttggaggttatttgttctctttgaatcacgcacgggtggtggttcttatggcgacaatgtatgcaatgtactgtgtcaaagtcagacttggatggcctggagttattctctcgatgaatcttgcattcttgtccaacgatatatttatttgtcttcttcaatggtgtgatactgttagtgaaaaaacacaagtggaggagccaacgaaacctgaaactgtaatagacgaagagtttccaggagagtttgagtattcttctgttcctgctgaagaagcagagaaaaaggttcatgaagataagtcgtccactaagccagcatcatcgggaattgttgcaagtaacctgaa

SEQ ID NO: 92890 - DNA, 549 bp, Arabidopsis thaliana columbia
  unsure (1)..(549): unsure at all n locations
tattatctccttttctctcccggctctctgctcctctagtatcgccgannnnnnnnnnnnnnnnnnnnnnnnnnnnnnnnnnnnnnnnnnnnnnnnnnnnnnnnnnnnnnnnnnnccacgcgtccgcttgaactcgcaaatttcaagactgcaactgtagaagacattgcaaatgttcacgacaaggcttatgtctttggcctagaaaagtgtaggcaatggatgaggcttcagattcgggactaattttcattgaaggctctggaccaacatatgccacttcaacgacattccaagattcacttatcgcagcaggagccggaatggctttagttgattcagtgatcgcagcatccagaaacagcgtagatccacccattggttttgcattgataagacctcctgggcaccacgccgtgccaaaaggtccgatggggttctgtgtttttggtaatgtggcaatcgcagctcgtcatgcccaacgcacacatggtctgaagcccctcttcatatttggctttgatgttccccccagcgatgtttcatatg

SEQ ID NO: 92891 - DNA, 553 bp, Arabidopsis thaliana columbia
  unsure (1)..(553): unsure at all n locations
nnnnnnnnnnnnnnnnnnnnnnnnnnnnnnnnnnnnnnnnnnnnnnnnnnnnnnnnnnnnnnnnnnnnnnnnnnnnnnnnnnnccacgcgtccgctctctgcaactcaaaaaataagattgtgaaaaaccctaatcgtaatctctcggttgagtcagtcttaaggtatcaatggggaaaaacaagagagagaggaaagatggagaagagaaatctccacacgctgccgccactgtttgcgtctctggctggccttattccatcaccaacgcacagcttgaagaagcctttagtgaagttggcccagtcaggcgttgctttctggtcacaaataaagggtctgatgaacaccgcggctttgcgtttgttaaatttgctttacaagaagatgttaatcgtgccattgagttgaagaacggttctactgttgggggccgtatgattactgttaaacaggctgcacatcgaccttctcttcaagagcgtcgaacaaaagcagctgaagggatctctgtacctgataattcccagggacagagtgacaaggacacttc

SEQ ID NO: 92892 - DNA, 876 bp, Arabidopsis thaliana columbia
  unsure (1)..(876): unsure at all n locations
nnnnnnnnnnnnnnnnnnnnnnnnnnnnnnnnnnnnnnnnnnnnnnnnnnnnnnnnnnnnnnnnnnnnnnnnnnnccacgcgtccgggcctgcgaaaatgagtgaagagaacatttcatatacagttgtttctaataagaaaaaggagattagcgaaaactcaaaacaggaacaaagttaaaagagtgagagagaaagaaagagagaagatgaaggtacaggagggtttgttcgtggtggctgttttctaccttgcttatacgcagctagtcaaggggcaacctcgcaaggagtgccaaactagatgtggcaatgtcgcagttgagtacccttttggtacttctccaggttgttactatcccggagatgaaagtttcaatcttacttgcaacgagcaagagaagctcttctttggcaacatgccagtcatcaacatgtctctcagcggccagcttcgtgttcggctagttagatccagagtttgctacgatagtcaaggaaaacagactgactacattgcccagcggaccaccctgggtaatttcactctctctgaacttaacagatttactgtagtaggttgtaacagttacgcatttctccgcacatctggagttgaaaaatactcaactggatgcatatcaatatgtgattctgccacaacgaaaaacggatcatgttctggtgaaagttgctgccagatccctgtccctagaggatactcttttgtcagagtaaaacacatagctttcacaccattctactgtgcatctgtntaatccttgcacctacgcctntctcgttgagatgggatgtttgacttcatgcttgggagatctcacatctgcgaatgtactacgtccctgagactagatt

SEQ ID NO: 92893 - DNA, 922 bp, Arabidopsis thaliana columbia
  unsure (1)..(922): unsure at all n locations
atacgactcacttagggaaagctgctacgcctgcaggtaccggtccggaattcccgggtcgacccacgcgtgcgctttcctctctctttcatctttcagatccagagagagagaaagagaacaaaacatgaagctttattctgtttccatcatcatcttcgtcttaattgctctctccaccatagttaatgctcaacaagctgctacagattcctgcaactcaactctacctctcaacgacctcaccttcaacaccagcctccttcaatgcaccgaagcttggactccccaaaatttcatcctccgatatgcaagaacggcagagaacacatggagctttatcttatcggcgccggattcaagcgctttcatcgggatcggattctctaccaacggtcagatgatcggaagcagcgcgatcgttggttggataccttccgacggcggttccgggactgtgaaaccgtacttgctcggtgggaaatctcccggagaggttaatcctgaccaaggagatctaacgatcgtcaacggctcgttgaagatcgaatccagtgtcgtcgcgtctttacatgagatttcaattgacggcgacgctggccgcggcagaagttctttctttcacggtgtgggacctgccggattcttcccatcttcgccggattttaaggtttagagagcaccgtttcgtgaccaccacggccatcaattataataaaaggttcgnaaagtgtggtaaagtttacccactttaaggtaaagaggcanaatggggtattaacattttcgnttggggaatttnnttntcgttggccnngtggtcgcaattaggaatgggcccctttggtttttnccaatggttcaannctggntttccnnggtaatgggaatttgggtggnttaaacggtnagccaaaattta

SEQ ID NO: 92894 - DNA, 678 bp, Arabidopsis thaliana columbia
  unsure (1)..(678): unsure at all n locations
nnnnnnnnnnnnnnnnnnnnnnnnnnnnnnnnnnnnnnnnnnnnnnnnnnnnnnnnnnnnnnnnnnnnnnnnnnnnnnnnnnnccacgcgtgcggcctgagacatcatcatcacattaccaatcatctccaatggcaaaatacgccggaacaagaaccagaccggttgtatgtatctccgacgtcgttctcttccttggcggagctttcatgtcactaatcctcgtctggtctttcttctccttctcttcaatctccccaaatctcaccgtgaaaaacgaagaatcctccaacaaatgttcttcaggaatcgatatgagccaagatccaaccgacccggtttactacgacgacccggatctaacctacacaatcgaaaaaccggttaaaaactgggacgagaaacgaagacgttggttaaatctacacccttcgtttatccccggagctgagaattcggacggttatggtaacaggttcacaatcttgcgccgtgtaaaaacccaatcggagatcatttgttgcttccgtttttttaagacaaagttggttattgtcgggtccntgggcatgnnatttntttnggaacggttttttatcngaggtgatttttttgggggaacttcggnggtnaaggggggtgtttcancttgggggggggctgnggtgtnnngttttt

SEQ ID NO: 92895 - DNA, 1040 bp, Arabidopsis thaliana columbia
  unsure (1)..(1040): unsure at all n locations
ccagcatctatacgactcactatagggaaagctcggacgcctgcaggtaccggtccggaattcccgggtcgacccacgcgtccgcaccattcacgtttctcttcttctcgtcacaaattccttatctctctctctctttctctcttatataaagagagaaatatacaaaacctccaagtacgtttcatcgatcctacctaattcatcaaaaaattgtgtgaggcttatttgatcaataattatgaattctggtcgtcgatcgttaatgtccgccacggcgagtctgagtttgctgttgtgtatcttcaccaccttcgtcgtggtgtcgaacggtgagcttcagagatttatagagccggctaaaagcgacggttccgttagttttatagtcatcggagattggggtcgtcgtggctccttcaatcagtctctcgttgcttatcagatgggaaaaattggagagaagattgacttagatttcgtggtgtctacgggagataacttctacgacaatggattggttagtgaacatgatccaaacttcgaacattctttctctaacatctacactgctccatgtcttcagaaacagtggtacagtggtttgggaacnatgactatagaggtgacgcaaatgctcagctgagttctgttctccgggaaatcgacagccgttggatttgtcttcgatcattttgtcgttgatgcagagttggtagagatgttctttgttgacacgactcctttcgtgaaagaatactacacagaagcagatggtcactcatatgattggcgcgcagttccatctcgcaactnttatgtcaaagctcttctccgtgatcttnaagtttccttaaagagttctaaagcaagatggaagattgtngttggtcaccatgcaatgagaagcattggacatcatggagatactaaagagctcaaccggaggagcttctttccgnttcttaaaagnggaccgggtgtttgatcctnttccanggaatgggccatnntccaatggctttnaaacaantnngggt

SEQ ID NO: 92896 - DNA, 358 bp, Arabidopsis thaliana columbia
acggacgcgtgggtcagaagacgcattggcgcatcaaaacacatcttgccatcagtcatcttgatgtcagcaaaattaataatatcgtggctgatatgcgcaaggtgttgtctaaaaatcctcaaatcgagcagcaaaaaatacacagaagagtctttctggaggatatagatccagagaaccaagcccttaggattctaatatcctgttttgtcaagacttcacgttttgaagaatacctgtgcgttaaggaagcagtgctcttggatcttcttactgttattaggcatcacggggcacgtctagcaactcccattagaacagtacagaggatgcgtaatgaggctgaggtggacac

SEQ ID NO: 92897 - DNA, 871 bp, Arabidopsis thaliana columbia
  unsure (1)..(871): unsure at all n locations
nnnnnnnnnnnnnnnnnnnatacgacacactatatggaaagccggcacgcctgcaggtaccggtccggaatacacgggtcgacccacgcgtccgcacagcttgtaaccaaagaacctatatcaccaaagcctctttcatccccacgtaagcaacaacaactacaaacagagaccaaggaagcaaaagcaagcgtgtcacaaaccaaactcactactctaactgcaccaggaccaccaccaccaccaccaccaccgacaacatcgcccacaaccgccgcgaaacgaaacgctgatccagcacagccatcaccaacagaggcataagaagcgtcacagactgtcgcagatttaccagaaccagcgtctgatattcagcgagcgtcatcgtcgaaagagactataatggaggaaacactaaggatcactcgtgggagtctgagaaaagctcgttctgcgggagcaccgcgctaagagaatgattaaaaaagaaaaggggaacacataattttaaatctctaacccctttagattggtttctctctaaaacagcaataatgagtcttatttgagtatttggtggtttaaggccaaggaaatctcagacttcagactaatattggatggggatctgcccttagctgagtaaaccaaataaaagttggaaaaaaattatggattacttcactacaaaggttgtttcaaggcaaaaacgtggccttcctctgtgacaaggtaaacccattgaccatcggggccctctgtaagaaaataaccttattacgggctttaaaaatagagtctaaaaaagcccccaattgaaaacgggcgtggcaacttgacggcggagaaacctgggataccgtaagggttg

SEQ ID NO: 92898 - DNA, 496 bp, Arabidopsis thaliana columbia
ccacgcgtcaggtcattttgaaagctgagttttttttgtgaagcgagcgagcgtgagaaggtgtgacggggaagagaatggcgaaggaagcggtcaagtatgtatgggaaggagcaattcctctgcagattcatctccacaaatccgacgtcgcttctcaccctgctcctcctcctgctcttgtgttagcaccaagaataggatatttgcctctgttgattcctcttataaagccttatttcaaggattcacttcctcctggtgaagattcaatttggtttgattacaaaggatttcctctaaaatggtatataccaacaggtgttcttttcgatctcctttgtgcagaacccgaaagaccatggaatctcacgatacactttagaggatatccttgcaacatactgataccatgtgaaggagaagattctgtaaaatggaactttgttaattctttgaaagaggcacaatatatcatcaatggaaattgcaagaa

SEQ ID NO: 92899 - DNA, 527 bp, Arabidopsis thaliana columbia
  unsure (1)..(527): unsure at all n locations
nnnnnnnnnnnnnnnnnnnnnnnnnnnnnnnnnnnnnnnnnnnnnnnnnnnnnnnnnnnnnnnnnnnnnccacgcgtccgggcgcttgcgtttctcgatgtctcgagggatgctatggcattggatccacctgattttataactggttatgagtttgttgaggaagctttgaagcttttacaggaggaaggagcaagtagccttgcaccggatttacgtgcacaaattgatgagactttggaagagatcactccgcgttatgtcttggagctacttggcttaccgcttggtgatgattacgctgcgaaaagactaaatggtttaagcggtgtgcggaatattttgtggtctgttggaggaggtggagcatcagctcttgttgggggtttgacccgtgagaagtttatgaatgaggcgtttttacgaatgacagctgctgagcaggttgatctttttgtagctaccccaagcaatattccagcagagtcatttgaagtttacgaagttgcacttgctcttgtggctca

SEQ ID NO: 92900 - DNA, 527 bp, Arabidopsis thaliana columbia
  unsure (1)..(527): unsure at all n locations
nnnnnnnnnnnnnnnnnnnnnnnnnnnnnnnnnnnnnnnnnnnnnnnnnnnnnnnnnnnnnnnnnnnnnnnccacgcgtccgcaagtaacaggccacgttttggctctttctctacaaatgtacggctgcagggttatccaaaaggcgttagaggtggttgaattggagcagcaagctcgaatggtgaaagagcttgatgggtctgtcatgaaatgcgttcatgaccagaacggtaatcatgtgatccagaagtgtatagagcgtcttcctcaggattggatacagttcatcatttcctcattctacggaaaagttttagctctttcaacacacccttatggatgccgtgtaatccagagggtactggagcatattgatgatatagaaacccaacggatcattatggaggaaatcatggattcagtctgtactctagcacaagatcaatacggaaattatgttatccagcatatcatacaacatggtaaacctcatgaacggtcagaaattatcaataagcttgctg

SEQ ID NO: 92901 - DNA, 852 bp, Arabidopsis thaliana columbia
  unsure (1)..(852): unsure at all n locations
cnnnnnnnnnnnnnnnnnnnnnnnnnnnnnnnnnnnnnnnnnnnnnnnnnnnnnnnnnnnnnnnnnnnnnnnccacgcgtccgcaaatgttggaggaaatcctggtgctggaacacttgacttcttgcgcaacagccaacagttccaagctctgcgagcaatggtgcaagcaaaccctcaagttctgcagcccatgcttcaggaactgggaaaacagaacccaaacttgatgcggttgattcaagaccaccaagctgacttcttacgcttaatcaatgaacccgttgaaggagggggagaaagtggcaacctccttggccaaatggctgcgggaatgccacagccacaggcgattcaagtcacacatgaggaacgtgaagccattgaacggcttgaagcgatgggatttgagagagcattggtgttggaagtgttctttgcgtgcaacaagaatgaagagttggctgcaaactatcttctagatcacatgcatgaattcgaggaataagcttcttcagattactttacctactctctatctttcgcattggtccatatgttttagctatatatgtgtgggatgccaaatccatgacctcgtcactttgtccatgttcatggctcagttctcagtttaaaatgaagtttgtcatgtgttctttctttggattgtcggtagtccctacaaaatatcttgttccagttatttttgttgaattggggacaggtattatttctgtatgtgcctcaatagttaaattatttaattattaataattttttttaaaaaaaaaaaaaaagggcggccgctttaaaagattccaggctacggaagggtgccatccacgttat

SEQ ID NO: 92902 - DNA, 589 bp, Arabidopsis thaliana columbia
  unsure (1)..(589): unsure at all n locations
cctccagctagtgccggacagcctgcaaatcctccagcacagactcaacaacctgcagcagcacccgcaagtggtcctaatgcaaatccgttagatctcttcccacagggcttgccaaatgttggaggaaatcctggtgctggaacacttgacttcttgcgcaacagccaacagttccaagctctgcgagcaatggtgcaagcaaaccctcaagttctgcagcccatgcttcaggaactgggaaaacagaacccaaacttgatgcggttgattcaagaccaccaagctgacttcttacgcttaatcaatgaacccgttgaaggagggggagaaagtggcaacctccttggccaaatggcggcgggaatgccacagccacaggcgattcaagtcacacatgaggaccgtgaagccattgaacggcttgaagcgatgggttttagagggcattggtgtttgaagtttcttttnggtgaacaaggttnagggttgntnnaaatatnttttggtcnattnatgatttgggggtaaggtntttagttctttnccnactttnttttttggatggcccatnttngctttntggngg

SEQ ID NO: 92903 - DNA, 355 bp, Arabidopsis thaliana columbia
acgcgtccatcacattctctttcagataaacaaacagtttcttagtttcgttcgagatgagcggtgaagtttggagatggaacaagcaagcagagatgaattcgataagagattgtttgaaacattgtaattccatcgctatcgacacagagtttcccggatgcttaaaggagactcccatggacgcaagtgatgaaattcgttatagagacatgaaattcaatgtggacaacacccatctcatccagctagggttaacgctattcggcaaaggaatcactaaaacctgggagatcaacttgtcagatttcaacgaatctaagagcttgaaaaatgataaatctatagcgttttt

SEQ ID NO: 92904 - DNA, 1540 bp, Arabidopsis thaliana columbia
  unsure (1)..(1540): unsure at all n locations
nnnnnnnnnnnnnnnnnnnnnnnnnnnnnnnnnnnnnnnnnnnnnnnnnnnnnnnnnnnnnnnnnnnnnnnnnnnnnnnnnnnccacgcgtccgtcagttgccacagcaggaaaactcatttgactgtggcctctttctgctgcactatctggagctatttcttgctgaagctccccttaattttagtcctttcaagatatataatgcttccaactttctttatctgaactggtttcctcctgccgaggcatcattgaagcgtactctgattcagaagttaatatttgaactccttgaaaaccggtcacgggaagttagtaatgaacaaaaccagtcctgtgaaagtccagttgccgtcaatgacgatatgggcattgaggttctctctgagagatgcagccccctaatagactgtaacggggatatgacacagacgcaagacgatcaaggaatcgaaatgactttgcttgaaagatcttccatgaggcacatacaagctgctaatgattcgggtatggtactaagagatttattcgattcaggatccaataacacaggatcattacttgaacaactacaacaaccattcgaggatccgtcttcgtttatcatcttagtacgactcgtcggaagagagcaagtgacatggaaactggtgccagtttatgtgtttgaacgctggagagggcaactttcaatgcatcacggaaactacctctccgagagcatctaattcattctcttcatggaaccttggtattcccctggtgcagaaggaagacgagactgatttgttatctgaaacttcgaatagttctaatgattcaaatcggtatcatagaagacacccccatagaaaatactcatgaagaagaaatcgacgagagtcctccaagagagaccgtctctttaaaatctgcaaccgtgggttctaacactgctgaccataccactgagaatgaagagcccgtttctacacacattgagcttgttgttccatcgagtcagaatgacagagatgaggagaagccattggagcatgatcttgaaattggggacaagacgagtgaagatgttggagatgattgtgatcaaaaggagccaatggaagaagaagatgagaagcgagctgcaaaacggccgaggctatcatctcccactggcgaagctgaggagatggagaaatagagattgtgtgggctatatcaacacaccacgggttttgtgttgggtcttggatggttagacgacttagagggtttatatcaaaccacctttaggaagtgtttataacgttgtaggagtattttacgaagaaaaaggaaagaataacgtctttcatcgttttttatgtaaaatttcgatacgttaacttaagagggttgatgaatatatagcccattttgtggtttttatttgaggttcttccgaggtaattttttacaaaaaaaaaaaaaaaaaagnnnnnnnnnnnnnnnnnnnnnnnnnnnnnnnnnnnnnnnnnnnnnnnnnnnnnnnnnnnnnnnnnnnngtacctaa

SEQ ID NO: 92905 - DNA, 413 bp, Arabidopsis thaliana columbia
ctcaatatttgttctcttctcttctctctctctttgcccgtgattactgattacggagttaattatttttattctgcgtacgttacgtaagagagatattgaggaatggctgcgaagaaggtttttggatcggcggaagcgagtaatttggtgacggagcttcgtcggagttttgatgatggtgtgacacgtggttatgaatggagagtgactcagcttaagaaactgatgattatttgtgataatcatgagcctgagatcgtcgcggctcttcgcgatgatcttggtaagcctgagcttgaatcttctgtttatgaggtatctctactgagaaactctatcaagttggctcttaagcagctaaaggactggatggctccggagaaggcaaagacttctctaacaacgtttcc

SEQ ID NO: 92906 - DNA, 528 bp, Arabidopsis thaliana columbia
  unsure (1)..(528): unsure at all n locations
ccnnnnnnnnnnnnnnnnnnnnnnnnnnnnnnnnnnnnnnnnnnnnnnnnnnnnnnnnnnnnnnnnnnnnnnnccacgcgtccgcccacgcgtccggagatattgaggaatggctgcgaagaaggtttttggatcggcggaagcgagtaatttggtgacggagcttcgtcggagttttgatgatggtgtgacacgtggttatgaatggagagtgactcagcttaagaaactgatgattatttgtgataatcatgagcctgagatcgtcgcggctcttcgcgatgatcttggtaagcctgagcttgaatcttctgtttatgaggtatctctactgagaaactctatcaagttggctcttaagcagctaaagaactggatggctccggagaaggcaaagacttctctaacaacgtttcctgcatccgcggagattgtgtctgagcctcttggtgttgcgctagngatctccggcttggaactatccttttctgttgcccattgatcctgttattggggcaatttctgctg

SEQ ID NO: 92907 - DNA, 703 bp, Arabidopsis thaliana columbia
  unsure (1)..(703): unsure at all n locations
agcaaagttaggtgtccgtcatggcatgtggggagctgtcaagaagctaaactctggtttacgagcgtaccaatccgccagaaaatcagactcatctctatctcggatcgcccaaatggcaagaatcactacaaaactgaacatggattctgcagaatcatcttcaagagatgaagacacaagcagagcaatggaatatgcgagacaacgggaccatttgagaatggactggaaatgggttgttgtaggaggtgtcgcattggcttgtggccttcactctgggatcattggcaaggctttactggctggagctggccagagactggctcgtaggtgagaaaccttgtcgtattcttattatatcttcccttgacagaaaagagaaacatatgcatataattaagggaaatgtattatttttgcaactcctctgagaagggcatgtggttttggtggtgaaccatgtagagtagtagctttaaactatggagtcataagttatttgagttctatcttgtaccacaggatagtgagatatgtattttataaactatatgaatctacatagcttctaaaagcttaaattctttgcatgtgacaaaaaaaaaaaaaagaaaacgaagnnnnnnnnnnnnnnnnnnnnnnnnnnnnnnnnnnnnnnnnnnnnnnnnnnnnnnnnnnnnnnnnggtcctaannnnnnnn

SEQ ID NO: 92908 - DNA, 543 bp, Arabidopsis thaliana columbia
gacccaaacgtaagactcaccagcacctctatttctttctcactctccaagtctcctctgtgaaagctgaaagctcatcttcttccacgtgatttgtcttcccgatcaccaaacctttccggtgatgactctcccttgcgttcgacgccatcttccttggagttctcttcaatcaaccggtaaatcttccactgattttgaagaagattcttccatgttcgatctggttcggctccagagatcgagagttgaattgcctcgaaacagctctagtttcaccagagacgcgcgaccgatagaaataaagagactccaagctgcgtgtaccggagacgaatggcgggaaaattgacttgagcgcgattttctgtgtggatccaaaatgaagaaagaggtgtctcagcagaagttactgtacagatggaagaggaaggtatacgccacgttgatgttcgctttctgctttgggactttcgtatttatacaagctcgtttcgcatctatacaagctcgtttcaatcgaatctctgcgtctctcgattc

SEQ ID NO: 92909 - DNA, 514 bp, Arabidopsis thaliana columbia
  unsure (1)..(514): unsure at all n locations
cccanaagcttgccatatnataaacaccagagccattaacacaccgaaattaaaaaacgttaaggaaccgaaaatatgatgatgaaagtcgttgatctgtctctctctcatcctcctcccacttgtctccgtcgtggaaggtctcggtggtggtggtggtcttggtagccggaagccgatcaagaatgtatctgatccggatgttgttgcggtcgccaagtatgccatcgaggaacataacaaggagtcgaaggagaagttggttttcgtcaaggttgtggagggaacgacgcaagtggtctccggtacaaagtacgatctgaaaattgcggcgaaggatggtggtggtaagatcaagaactatgaggctgttgttgttgaaaagctttggcttcattctaagagccttgagtctttcaaggcgttatagatctttaattggatttttgtttagatccgtctcttctctcgggtatatctatctagcttttgatgatttgagactctgacgttt

SEQ ID NO: 92910 - DNA, 314 bp, Arabidopsis thaliana columbia
aagacgcgtgggttcttctctctctctctgcaaattcaaaacactgaaaaaaacctctcttcattttttaactccctctctctctctctctctatggagagacgaacgagacgagtgaagttcacagcagaatcgtacggtcacaaacgtagcagctacaccatctaacgggtctccgacactggtccgtatcactgttactgatcctttcgctactgactcgtctagcgacgacgacgacaacaacaacgtcacggtggttccaagagtgatacgatacgtgcaggagattagattctgccaaggtgaatctt

SEQ ID NO: 92911 - DNA, 458 bp, Arabidopsis thaliana columbia
tgaaactggaatagtcacgggtgaaagtttcccgggtaaggttaaatccccgggagtagaaagaggaggaagtgagtcatggtcgttttctggtgggttttgggacaaagttataccaaaaaaaaaaaggtttcatggaacatctcataatacattcttgttttttcttttctctcatatgttcttcaaccccttgaggagggagaggtctcaggtttttatcaagtgggggcattattagaggacaatcccttgattttttcttttgttttcttttattatttggttagttgcagtctttgcatcatcattttgtcttttgggggggtttgtatgtttgattaacagcattattcacatttttatttttataaaaaaaaaaaaaaaaaaaaaaaaaaaaacaaagggcggccgctctagaggatccaagcttacgtacgcgtgcatgcgacgtcata

SEQ ID NO: 92912 - DNA, 1418 bp, Arabidopsis thaliana columbia
  unsure (1)..(1418): unsure at all n locations
ccctctcttccgcggacgcgtggggtatatgtgtgtgtgtatatatatacatactcatccacaaaaactcgactgattgatttctccatgaacaacgtcctcctttgatttcacctttttttgttgtcttcttctttcgaaatcaatcatgagattcagatctctcatctctctcctcttccttctcttcttcacttcatctgcttacgctcgattcgtctccctaaacccatcttcaacgagtctaatctccgatggaatcgacggtggttcaaatctcgccggttccggatcggttatcaagtcggttgtttcggctccggctgaggaaaaggaggaagcttgtgagcagacatacgggtttatgccgtgtactaagaccgctcttggaaacgtgtttctgattttggtttatggatttctcatgtttacggctgcgacgtatctctctgctggaagtgagcttcttcttgagatccttggacctggaattgtcggtggtttgtttcttccgatgcttggtgctcttcctgacgctatgcttatcatggtgtctggactatctggagatgcagcaactgctcaaagccaagtctctgtgggaatgggtttgcttgctggttccactgttatgcttctcactgttatctggggaacttgtactgtggttggcaagtgtgatcttcgtgattcaattgctgtaaacaaccaagacaccaaaggctttcacctaaaagattctggtgtaactgttgatatttggaccagctatgctgcaagaataatggctatatcagttattccgttcgtcattgtccagcttccgcagatgttgggctcaacctctggaagacaattgtccgtgttgattgctctaatcctttcagttcttatgttgatctcttactgcgtatatcaggtattccaaccatggatccaaaggagacggcttgcttttgcaaaacacaagcatgttatatcaggaatactaaggcacttgaaacaacatgctctgggaaggcttcttgatgatgaaggtcagcctgatgaacatgtcattcgaaagttgtttttgacaattgatgcaaacaatgacggacacttgtcagcggctgaactaaaggcgcttatcattgggatcagctttgaggatatagattttgacaaggatgatgctgtgggaaaagttctccaagattttgataagactcttgatgagcaagttgatcaagaagagtttgtccgtgggattaagcaatggcttattcaggcaatggggaggtgctccatctggtcctnaagcttggcccccggacaatgaaattccttgacaatttccattgtgcaaccaaagggggggcattccttttttgggggctancngnattgtttggattttttggnngcggttgggttnt

SEQ ID NO: 92913 - DNA, 806 bp, Arabidopsis thaliana columbia
  unsure (1)..(806): unsure at all n locations
atgatactgccnnnnnnnnnnnnnnnnnnnnnnnnnnnnnnnnnnnnnnnnnnnnnnnnnnnnnnnnnnnnnnnnnnnnnnnccacgggtccgcggacgcgtgggtgccattgcagctgcatttgctgatcctttagtcgacactgttaacaacttctccgcagccacagggattccgtctttcttcatttccttcatcgctttgcctttggccaccaattcaagtgaagccgtgtctgccatcatcttcgcatcccgcaaaaagatcagaaccgcctctttaactttctccgagctatgtggtggagtgacaatgaacaacattctgtgtctctcggtgttcttagcaatcgtctacgttcgaggactgacatggaacttctcatcagaagtgttggtgattctcatcgtttgtctggtgatgggcggtttcgcgagtttccgcacaacttatcctctttggacatgtttcatagcttacttgctttacccattctccttgggtctggtctatattcttgattactggtttggctggtcgtagatatcactctctgttcaaagagtttgttctaatgagtgagtgtcttcgcgcgtggtttcgtttcttctctacatatatatatatatatatatatggattcgagagtgtaaaaacttaaattctgagatttgtcagtgattattaatgtattggaaacagagtcttattgaaaaaaaaaaaaaaaaaagggcggccgctctagaggatccaagcttacgtacgcgtggccatgcgacgtcatagctctctataagtggcacct

SEQ ID NO: 92914 - DNA, 1176 bp, Arabidopsis thaliana columbia
  unsure (1)..(1176): unsure at all n locations
atgttttaggtgcactatagaagagctatgacgtcgcatgcacgcgtacgtaagctcggaattcggctcgagaaacaatgacggacacttgtcagcggctgaactaaaggcgcttatcattgggatcagctttgaggatatagattttgacaaggatgatgctgtgggaaaagttctccaagattttgataagactcttgatgagcaagttgatcaagaagagtttgtccgtggaattaagcaatggcttatccaggcaatgggaggtgctccatctggtcctgaagctggccctcgaacaatgaaattccttgacaatttccatgtgcaaacaaagagagagcatgctttgttgggagataacgagaatggtgagaatgatgaggaaggcggtgaggttgcagacccaaaatggatcaccattaaagcagctctgctgctactgttaggagctgccattgcagctgcatttgctgatcctttagtcgacactgttaacaacttctccgcagccacagggattccgtctttcttcatttccttcatcgctttgcctttggccaccaattcaagtgaagccgtgtctgccatcatcttcgcatcccgcaaaaagatcagaaccgcctctttaactttctccgagctatgtggtggagtgacaatgaacaacattctgtgtctctcggtgttcttagcaatcgtctacgttcgaggactgacatggaacttctcatcagaagtgttggtgattctcatcgtttgtctggtgatgggcggtttcgcgagtttccgcacaacttatcctctttggacatgtttcatagcttacttgctttacccattctccttgggtctggtctatattcttgattactggtttggctggtcgtagatatcactctctgttcaaagagtttgttctaatgagtgagtgtcttcgcgcgtggtttcgtttcttctctacatatatatatatatatggattctcgagtgtaaaaacttaaattctgagatttgtgtattggaaacagagtcttattgaagctaatacagtaatatctttcttgtttcttctgtctgaaagagggtaaacacgnctagggcaaccgctctagaggatcccagcttccgtacgcgnnnnnnnnnnnnnnnnnnnnnnnnnnnnnnnnnnnnnnn

SEQ ID NO: 92915 - DNA, 556 bp, Arabidopsis thaliana columbia
  unsure (1)..(556): unsure at all n locations
nnnnnnnnnnnnnnnnnnnnnnnnnnnnnnnnnnnnnnnnnnnnnnnnnnnnnnnnnnnnnnnnnnnnnnnnnnnnnnnnnnccacgcgtccgcttctgcccaaaccaaaaaaaaaaagtttccagatccaaaattacaacaaagattctcaaactcctaaaacttcatcttaaaaacttaacaaacaaaattctaattacgaaaaatcccaatcctagtgtttctcttgttggcttttttgtttgatctgtctgtaattttttttttgtttgatctgtggtttgttttgtaaaaattccactcgtcagcactcagattaatctcttgtccattgatctatctatcgacttgcttcgacttttgatttgagatttgcgaaaattagggtttttgtttcgaaattagtgtttgtgtcacctagatgaacgatcaatctaagctgatgaatccgccacctccacagcagatgattggtcagcctccaccgcaacagaggatgaatccgccgccgccgtcacaggtaccacggattatgaaccagagtccgttattagg

SEQ ID NO: 92916 - DNA, 428 bp, Arabidopsis thaliana columbia
atattaagaactttcgttgcttttctaaggcaaaacaaaacagactttttctcttcttcttctttttggggctacgacaatctgaatttgatcccaaatcaaaactttcttcttcttcgtcttcctctaatcaaaactgtctcctaccaaaggtctttcctttctccagccagatatgtgaggaaaccaagcttctcgtacaacttcatcacctacttccttttgacgttttcaaatcttgagagagatgggtatatatctaagtactccaaaaacagacaagttctcagaagatggcgaaaatcataaactcagatatggtttatcctctatgcaaggttggcgtgcgtccatggaagatgctcatgcttgcaatacttgatctcgatgataacacttccttcttggggggctatgatggtcatgaa

SEQ ID NO: 92917 - DNA, 481 bp, Arabidopsis thaliana columbia
cacaacaacaacaactaagaaatggcacgatatgaattcttccgccaaatattcattgtcttgtctggagtttctccgttggtcggagctttcactgtgatcacctccgactcgacggccccatctgctctgatcgacggcccacaaactggattcacgatgaccaatgacggcgctcgcacggagcctgacgagcaagacgccgtctacgacattatgcgtgcgaccggcaacgactgggctgccgcgattccagacgtttgccgagggagatggcacgggatcgagtgtatgccggaccaggataacgtctaccacgtggtctctctgtcgttcggagcgctctcagacgacacggcgtttccgacttgtgatccacaacgctcttacgtctctgagtccctcacgaggctcaaacacctcaaagccttgttcttctaccgatgtttaggccgcgccccacagcgcataccggcgtttc

SEQ ID NO: 92918 - DNA, 476 bp, Arabidopsis thaliana columbia
  unsure (1)..(476): unsure at all n locations
ttcggtgggcagaaccaaaataagttaacaaaaaataagtttgttttctgggtgtgttttctggaatcgtcgcgattgttgctgaactccgtcgcaacttcaatggcatctgctcactccatagccgccgtttctgttctcgatgcggcctccaagcaagcaacacttccttcttcttcttcttcttcctctgcgctctaccctctttcttctcttcgatctaaacctcgccagcagcttctctccctacgcagtgtcgctctcaaaggtcgagtaaaggcgcaggcaaaagaagcagaagctagtccaagtccagtgggagtgggagacgcaattcagtaatgtgaaggcatctttctccctgcccggttgattgntcggaatccttaatcttttttgaaggnnnccagncagggttgnttgtttacaacaancccagctttngaaaaannaggttttgggggcttgtntnacaa

SEQ ID NO: 92919 - DNA, 858 bp, Arabidopsis thaliana columbia
  unsure (1)..(858): unsure at all n locations
ataccgnaaattnccagagganagaccccacgncntccggttgcataatggttagtttgttgatgagccaacaatgattagtttgtggttagcttaggtcgagtaaaggcgcaggcaaaagaagcagaagctagtccaagtccagtgggagtgggagacgcattcagtaatgtgaagcatcttctcctgccggtgattgatcggaatccttatctttctgaaggcaccagacaggctgctgctacaacaaccagcttggcaaagaagtatggagctgatatcacagttgtagtcattgacgaagaaaagagagaatcatcttcggagcatgagactcaagtatccaacatccggtggcatttgtctgaaggtgggttcgaggagttcaagctgttggagaggcttggggaagggaaaaaagcgacggccataataggagaggtggcagatgagctgaagatggagctggtggtgatgagcatggaagccatccactctaagtacattgacgccaatctactcgctgagttcatcccctgccccgtcctcctcttgcccttgtgatcgctcccccaaatgcttatatgatagacataccacttgttttatttttctctgtgtttggttgccgtagaagagcattactaggagaggggatggaaatgtgtcaaggtgtgagatgcatgtgtcaagcatttcctgtcttatcatggttgttgttgttgtgtcctttgttttctccgttactcacatactaacgtgttcggccccaaattaaaaaacaaaaaaaaagggcggccgctctagaggatccaagcttacgtacgcgtgcatgcgacgtcatagctggtctatagt

SEQ ID NO: 92920 - DNA, 473 bp, Arabidopsis thaliana columbia
agtgaatccataagagaagacaacaaaagatctatctctataccacatattacactttttctccaatggcttctctgaagctttcaccttcttctccaatctccatttctaaggttggtgtgattccttcctctaagaaaggactttcatttcttgtaaaagcagagcaccattcctcgtcttcttcttctcatcttcaagataaatgtcagagacgtctgattgtaacatttggtgttgttgctccttggatctcattgcttagtagagctccattatcatttgctgcagaaagcaaaaaaggattccttgctgtctctgacaataaagatgcttatgcgtttctctatccatttggttggcaggaagttgtgattgaaggtcaagataaggtatacaaagatgtgattgagcctttagaaagtgtagtgtgaaattggtcccaactagcaaacagactattaaagaatttg

SEQ ID NO: 92921 - DNA, 860 bp, Arabidopsis thaliana columbia
  unsure (1)..(860): unsure at all n locations
annacgnnggtacgaacggtcatcgcataagtcttgcatcatcgnaattncgcgtgccgctttcttagcctctcgtttctcatctccgagaaccaccaccgatgctcctccgtcttcttcgccggtgattttgtcttccgattgtaatcaatnagtcttcgtgtagtttcctccgttttctccggaatcaatcgaatccctaacctccacgagactcatactcttcttcgctctcatgtcttctctttcttcttcaaaccggcgaatatcggtagtatacggcgactggtcttatccccatcatatggagaccggagcagagatagtgttggctccgccgccgatgtttcgtcatctattctcgacgacgagcttctgagcagcgtatccgccgttagagatgccgatgaaagcgntcgnaatgntttctgatccggttcgggtcaaatcgcggttggaatcgttgaacttgaagattgccgttcgattatctccgcttgctgtcagtcgcggcaatgtgggccttccgttgtcgatattctacaccatgcgggcgggtttcgatttaggtggaagtgacaatgatcgatggagttggtcaaggcctgatgttgaagtgtacacgatgttggttaatggtcttgctgcttccttaagggtttctgattctttaaggattatcagagatatttgccgtgttggtatctcccctgctgaggaggttccctttggtaaaattgtgagatgtccgagctgtttgattgccatagctgttgcacaaccacagcatggagttcagattgtatcttgcgctaattgccgttaccaatacgagcttttctctggtgacataactagca

SEQ ID NO: 92922 - DNA, 621 bp, Arabidopsis thaliana columbia
  unsure (1)..(621): unsure at all n locations
gagctcatcattttccaccgataacttttctcagctccgacaaaaatggctgcaatcaccatttcttcctccttgcacgcctcagcctctccgcgtgttgttcgtccacatgtttctcgaaatacccctgtgatcaccctctattcacgcttcacaccatccttctccttcccatctctctccttcacactccgtgacacagctccgtctcgtcgtcgttccttctttatcgcctccgccgtcaaatctctaacggagacggagctgcttccaatcacagaggctgattcaatcccgtccgcttccggtgtatacgctgtatacgataagagcgacgagcttcagttcgtcggaatttctcggaacatcgctgcgagtgtctctgctcatctcaaatctgtgcccggagctttgtggctccgttaaggttggaatagtagaagaaccaggtnaagcagtttaaaacaagcatggnattatggggtngaggacntttaaaggaactggaaagtccgcgggggnanantanggggaaaaaatttgnaaaaaacccgggnanaatcggancgggnaaccaggngcatgtanncacggncttgggnatgnttgnttggaaagant

SEQ ID NO: 92923 - DNA, 2406 bp, Arabidopsis thaliana columbia
ctttgaatgctcaatcaaagcttcttcatagttaaacttccacacaacgtcaaaactcgagaagaagatgaaagagagagattcagagagttttgaatctctctcacatcaagttctcccaaacacttcaaattcaacacacatgatccagatggccatggccaactcaggttcatctgcagccgcacaagccggtcaagaccagcctgaccggtcaaagtggctgcttgactgtcctgaaccacctagcccgtggcatgagctcaaaagacaagtcaaaggctctttcctaaccaaagccaaaaagttcaagtcacttcaaaaacagcctttcccaaaacaaatcctctctgtcctccaagccattttcccaatcttcggttggtgcagaaactataaactcaccatgttcaagaacgatctcatggctggtttaaccctcgctagcctctgcattccgcagagcattggttatgcaactcttgcaaagcttgatcctcaatatggcctatatacgagtgtggtaccaccattgatatatgcattgatggggacatcaagagagatagcaatcggaccggtggctgtagtatctcttcttatatcttcaatgttgcagaaactcatcgatccagaaacagatcccttgggatacaagaaactggtcctaaccacaaccttcttcgccgggatcttccaagcttctttcggtttattcaggttagggtttctggtggattttctgtcgcacgcagccatagttgggttcatgggtggtgcagccattgtaattggactccaacagcttaaaggtttgcttggtatcactaacttcaccaccaacactgacattgtctctgttcttcgagctgtctggagatcttgtcaacaacaatggagccctcacactttcatcctcggatgttctttcctcagttttatccttattactcgcttcatcgggaagaagtataagaagctgttttggctaccggcaatagctccgttgatcgccgtggtagtgtcaacactaatggtgtttctgactaaagccgacgagcatggtgtgaagacagtgaggcacatcaaaggaggtcttaatccaatgtccattcaggatctcgactttaatactcctcatctcggacaaatcgctaaaatcggattaatcattgccattgttgctctaaccgaggcgattgcggtggggaggtcgttcgccggaataaaagggtacagactcgatggaaacaaagaaatggtggccattggatttatgaatgtcctcggttccttcacatcttgttacgctgctactggttcattctctcggacggccgttaattttgcggcaggatgtgagacagcaatgtccaacattgttatggcggttacggtgtttgtagcactcgagtgtctaacgaggcttctctactatactccaatcgccatcctcgcttcaataattctctcagcacttccgggactaatcaacattaacgaggctattcacatttggaaagtcgataaattcgattttcttgctctcattggagctttctttggtgttttgttcgcttccgttgagatcggacttcttgtcgcggtggttatttcgtttgccaagatcatactcatatcaattcgtccagggatagaaacgcttggaagaatgcccgggaccgatacttttacagatactaatcaatatcctatgacggttaagactcccggagtgttgattttccgtgtcaagtctgcattgttgtgctttgccaatgccagttcaattgaggaaaggattatgggatgggtcgatgaggaagaagaagaagaaaacacaaagagcaatgccaagagaaagatcctctttgtagtccttgatatgtcaagtttgatcaacgtcgatacatcggggattactgctttgctggaactgcataacaaattaatcaaaactggtgttgagctagtgatcgttaacccgaaatggcaagtaatccacaagctgaatcaagcaaagttcgtcgacagaatcggtggcaaagtttacttgacgatcggcgaagctcttgatgcttgctttggattaaaagtttaagaaacagttttcaaaggaccagttgtgttacgggttattgcatgtgatgaatttatgtgagttgttgtgatttaaataatgtgatgcgtgcatgatcatgattaatatttaagtacgtatgtgtaatagagtgcttggtcgtgactgaataaagtcatgcaaactataatgtgaggatcgatatgggtgtgtttgtaactcgatagatttggaaataatgtataatatatgtaagtttgagaattattggtgttttgtatgattgttgaaatgttatatagaatcagggatatattttttggggc

SEQ ID NO: 92924 - DNA, 678 bp, Arabidopsis thaliana columbia
  unsure (1)..(678): unsure at all n locations
ggcacgagcaaaaaaccctaacaaaaatggaatcggaaagcaatttgcttagggtttcttcctccaagacttcgattttcatctccacgtttactctctcttcctccttctgctcctgcttcttccacatttgcgacgcgtcacaaacttgattccagacaaaccctcctttggaacaaaccgcaattgagccgagttcgtgtagcgtgttcttcttctcaatctgactcaagacctgagaagaagcaatcggataagagtaactatgctcgagctgagctgttccgtgggaaatcaggttctgtttctttcaatggtctgactcatcagctggttgaagaaagtaaactggtttcagctccgtttcaagaagagaaaggttctttcttgtgggttttggctcctgttgttttgatttcttcgttgattcttcctcagttcttttctaagtggtatcaattgaagctacccttcaaaaacggcactgttgctgaaaattgttacttctttttgctttgagacggtgttttatgctgggctttcgatattcctgtctgtganctgaccnagttcagaggccgtccttanntttcanctccaagagatggggctnaccnctgncttagggggtaccttaggntgaattccnacgntngggttaaaagtttnggncccgga

SEQ ID NO: 92925 - DNA, 509 bp, Arabidopsis thaliana columbia
caaggttgcaacagaatctcaggaaacatcaactccgacattgttagctccttgtgctggtcattctttgatagcatgggacaacaagctgctgtctatcggtggtcacacaaaggatccctcagaatctatgcaagtgaaggtctttgatccccataccattacatggtcaatgttaaagacatatggaaaaccaccggtttcacgtggaggccagtcagttacaatggtgggtaaaaccttggtgatatttggcgggcaagatgcaaagagatcacttctgaacgatttgcatatacttgacctagacacgatgacctgggatgagatagatgccgtgggtgtatctccatctccgaggtctgatcatgctgctgcagtgcatgcagaacggttccttcttatctttggtggcggctcacatgcaacctgtttcgatgacctgcatgtccttgatttgcaaactatggagtggtcaagaccagcacagcaaggtgatgcaccaactc

SEQ ID NO: 92926 - DNA, 603 bp, Arabidopsis thaliana columbia
  unsure (1)..(603): unsure at all n locations
cgaagctattccttgtgatcaattcgacgttgcgtttcaggcggtggagctttggatcgccgatcgtgctgttctcccagttgagaactctctcggtggttcgattcatanaaattacgatcttctcctccgtcaccgtctccacatcgtcggagaagttcagatcccggttcaccactgtctcttagctcttcccggagttcgtacggattgcatcncgcgagtgatttcgcatcctcaagctctggctcagacggaaggatccgctcaacaaactcactcccaaaagcagccgattgaaagcgtttcacgacacagccgcggcggcggaatacatcgctgctaacaacctccacgacacggcggcggtagcgagcgcaagagcagctgagctctacggacttcagattctcgccgacgggatccaagacgacgcaggaaacgtcacgcgcttccttatgttggcgcgtgatccgatcattccccgtaccgatcgtccgtttaaaacgagtatcgttttcgcagctcaagaacataaaggaactagcgttttattcaaagtgctttccgcgtttgcgtttcgaaacattagtttgacgaaaa

SEQ ID NO: 92927 - DNA, 548 bp, Arabidopsis thaliana columbia
  unsure (1)..(548): unsure at all n locations
annnnnnnnnnnnnnnnnnnnnnnnnnnnnnnnnnnnnnnnnnnnnnnnnnnnnnnnnnnnnnnnnnnnnnnnnnnnnnccacgcgtgcgggtcttcccctttccttccgaaattagggcttccgtgtttcgcagtgctctccttcaatccccagcttgacaatgcctcgctatgatgatcgctatgggaacactcgtctttacgttggccgattatcatcgagaactaggacccgagaccttgaacgtctttttagcagatacggaagagtgcgagatgtggatatgaagcgagattatgctttcgttgtaagtaaaatctccttttaacctgagctttcgatttcttgaaaaagtcatgtagtacgttttttagtcggaaccaatgtataatgtgggaaaacacaccatgcatgtggtctcttttgtcctcacattttcgaaatcaggaatttggtgatccccgtgatgctgatgatgcaagacattacctggacggacgagactttgatggaagtcgcatcactgtggagttttcacgaggggca

SEQ ID NO: 92928 - DNA, 519 bp, Arabidopsis thaliana columbia
  unsure (1)..(519): unsure at all n locations
ggaaattagggcttccgtgtttcgcagtgctctccttcaatccccagcttgacaatgcctcgctatgatgatcgctatgggaacactcgtctttacgttggccgattatcatcgagaactaggacccgagaccttgaacgtctttttagcagatacggaaggtctctgggattttgcctaacctggaggtgtttgatgagtgggtggacttggtggaaattctcgccaagtgtttaggggacagggcgccttggcgattctgtttgtagaattttttaatgtgttttgatggaaatggagactcagtctcaaaaatggtgtttagaagtaccttaaagtaatgatggccttacttttctgccaacaatttcttccgcagagtgcgagatgtggatatgaaggcgagatatgcttccgttgaatttggggatcccccctaattcttatgattcaagacattcctggccggcnggactttnatggagncgatnnctntgggttnacgggggaccngggttg

SEQ ID NO: 92929 - DNA, 493 bp, Arabidopsis thaliana columbia
  unsure (1)..(493): unsure at all n locations
cccacgcgtccgcccacgcgtcccgaaattagggcttccgtgtttcgcagtgctctccttcaatccccagcttgacaatgcctcgctatgatgatcgctatgggaacactcgtctttacgttggccgattatcatcgagaactaggacccgagaccttgaacgtctttttagcagatacggaagagtgcgagatgtggatatgaagcgagattatgctttcgttgaatttggtgatccccgtgatgctgatgatgcaagacattacctggacggacgagactttgatggaagtcgcatcactgtggagttttcacgaggggcacctcgtggttctcgggattttgatagcagaggcccaccacctggagctggtcgctgttttaactgtggtgtagatggtcaatttgggctccttnacttgcacaataggggggctttgaaagaacaaanttttacccnttntnggggngagggggcanattttggggaact

SEQ ID NO: 92930 - DNA, 490 bp, Arabidopsis thaliana columbia
ttttcaattaatgacatcttcttcttctcctttcactgcaaaaccgaaagcttgagactgtgagattatgtctatggcatcggcttcttcttccatcgatcacttcatcacctttcgtcatcttgatcttattctccactgtataaaatcagcgagattttaagggattgtgaaggtaccatcttaaacacaaaatgggtacttctactacagagagtgtggtggcgtgtgaattttgcggcgagagaacggcggttctgttttgtagagccgatacggcgaagctttgtttgccttgtgaccagcacgtgcactcggcgaaccttctctcgaggaagcatgttcgttctcagatctgtgataactgtagcaaagagccggtgtccgtacgttgcttcacagataatctcgtattgtgtcaggagtgtgattgggatgttcacggaagctgttgctccttcgcgacgcatgaacgctccggcgtggaagg

SEQ ID NO: 92931 - DNA, 600 bp, Arabidopsis thaliana columbia
accacgcgtccgggattaagacataaacaagacaaaacaagaagaagagatttatttattacataaaaatggttgtcgccaatgatctctcgtccaagattctccccagagttctcatcgtctctcgtcggactctccgcaagaacaagtacgtggacttcgtaggagaataccatctcgatctcatcgtctcctccggtgccgtccctgtcattgtcccacgtgtcaatgggatccattctatgctccagagcttcgagcctattcatggtgtcctcctctgcgaaggagaagatgtcgatccttctctctacgcggacgatgaattatcagacctctcgccagaagacatggaggagattaagaaggcgcatgcagaggacatgaccatcggaccgagagaaagacagcattgagctgactctagctagactctgtctcggaaagaaacattcctttcttaggcatttgtcgtggctctcagattctcaacgttgccgcaggtggaactctttaccaagacatcgacaaagaactcggaactacgatgacaacgacaaatcatatagattatgacaactacgatgggcacagacacga

SEQ ID NO: 92932 - DNA, 597 bp, Arabidopsis thaliana columbia
gtcaatgagttgataaagaaacagaagttgtcagcagttagaaagatcttgcagtgacatgactatacgaaaccatggatcgcagatgttagggctaaggttggaagtcgtctaatagagttactcgtaagaacagcttatatacagtctccagctgatcagcaagataatgatctgcctgatgtccgacctgcatttgtgcataccttcaaggtagcgaaaggaagcatgaattctgggagaaaatatggtgtaatcgagtgtgaccctttggtccgcaaaggcttgggaaaaagtgggagatatgcagtgatgccatacatgccaatgctggttcctcctctcaaatggtcgggatatgacaaaggtgcttacttgttcttgacgtcttatataatgaaaactcatggagccaagcaacaaagagaggcacttaagagcgcacctaaaggacaactacaaccagtctttgaggccctggatacgcttggaagtactaaatggagagtaaataagcgagtcttaacggttgtagataggatatggagcagtggcggatgtgttgctgatatggtggatcggagtgatgttccttta

SEQ ID NO: 92933 - DNA, 598 bp, Arabidopsis thaliana columbia
  unsure (1)..(598): unsure at all n locations
anttccattttccnagcttatcccccttgggaactgtccntagtcggcggatccgggnacccacgnccggccttaagggtcttttggacgatgaaacaactaatccgccgtttatcgcgtgtcgcggactcaacacagtatagcctcctccggtctgaatcccagcgtggccgcaccaagaaggagaaacacaaatcttgggttcccgaggggcacgtgcctgtttacgtaggccacgagatggagcggttcgtggtgaatgcggagctgctcaaccaccccgttttcgtagcgttgctgaagcagtcggctcaagagtatggatacgagcaacaaggagggcttcgcatcccttgccacgtgcttgtgttcgaacgcatcttggagtctctccgtctcggactcgccgatcgagtcacatgacctacacgatctcttttgagatttaagaagtttctagtgtcttatagtatcttgctagctataggggaaacagagttatgtaaattacatattctttatctaattggtttatcagatctatttgaagatgggattatatatataagtgaaataatcgagatttaaggcttttatt

SEQ ID NO: 92934 - DNA, 716 bp, Arabidopsis thaliana columbia
  unsure (1)..(716): unsure at all n locations
aacccacgcgtccggccaagccagcatgaacaggcagcattttctgcaatgtgctcaagggataatgaacaaacattttgaaaagctcgttcaatgtgatcatcgtctgttccatctaagccgacagccggagatagctattgactctccctactttgatgcacggcaatctatttttgaggatccaagtgaatcaaaaggccatccttttgggaatttgaatcttagtacaggtccttcgatctctgggactcagaatttagcatctcctgttggggctcagtcatcatctgagcatatgtatctgtctcatgaagcaccatcacccagctcagtgatagatgctcgtgcaaatgaaggaattgggggttctgaagcagtcaattcaagaaacagaacagattgtggtcagatcgaagcacctggaatacaccaatctatgtcactgagtgatttccttgcggttctctgtgatacaaaaaacacaacggatttgaatctggctgacgccgtagatggactacaccaatctatgtcagttagtgatttcggttgcatattttatctgattcaaggaaccattactgattcagatcagataaaggtacctggactacaccaatctatgtcagtgagcggtttcggtggcttctctctgattcgcctgntgaagtcatccgaccntttngggaattttgggcnatgaaccagcantt

SEQ ID NO: 92935 - DNA, 588 bp, Arabidopsis thaliana columbia
  unsure (1)..(588): unsure at all n locations
cggacgcgtgggcggacgcgtgggcggacgcgtgggtggctctgagctactctttattgcttaggccttagtgtgtgtgtgtgaatcttctcagcgaaagccaagttcttttctttgttggtgtttctgggtttattgcgacaatgggagctgagcattttagcctggtgaagttcaatagaggtttctttgtgtgtttatgggtgatgctctcgctatcttgcgcagcagcgagctatggctcttcaaggcaaaagtttgaggtgaagaagcatttgaataggctcaacaaacctcctgttaagactattcagagtccagatggagatataatcgactgtattcctatttcaaagcagccagcttttgaccaccccttcctcaaagaccacaagattcagatgaggcctagttaccacccagaagggctttttgatgacaataaggtatttgctgaaccaaaggggaaagaaacttaatttccctcagttttggnnccggattggaaatttcttanggaccnttccctttggggggcaaagggggttatttttttnggaantttcntaaaaantttgcaanagggna

SEQ ID NO: 92936 - DNA, 457 bp, Arabidopsis thaliana columbia
ccttttcctgctgcttctcgtgatgggttgctttctggtgatgtaattctcgctgtggacggtactgagctgtctaaaaccgggcctgacgctgtttcgaagattgttgacattgttaaaagaaacccgaagagtaatgtggtgtttagaatcgaaagagggggtgaagatttcgatattcgggttacaccggataagaactttgatgggacggggaagatcggtgttcagttgtctccaaatgttagaatcactaaggtgagaccgaggaacattccggaaacgtttagatttgtgggaagggagtttatggggctatcttctaatgttttggacggtttaaaacaaacattctttaacttctctcagacagcaagtaaagtagcaggtcctgtggcaattattgcagtgggagcagaagtggcaagatcaaatatcgacgggctttaccaattcg

SEQ ID NO: 92937 - DNA, 1059 bp, Arabidopsis thaliana columbia
aagtctctgattttgcctttggttatgagttcagtctcttctctctgtatccacattgtcctctgttggagcttggtctttaagtttggtcttggaagcctcggtgcagctattgcgatcggtgtttcttactggctaaacgtgactgttcttggattatacatgacgttttcttctagctgtagcaagagccgtgcaactatctccatgagtttgtttgaaggaatgggagagtttttccgggtttggaatcgcatctgcatctatgatttgccttgagtggtggtcattcgaatttttagtcctgctctctggtattttaccaaatccgaagctagaagcctctgttctctcagtctgtctttcaacacaatcctccttgtaccaaatcccagagagtctcggtgcagcagcaagtacaagagttgcaaacgagttaggagctggaaacccgaaacaagctcgaatggcggtttacacagcgatggttataacaggtgtagaatcaataatggtgggtgcaatagtctttggtgcaagaaatgtatttggttacctattcagttctgaaactgaagttgtagactatgtaaaatcaatggctccactgctttctttatcggtcatattcgatgcccttcacgcagctctctcgggtgtggctagaggatcagggaggcaagatattggggcatacgtaaacctagcagcatactatctctttggaataccaactgctatactattagcttttgggtttaaaatgagaggaaaaggactctggattggaattacagttgggtcatgtgtacaagctgttttgctcggtcttatcgtaatcctccctaattggaaaaaacaggcgagaaaggctagagaaagagtgatgggtgatgagtatgaagagaaagaaagtgaagaagaacatgaatacatcagctaaatcaaacagtttccattccatccccattaatccgttaaatgttgtgtgtttttattaattcgatgtttggtattgttgttttcgagtatagtaatgaaggaattgattgttcccat

SEQ ID NO: 92938 - DNA, 372 bp, Arabidopsis thaliana columbia
attcgaaaccctaacaaaagccctaatttacgaaatacgccgaatcgttgacgagaatggagtttgacgaatacgagtacctggagaagacggttgaggaaggagctgggtcgaataagaaaaaggaagagagtgggaacgagaggagcgagaggagttacagaaagagagaaggaggagagaggcagggggaagaaggaggtgaagaagagcgggttagcagtcggagtaagaagtctcgcggagacggcgaagagaacggtggtggtaagagggatcgggagagagagaggcataggagcagcagagacaaggatagggagagggataaggttagagaaggatcgagagataaagagagcgatcgaaaga

SEQ ID NO: 92939 - DNA, 538 bp, Arabidopsis thaliana columbia
gattatttcagcaccaacttggaaaatgggattttttaagcatatgcagaggaacatactatgaaggactaatgttccctatgcttgttacagaacaacttgagctttggcctgaacaacatgttaggcaaagaatctgggtcagtagctaaataaaactatgttttctttagatattttgtaacatatctagtgttttactgattgatatgaatttattggggacaacagatgaatgtaaccgaagcaagaggaagctttgtagagattggtgggatgaaagaagcattaggatgttttggttgagagaccttttcatcaccaatgaattcaacccaaaaggaaggggaaggctattgtcaattcccctattcgaaacaatgtgttgatgatgaagctgatgattgctaaattgctgattgttgatgggagtttttatgagctaatatggatctctggaggtattaaatagatgggtttcaattagttattgagacggctaaaaaaatctatttcgaaagccggtgcagagagcatg

SEQ ID NO: 92940 - DNA, 739 bp, Arabidopsis thaliana columbia
  unsure (1)..(739): unsure at all n locations
cntccctacccntttncaagacgggccntccnaaaaaccttgtnccttgnatttgccanccgggtttccnntganngattntgggccnccgatgatttcccgaccaagggacttgtagagattggtggatgaaagaagcattagatgttttggttgagagactttcatcaccaatgaatcaaccaaaggaagagaagactatgtcaatctctattgaaacaatgtgttgatgatgaagctgatgattgctaaattgctgattgttgatgggagtttttatgagctaatatggatctctgtaggtattaaatagatgggtctcaattagttattgagacggctaaaaaaatctatttcgaaaagccgatgcagagagcatggacaaagaaaaagatggtagagttttaagttttggatcagaaagattaacatcatgtgatttaagaagtcttgtgtttgtgtttataatgtttctgcaagaacttcttaagatatgattaagagggaagatgataaacttagagtgcaagcaaaacctgtataattgtgtttccctctgtttatttttcctctctctttgaatttgcaatggagacatttgatttcatccaaaaaaaaaaaaaaaggacggccgctctagaggatccaagcttacgtacgcgtgcatgcgacgtcaaagctcttctatnnnnnnnnnnnnnnnnnnnnnnnnnnnnnnnnnnnnnnnnnnnnnnnnnnn

SEQ ID NO: 92941 - DNA, 1887 bp, Arabidopsis thaliana columbia
cgaatttctcaaaagaaacttctatagaaatctcaaacatattcatgcaacgattctgcgtctgttcaccttcaagttatcgtctcaatcccataacatcaatggctactggatccggttcactgatttggttccggaaaggtctccgggttcacgacaacccggctcttgaatacgcctcaaaaggttctgaatttatgtatccggtttttgttatcgacccgcattatatggagtcagacccatctgcgttctctcccggttcgtctcgcgccggggtaaaccggatccggttcttgcttgagagtctcaaggatctcgattctagcctgaagaaacttggttcacggttgcttgtttttaaaggtgaacctggcgaagtactagttcgttgcttgcaagagtggaaggtgaagaggctttgctttgaatatgatacagatccgtattatcaagctttagatgttaaggttaaggattatgcttcttcaactggagttgaggttttctctccagtgagccatactctgttcaatcccgcacacattatagagaaaaacggtgggaagccacctttgagttatcaatcatttctgaaggttgctggggagccctcatgtgctaaatctgaacttgtgatgtcttattcctcacttcctccaattggagatattggaaaccttggcatttcagaagtaccatctcttgaggaacttggctacaaagatgatgaacaagctgattggactccttttagaggtggtgaatcagaagccttaaaaagattgactaaatcaatcagtgataaggcatgggtggcaaactttgagaaaccaaagggtgatccatctgccttcttgaagcctgctactacagttatgtcaccatatttgaaattcggatgcctttcttcgaggtacttttatcaatgccttcaaaatatttataaggatgttaaaaagcatacatcgccgccagtttctctcctggggcagttgttgtggcgagaatttttctataccactgcatttggaactcctaactttgacaaaatgaagggaaaccggatctgcaaacagattccatggaacgaggatcatgctatgttggctgcttggagggacggtaagacaggatacccttggattgatgccatcatggttcagcttctgaaatggggttggatgcaccatctagcgcgtcactgtgtagcctgttttcttactcgtggggatctgttcatacattgggaacaagggcgtgatgtgtttgagagacttctgatcgattcagactgggcaatcaacaatggaaattggatgtggttatcatgttcgtcgttcttttaccagttcaaccgcatctactctcctatatctttcggaaagaagtatgatcctgatgggaagtacattaggcattttctaccggtactgaaagatatgccaaagcagtatatatatgagccatggacagcaccattgagcgttcaaactaaagcaaactgcatagtcgggaaggactacccaaagccgatggtattgcacgattcagcaagcaaggagtgcaagaggaagatgggtgaagcatatgcattgaacaagaagatggatggtaaagtagatgaagaaaatttgagggatttgaggagaaagcttcagaaagatgaacatgaagagtccaaaatcaggaaccaacgaccaaaactcaaataggtagaggattaaaaaccttttctgaaattgatgaagtgtgtattgttacaataattctagctggtatgacttaatcatggttacatttctatttctatgtaaaaaaatctgttatgcatcaatgtgtcatgtaacacttctcttgaggcaaatataaattatttgaattact

SEQ ID NO: 92942 - DNA, 984 bp, Arabidopsis thaliana columbia
  unsure (1)..(984): unsure at all n locations
cggaaaaaataacaatttacttccctttgttcagacgtttctttattcttcttccttccttcttctccttcttcttgatcgtgttcagaaatcatattcatcacctctctctctctatgtctctatatttggattctttataacatgtgagatcgatctatttttgatcagagacagagagaagactagaagaagcaaagaatatttcaagaatgatgaagatgaatacaggaacatcgccgtcggtcatcggcggcgggactagtggtaatgagtgggagtctcgacctggaggaatggttgttcaacgtcggacagatcagaactccgatgtgccacgtgtctttcgtgttcgggttaaatacgggtcggtttatcacgagatcaacatcaattcccaatcttccttcggagagttgaagaagatgttgtctgatcaagtgggacttcaccatgaagacatgaaggttttgtacaaagacaaagagagagattcaaagatgtttcttgatctttgtggagttaaagatcggtcaaagcttgttgttaaagaagatccaatttctcaggagaaacgtctccttgcaaaaaggaaaaacgccgccattgaaaaagcttctaaatctatctctgatattagtttcgaagtcgacagactcgccggacaggtgtcggcgtttgagacggtgattaataaaggaggtaaagttgaagagaagagtcttgtgaatctgatagagatgttgatgaatcagttattgagacttgatgctattattgctgatggtgatgtcaaattgatgaggaagatgcaggtgcaaagagttcagaagtacgttgaggcactcgacctcttgaaagtcacatacctctgccacaaaagtttgaagtcaacaaagtcccgtcccgccacaaaccggcaaaacggacacggngnttttngcaacggggtnttgttnatcngtttttnnatgaatgtgacgt

SEQ ID NO: 92943 - DNA, 457 bp, Arabidopsis thaliana columbia
gaagaaagatgtaaggagagcaactggtggtagtagtgacaagacaatgaatagcaatagcagtaccaacgaagaaagtttagtcaacggtgaagctacaatcagctagtggaatgcaaacaagatcactgttcatatctgtgtctcgtgagactcattacgaaaggaggagagtttcttccaacggaaccacagtttcttgaagctgtgcatatatgttggcaagtctggtgtggaggaggataacatttttgaagacgtcatatgttgggagattctcagacatttcatcagttctttctgttgtcttctctcttgcaaactcattagtccgtttaggttacttgatatattaatgtttttgactaaattttatttgggatagatgatttttcttcagcttgtcaaagtttcccaatttttgttatgtttcgagttattagatggacttggcaaa

SEQ ID NO: 92944 - DNA, 463 bp, Arabidopsis thaliana columbia
  unsure (1)..(463): unsure at all n locations
cnnnggnctcanttgctcgnnttnctgancggtggggaaggnttgtaccnacttattnccgagtgtcctgtgcgagtacctctccaatttanctgaacactttaccngntctactccaattgtcaggtcaatggttcaccnagaggagacaagccgtctcctactttgtgaagcaacggccatagtcatgcggaaatgcttccaccttcttggaatcactccggtttacaagatttgatcacatcacaagtaaacgacccaaaggaaaatgtttttaattcgttttgacaatttttctgcacaattagtgtaaaaggcgttatttggccctaaattctctctgttctcatttagcttggggcaaacttgtatacaaatgaatacaatgttaaactgaacccagaaggttgttttgtcatgtcattgaactgatttgggtgaatcatgaaatggtttaanggtt

SEQ ID NO: 92945 - DNA, 589 bp, Arabidopsis thaliana columbia
  unsure (1)..(589): unsure at all n locations
cccccccnnnnnnnnnnnnnnnnnnnnnnnnnnnnnnnnnnnnnnnnnnnnnnnnnnnnnnnnnnnnnnnnnnnnnnnnnnnnnnnnnnnnnnnnnnnnnnnnnnnnnnnnnnnnnnnnnnnnnnnnnnnnnnnnnnnnnnnnnnnnnnnnnnnnnnnnnnnnnnnnnnnnnnnnnnnnnnnnnnnnnnnnnnnnnnnnnnnnnnnnnnccccgcgtcgggaacgagatgaggagttggaggaacttcgagcggatatagtggacttgaaggagatgtacagggagcaagtgaacatgctggtgaacaagatccaatgaggggcaagggaagatggtgttggcaagctcaggctcacgagtgttggttgaacttgaggctttttaaaacaaacttttgctgctcgaaagaagatttttcttacagtgaattcgatcgtaaattattattttggagacgagaataaacttttgtctgtgtgacttatctacgtatgtaacatgtattgtctgtgtagtaaaaaaaaaaaaaaaacagggcgcccgctctagaggatccaagcttacgtacgcgtgcatgcgaggtcatag

SEQ ID NO: 92946 - DNA, 645 bp, Arabidopsis thaliana columbia
  unsure (1)..(645): unsure at all n locations
cgttttttcccccncccnaaagggntacttctcatntccccntttcaccatggnctttccggatccctgctaaaacttnccaaatncccncngntttnanacctccgggggagcattggggncccgggcaattaaggcaggccttggaagcccttaaggcaaagacacccggcttgctctggaattgatgggtgaacgagatgaggagttggaggaacttcgagcggatatagtggacttgaaggagatgtacagggagcaagtgaacatgctggtgaacaagatccaatgaggggcaagggaagatggtgttggcaagctcaggctcacgagtaggaccacctaatccttgtttccccaatattgtatagctctataagctaccaacctaagcccactatattcatttgtcgttttgtctctcaggtgttggttgaacttgaggctttttaaaacaaacttttgctgctcgaaagaagatttttcttacagtgaattcgatcgtaaattattattttggagacgagaataaacttttgtctgtgtgacttgtctacgtatgtaacatgtattgtctgtgtagtagaaaaacggtggagagacccattaataatgggattcgttgatgtagcaatccatccatat

SEQ ID NO: 92947 - DNA, 530 bp, Arabidopsis thaliana columbia
  unsure (1)..(530): unsure at all n locations
cnnnnnnnnnnnnnnnnnnnnnnnnnnnnnnnnnnnnnnnnnnnnnnnnnnnnnnnnnnnnnnnnnnnnnnccacgcgtccgggttagggttcgttgattctctttttgattacgaaagcttaagatctcttttggtggatttttgggtttatccatctatggtggatcgcagatcttttggctctataactcctcctctccaattagatatggaacagttgctgtcagaagcccaacacaggtggcttaggcctactgagatttgtgaaattcttcagaactatcacaagtttcatatagcatcagagtctcccacccgacccgccagaaggtactgagatattttaggaaagacggacataactggaggaagaagaaagatggtaaaaccataagagaagctcatgagaagctcaaggtaggaagcatagatgtgctacattgttactatgcacatggggaagccaacgagaatttccagagacgttgctactggatgcttgaacaacatttgatgcatatcgtgttt

SEQ ID NO: 92948 - DNA, 742 bp, Arabidopsis thaliana columbia
  unsure (1)..(742): unsure at all n locations
ccccccctcgagtacgacggtctagcataagcttgatatcgaattcgcggccgccctgtatatagcccgagacgaaggctactggattataagcttctcagttcatgcatactcagatcggttaggctgcgttgattctctctttgattacgaaagcttaagatctcttttggtgggattttggcgctcatccatccatgggggatcgcagatcttttggctctataactcctcctctccaattagatatggaacagttgctgtcagaagcccaacacaggtggcttaggcctactgagatttgtgaaatccttcagaactatcacagcggtcatatagcatcagagtctcccacccgacccgccagcggttcactttttctttctgataggaaggtactgagatattctaggaaagacggacatatctggaggaagatgacagatggctacaccatcagacaagctcatgagaagctcaaggtaggaagcatagatgtgctacattgttactatgcacatggggaagccaacgagaatttccagagacggttgctactgggatgcttggaacaacatttgatgcatatcgtttttgtgcactacttggnaggtaaagggtaccggnccagtataggatgnaagnaacaatccaatcctgnaatgnccantccaggnaattggtccanagnagccacnagccatgcacatatgngaatccgaccggggngcnncagcaggna

SEQ ID NO: 92949 - DNA, 1037 bp, Arabidopsis thaliana columbia
  unsure (1)..(1037): unsure at all n locations
ccnnnnnnnnnnnnnnnnnnnnnnnnnnnnnnnnnnnnnnnnnnnnnnnnnnnnnnnnnnnnnnnnnnnnnnnccacgcgtncgcggacgcgtgggaaacgattttctgtctgttctctctttgctctctcgccctctcttgctcttctgggttcgtcttcctcggctagggtttatcagtggtttgtcaatggaggcttcatcatctcaaccatccgattcttctgatcaaactgcttccaagttcctttctgacctcccgtctcgaggtttcttgtcttctaccgtcgtctcttccaatccgggaagcttgcgggtctacatttgtgagcatgacacatctcccccagtaattgggagtctcaggattatcagtttcagaataaaaggacagcttatcaaaacaaaccagcaaaatatactaatcagatctctcttgttaaagaagcaaaaaggcgaatctagttctaaagactcaaaaggaactgctgaagatggtcctaaaaagagggctgcaaatagagctctggacgacagaagctcagctaaaagagctgctaatgcatctagacaagaaggatcaagcagtcgcacaggcgaaagagactttcagtctttgaccgttgagaagctccgcgccatgctcaaggagaagggccttccaacaaaaggaagaaaggatgagctcattgcgcgtctgaagagtgccaactgaaatgaagttgagaagggtgctctggtgaatatatgtatctttagaggtttcccaaataggagagaattgttgttgttcttgatcaaatacaaatccttttgatctcatctggagaatttgttatcaggaattaggctactttagtttatgaatccggtttggtgacatttgtaatatggatttcatcttttgataaagcaaaccaaaccaaaccaggcggtcttggttaattaaaaaaaaaaaaaaaaggcggcccgctttaagaggatccaaggcttacgaacgcgtgcatgcgacgtcatagatcttctatagnnnnnnc

SEQ ID NO: 92950 - DNA, 922 bp, Arabidopsis thaliana columbia
  unsure (1)..(922): unsure at all n locations
nnnnnnnnnnnnnnnnnnnnnnnnnnnnnnnnnnnnnnnnnnnnnnnnnnnnnnnnnnnnnnnnnnnnnnnnnnnccacgcgtccgcccacgcgtccggagcgttcagatttctcttcaacataatcatggcattgaccttcttcttcttgttatcgaatttgttcttctccggagttatgtcaaggagcttcacattttcaaacaaatgcgattacacagtgtggccgggaattctatctaacgccggagtttctccattaccaaccaccggcttcgtcctcctgaaaggcgagacgcgtacaatcaacgcaccgtcatcatgggggggtcgtttctggggaagaacactctgctcaaccgattccgatggaaaattctcgtgtgccaccggagattgcggctccggaaaaatcgaatgctccggcgctggagctgctcctcctgcgactttagctgaattcactctcgatggctccggaggactcgatttctacgatgtcagtctcgtcgacggctacaatgtccagatgctggtggttcctcaaggcggctccggtcagaattgcagcagcaccggctgcgtcgtcgatttaaacggatcttgcccgtcggagctaagggtgaatagcgtcgaccggaggaagcggtggcgatggcgtgtaaaagtgcgtgcgatgcgtttcggcagccggagtattgctgcacnggcgcgtttggattcgctgacacgtgtaagccgtctacgtactngcggatcttcaagagcgcgtgtncacgcgcctatagctancgcgatgacgataagtctagtacatttacgtgcgcaaatctccaactacgtatcactttctgtcttctcccacaccagctaaatcagctgaggacacacacgagacatgacgacacaggtcagtccggag

SEQ ID NO: 92951 - DNA, 585 bp, Arabidopsis thaliana columbia
ggaactacaatcataatttgtgatctctctccaattttcatcttttggtcgaaattcccaattccctgagtcaagaaccctaatttcaacatggtttgcgttatgtgtttggtgcctctgttcctcgtcccgctcatcaatttaatgcctcgaatcatcgattatttcatggctaaattgtacgcgtggctcggatgggagtacaggaagccagcgagagttcctccagcttgtcctttcaagccagttgctaaaaacgacaacgccaccaaagtgggtgcggaaactggaactgaaggtacagaaacaatagctaaacctggcgttgtagaggagacgggtggtattaagcaggattgaggccgagtcttttcttcaataaaaccttttgtatttgtggatatgttttggataagagaagaagctggaagttgaaattacctgatgtgatactgataatgaatgatgtacgttgaaaatgctacgtaaccagataattttcttatatggttaaaaaaaaaaaaaaaaaagggcggccgctttaaaggatcccagcttacggacgggggcaagggacgtcaaaga

SEQ ID NO: 92952 - DNA, 799 bp, Arabidopsis thaliana columbia
  unsure (1)..(799): unsure at all n locations
nnnnnnnnnnnnnnnnnnnnnnnnnnnnnnnnnnnnnnnnnnnnnnnnnnnnnnnnnnnnnnnnnnnnnnnnnnnnnnnnnnnccacgcgtccgcaaacaaaaagttgaagctgaattttttttgcaggttttaagtaaagatgatgcagaagaagctacttcttatagtatcaatcatcgtgaatctcgtattcaccattcatattctttattatagttcaaccacatggaatccaacgtggaccaacagagctgcagcggaagcagaaactgtagcctctttttcatgctcaggccacggcagagcttttgtggatggtcttggtggccttgacggccagaaacctccttgtgagtgcaacaattgctacataggaaaagattgctccgttcttctcaaagattgtcctgtcgatgctaactcaggagaccctttgttcttggagcctttctggatgcgacaagcagagagaagcgcggttttggtctcgggatggcacaggatgagttatatttatgaagatgggacatatgtgtctcgagagctcgagaaggtcattagaaaacttcatagtgtagtgggaaatgcagttacagataacagattcgtaatctttggatctggtaccacacaattgcttgcagcagctgttcatgccttgtctttgacaaactcatcagtatcatcacctgcaaggcttctgacttctattccatactatgctatgtacaaggaccaagcagagttctttgattcagcacatctcaagtttgaaggagatgcgtctgcgtggaagc

SEQ ID NO: 92953 - DNA, 928 bp, Arabidopsis thaliana columbia
gggctggagcagagcaaagccagagatggagccttaaggccaagaccgtacttgtaaccggtggaacaaaaggcatcgggcatgctatagtagaggaatttgcgggatttggagcagtaatacacacttgtgctagaaacgaatatgagcttaacgagtgtttaagcaaatggcaaaagaagggttttcaagtcactggttcggtctgtgacgcatctttgagaccagagagagaaaagctaatgcggactgtgtcttcaatgtttggtggaaagctcgatatcctcataaacaatttgggagcgattcggtcaaaaccaacgctggattacacagcagaagatttctcgtttcatatttcgacaaacttagaatctgcttatcatctgagccagcttgcgcatcctctgcttaaggcttcaggatgtgggaacataattttcatgtcctctattgctggagttgtatctgctagtgtcggctccatctactctgcaacgaaaggggcattgaatcagctagcaaggaacttggcatgtgagtgggctagtgatggcattagggctaatgctgtggctcctgcagtcatcgcaactcctttggctgaagctgtgtatgatgatgagttcaagaaagtggtgatatcaagaaagccgttggggcgtttcggggagcctgaagaagtgtcctcgcttgtggcttttctatgtatgcctgcagcttcttatataactggtcaaaccatttgtgtcgatggaggtctcactgtcaatggcttctcctatcagccacaaggttaaaatccaatatccaaaaacaaacacattttcaacttcattactttgaacattgtcatcttgggctaagcccggtttggaagtatggattctggccgtaacactttagaaaataaaaggaaacttcaacc

SEQ ID NO: 92954 - DNA, 525 bp, Arabidopsis thaliana columbia
  unsure (1)..(525): unsure at all n locations
gctcctnnnnnnnnnnnnnnnnnnnnnnnnnnnnnnnnnnnnnnnnnnnnnnnnnnnnnnnnnnnnnnnnccacgcgtccggaaagacgcaatgatttagacagagacgatggaaacaaagagcctttggtcgtggatagtagcgatagtacagtgaacaacgaagctcctttgccgcaaacgaaactggttgccctgcagctaacaacagatcacagcacaagcatcgaggatgaggtgacaagaataaaaaacgagcaccccgatgacaaccattgcatagtgaatgacagggtgaaaggacggcttaaggtgaccagagcgtttggagcgggattcttaaagcagccaaaattgaacgatgctttgctggaaatgtttcgaaacgaatacattggtacggatccatacatatcatgcacaccttcccttcgtcactaccggctaacagagaatgatcagtttatggttctctcatcggatggattgtaccaatacttgagcaatgtggaagttgtttctctt

SEQ ID NO: 92955 - DNA, 540 bp, Arabidopsis thaliana columbia
  unsure (1)..(540): unsure at all n locations
ccnnnnnnnnnnnnnnnnnnnnnnnnnnnnnnnnnnnnnnnnnnnnnnnnnnnnnnnnnnnnnnnnnnnnnnnccacgcgtccgtgacaatgacctctctaagaagaaaggaggtaagcctaatctgaggattgctagtcttggccacgcgttgcatgtatggctcaatggagaataccttggaaacggacatggtagccatgaagagaagagtttcgtctttcagaagccagttactctaaaagaaggagagaaccacttaaccatgctaggtgttttgacgggatttccggatagtggatcttatatggagcatagatacacaggtccacgtagtgtttccatcttaggtttgggctctggaacacttgatctcactgaagaaaacaaatggggaaacaaggtgggtatggaaggcgaaaggcttggtatccacgccgaagaaggattgaagaaggttaaatgggagaaagcttcagggaaagacccgggaatgacatggtaccagacatacttcgatgcaccagagagccaaagggc

SEQ ID NO: 92956 - DNA, 391 bp, Arabidopsis thaliana columbia
gctttgagtcttccattgacatgggcgcttagcttatgcttgagatattttgtttttacctccgagaaacggatttagattcgtaatcgtgagttttttggtgtaatggagatcgctactgtcgtaaaggctaatggcggttgtgaagcggatcgacgacggcttcgccgattgagatgctctgttaaggattacgattggggcaaaattggatcggattcactcgtttacagggtttatgcggcgaattcagattacgagatcgatcctacacgaccttacgccgagctatggatggggactcacgagtctggtccgagttacttggaggatgctgatggatccaatggcgtgacccttagatcctggatcaccgaaaaccctaaatctc

SEQ ID NO: 92957 - DNA, 580 bp, Arabidopsis thaliana columbia
acgactgactatgggagagctgaccgcctgcagtaccggtccggaattcccgggtcttccacgcgtccgtacagctgtgagaagacgactgaaggggaaagagaaaagctttgagtcttccattgacatgggcgcttagcttatgcttgagatattttgtttttacctccgagaaacggatttagattcgtaatcgtgagttttttggtgtaatggagatcgctactgtcgtaaaggctaatggcgttgtcgattcaagcacatccagataagaaattagcaaagaaaatgcacaaagctcatcctaatctttataaagacgacaatcacaaaccagagatggctttggcctatactcaattcgaggctctctgtggctttatacctcttcaggagcttaagagtgtcattcgagctattccggagattgaacaacttgttgggagtgaatagcaaacaaaggttcttgatcactgaacctgatgaggaaaaagtgaaatttgatgtccgaacaatcttcaccctgcttatgtctgctgaccccgatacaacaagaaaaattgcatccaaattaataacg

SEQ ID NO: 92958 - DNA, 450 bp, Arabidopsis thaliana columbia
cctatagggaaaactggtacgcctgcagggcccggtccggaattcccgggtggagccacgcgtccggaaccctttctctcccctgtatatgtagatgcttcttgatcaaatggagacctagctagcactccttctccatctcttttcatttttattgattttgtcacagcatcatctacttttgtattattcttttagttctctgatgcttcttctctttctttctttttttgggtgggggtatttgtatttctagtcataacctttctcgcctgcagatatgtgaaagatagagagagagttgataacttttttctttgtgtcatgagagtgagtgactcggagggctcaataatatcataaacttgcagaaaaaaaaaaaaaaagggcgaccgctctagaggatccaagcttacgtacgcgtgcgtgcgacgtcataactcttcgaga

SEQ ID NO: 92959 - DNA, 468 bp, Arabidopsis thaliana columbia
gacagtactctagcttctccggcgactccaggagcgcctctttgcacctctcttcttctctcgctctctgtttctgaggttctgcaagaagtaaaacatgtcagttcttattgtgacgagccttggtgatatagtaattgaccttcactcggataaatgccctttgacttgcaagaacttccttaagctttgcaagatcaagtactacaatgggtgtctttttcacactgtgcaaaaggatttcacagcacagactggtgatccaactggtacgggagctggtggagattcaatctacaaatttctgtacggtgagcaggctcgtttttacaaagatgagattcatcttgatttaaaacattcatagaccggcactgttgcaatggccagtggtggagagaatctcaatgcttcccagttctatttcacacttcgtgatgatttggactatcttgatgggaaacacac

SEQ ID NO: 92960 - DNA, 513 bp, Arabidopsis thaliana columbia
  unsure (1)..(513): unsure at all n locations
nnnnnnnnnnnnnnnnnnnnnnnnnnnnnnnnnnnnnnnnnnnnnnnnnnnnnnnnnnnnnnnnnnnnccacgcgtccggtgaaaggagatttagaatagctagagatgagcttatgaatttgaaagatgcattggggattggtgatgagagagatgatgtgattgtcatcgcagctaaattctttgaaatggcagttgagcagaatttcacgaaaggcctgcagaactgaactagtacaggcttcctgcctctacttgacgtgcagggaattgaacattgcgttgcttcttattgatttctcaagctaccttcgagttagcgtttatgagttaggttctgtatacttacaactctgtgaaatgctgtaccttgtggaaaatcggaattatgaaaagcttggtgatccttcaattttcatggatcgattctcaaacagcttattgaagggaaaaaataataaagatgttgtggcaacagctagagacattatagctagtatgaagagagattg

SEQ ID NO: 92961 - DNA, 412 bp, Arabidopsis thaliana columbia
atacgactcatatagggaaagctgctacgcctgcaggtaccggtccggaattccgggtcacccacgcgtgcgcggacgcgtaagcagacccctgggcggacgcctgggcctggctctcaaattcatactacttggccagcttgctcgatttccctcgtacagccaaattgtgctatgggaatcaaaattaacagtcgcagaacccagtaataatggagtcgttgctgcgggcggatcaaaccctaattccgggagcgatgtgtagcccgcagagttttggacacactcaggactgcctcttccctcagggagcgtaactgaattggatctggggagagggctattacaagctttgcaggggctgcctagccccttctttttttgggacccaactggacaaactttcccgccc

SEQ ID NO: 92962 - DNA, 541 bp, Arabidopsis thaliana columbia
tacgactcactatttggagagctggcacgcctgcaggtaccggtccggaattcccgggtcgacccacgcgtccgatatattcacttgatcatcatatctctacaagcataaatcccgtgtttgataactattttttgtcagtagaaaattaatgatttgtgtttttcggagtccggtgcatttctgacacgtagttatccgttaccagatattcgtcgagaaaggtaaagaaagactgctctaaaatatttttatttttgtgaaaatatgtgacagccgttgatatttggactgagcttgatagggctgacacctctagctgagcgagttagctttttgacagagtaagttattatcgtcccacaaattttctatagggataactacgagatatttcatagtattaccattttattcttttcgacataaatggtgttgggttaagtttggtttagtttaggtactagtataaagtaattgacatttccaagctgttgactgaatgatcatcacctttaagattcttttgaaatttcgaaac

SEQ ID NO: 92963 - DNA, 441 bp, Arabidopsis thaliana columbia
gcgatcaaaacgttttaaaacatgggaagtatcgtggagccatgggcagcaatcgccgagaacggaaacgcaaacgtgaccgcgaaaggctcgagcagggagctgcgacatgggagaacagcacacaacatgtcttcatcgtcgctaaggaagaaatcagacctgagattggttcagaaagttccatgcaaaactctcaagaacattctctctaatcttcaagaagtcattcttggtactaagcttactctcttatttctcgccatccctctcgccattcttgccaattcttacaactacggtcgtccgttgatatttggactgagcttgatagggctgacacctctagctgagcgagttagctttttgacagagcaactagctttctacactggtccaacagtgggcggtttgttgaacgcgacttgtggaaacgcgaca

SEQ ID NO: 92964 - DNA, 536 bp, Arabidopsis thaliana columbia
  unsure (1)..(536): unsure at all n locations
nnnnnnnnnnnnnnnnnnnnnnnnnnnnnnnnnnnnnnnnnnnnnnnnnnnnnnnnnnnnnnnnnnnnnccacgcgtccgcgctgctctcacacgcaaataatggctcatctcttcagggagctgtctctgggccactccaagagagagtctacgccgccgccgccgtcacattcggcgacttcacgttcttcttcaatgtcttccgatctacctccatcaccactcggacaacgcgctgtccaactttccgattccgatctccgtctcactgcttacgagatcttcgtcgccgcatgtcgtagcgccaccggtaaacctctctcatcggctgtttcagtcgctgttttgaatcaggattctcccaatggctctcctgcttcgccggcgattcagcgttctctgcacctcaaccgccgctagtaaaatgaagaaagctttggggttaaggtcgtcttcttcgctttcacctggatctaataagagttctggttctgcttcgggttctaatggtaagtcgaaacgtcctactactgt

SEQ ID NO: 92965 - DNA, 402 bp, Arabidopsis thaliana columbia
ggaatcactcctgcacgcgtcttcgtctctggtgtctctgagacccagaatcgacggtagagattcgttcatcaacccgtcacgcgtgtgccttaatcctagtctcggccgcagaggatctaaacctcttccgttggtcgcggcggcgaagaagatgaaaagcaagaaagatgacaatcataacttttcagctagacctgacgaagccactggtccttttcctgaatccattcttctcaaagagaagaagattgatgaagaaggtgatcttcttcccgagtttgctgatgctgaagaaatggagctatatcagcttctggatcttcagcttctgagtgactcgtatgaagaaaggatgaggcactatgaggtggtttacttgattcatgaaaaacatgctga

SEQ ID NO: 92966 - DNA, 962 bp, Arabidopsis thaliana columbia
  unsure (1)..(962): unsure at all n locations
gccnnnnnnnnnnnnnnnnnnnnnnnnnnnnnnnnnnnnnnnnnnnnnnnnnnnnnnnnnnnnnnnnnnnnnnnccacgcgtccgctagtgatgagtccaccagaaatggagattccaagaaatcaggaatcggagcgggggcaattgcgggcataatcatttcattgttagtagttacagctcttcttgttgctttcttcttgttcagaagaaaaaaatcaaagaggtcatcacccatggacattgagaaaaccgataaccagcctttcactcttgcttcaaacgactttcacgaaaacaattccattcagagttcttcatcagttgagacaaagaaactggacacttcattgtctattaatcttcgacctccaccaattgatagaaacaaatcatttgatgatgaagattcgacaagaaagcctattgctgtcaagaaatccacagtggtggttccttcaaatgtgagactctattcagttgcagatctccaaattgctactggcagtttcagcgtagataatcttcttggagaagggacttttggacgagtatacagagctgagtttgatgatggaaaggttcttgctgtgaagaaaattgattcgtctgctctcccacatggcatgaccgatgatttcattgaaatggtatcgaaaatagccaatttggatcatccaaatgtgaccaagcttgttggttactgtgctgagcacggacaacatctcgtggtctatgaattccacaaaaatggatcattacatgacttcttacacttatcagaagaggaaagtaaagcattggtgtggaattcacgagtcaagatcgctcttgggactgcacgcgcattggagtatctgcatgaagtttgctcaccgtctatagtggacaagaatatcaaatcagctaattttttactcgattcagagctgaatcctcacttatcagattctggtctcgc

SEQ ID NO: 92967 - DNA, 563 bp, Arabidopsis thaliana columbia
actcactttagggaaagcacgtacgcctgcaggtaccggtccggaattcccgggtcgacccacgcgtccggtcgtgttcaatatctacaacaagaaggtcttgaacgcttatccttacccatggcttacctcgacgctttctcttgccgctggttcgttgatgatgcttatctcttgggctgttgggatcgttgagactcccaagacggattttgatttctggaaaactctttttccggttgctgtggcacacacaattggtcatgtggctgcaacggtgagtatgtcaaaggttgctgtttctttcactcacatcatcaagagtggtgaacctgcgtttagtgtgcttgtctcgaggtttattttgggtgaaaccttccctacttcggtttacttgtctctcattccaatcattggtggttgcgctctgtctgcccttaccgagcttaacttcaacatgattggtttcatgggagctatgatttcgaacttggctttcgtgttccgtaacatcttctcgaagaagggaatgaagggaaagtctgtgagcgggatgaactact

SEQ ID NO: 92968 - DNA, 506 bp, Arabidopsis thaliana columbia
ctatacgactcacttagggaaagctggtacgcctgcaggtaccggtccggaattcccgggtcgacccacgcgtccggcttatacacaagagcgttcgcttgttttcaaccagcccgtatttgacacttggcagcgttgttgaagacttgcctgaagaagacggcagctacatcggagatatcctcttgttcgatccggccaaggaagagttagtcacagtccgggacaaaacaattcccgaaaagctcgttaactcgagagtggtcggagcttcacatggatggacatttttctctgaccgatgcaatcataattctgtatgtatcagcgacctttttactcccatggcttccaaatcaaacacaaagataattcctctgcctctgcttactactatgatctatggccaaacagaagctgtctggaacgtggcaatgtcgtcatcttctcctcaccaagacaatgaagaagaagactgtgtcgtggctatcaatttcttgggtagc

SEQ ID NO: 92969 - DNA, 495 bp, Arabidopsis thaliana columbia
tacgactcatatagggaaagctggtacgcctgcaggtaccggtccggaattcccgtgtcgacccacgcgtccggttcttttgatctcgatggtggttgcggttaccgttggtgtcagcctcaataagcatgacggtgactctaaaggtaaagcagaggtaaatgcttccgtcaaggccgtcaaggatgtttgtgcaccaactgattacagaaagacttgtgaagacactctgattaagaacgggaagaacacaaccgacccgatggagttggttaagactgcgtttaatgttacgatgaagcagatcacggacgcagctaagaagtcgcagacgattatggagcttcagaaggattcaaggactaggatggcgcttgatcaatgcaaggagcttatggattacgcgttggacgaactaagtaactctctcgaggagcttggaaaatttgagttccacctgctcgacgaggctttgatcaatctgaggatttggct

SEQ ID NO: 92970 - DNA, 619 bp, Arabidopsis thaliana columbia
  unsure (1)..(619): unsure at all n locations
taatacgactcatatagggaaagctggtacgcctgcaggtaccggtccggaattcccgtgtcgacccacgcgtncgcccacgcgtacgcccacgcggccgctctgtctacttttgaaatccttcaaaaatgtcgggactcagattggatggcaaaatcgcaataataacaggcggagctagcgggattggagccgaagcggttaggctgttcacggaccacggagctaaggtggtcatcgttgactttcaagaagaacttggtcaaaacgttgccgtttctgtcgggaaagacaaagcaagtttttaccgttgcgatgttacaaacgaaaaggaggtagaaaacgccgttaagttcaccgtcgaaaagtacgggaagcttgacgttctctttagtaacgccggcgttatggaacagccgggaagctttctcgacttgaatctggaacagtttgaccgaaccatggcggtcaacgttcgtggtgcggctgcgtttatcaaacacgctgcacgggccatggtggagaaaggcacgcgtgggtaaatcgtttttgcccacttcggtttgaancggtgncnaggcctaagggtcanggggtttanncgttttttggntgttaa

SEQ ID NO: 92971 - DNA, 443 bp, Arabidopsis thaliana columbia
tcgtaatctgaaaccaatctgttcatatgatgaagaagtttctctcgttctcctccaacgcgtagaaaattctgacggcttaacgatgtggcgaagatctgttgtttctcgtttctcttcaagaatctctgtttcttcttcgttaccaaaccctagactgattccttggtcccgcgaattatgtgccgttaatagcttctcccagcctccggtctcgacggaatcaactgctaagttagggatcactggtgttagatctgatgccaatcgagtttttgccactgctactgccgccgctacagctacagctaccaccggtgagaattcgtctagagttgcggcttttggctggattagggcatcactacgctcgttgttattgggagctttctaaagctaaacttagtatgcttgtggttgcaacttctggaactgggtatatt

SEQ ID NO: 92972 - DNA, 2089 bp, Arabidopsis thaliana columbia
  unsure (1)..(2089): unsure at all n locations
aatccaaatgagactttattagcttttgatcaatctcattaatccaaattaaatagttaaactagaagatgagcagcaaaagggcatcacaatatcaccaagtagaaatccctccaccacaacctttcttgaaatcactaaagaacactctcaatgagatccttttcgccgacgatccgttccgtagaatcaggaacgaatcgaaaacgtcgaaaaagatcgagttagggttgagacacgtgttccctatcttggaatgggctcgtggttacagtttggagtatttgaaatcagatgttatctcagggataacaattgcaagtcttgctattcctcaagggattagctatgctcagctcgctaatctccctccaatccttggtctttactcgagcttggtgccgccgttggtatacgcgatcatgggaagttcaagagatttagcggtgggaacagtggcggtggcctcgctgttgacggctgcgatgttggggaaagaggtaaacgcagtggtgaatccaaagctttaccttcacttagctttcaccgccactttcttcgccggactcatgcaaacctgccttggcctcttacggttagggttcgtggtggagatattgtcgcacgcggcgattgtagggttcatgggaggagccgcaacagtggtgtgtctgcagcaactgaaaggattacttggcctccatcatttcactcattccaccgatatcgtcactgttctccgctccattttttctcaatctcatatgtggagatgggaaagtggagtgctagggtgttgcttcctaatcttccttcttacaactaaatacattagcaagaagagaccaaagctgttctggatatctgcaatgtctccacttgtttctgtcatttttggaaccattttcctttacttcctccatgaccaattccatggtatccaatttatcggagaactaaagaaagggataaatccaccgtcaatcacacatttggttttcacgccaccttatgtcatgttggctctcaaagttggcattatcactggagtcatagctctcgctgaaggtatagcagtggggagaagctttgcaatgtacaagaattacaatatagatgggaacaaagagatgatagcctttgggatgatgaacattcttggttccttctcctcttgctatctcactaccgggccattttcacgttcggcggtgaactacaacgcgggttgcaaaacggcgttatcaaacgtggtgatggcggttgcagtggcggtgacgttactgttcttaacgccgttattcttctacacgccattagtagttctgtcgtcgatcataatcgctgccatgctaggcctagtcgactacgaagcagccattcatctttggaaactcgacaagttcgatttcttcgtttgtctctctgcttacttgggcgttgtttttggtaccatcgaaattggtctcatcctctccgtgggaatatcagtgatgaggttagtgttgttcgtgggaagaccaaagatttatgtaatgggaaacattcaaaactcagaaatatataggaacattgagcattaccctcaagccatcactcgctcttctcttctcattctccacatcgatggtcctatttacttcgccaactctacctacttgcgagacagaattggaaggtggatcgatgaagaggaagataaattgagaactagcggagatatcagtctacaatatattgtactcgacatgagtgctgtggggaacatcgacacgagcggtataagcatgcttgaggaactcaacaaaatcctgggacgtagagagcttaagctagtgatagcgaacccgggagcagaggtgatgaagaagctaagcaagtccaccttcattgagagcattggtaaagaacggatttatctcacggtggcagaagccgtcgcagcttgcgatttcatgctccacacggctaaacccgactcgccggtaccggaatttaacaacgtttaagatttcatattgaaaatttcacatttctaaaaagttttattgtcattaagaaataagaagttgaaaanacgcggccggcg

SEQ ID NO: 92973 - DNA, 448 bp, Arabidopsis thaliana columbia
ccacgcgtcagaaaaaacttaagcctcaagaaatcaaacccacaaaaaatcaattcaacaaaacctctttctgctctctctctctttttcattcccatatgttgcttccttgagtttatctcttcccaaagaatgggaagcaacatctgaggatccatttgattaccatacatatattaaaaacaaaaacatatatctttgtgtgtgcgcgttaatgatgaaatagcagattgagagcaagaaagaggtcatagctgataaccacaatggagattcagaggatgaggcagttgatgtctctttggtctaatttgaagagtagccgcgtttccctcaccggtgggaatcatacagccgcaaggttctgcactcgctaggctcgcctcttctctcgctagctttttctttcttctttctcttcttcttacttccttttgattctctttta

SEQ ID NO: 92974 - DNA, 850 bp, Arabidopsis thaliana columbia
  unsure (1)..(850): unsure at all n locations
aatgatttccaacaaattgaaaacaagagagagattttcagtaatatatttttgtttatttttcgtgttcattgaaatttttaacgaaatggcagtaaatatgggaaggttcacagacacacttttacgatgaaatcgaacccttttgtcgatggagaagaacggaagacatcgacattcttgagctacatcttccttcaggtttgaagaaagagcatcttaaaatacagatcaacaacagtggtgtactaacaataacaggaggctgtccagtggaccaaaccaaaacaatcaggttcatgaaagaaacaaaagttgcaaaagattgtaaaagaaatgagattcgtgcaaagttctctaagggagttttgtatgtgacgatgccaaagacaaatccctatagcagctggtctctcagtttctttgaagggagccacgccacaacatcaaacccctaaaacagatgagggtatgagaaatgttgcaaactgttcaagcgaattttatagtaagtttggctcattgaagcaaagactatggaggaagacagtagttgagggtgtggccgctgtggtggttgtggctgctgcagttttaggagttgttaaagcgtaccaatattttatggcatcacctgtgtgatcaagttttaataagaccatgtatttgcattattggtatgatgtatacatatattcattatgtttcactttacataagttactcccccattactactaaataagtataaattgtccttcttgagttaaaaaaaaaaaaaaaagnnnnnnnnnnnnnnnnnnnnnnnnnnnnnnnnnnnnnnnnnnnnnnnnnnnnnnnnnnnnnnnnn

SEQ ID NO: 92975 - DNA, 388 bp, Arabidopsis thaliana columbia
ccggaccggaatggtcggctcgaccatgcgtgcatggaaatctgaaagaaatacacgctcccatagtcttcaattttcacgatctccgaatttcacgacgtttgatacttggtttctttgcacattcacgcgacgaagatgaggctgttgaaggttgctacgtgtaacttgaaccaatgggccatggatttcgagagcaacatgaagaacatcaaggcttcgatcgctgaggcaaaggctgctggtgctgttatcaggcttggacccgagctcgaggtcactggctatggttgcgaggatcacttcttggaactcgacactgtcactcatgcgtgggagtgtttgaaggaattgctgcttggtgattggacggatgatattttgtgca

SEQ ID NO: 92976 - DNA, 534 bp, Arabidopsis thaliana columbia
acgactcactttagggaaagctcgtacgcctgcaggtaccggtccggaattcccgggtcgacccacgcgtgcgagcagaatttgtatatcaaaatcgagcgaacgaagatctccggattgctgcactctgctacatgcctttcgaatccgtttactgcatcgccggagaagtaggaatctgtttacttacctttggaatccatcctcatccctctccgtctagtgtgatgcagcagttaggcactagtgcagtgacatctaagtttaaacagacttttttcttcaaaatgcgacattttcttctgatgtctgcagtacggttgtatacctctttctctccccccattcaccctcttcgatcgtgttgtttcttgcatcgccttggcagtaatctcgggggtttctttcttaaagtttgtgcaaaatggtggactggctttcactattaccctggaataaaatcttcactgctgcatgtggctgctttttaagcgatagcaactacattcacttgatggagtcaaatctcgatgc

SEQ ID NO: 92977 - DNA, 556 bp, Arabidopsis thaliana columbia
  unsure (1)..(556): unsure at all n locations
aggacagccttgcacgttccgcctcgccgcttgtatcgccnnnnnnnnnnnnnnnnnnnnnnnnnnnnnnnnnnnnnnnnnnnnnnnnnnnnnnnnnnnnnnnnnnnnnccacgcgtccgcccacgcgtccggtgtctgtgtactgcgtagggtttagtgagtccatttgcaaagatgactcgtgagttctaatctatcgacctctctcgttttctcgcagttgcagagtctcaggattatataataggacaaagagagagagacaacatgcactctcttaagactacttgcgttgggcaaatatttgctctagctaagcctcacgattctgtaggcaagaggactcgtaatcggattcctaaagaagagagaaagacactggttgaatcttttataaagaagcatcagaaactaaacaatgggagttttccttcacttagcctcacacacaaggaggttggtggatctttctacactataagggagattgttagagagattatccaagaaaatagagtccttggtcctggtgacttgctacttgagggaaatggc

SEQ ID NO: 92978 - DNA, 394 bp, Arabidopsis thaliana columbia
accacgcgtccgctatagcattggaaaagaaagaaagagagagaacaaagcttcttcatcaatggagaagcaaggatgtgagatcgaagctttagatattgattacaacatctttgtaaggaagattaatgttaatccctttggaatctttaggcggaaaccgcggccggaagctgaccagccggtaaagacagaggaagagtcattgaagctagaggatgaaaccggtaacaaagtcaagcatgtactaaaaggagtgacttgcagagccaaaccatgggagattcttgctattgttggcccaagtggtgcagggaagtcgtctttgcttgaaattctagctgctagactcatccctcaaaccgggtcggtttatgtcaacaagagaccggtg

SEQ ID NO: 92979 - DNA, 533 bp, Arabidopsis thaliana columbia
cagctctctacgactcactatagggaaagctggcacgcctgcaggtaccggtccggaattcccgggtcgacccacgcgtgcgcccacgcgtccgtgggaatgttcccttaaagtggtatgaagatgagaaacatattggttatgacctcactgggaagaagattactaagaaagaaaaacaagataaactcgactcttttcttgcaactatagatgactctaagacttggcgcaaaatttatgaggaatataatgacgaggacgttgagctgactaaagaggagagcaagatcgttcagagaatactcaaaggggaagctccacatgcggactttgatccatatgcaccttatgttgagtggttcaaacatgatgatgcaatacatccactctcaagtgcaccagagcccaagcgaagattcatcccttcaaaatgggaggccaaaaaggttgttaagattgttagagcaatacgtaaggggtggatcaagtttgataagcctgaagaagagcccaatgtataccttttatgg

SEQ ID NO: 92980 - DNA, 523 bp, Arabidopsis thaliana columbia
atcctgaatcttacttgctacctttcttcttccttcttcatcattcatcattcatcattcatcattcatcattctcatatctctcttcttttactggggatcacaatatctatctacttgtaaattgtgaatgatagatcctgagccttcttgccgccacctcttgaacttaatgtacttgaaaccagtctccacatagcgatagagagagagatctgttatgtgtgtattcatcaagttctctttttttgggctcaaagtgtaaaaggagacattttcaattctgagttcttttgttttcttataataaaatctgggttttctgagattttcgtcacatcgtccgaaacgtggacacattttgatcttttgggtgtcactgtgtcaataaaggttgaaactttgattacatttctctcaaaaggattaatttttatttctctatctgggtgagatttggattaattggtgaggaatcggaagaaactggcgagattacaagcgattgtgaaatatcagaatc

SEQ ID NO: 92981 - DNA, 562 bp, Arabidopsis thaliana columbia
  unsure (1)..(562): unsure at all n locations
cggacgcttgggcggacgcgtgggagaaaccccaaaacattttgcctagaaagttgtttaaattacctcttaaaccttaagaaatcatatccagaaactcaatggatcaacaagggatggtcaagaaaagactagccgttctcgtcggctgcaactaccctaacacaaggaacgagcttcacggttgcatcaatgatgttctagccatgaaagaaactattttgtcacgtttcggattcaaacaagacgacattgaggtgctaacggacgagccagaatcaaaggtaaagccgacaggtgccaacatcaaggctgctctacgtaggatggtggataaagctcaagcccggatcttggagacatcttgttcttccactacagtggccatggaacttcgaattncttcgggttaaaatnttgctnaatccttttaaaacaaggcggagctatttgtnccctngtgnntttaantttcatccacaagatttttnatttccgnggatttgggcaatcaactttcctaaggnccaaggnttnccatgaccttttngttttnccanng

SEQ ID NO: 92982 - DNA, 550 bp, Arabidopsis thaliana columbia
  unsure (1)..(550): unsure at all n locations
nnnnnnnnnnnnnnnnnnnnnnnnnnnnnnnnnnnnnnnnnnnnnnnnnnnnnnnnnnnnnnnnnnnnnnnccacgcgtccgcttcttcccgccgggaaattcttacgtttctccggcggttagaaaaatgacaccacagatcaaaactcatctcttgccgaagcaagaaccttcttcgtctgagaaccatggatcatcaacctccggcatcgttttcaacgtgtcaacgagtataagcggagccggaataatgtcgatgccggcggcgtttaaagttcttggaatagttccagcgtttttgattatcacgatcatagcttggctttccacaatttccgttggatttctgatgaaatcaactctcgccggagaatcaactacttacgccggagttatgaaagagtcgtttggtaaaacaggatccatcgctgtacagattgctacgatggttgctacttttggttgtatgattatattttcgattattataggagatgtgctttctggtaatgaaaatggtggtcctgaacatattggagttttgcaaga

SEQ ID NO: 92983 - DNA, 524 bp, Arabidopsis thaliana columbia
aggtctctacgactcactatagggaaagctggcacgcctgcaggtaccggtccggaattcccgggtcgacccacgcgtccgttaaaggagaaacaagctgagttaactgaacagtgggagcacgagaggtctgttatgtcccgtcttcagtcgattaaagaggagattgatcgagtaaacctcgagatccagcaggcggaacgtgaatacgatctcaaccgtgcagctgagctcaaatacggaagcttaaactcattgcagcgacagcttaatgaagcagagaaagagctgaacgagtacttaagctctgggaaatctatgttcagagaagaggttttgggtagcgatatcgccgagattgtgagtaaatggactggaatcccggtatcaaaacttcaacagtctgaacgagataagcttctacatttggaagaagaattgcataaaagagtagtcggtcaaaccccagcagtgactgcggtagctgaagcattccaacgatcaagagctggtctttcggatcc

SEQ ID NO: 92984 - DNA, 588 bp, Arabidopsis thaliana columbia
ggatttggttccgaatgtgccaaccccgttccagctcttgggtcgagaccttgtactctggtttgatcggaatgatcagaaatgggcagcctttgatgatctctgccctcaccggctcgctcctttatctgaaggaaggttggatgagaatggacacttgcaatgttcgtatcatggatggtcatttggtgggtgtggatcttgcactaggattcctcaggctgctacttcaggtcctgaagctcgtgctgttaaatccccgagagcttgtgctattaagttcccgacaatggtgtctcaaggtcttctctttgtgtggcctgatgaaaatggttgggatagagccaattcaattgaacccccctaggttgccggatgcatttcgataaaccggaattttcgacggtgacaattcaaagggatctttttctatggataatgataactctcattggaaaatgtatctgatccttcccatatagattttgctcatcacaagggtacaggaggaagagacagagccaaaccattgccgttcaaggtggagtcaagtgggccttggggtttccaaagtgcgaatgatgacag

SEQ ID NO: 92985 - DNA, 902 bp, Arabidopsis thaliana columbia
ccgggccccccctttgaacgcccgtggagactggcccttctgcaggtaccggaccggaattcccgggtcgacccacgcgtccgccgttcttctcgtagcttgaaataagattcatcagaagagtaaataaacatcaaaatccaacaaaccaaactagaaaaatgtcagtagttttactctcttctacttctgcaacaatcaccaaatcccaatccaaaaagattccctttttatctcccaccacaaaattcccattaaaggtctcaatttctccatcaagatcgaaacttttcaacaaccctttacgcgtggcggcgccgccgtctatacccacttcggattcggcggaggagaagcggatcgaagaagaatacggtcggtgataaggaagaagaagggtctgagttcaagtggagagatcattggtatccagtttctttggttgaggatttggatccgaatgtgccaaccccgttccagctcttgggtcgagaccttggcctctggttcgatcggaatgatcagaaatgggctgcctttgatgatctctgccctcaccggctcgctcctttatctgaaggaaggttggatgagaatggacacttgcagtgttcctatcatgggtgggccattcagagggtgggggatcctgccaccttagatttcctcgagggctgcttaccttcaagggtccccggaaaggctcgcggggcctgtgttaaaaatcccccccgagagaagaccttggttggcttaatttaagaggttgttccccaccaaatgggcgttggttcttcaaaaagggggccttcccttccttcttggtgggcgcgggcccctggataggaaaaacataggggtgttggggggattatgggaggcgcccaaactttccaaatttg

SEQ ID NO: 92986 - DNA, 582 bp, Arabidopsis thaliana columbia
  unsure (1)..(582): unsure at all n locations
aggtcacagtgaccaaaatcacacacttcacaagaaacaacctatggatccaaatgaatctccaccaaaccaatttcgccacgtggtggccatgccttatccaggtcgaggacacatcaaccctatgatgaacctctgcaaacgccttgtccgtcgataccctaaccttcacgtcaccttcgtcgtcacagaagaatggctcgggtttattggacccgacccgaaacccgaccggatccatttctccactctccctaatctcatcccttccgagcttgtcagggccaaagacttcataggcttcattgatgccgtctacacaagattggaagaaccattcgagaagcttcttgacagcctcaattcaccacctccgagtgtaatattcgccgacacttacgtcatttgggctgtgcgagtcggcagaaaaaggaatattccggtggtttctctctggaccatgtcagccacgnttctntccttcttcctncactctgatctactcataagtnatggncatgntctgttcgaaccatcagnaagaagaggtttttgatnaggnnccccggtttatctccgacg

SEQ ID NO: 92987 - DNA, 982 bp, Arabidopsis thaliana columbia
  unsure (1)..(982): unsure at all n locations
atacgactcactttagggaaagcagctacgcctgcaggtaccggtccggaattcccgggtcgacccacgcgtccgtttccttcttcatttatgaaacgcaaaaaacattattcccctctgtggtctctctctcacgagcatcgtttcttcatcgatctcatagttaccggcgttgttttgaggccactaccgtcgtctctctccgtaatcgtctccaacatcatcatcttctcaatttcgaagcattttattctctaataggactcaggaatgaatctttctccgttcaagagagatatcgatgagctgatagacgagtttgtggaggatgatttgacaacctttgctgatatgaagagtgtctggctatctagaaagttttctcatatatatgaagctagtcctaacagcaacctagcctttttcatgcagtcactatatgttcataccattggtcacatggttagtattgattctttttcacggagacttggaggtctttactgtctctattgccttcatgagatccaaccctttaaacccaagttcagaatctatatctcacttcaagagcttgggaaatttagggatccttgtagttgaggcaaaagataaaggtgtagagatagctgctgctgtggcaaaaaaaatgcttgatgaggacatgttaatattttggagctgtggatggggcatctgcaaccaaggcaattcatcaattaaccgggctacagcaccggacggcttcgggttttcctatgnggaggtaaacctgtgacacttggttttancccaatttattcattttgggtatggggaaaggaaggttnacctgnattcccctgggaaaaatgcctttagggttttccaggggccnagaaagggtcaagccgnagggtccaggggnantaatgggggtttgtgncanaagggttttccngggggnagggnttttnggggnanattggggatttaaggggta

SEQ ID NO: 92988 - DNA, 603 bp, Arabidopsis thaliana columbia
  unsure (1)..(603): unsure at all n locations
ttctgcagaatatttactattttttataaagaaacaaaagagcatagaaaggtttggtttttcaaagaacgtgaaaatgagtatgcattttaggaataaagcatggattattctggcaattctgtgtttttcatctttgattcactcaacagaagcagtggtcacttatgatcacaaagctttaatcatcaatggacagagaaggatccttatctccggttctatacactatccaagaagcactcctgagatgtggcctgatcttataaagaaggccaaagaaggaggtttggatgttatacaaacatatgttttctggaatggacatgaaccttctcctggaaattactattttcaggatagatatgatctggttaaattcaccaaactggtgcaccaagctggactatatcttgatctaagaattggtccatatgttttgtgccgagtgggatttttgggggatttccggtttggctcaaatatgttccnggnatggttttcagancagataacgnacctttcaaggttgcaatgcaaaaattcncaaagaagatttntgggtatgntgnaggaggaaagntgtttaggctnaaggnggnc

SEQ ID NO: 92989 - DNA, 425 bp, Arabidopsis thaliana columbia
gaagaaacaaagcataaccccccagagtttgtgtgagagtttctcccaacaagatcaaacttcgtactctacgagaactactattatccaaaacgcgaaatagagagacagagatttcataaatttcttactttttaaccccaaagttcttttccagacagcgttttcctctgtcctttgctctttgtgggttaactccttcttccggtttggatatcccgagctagtaaagaagggatccagtagcagaagctgaagctaataaacccaatcatagagaaagctctctgaacaaaagacattttctgggtttgttttaattaaaaagaaatggccgattcgaccaaagtaaggctagttcgttgcccaaaatgcgagaatctcttatcagagcctggaatatttccctttttccagtgcggtgg

SEQ ID NO: 92990 - DNA, 900 bp, Arabidopsis thaliana columbia
  unsure (1)..(900): unsure at all n locations
cagctannnnnttaggagcaactatagaagagttatgacgtcgcctgcacgcgtacgtaagctcggaattcggctcgagtcttctccttcagctttgagtttctcgaggctcttttcttaattttactgctaaatagtagtgtttactgtcttcagccgccgtcgccggattccattatcgaaggcgacggaagcagtatcttaggttttgtccgacgaagctccgtttgattgttatcggttccgttgtattcgtcgatcttccattttcgcatttgttttctatatccgaagatgggaagcagtccagctccgtttgccgatattggcaagaaagccaaagatctcctaaacaaggattacatttttgaccacaagtttactctcacaatgctgagtgctacaggaacggaatttgtggctactggtttgaagaaggatgatttcttttttggcgatataagcacactatataaaggtcaaaacaccattgttgatctgaaaatcgacagccactctagtgtgtcgacgaaagtaactctcaaaaatctcttgccatccgctaaagctgtaattagtttcaaaatacctgatcacaagtctggcaagctggatgtgcaatatgttcatcctcatgctacgctcaattccagcattggcctcaacccaactcctctgttagatctatcagcaactatcggaagccagaatgtttgccttggtggtgaagtcagtttcgacacagcttcatcatcactaaccaaagtacaatgcagggattggtttcaccaaccaaggcggctctgctcgcactcatcactggggggtaaagggggggggtctgagagctacttacgttcacacagtgaacccaaccacattctttggtgcagaactgat

SEQ ID NO: 92991 - DNA, 439 bp, Arabidopsis thaliana columbia
  unsure (1)..(439): unsure at all n locations
ctccgcccacgcgtcagcggacgcgtgggttcagatcatttgaatcgaagctaaagaatcgccgccatggacgccattgattccgtcgttgatcctctcagagacttcgctaaggatagtattcgtctcgtcaagcgttgccacaagccagatcgcaaagaattcacgaaagttgcagttcgtaccgcgattgggtttgtggtaatgggattcgttggcttctttgtgaagctaatcttcattccgatcaacaacatcatcgtcggtgccacttagaaagcaaaggatacacaagtcagttctatgttttgagaaaggaagatttagaggttatcgtgtttttaggtgaaaggcacaagtcagttctgtgttttgtgtaatcggatcccattttgttttcaaaggtttttttgggnncccccttttttnntcnnnactt

SEQ ID NO: 92992 - DNA, 604 bp, Arabidopsis thaliana columbia
  unsure (1)..(604): unsure at all n locations
actatagggaaagctggtccgcctgcaggtcccggtccggaattcccgggtcgacccacgcgtccgcccacgcgttcgaatacaggaccttctgaagttagaaagacttcaaacagagcttacagagcgtagtggacgtcagccaacctttgcgcagtgggcttctgctgctggagtcgatcagaaatcattaaggcaacgtatacatcatggcacactatgcaaagacaaaatgatcaaaagcaacattcgactcgtaatttcgattgcaaagaattatcaaggagctgggatgaacctccaagatcttgtccaggaaggttgcagagggcttgtaaggggagcagagaagtttgatgctacaaagggttttaaattttcaacttacgcgcattggggggtcaagcaagcttgtgcggaagtctctctctgatcagtccagaatggataagattgccttttcacatggtggagcaacatttagggtgaaanggcncggagcaactnncagttnaccgggtagtccccgagnccgngnantttcagggggacaggggtttcattaagggnttatnggggtttnttttcctaacntccgggngtc

SEQ ID NO: 92993 - DNA, 2400 bp, Arabidopsis thaliana columbia
  unsure (1)..(2400): unsure at all n locations
ccnnnnntcctcttcttcgtcttcatcatccgcgcatcaccagttttttctctctctctacaaatcttcttaacggcctttcatcaatggtcagcagacttagctttcgaatataggctaagaacgagcatgtcttcttgtcttcttcctcagttcaagtgcccacctgattctttctctattcacttccgaacctctttctgtgcccctaaacacaacaagggttcagtcttcttccaaccgcaatgtgcagtatccacttcaccggcgttattaacttctatgcttgatgtcgcaaagcttagactaccctctttcgatactgattcggattcccttatatcagacaggcagtggacttatacaaggcccgatggtccttccactgaggcgaagtatttagaagctttagcctctgagacacttctcacaagcgatgaagcagtagttgtagcagcagcagctgaagcagtcgcccttgcaagagctgctgtcaaagttgccaaagatgcaacattatttaagaacagtaacaacacgaacctattaacttcgtcaacggccgacaaacgctccaagtgggaccagtttactgagaaggaacgtgctggcatattggggcatctagcggtttcggacaatggaattgtgagtgataaaatcactgcatctgcctctaacaaagagtctattggtgatttagaatcagaaaaacaagaagaagttgagcttctggaggagcaaccttcagtgagtttagctgtgagatctacacgtcaaactgaaaggaaagctcggagggcaaaagggttagagaaaactgcatcaggtattccgtctgtgaagactggttcgagccctaaaaagaaacgtcttgttgcgcaggaagttgatcataatgatcctttgcgttatctaagaatgacaacaagcagttccaagcttctcactgtcagagaagaacatgagctgtcggcaggaatacaggaccttctgaagttagaaagacttcaaacagagcttacagagcgtagtggacgtcagccaacctttgcgcagtgggcttctgctgctggagtcgatcagaaatcattaaggcaacgtatacatcatggcacactatgcaaagacaaaatgatcaaaagcaacattcgactcgttatttcgattgcaaagaattatcaaggagctgggatgaacctccaagatcttgtccaggaagggtgcagagggcttgtgaggggagcagagaagtttgatgctacaaagggttttaaattttcgacttacgcgcattggtggatcaagcaagctgtgcggaagtctctctctgatcagtccagaatgataagattgccttttcacatggtggaagcaacatatagggtgaaagaggcacgaaagcaactgtacagtgaaaccggtaagcacccaaagaacgaagaaattgcagaggcaacagggctgtcgatgaagagactcatggcggttctactctctcctaaacctccgaggtcgctagaccagaaaatcggaatgaatcaaaacctcaaaccttcggaagtgatagcagatccagaagcagtaacgtcagaagatatactgataaaggaattcatgaggcaggacttggacaaagtgttggactcgttgggtacaagggagaaacaagtgatacgttggagatttgggatggaggatgggagaatgaagacgttgcaagagataggagagatgatgggagtgagcagggagagagtaagacagatagagtcatctgcattcaggaaactaaagaacaagaagagaaacaaccatttgcagcaatacttggttgcacaatcataattctttttctcttcaatatggaatgttttgtgcatagaacccacccacctgagcataacaagcagtaaattattactttttagcatttacgattcttgtgacgccatggacgccattgattccgtcgttgatcctctcagagacttcgctaaggatagtattcgtctcgtcaagcgttgccacaagccagatcgcaaagaattcacgaaagttgcagttcgtaccgcgattgggtttgtggtaatgggattcgttggcttctttgtgaagctaatcttcattccgatcaacaacatcatcgtcggtgccacttagaaagcaaaggatacacaagtcagttctatgttttgagaaaggaagatttagaggttatcgtgttttaagtgaaaggcacaagtcagttctgtgttttgtgtaatcggatcccatttgtttcaatgtttttttggttcttctttttcgttcacaactgaaaaatcggacgtgttttgaatgtagagcaaactaatttaaaaagctgtggatttcgtagtccagcttggtctgttaaaa

SEQ ID NO: 92994 - DNA, 525 bp, Arabidopsis thaliana columbia
  unsure (1)..(525): unsure at all n locations
nnnnnnnnnnnnnnnnnnnnnnnnnnnnnnnnnnnnnnnnnnnnnnnnnnnnnnnnnnnnnnnnnnnnnnnnnnnnnnnnnnccacgcgtgcgagtttctctgtgttttttcgttgggtggttcctcagtggttaccaaatctctcttcttcttcttcgtcagaagctaaaacctttcaagaccctaatttcatctatctatctcaataaggctagatcaaaaattcgaatttcaaaatcccgttttgagtgttagtagattcggtttctgggttttcgtagaaacgggattaacggcggattcagatcttgaaatttttgtgtgtttctcaaactgattataaattttggtttttttttttttaaatttcgggtttgaaaaatagggaaaatttctgggtttcttctgagaaattcgaattttttggagatgggagaaggtgaagaaggagacaaattcccgccaaaaacggaggaggtacacaagaatctatgaagtcgggcgagcgaactcgattttactgg

SEQ ID NO: 92995 - DNA, 729 bp, Arabidopsis thaliana columbia
  unsure (1)..(729): unsure at all n locations
atgatactgccnctcnnnnnnnnnnnnnnnnnnnnnnnnnnnnnnnnnnnnnnnnnnnnnnnnnnnnnnnnnnnnnnnnnnnccacgcgtccgattactttcttctcatacaggaaaaataagtcagtaatctccaagcataagaaaaatatggctaaactaatctcccatgttactgcgctattcattgttgtagttttggtgtgtgcgtttgttcctgctttttctgtagaagaagctgaagcaaaatcattatgggacacttgtctcgttaaaatcactcctaaatgtgcattgaatataatcgcggttgtttttggaaatggaaccctcattgagtcttgttgcaaggatcttgtccaagaaggaaaagtgtgtcacgataatctcattaaatatattgctgacagaccaagcttaattggccgtgaaacacaatacttgaagaagagggatgacgtgtggagtcattgtatctcaatctctaaaactgcttaaaatatgtgtgtttttaatattatttcgatcgaacacatttaaattttgttgttgtaacatttttgttacgataaattaatttctatgtgtttactttaataccaaataaattaacaagctctcgtaagatgaaaaaaaaaaaaaaagnnnnnnnnnnnnnnnnnnnnnnnnnnnnnnnnnnnnnnnnnnnnnnnnnnnnnnnnnnnnnnnnnnnnnnnnnnnnataaatcg

SEQ ID NO: 92996 - DNA, 1203 bp, Arabidopsis thaliana columbia
agctctctacgactcactattgggaaagctggcacgcctgcaggtaccggtccggaattcccgggtcgacccacgcgtccctgtatttcaaactatgacaatggagtcatacaaaaccctagaaatcattcgcaagaacactgattcctccgtatttcatctcatcatcaacagaccatcacatctcaacgccttatctctcgatttcttcatcgaattccccaaagctctctcatctctcgaccaaaatccagatgtctccgtcatcatcctctccggcgccggaaaacacttctgctccggtatcgatctcaattccctctcttcaatctcgacacaatcctcctccggtaacgacagaggacgatctagcgagcagctacgccgtaagatcaagtcgatgcaagcggcgattacagcgattgaacaatgccggaaacctgtaatcgccgctattcacggcgcgtgtatcggtggcggtgttgatctgattaccgcttgtgatattaggtattgctctgaggatgcgtttttctcgattaaagaggttgatctagcgattgttgcggatcttggtacgctccagcgattaccgagtatcgttgggtatgctaacgccatggaattagctttaactgctcggagattctctggaggggaagccaaggatcctggttgggtttccaaagttttccggtctaaatcggggcttgccaacggcgccagtacatcccctgaaggattgggggccaagtcccctttagctgtgacagggccaaaggcagtgttattaagaacccagagaggtgagtgtagaccaaggacttgactatgtagcaacttggaactcggctatgcttatatcagatgatctcaacgaagctgtttctgctcagatgatgaaaacaaaacctcggtttgctaaactgtgatacagtctctgtgttgcttctttgtctttcaaagctcttctggtaactaaagtaataagatattacttcaaataagtttagttattgatagttccctaattacggattagggctatagataaaatggtcttctacacatgagaatatgattaatactctgcacaatgcatattggtaaatgctatacctcaatgtttattaaaaaaaaaaaaaaagggcggccgctctagaggatccaagcttacgtacgcgtgcatgcgacgtcatagct

SEQ ID NO: 92997 - DNA, 557 bp, Arabidopsis thaliana columbia
  unsure (1)..(557): unsure at all n locations
gatgacacttcggccgatgaggataaggagattgatctgccagagtccattcctttatctgacataatgcagaggcagaaagttaagaaaagcaaaaacgtggcagtgtctgtggaaccgactagttcctcaggtgtaagatcctcaagtagaacacttatgaagaaggattgtggcaaaaggttgaataaacaagttgaaaaaacaagagaaggaaagaatctaagatcgttaaaagagttgaatgctgaaactgacaggacagcagaagagcaggaagtgagtctagaagctgaatctgatgacagaagcgaagagcaggaatacgaagatgattgtagcgataagaaagaacaatctcaggacaaaggtgtagaggctgaaactaaggaagaagagaaacantatccaaattcagagggtgagagttaaggagaggactcagagtcagaggaagagccgaattgggngaaacangttngtnttgggggttattnaagnaggagnnggnggagnngtttttccnttttgggggttttgccnangaggggaaaaag

SEQ ID NO: 92998 - DNA, 513 bp, Arabidopsis thaliana columbia
  unsure (1)..(513): unsure at all n locations
agccggtcagtgaaaaaacaagtgtctgatggctttggcgaggatttggtcggtaagagagtcaatatgtggtggccgctcgaccagacattttatgaaggcgtcatagattcctattgtactcgtaacaagatgcatcgggtaatatattctgatggagattccgaagagcttaatctccctgaagagcgctgggagttactccaggatgacacttcggcccattaggataaggagattgatctgccagagtccagtcctttatctgacataatgcagaggcagaaagtttagaaaagcaacaacgtggcagtgtctgtggaaccggctagttcctcaggtgtcagatcctcaagtagaacccttatgaagaaggattgtggccaaaggttgaataacctagttgtgcagagactcagtttcatacgaccgaacgcatagnnnnnnnnnnnnnnnnnnnnnnnnnnnnnnnnnnnnnnnnnnnnnnnnnnnnnnnnnnnnnnnnnnnnnnnn

SEQ ID NO: 92999 - DNA, 601 bp, Arabidopsis thaliana columbia
  unsure (1)..(601): unsure at all n locations
nnnnnnnnnnnnnnnnnnnnnnnnnnnnnnnnnnnnnnnnnnnnnnnnnnnnnnnnnnnnnnnnnnnnnnnccacgcgtccgcgcacgcgtccgtggcagtgtctgtggaaccgactagttcctcaggtgtaagatcctcaagtagaacacttatgaagaaggattgtggcaaaaggttgaataaacaagttgaaaaaacaagagaaggaaagaatctaagatcgttaaaagagttgaatgctgaaactgacaggacagcagaagagcaggaagtgagtctagaagctgaatctgatgacagaagcgaagagcaggaatacgaagatgattgtagcgataagaaagaacaatctcaggacaaaggtgtagaggctgaaactaaggaagaagagaaacaatatccaaattcagagggtgagagtgaaggagaggactcagagtcagaggaagagccgaaatggagagaaacagatgatatggaggatgatgaagaagaagaagaagaagagattgatcatatggaggatgaagcagaagaagagaaagaagaggttgatgataaagaggcaagcgcaaacatgtctgagattgagaaagaag

SEQ ID NO: 93000 - DNA, 746 bp, Arabidopsis thaliana columbia
gcgctgaaagaagcaatgaatctttcaaggcaagagataacacaattgaaatctgcagttgaagcagcagagacaaggtatcaagaagagtatatacagagcacacagcagaagagcaggaagtgagtctagaagctgaatctgatgacagaagcgaagagcaggaatacgaagatgattgtagcgataagaaagaacaatctcaggacaaaggtgtagaggctgaaactaaggaagaagagaaacaatatccaaattcagagggtgagagtgaaggagaggactcagagtcagaggaagagccgaaatggagagaaacagatgatatggaggatgatgaagaagaagaagaagaagagattgatcatatggaggatgaagcagaagaagagaaagaagaggttgatgataaagaggcaagcgcaaacatgtctgagattgagaaagaagaagaagaagaagaagaagatgaagagaagagaaagtcatgaaggagttacatagagttagagcattgtaagctaaaaccatttcagaaagattctttctgcttagacgctctggtttatctttcttagtagatttgttgatattgaaccaagttttagatgaggtcacctggtttgtgtttgtgtcttgagagtttgtgacatttgtaattcattatcgttgttacatagtataaaccatatgttatgagccacacgcgtttctctgtcggttataaaaattatttacaacgtgcg

SEQ ID NO: 93001 - DNA, 741 bp, Arabidopsis thaliana columbia
tagaatacgccaattggatttggcagttgaagcagcaaatgcaaggtttcaagaaggggtatatacaagcccccaaacagaagaccaggagatagttttaaaaacgaaatctgatgacaaaaatgaagagcaggaattaggaaaataattgtagcgataataaagtacaatttcagggcaaaggtttaaagtctgaatctaaggaaaaaagagtaccaatatccgaattcaaagggtgaaagtgaagtagaggactcaaagtcagagtaaaagccgaaatggagagaaacagatgatatggaggatgttgtagaagaagaagaagaagagcttggtcatatggtgggtgaagccgaagaagagaaagaagaggttgttgattaagaggcaaccccccccatgtctgagattgagttagaagaagaagaagaagaagaagatgaagagaagagaaagtcatgaaggagtttcatagagttagagcattgttagctaaaaccgtttcagaaagattctttctgcttagacgctctggtttatctttcttagtaggtttgtggatattgaaccaagttttagatgaggtcacctggtttgtgtttgtgtcttgagagtttgtgacatttgtaattcgttatcgttgttacatagtataaaccatatgttatggaaaaaaaaaaaaaaagaaaaagataagggcggccgctctagaggatccaagcttacgtacgcgtgcatgca

SEQ ID NO: 93002 - DNA, 349 bp, Arabidopsis thaliana columbia
gcgaagctttattcgtttgcttgagctccgaagagtggagacagaaatggaggaagaagagcacgaggtttacggtggagaaatccctgaagtcggcgatactgatgttcccgatccggatatcgatatgtctgcagccgatgaggacgccgttacggagcttgctgagatgaagaggagattaaaggagatggaggaagaagctgctgcgctacgagagatgcaagcaaaagtcgaaaaagaaatgggagctactcaagatcctgctagtatggctgcaaatcaagaaggaaaggaggaggtggatgctcgatcagtttatgttggcaatggttgttctcataaatga

SEQ ID NO: 93003 - DNA, 396 bp, Arabidopsis thaliana columbia
gagtgatattgttaggaactttctccttcatacattacagcttcagagttgggagaaaactgtagactgttacagtcctggacagggtttgatgcctgcaagttttaaagtaagaactgtggcgcttgatgagaacactacggaagaggttttggatccggattttggtgaatcagctattggtcgtgttgctcctgtggattctggtttgtggtggattattctcttgagggcatatggaaagataactggagaattcccgttacaagagaggatagatgttcagacagggataaagcttatcatgaacttgtgtttagcagatggatttgatatgtttccaacacttttggtcactgatggttcttgtatgattgatcgtcgtatgggtatcca

SEQ ID NO: 93004 - DNA, 397 bp, Arabidopsis thaliana columbia
aacggacgcgtgggcgggtcttcttctccaaaacccatttcctcgcaaaatccatctgagaaaaagagcaacaagtttcattttcatggtggtgatgacgaacaaattcttcgaattaatcggcggagctccgtcgtattcttcagtatccgtcgctgttaaaggatccgtcggtgacgccgtaggaggaactgctagtcgtcgtgctcttcgttggacaatcgaaaatttccttcctaaaatcgatagattagttcttgttcatgtcatgcctacagttactactattccatctccttctggatcgaagattccaatagaggaattggatgagagtgttgtgtctatgtataaacgagatttgagaaaagaatttgaacaagtttttgttccgttt

SEQ ID NO: 93005 - DNA, 510 bp, Arabidopsis thaliana columbia
ccagcactaatcgactcatatagggaaagctggtacgcctgcaggtaccggtccggaattcccgtgtcgacccacgcgtccgccttctcaaagttatggtagtgataataagaagaggttggagcgcaagtattcgaaaatttctgatgattactcttctttggagcaggtgacggaggctcttgcacgggcgggtctagaatcttcaaatctcatcgttggtattgatttcactaagagtaacgaatggacaggggccaggtccttcaataggaaaagcttacacttcataggcagtagtcccaatccttatgaacaagcgataactatcataggaagaaccttacccgcctttgacgaggacaacttgattccatgttatggttttggagatgcatcaacacatgatcaagacgtgttcagtttcaattcagaggatagattctggaatggatttgaggaagtactttcccggtataaggagatcgtgcctcaacttaagcttgcagg

SEQ ID NO: 93006 - DNA, 491 bp, Arabidopsis thaliana columbia
  unsure (1)..(491): unsure at all n locations
ttccnnnnnnnnnnnnnnnnnnnnnnnnnnnnnnnnnnnnnnnnnnnnnnnnnnnnnnnnnnnnnnnnnnnnnccacgcgtgcggctttcaggtatattagagaagaagagagtgaagtcctagtcaataaactctcgaaatctgctgagacacgaactatggtagacttgagaaaagctcttttctcttataccgctagtatcgtatgtagactcgcttttggacagaacttccatgagtgcgattttgtcgatatggataaagttgaagatcttgtgctcgaatctgagaccaatcttggctcattcgcgttcactgacttcttccccgcaggtcttgggtgggttatagaccggatctctggccaacattcggagttgcacaaagcctttgctagacttagtaatttctttcacatgtgatcgatgatcacttgaagcccgggcaatctcaagatcattcagacatcattggtggcatggtagatatg

SEQ ID NO: 93007 - DNA, 530 bp, Arabidopsis thaliana columbia
  unsure (1)..(530): unsure at all n locations
nnnnncagctccctacgactcactatagggaaagctggcacgcctgcaggtaccggtccggaattcccgggtcgacccacgcgtccgagatgttttcgtttgattatatataccttagtcatgttatctatttatgatgtagctcgttcttacttgagattgcactagtagtcttgcttaatgacatataaatcttgatttaaactccctctggatattctttcatagagaaaaaattcttatgatgattttattgttgttgttacttgttttctcagcattgatccatctctgctcaatccttacaccaaattttgatggtataagaggattcagtgacaatgcttatattaaaaatggagtttatagtctctctgaactatctatgtccaagttcttgggagttcggaagcaccttacatcgttgacatttgttctaagttttcctatgacaattcttttcgtttgcacattcagagatcagtttgagatccactaaagttgatgtggtctgatactcacttcttatc

SEQ ID NO: 93008 - DNA, 672 bp, Arabidopsis thaliana columbia
  unsure (1)..(672): unsure at all n locations
cannnnnnnnnnnnnnnnnnnnnnnnnnnnnnnnnnnnnnnnnnnnnnnnnnnnnnnnnnnnnnnnnnnccacgcggtccggagtaattaaaattggagtttctgatttctagggcacaaaatctttagattcggtgaagtcattcattacttcattgccaaagcttgtaaccaaaactcccatggccgacgaatcttcttctccggccacgggggatcccaattcacagaaaccagaatccactactccgatttcaattcccaatccaaatcccaatccttcactaacaccaccgccgcctcaacaacattcgcaaccaccagtcgctcctctggttccacctggtccgccttatgctcctccggctcagattcctagctcgcttctccccaccaatctcccgccgccaccaccattccgtcccggtatgcagttcactcccgttgcgaattttcaaaaccctagctctggagttcctcctccaggatctatgcctcaggtatcaaccgcaggcctgggatgaagaccttttcaagcctatggtaatggttatcccggaatttaatggtgttgntcctcctnggngcatgctncctaagggggttttccgggatccttgctnatatccaaaaatgggttgncctggggttaatattgggncggtttagngg

SEQ ID NO: 93009 - DNA, 688 bp, Arabidopsis thaliana columbia
  unsure (1)..(688): unsure at all n locations
nnnnnnnnnnnnnnnnnnnnnnnnnnnnnnnnnnnnnnnnnnnnnnnnnnnnnnnnnnnnnnnnnnnnnnnnnnnnnnnnnnnccacgcgtccggaagaagagtgatactgagaagatctgtgagattattatattcgattttgatcagtttctaaaaagctttcaacaatggattcgtcttcaaatttgaatcctcttcgtgaagatacctcagaggaacatttagaacccatagaagctccggcgtctgtcttcgccgctcgtcctcttcgtcctccttctacgaattcgtcggagaagtattcgcctgtagaatggaaaagctattttgataaagaagatgatatatcaatcactggctctgatgatgtgtttcatgtgtatatggcaggaaatgaaggacctgttgtcttttgtctccatggtggtggctactctgggctctcgttttctatagtagcaagtaaaattaaggagaaagcacgtgtggttgcgatggacttgagagggcacggtaaatcggtttcggagaacgaattggagttatcgcttgagacaatgagcaatgatgttttggctgtcattaaggaattgtatggagactctcctccagctattgtgctagttggtcacagcatgggaggttcggtcgctgtgcaagttgctgcaaacaaaacattgcctagc

SEQ ID NO: 93010 - DNA, 689 bp, Arabidopsis thaliana columbia
  unsure (1)..(689): unsure at all n locations
nnnnnnnnnnnnnnnnnnnnnnnnnnnnnnnnnnnnnnnnnnnnnnnnnnnnnnnnnnnnnnnnnnnnnnnnnnccacgcgtccggggagataaatctagatcacttacaaatgctggataaattcgaatccagtaatggacacaaacattcccctagtgagagagcagagatatgtcaaagagatcagaagggtaacaaaaggaatgttggtgatgcaacatcagtagtttcagtccctaagcgccggagatcatcttctggccatagtccttacaagttctcaaacagtggtcctaaagttcaactgaaagcttctgaagatgagttgcatctagagagtgacatggacaaaaatgtctctttggactcgcccgatgaaaattctgcccaagagaaaatgttagaaagcatctctccccggaagagaaagaaaagcttttcctcaaaattaaagattacagaatctgattgggctctcccccatttggaaaggaagtaggtcaccaggaaggtggtgataccaaattaaagtttgcctttgggtcccaaaaaaaaaaaaaaaaaaaaaaaaaaaaaaaaaaaaaaaaaaaaaaaaaaaaaaaaaaaaannaagggcgaccgctctagaggatccaagcttacgtacgcgtgcatgcgacgtcatagactctctantagtgtgtccta

SEQ ID NO: 93011 - DNA, 712 bp, Arabidopsis thaliana columbia
aatacgactcactttagggaaagctcgtacgcctgcaggtaccggtccggaattcccgggtcgacccacgcgtccgcggacgcgtggggaaggtttagattttcagagccgagctctgcagatgagcaaagttaatctttcttgggatgaagatgaaccgcaccggattaagaccttaaatcagaaattcaatcctgaacagttggcaaatcttgagatgaaggagtttctagcttctgatgagagtgattctgatgaggaagacgacttgggcaatgaagttattaaccagagtaaaaaaaaggacaagaagaaagataagtaccgagctttaatagaagccgaagatgttgattctgataaagacctggaggaggagaatgaccaggatatggaggtaacattcaataccggtttagaagatcttagcaaagagattcttaaaaagaaagacaaccagtcagaatcggtgtgggaaacatatctaaggcagagacgcgagaagaagagagccaggaagaataaacagaaggatgatgattcttctccggatgatgacgacgattataacattgatagaaaggcagtgaaagatgatggagatggcgatttctttatggaggaacctcctcttaagaaaaaaaaaaacaaagggcggccgctctagaggatccaagcttacgtacgcgtgcaggcgacgtcaaaactcttc

SEQ ID NO: 93012 - DNA, 530 bp, Arabidopsis thaliana columbia
atgattctccagctctctacgactcactatagggaaagctggcacgcctgcaggtaccggtccggaattcccgggtcgacccacgcgtccgtgaaattttgagtgattttcagagaagtttgaggatgactgtgtgattctacttctcgaattgaaatagatagttgggtcataatcgcatatccttgtcttctgtcatgtattctctgattcgccatggaagaagtttggtcgagttacagaaatggcgtcatttgagagttttagtgcaaaaggcgtctcctttgtccaattccttctcctctgcttctgctgcgcgtttgagtcctagagttggtcgaaaaggtaagagctttacagtctcttacctcgttgattcattgggtttacccaaaaagctcgctgaatcggtctcaaggaaggttagcttcgaggacaaggacaaccctgactctgttctgaatcttttgagaagtcatgggttcactgattctcagatctccaccatcgttacggattatccacaattg

SEQ ID NO: 93013 - DNA, 614 bp, Arabidopsis thaliana columbia
  unsure (1)..(614): unsure at all n locations
aaaacatcgatatatgcaaatgggtggggatttctgtgtttgcagtccagctactgtcattgctactagccatggttctcagagcgatggtttcaaccccgaaacccgaacttgacgaagaggaagatgatgagaacccaaggagtagaacttgggacccacttcttggtccgcaaggaaaccaagcgcctgctggctcaagcaagattgaaaactggagctcccgaatcagagaaaagtatggtttgaaccagagtccaccggtgaacccgaaaggttgatgaagccaaataatcatgtttctaaaactgcatgtgtccatatggtctctgtgaagctctctttctctatgttttgctctttgcaacttctcgagtgtgcataaacatttactcaaaacagtgctgtattgtgtttacacaaacggcataagcatcttcgtttgtgtgtttgcttgtacaaacaatcctgtgaacagtttgaagttagcatttccactataacgtttcgattcaatttataatgaagaaaacaanncttataaaaaagcaaacataaaataaaagatnnnnnnnnnnnnnnnnnnnnnnnnnnnnnnnnnnnnnnnnnnnnng

SEQ ID NO: 93014 - DNA, 1379 bp, Arabidopsis thaliana columbia
aaaaattcgtcgggccccttaggaacagctaccccaatttcaaatttttattcgtttttgcctttactaacttatggtcagatctctttaattaaatattttcaacttgataacttaatttatatttttcaaaaaattaactcttatgtaatcgatgaaaacggaataattttaaatctcgacccatatagtaacgttgttttgaatccattcaaattgaattggtattttcttcatcaaaattatcatcataattattgtgaggaaacgtccacaataattagtcttggacaatttttttgtgaaaatgtatgtatagctaaaaaagaaccgcacctaaaatcgggtcaagttttaattgttcaaagggattccgcagtaataagatccgctaagccctatttggctactccgggagcaaaagttcatgggcattacagcgaaattctttacgaaggggatacattagttacatttatatatgaaaaatcgagatccggtgatataacccaaggtcttccaaaagtagaacaagttttagaagtccgctcgattgattcaatatcgttgaacttagaaaagcggattaagggttggaacaagtgtataacaagaattcttggaattccttggggattcttgattggtgctgagttaactatagtgcaaagtcgtatttctttggttaataagattcaaaaggtttatcgatcccagggggtgcagattcataataggcatatcgaaattattgtacgtcaaataacatcaaaagttttggtttccgaagagggaatgtctaatgtttttttacctggagaacttattggattattacgagcagaacgaacggggcgtgctttagaagaagcaatctgttatcgagccgttttattaggaataactcgagcatctttgaatactcaaagttttatatccgaagcaagttttcaagaaactgctcgagttttagcaaaagctgctcttcggggtcgtatcgattggttgaaaggcctgaaagaaaatgttgttctagggggggtgatccccgccgggaccggattcaacaaaggattggtgcattgttcacggcaacataccaacattattttggaaaaaaaaacaaagaatttagctttattcgagcgagatatgagagatattttattctaccacagggaattttgtgactcttctatttcaaatctgacttttctaggatttaatgatttctaatagcggactatttaaaatttagtttttgttgtttgctgtagtcatttgctttcgtaatttgttaacactaataaagataataatcaatacaaaataatggcttggttcatgcataaatggcatccccggtacaagagaaggtt

SEQ ID NO: 93015 - DNA, 525 bp, Arabidopsis thaliana columbia
atgaactgccggctcccatacgactcactttagggaaagctcgtacgcctgcaggtaccggtccggaattcccgggtcgacccacgcgtccgcccacgcgtccggcaagggaggctgttagaaaatcccttgtgctactgaagaacgggaacaaaaccaatcctatgctcccacttcccaggaagacttcaaagatcctagtcgctggcactcacgctgataatttaggttatcagtgtggtggttggaccataacttggcaaggatttagcggtaataagaacacgagagggactacacttcttagcgctgtaaaatcagctgttgatcaaagcactgaagttgtcttccgcgagaacccggatgctgaattcatcaaatcgaacaactttgcttatgcaatcattgctgttggtgaacctccatatgcagaaacagctggagacagcgacaagctaactatgcttgaccccggccagcgattattagctccacttgtcaggctggcaagggtgggggttgggg

SEQ ID NO: 93016 - DNA, 405 bp, Arabidopsis thaliana columbia
tacgcctgcaggtaccggtccggaattcccgggtctgacccacgcgtccgtgcaagtctgagatggtttcttcagtttctaattataaaagagaatttggttttaatttctctttattgtttatctcgtcctcgatttcaagagtttgatttctgtaactttgagcttccttcaaagcaaatgaaaggtgtcgtcgtgagtatactcgaattgtatttcccatggtgaataaaggataagaaagtgttgtgtcttcatttcaatagataaaacaatctaaacatggcgtattctgttgttcggcttcgaaaggttccagctttggggatttctcgtgttcttcaagctgataaaggaagtttgtggcggtttcactttgaacctgagtttggtgaccttttgaga

SEQ ID NO: 93017 - DNA, 762 bp, Arabidopsis thaliana columbia
  unsure (1)..(762): unsure at all n locations
nnnnnnnnnnnnnnnnnnnnnnnnnnnnnnnnnnnnnnnnnnnnnnnnnnnnnnnnnnnnnnnnnnnnnnnccacgcgtccggatttacttgacatttccagctgacagctccttcacagatgaagatgtctccaattattttggcaattttggaccagtgcaagatgttaggattccataccagcagaaacggatgtttgggtttgtcacttttctccactctgaaactgtgagaatcatattggccagaggaaatcctcatttcatctgtgactcacgtgtgcttgttaaaccgtacaaggagaagggaagaatccttgaaaacaggaggcagcagcaacaactgctgcagcagatggagagaggaaacttttctcctggttcaagtccatctggaatggattccagggatctctttgattctcatctcgcaccaaggatgttttctaacacacaggagatgatgaggagaaaagctgagcaagctgacctgcaacaagcaatagaattccaaaggagaagatttttnagtctgcagttgcccgacatggacagtgaatcgtttctccatcaccagcgtagtctttccattggntcccccgtccattttttccccctcgtgtcaaatcaaaagcatgctcttttcgntcagnaaacaaccagtgattgaaggctttcgnaggcagggtnattggtgattcagggccaacagtcttnangaacccggngnttttnttnagggnatacttgggcantaacat

SEQ ID NO: 93018 - DNA, 501 bp, Arabidopsis thaliana columbia
  unsure (1)..(501): unsure at all n locations
nnnnnnnnnnnnnnnnnnnnnnnnnnnnnnnnnnnnnnnnnnnnnnnnnnnnnnnnnnnnnnnnnccacgcgtccgcaggcgagagagatgagcgcgacggagctgccgacgaaggaggcacacatacttaaaggccacgagggggcggttttagcggcgaggtttaacggtgacggaaactacgctctcacctgtggcaaggatcgaactatccgcctctggaacccgcaccgtggaatcttaatcaagacctacaaatctcatggccgcgaagtccgcgacgttcatgttacttcagacaatgccaaattttgctcatgtggtggtgatcggcaagtttactactgggatgtttcaactggacgtgtaatccgtaaattccgtggtcatgatggagaggtcaatgcagtgaagttcaatgattcgtcgtctgtggttgtatcagctgggttcgatcgttcgctacgtgtatgggactgcagatctcacagtgttgagcc

SEQ ID NO: 93019 - DNA, 224 bp, Arabidopsis thaliana columbia
aatccgacaacatctcaaccgcagagactggccatggatacgaggtcgaagagagtaaaccggagttagagaaatgctaaaagcgccaagctaagaagctattagtaatttggtcttactttgagagattgttttctaggagacaaaaagagtttcaaaggtatttgaattgatttgtagtggtaatgatttgactaactttcgagtttctttcttcttttgtt

SEQ ID NO: 93020 - DNA, 363 bp, Arabidopsis thaliana columbia
acttccaaatctccccactctctctctctctctctctcgctctctctctctctctctctctatctctctctatctctctctatcttctcttttctcctctctccaacttcttcactaatgggagctcaggagaaacggcgccgtttcgagcagatatcaaagtgcgatgttaaggaccggtccaaccataccgtggccgctgatctagacggaacactactaatctctcgtagcgccttcccttactatttcctcgtagccctcgaggcagggagcttgctccgagcgttgatcctacttgtgtccgtaccattcgtgtatcttacgtacttgaccatttccgagacttttaggcatcaaagg

SEQ ID NO: 93021 - DNA, 526 bp, Arabidopsis thaliana columbia
ctctctctctctctctctctctctctctctctctctctattctctgtacatttccagcgctaaaaatggaagaggcccaagtgagagaaagatggtgaaaggcgaggagatataggggagagagaatcccattcccatattcagagcacaaacaaaaaagcttcaatttttggggacaaagtttttatcttttcgttgtttggaatttgggggaggaagaaggaaaggtgtaaggatagggtcgtgcgtgtcaacgagaggtgctgctggacgtgaagcctcctcctccgcatcggcgaggaggcttccgtcgcagcaccacctcagcggtagccttagctcttctggctacggcggagaaccgtcggatcaatctgatatcggcggtgcgaagatgaaagggcttttcaagtctaagccacgcactccttgctgaccctgttcggacaaacccgcgatctccttctcttctccgatcgatctacctctttgcctgacctccgagattccaaacgcgacgaaaaga

SEQ ID NO: 93022 - DNA, 517 bp, Arabidopsis thaliana columbia
  unsure (1)..(517): unsure at all n locations
nnnnnnnnnnnnnnnnnnnnnnnnnnnnnnnnnnnnnnnnnnnnnnnnnnnnnnnnnnnnnnnnnnnnnnnccacgcgtgcgacttagctccggagctctctatctttggtcatcctcctatcgggatcggcagcgcagggaagagggcagattatgaataatgatacatcaaaaaagctgggaactttggtttctgatgatggaccagtgaatgtatatgtatgggacatggacgagactcttatcttacttagatctctgttaaatggaacttatgctgagtcttttaatggctccaaagatgttaaaagaggtgtagagattgggaggatgtgggagaaacacatacttaagatctgtgacgattttttcttctacgagcaagttgaggaatgcaatgagccatttcttgattcattgagacagtatgatgatggaaaggatctttctcggtatgagttcaaacaagacgactttagtactcctactgatgacttgaacaagaggaaacttgcg

SEQ ID NO: 93023 - DNA, 767 bp, Arabidopsis thaliana columbia
  unsure (1)..(767): unsure at all n locations
caannaatacgactcactttagggaaagctcgtacgcctgcaggtaccggtccggaattcccgggtcgacccacgcgtccggcagtcagagccggtatagtaactgcattggttaagatgctcagtgattccacccgccaccggatggttgatgaagctttgacaattctctcagttcttgcaaataatcaagacgcgaaatccgcgatagtaaaagcgaatactctacccgcgttgataggtattctccaaacggatcaaactagaaaccgagagaacgcagcagcgatattgctttcgctgtgtaaaagagacactgagaaactgatcactatcggtagactcggtgcggttgtcccgttaatggatttatcgaagaatggaacagagagaggcaaaaggaaagccatatctttgttagagcttcttcgtaaagcatgccaataataactagtcttctgacaaaaaaggttcatcaagctctcatttttattgagtttattaaattatgttaatattcttgtttaattgatttgattttttttggaattccatttgtggaatcgaaattgaagatggtgaccgaaaatggtgttcgaaaatcgaactctgttttgccccgctgtgtatttatttgttacatttgtaataatattggagatgaatgaataagtattgaattgaaaaaaaaaaaacaaaaagggcgaccgctctagaggatccaagcttacgtacgcgtgcgtgcgacgtcataactcttctagagt

SEQ ID NO: 93024 - DNA, 1084 bp, Arabidopsis thaliana columbia
aatacgactcactttagggaaagcacgtacgcctgcaggtaccggtccggaattcccgggtcgacccacgcgtccggatctgacctcaaaatcaaacgagtttctttgataatcttcttgctaagtgttcttgttgagttttgctatggagggttcacaagtgaatatgtcagaggaagtgatttaccagatgacatgccactagacagcgatgtttttgaagttcctcctggtcctaattcacctcaacaggttcatgtaacgcaagggaaccatgaaggtaatggagtgatcatttcttgggtgactccggttaagcccggttctaagactgttcaatattggtgtgagaatgagaaatcgaggaaacaagcagaagcaacagttaatacttaccggttctttaattacacgtctggttatattcaccattgcctcatcgatgatttggaatttgatacgaaatactactacgaaattgggagtggcaagtggtccagacggttctggttctttatcccgcctaaatcaggccctgacgtaccttacacatttggattaattggggatctaggacaaacttttggctcaaaattagtacggtaagcccattttttgggatgaatccgggaaaaggacaagcggttctttttgtaggagacttgtcttacgcggatcgctaccctaaccacgacaacaagagatgggatacttggcgaaggttcgttgagcgaagtgttgcttatcaaccttggatatggactgctggcaaccacgaaatcgacttcgttcctgacattggtgaaatagaaccattcaagccttttatgaatcggtatcatacgccacataaggcatcaggaagtatctctccattgtggtattccatcaaaaggtcgtcagcttatattattgttatgtgaggtggctgatgttatgggatatacacacctcaatacaaattgttgtaaaaggagatacatggagtgaaatctacattttctccatggctttttttcatagtgcatagcccgttttacatagctattttcattattcatggaagttaatcatttaaagttat

SEQ ID NO: 93025 - DNA, 488 bp, Arabidopsis thaliana columbia
ggaaagcctggtcgcctgcaggtaccggtccggaatatccgggtcgacccacgcgtccgccttatcgcttccttctcgatacgctctcttctccggctcgactcctgttcgcatcagcaggaggagcaacctctgcttcgccgtctccgccgcacgagcttctcgccgggattctatatcattcccccagcctatcttcctccgccacgtcatctctacccagtcgaatttcgagatcgatcgaaattatagagctcatgcgtcttctatcggatcattcgaggatagctcttcttctaacttactagaagacgccagttccgatggtttcgatttgggcagctttgtttctttcgcggaagcgctttgtattttatcatccgccgtgatttcagtggttctcgcggggaattacgtggtggttggtgaaattgcgaaaaaggtttctgtctttaggctcctgccggattggttggctcagcccgcca

SEQ ID NO: 93026 - DNA, 579 bp, Arabidopsis thaliana columbia
  unsure (1)..(579): unsure at all n locations
nnnnnnnnnnnnnnnnnnnnnnnnnnnnnnnnnnnnnnnnnnnnnnnnnnnnnnnnnnnnnnnnnnnnccacgcgtccgcccacgcgtccgcccaaccaaagtttctcatcattcatttcagatcagccatggaggacgaggtaatcttacatcttttcgtatatatttattataaacacgatttagctctgtttttccgccggagattataatttgccggagacctttattcgagatctgattgatcatttcttatatgcctacattaactttgatacccattagatttctttttgatggaaatcgatttgatgtgaaattagctgctcgttactctggctttttccactcatcctctatagatgatctggtggagtgtttgtatagagaagaaagacatatgagttcattagaattgtagaaaagtgatggaagattttccgtcaaatcgttttctcaaaggcgtggtggtctattgttgctcgactggaattgtataatagagtttctctgtcaaaccattttggcatttttttagtagacttgggaactgaaagagaagaaaagatggatctttg

SEQ ID NO: 93027 - DNA, 535 bp, Arabidopsis thaliana columbia
tacgactcacttttagggaagctggtacgcctgcaggtaccggtccgagattcccgggtcgacccacgcgtccgcccacgcgtacggccacgcgttctcctcgacctcttcccagtcgtacgttctcgtgaccaccgtgctgaattagattcttcaaagcaatcaacttcacagtcagttgtggatcgagaggtaagtgaatggcacgatgcaccgactgttgctgagcctaaagacttgcaatatctgaagactgatcaagacaaattttgggaaaatctgaaagcggctgctgagaagaaggttggtggggttgaagcagagagattttgcaaggctttcgagaaactccacaagaaacttgtgtatgaagaattggatccagaagctgcaaagcgatatttactaaactcttaaacttctgtcttctatatgatgtgcttcccaaagtttggttaatgtggagacacttccaagtcttggcctttttctttatcggaatttatgaatttatgagtgcgcaaaaattatcttt

SEQ ID NO: 93028 - DNA, 516 bp, Arabidopsis thaliana columbia
ttaggtacacactatagaagagctatgacgtcgcctgcacgcgtacgtaagctcggaattcggctcgagggtcattccttcaaccactgatcctgaagatgaaggcttaagacttgtttacaacaagtggcctcaatctccttctgatttcagggaagcatgtgaagtatatgcgagacacgctgaaaaattagcgttcaagctcttggaactgatttcgttaagcttaggcttgccaaaagagcgttttcatgactacttcaaagaacaaatgagttttttcaggataaatcgttatccaccatgtccaagacctgacctagctttaggtgttggtcaccacaaagatgccgacgttattagtctattggctcaagatgatgttggaggattacaagttagtcgtagatcggacggtgtttggtttccgattagacccgtccctaatgctcttgtcatcaatataggcaattgtatggagatatggacgaatgacaagtattggagtgctgaaca

SEQ ID NO: 93029 - DNA, 1258 bp, Arabidopsis thaliana columbia
  unsure (1)..(1258): unsure at all n locations
ccnnnnnnnnnnnnnnnnnnnnnnnnnnnnnnnnnnnacacagcataaaagtagctctattgactttttttcttcctccaaactctttttacgtcaagcaatggaggatcttgatccaacctacatccaagcaccagagcatagatcagattcgaatttcatccctaaccaaccagaagaaatacccgtgattgatctctcgcgcctcgatgaccccgaagatgtccaaaacgttatctcagagatcggtgatgcttgtgaaaaatggggattttttcaggtgcttaatcatggtgtgccttctgacgcaaggcaacgtgtggagaagactgtgaagatgtttttcgatttgcctatggaagagaagataaaggtgaagagagacgatgtgaatcctgtagggtatcatgatggagaacacaccaagaacgttaaagattggaaagaagtgtttgatatttatttcaaagatccaatggtcattccttcaaccactgatcctgaagatgaaggcttaagacttgtttacaacaagtggcctcaatctccttctgatttcagggaagcatgtgaagtatatgcgagacacgctgaaaaattagcgttcaagctcttggaactgatttcgttaagcttaggcttgccaaaagagcgttttcatgactacttcaaagaacaaatgagttttttcaggataaatcgttatccaccatgtccaagacctgacctagctttaggtgttggtcaccacaaagatgccgacgttattagtctattggctcaagatgatgttggaggattacaagttagtcgtagatcggacggtgtttggtttccgattagacccgtccctaatgctcttgtcatcaatataggcaattgtatggagatatggacgaatgacaagtattggagtgctgaacatagagtggtggtgaacacaacaagagagagatactcgataccattcttcttgttgccttcacacgatgtggaagtgaagccattagaagaacttgtgagtcctgaaaaccctccaaaatacaaaggctataaatggggtaagttctacgtcagtaggaatagaagcgattttcgaaaactggaaatcgaaaacatccaaatcgatgacttcaaagttaaaacttaatatactatgtatcggctttttttttgtttaccaagctatgatattaatcaaataatgtgtgtgggacttaatttgtgtcggaaagaataaatttgattacttttgaat

SEQ ID NO: 93030 - DNA, 492 bp, Arabidopsis thaliana columbia
atacgactcactttagggaaagctcgtacgcctgcaggtaccggtccggaattcccgggtcgacccacgcgtccgcgtttttcatgggaaaggctgtgttaccaggaagagaagtgcctgcagtgttcgatcacagagccaaaggatattcattgaccattcgtccagacggtaacccttacaccagctttgtattttgcgttgtggtttcccgtaaccaaaaaagtgataaaaccattcctccctcactattgtggcgtcgcatcatagctcaagatgagggctatcccgttgaggtctggaaccgcataggagatgtcttcaaatatcgaacggaacatctattaatatttcacttcgactttctagaattcgacaacagggatatagtgttcgaattcagcagcgaatcccacgacttcgacattattgaatgtggtgctaaagtcttggccgaaaagagcatcaaagaaagctatgaatctggatccg

SEQ ID NO: 93031 - DNA, 650 bp, Arabidopsis thaliana columbia
  unsure (1)..(650): unsure at all n locations
atgatactgccagcatannnnnnnnnnnnnnnnnnnnnnnnnnnnnnnnnnnnnnnnnnnnnnnnnnnnnnnnnnnnnnnnnnnccacgcgtccgcccacgcgtccgagaaaacaacaaatccttgagatccatgtcgagagagaggatcaaacgtgaattacctcctgttcaagagcatattgataaattgcggaaagtgatagaggaaggcaattactatggagctttgcagatgtataaatctatcagtgcaagatatgtcaccgctcaaagattctctgaagctcttgatatcctcttttcaggggcttgcattgaactagaacacggcctggtgaattgtggggcggacctagctattttgtttgttgacacactagttaaagccaaatctccttgcaacgatgaaactcttgatcgtatcaggtgtattttcaaattgtttcctcgggttcctgtaccacctcatttggtagatgtgagtgacggtggagatgttcaaaatcttcaaggatctcttgggggagccagattcccgggtgggaaacttanntncggtcttnnaggnctgtatnaaatggcttnagnntttgnggccncggcctggnatcctaagttnatntatcttgggggtttcntncncttagg

SEQ ID NO: 93032 - DNA, 746 bp, Arabidopsis thaliana columbia
gactcactttagggaaagcacgtacgcctgcaggtaccggtccggaattcccgggtcgacccacgcgtgcggcctaccggctaagtccggtttgttcttccgacttgtttaagataatttttcgactttgttcggatcttttgtagccttttgcagctttgaaacccagtttttttgaagctgtaaaattccaggagtttagatggattcttgcattgttggatggttgattagtctaccaagagaaggtaaatccccgcttgtcctaatagatcgctaaaagcgtcggttctacttttggttgattcaatcaagtggttgcggttgatggaaacgaaatatgaagatttggagttctcatcgtgttttgatgattctctcaagaatattttggatctggtcaactgaggtcaaatttccggtgagcgagtttaaatccaaccatttcttccggtgatcaatcgcaaaaggcaataggtacaatagaaggctataggagtgaaagcttcatgaagaacctaaacaaattatacgtcggccgattacgaaagtttccgacaaagaactctggttagtgatgagtcggtgaacggcgaagttgacgaagcttcataacccacgttgcataacacatgtttcaaaattgttttccttatcttgtactgttttgcaattagtggaccttattaggcctttctttgtattgactatatgctcgtttggactttataaaatatatatatgtc

SEQ ID NO: 93033 - DNA, 408 bp, Arabidopsis thaliana columbia
  unsure (1)..(408): unsure at all n locations
actcactttagggaaagcacgtacgcctgcaggtaccggtccggaattcccgggtcgacccacgcgtccgggaaggagaacaagaacatttggatacagaagaattgacacaaacaactaccccatgacacaatacacattcttgttgtatcttcttcttttttcacacgagattattcttctatgtaaccatggcgaataattattgtaaagtctatacgcacgcgagctatatcaaaagatataagcagtatctatatctacaagttaccgttaggtttaattaaaaaaaaaaaaaaaaaaaaaaaaaaaaaaaaaaaaaaaaaanaannnnnnaaaaaaaanngggggggcggcccgtttaaaggaaccaagcttaccttcccgtgcaagcgaaattataacttt

SEQ ID NO: 93034 - DNA, 1446 bp, Arabidopsis thaliana columbia
  unsure (1)..(1446): unsure at all n locations
cgacggttcgtcattcttcctctaagctttatctttctgatctctgaccttgtgtctctgtgcatgtgtgtttatctgctactgtgttttgtcggtttgatctccaaaaaccagacatgaacagaggaagcttatgccctaatcccatctgtctccctcctcttgagcaatccatctccaaattcttaacacagagtggaacgtttaaagatggagatcttcgagtgaacaaagatggaatccagaccgtgtctctgtccgaaccaggagctccacctcctattgagccattggacaaccaattgagtttggcagatttagaagtgatcaaagtcattggcaaaggaagtagtggtaatgtccagttggtcaaacacaaactcactcaacagtttttcgctcttaaggtcattcaattgaacacagaagaatcaacatgtcgggcgatttctcaggagctgagaataaacttgagctcgcaatgtccatatcttgtctcatgttatcaatctttctaccacaacggtcttgtttcaatcatattggaattcatggatggtggatcccttgcagacttgttaaagaaagtcggaaaagttcctgaaaacatgctatctgccatctgcaagcgagttcttcgaggtctttgttatattcatcatgagaggcgaatcattcatcgggacttaaagccttcaaacttgctaatcaatcatagaggtgaagtcaagatcacagactttggtgtcagcaagatcttgacaagcacaagtagtcttgctaattctttcgtgggcacatacccttatatgtctccagagagaatcagcgggagtttgtacagtaacaagagcgatatttggagcttgggactggttttgctcgaatgtgcaacgggtaaattcccgtatactcctccagaacacaagaaaggatggagtagcgtgtacgagcttgtggacgccattgttgaaaacccgcctccttgtgcaccttccaatctcttttctccagagttttgctccttcatctcgcaatgtgtacaaaaagatccaagggacagaaaatcagcaaaggagcttctggaacacaagttcgtaaagatgtttgaagattcggatacaaatctctcggcttacttcaccgacgcaggatctttgattcccccacttgctaactagaaccgagtttgaacaatcttttaacctccaagttattatttcatatccactagaagagattttatgaaagataaatttacgagatgttatgacttaagagacttgtctacaaaatttgatttaatgtgtgtactttccacatcactattataaacacaactatcatcagttatgtttctctgctagtggtggatatacttatatagtagttcatatcattatacacattttgttttgtnnnnnnnnnnnnnnnnnnnnnnnnnnn

SEQ ID NO: 93035 - DNA, 866 bp, Arabidopsis thaliana columbia
acccacaagtccgctttgtcgagaacaagatggtttcagttgacaggatcaaacagttcactgatattccctcagaatccgagtgggagagcgaaggaacccttccaacctgcgaactggcccttccatggcaatgttcttctcgaagacctcaaggtgcgctacagaccgaacactccacttgtgctcaaggggatcactctcgacatcaaaggaggagagaaggttggtgtggttggacggacgggaagcgggaaatccacattgatccaagtcttgttcaggctcgtagaaccatcaggagggaagataatcatagacgggattgagtataagcactctagggctacatgatctaaggtcaagattcggaatcattccgcaagaacctgtcctcttagaaggaaccgagagaagcaacatcgacccgacagagcaatactctgacaaagaactctggaagagcctggagcggcgtcaactcaagggtgttgtagctaccaagcctgagaacgctcgatactttggaggttgacaatggggagaactggaacgtatggcagaggccgcttttatgcttacgcagggttatgcagtaacgcagcagacttccttttctagacaaaacaactgcatcccttgattcccaaagcgaccccgtgattcaaaagattattttatgaagactttggcgtcgtgcacccaaaattaggcttggcccacccgggatttcctaccagtgatggtacgggtgaacccaggccccttgggcatttggttgcccgggtaaacgcccaaacagaaatatccgataagcccccgggctcacgctttgtttggaataagggccccgcccttcttttttt

SEQ ID NO: 93036 - DNA, 543 bp, Arabidopsis thaliana columbia
  unsure (1)..(543): unsure at all n locations
agtagtacggaagataaatctgctcttcggcgcgtagtatcgccgnnnnnnnnnnnnnnnnnnnnnnnnnnnnnnnnnnnnnnnnnnnnnnnnnnnnnnnnnnnnnnnnnnnnccacgcgtccgcggacgcgtgggaatataatggaacatatggtagaatgttgagtttggctactgatgctttggcagagaacaaacttgagaccaaagacttatggcaggagccgaaggaacaagcttcggcgtggaagccttgtgcggatcaacgttctttgactcctgacgatggcaaaaatggatatattatggtaactgcaaacggagggattaatcagcaaagagttgctgtatgtaacattgttgttgtagctcgattgctcaatgcggctctcgtcattcccaaattcatgttaagtgacgtttggacagatgcaagtttggagatatctaccaagaggaacattttatggagtacttgtcgcccgatattcggatagtaaaggaactaccaaaaagagcttcattctgttaatcttgaagaa

SEQ ID NO: 93037 - DNA, 431 bp, Arabidopsis thaliana columbia
  unsure (1)..(431): unsure at all n locations
cacaggagatttcccaactagtgtcttgaaaggaaacaatctcacgtttcttgatctcaggttcaattctttctcaggctctgttcctcctcaggtctttaatctcgacctcgacgtcttgttcatcaacaacaacaatcttgttcagaagcttccactcaatcttggatccatcactgctctttacctcaccttcgccaacaacaggttcacggggtccaattcccgaaagcattaggcaaccatcaaagtaccctacaagaaggtccttttcctggaataacaaagttaacccggatgcttaccgtacccaaatcggggaaaccttaacccgaggccactngttttcggatgttggggttcaaccaatttaaccggtcccaataccgtacttcttttcgggttggctttggaaaacgnttgggaaccaa

SEQ ID NO: 93038 - DNA, 498 bp, Arabidopsis thaliana columbia
acgcctgcatgtaccggtccggaattcccgggttgacccacgcgtccgtaccgcgcgaaaagacgacagaaggaggggatccatcactgctctttacctcaccttcgccaacaacaggttcacgggtccaattcccgaaagcataggcaacatcaagtacctacaagaagtccttttcctgaataacaagttaaccggatgcttaccgtaccaaatcggaaacctaacccgagccactgttttcgatgttgggttcaaccaattaaccggtccaataccgtactctttcggttgcttagaaacgatggaacaactcaatttagccggaaacaagttctatggaaccataccggagattgtatgcgagattgcttgtctccaaaacgtttctctctcgaataattacttcactcaggttggttcgaaatgtagaaaactcatcaagagacaaattatggacgttagtatgaatgtgtctgcttgattctctcaaacgca

SEQ ID NO: 93039 - DNA, 659 bp, Arabidopsis thaliana columbia
  unsure (1)..(659): unsure at all n locations
ccagctctctacgactcatatagggaaagctggcacgcctgcaggtaccggtccggaattcccgggtccacccccgcgtgcccggaaacaagttctatggaaccataccggagattgtatgcgagattgcttgtctccaaaacgtttctctctcgaataattacttcactcaggttggtccgaaatgtagaaaactcatcaagagaaaaattatggacgttagtatgaattgtatacttgatcttccaaaccagaaaacgccatcggagtgtgctaagttcttcatgcggaaacagacttgtcctaattccaagtctttgtttactgtcccttgtgataagaatccaaaccggggtaaaccggatcaagaacgattggaggaggaaaaagctcaagtttctcatccggtaacttacaacacacttaacccggaccggcttcggaatctataaccttggccgttttttcttatcaagtaacgatatatatatatatatatatatagccaaagccaagttgtttataatttgaggtgtctaatgcaatataagtgaataaatgtattgtagttgtgtactttcggatcatcactatatgtattttcattgatgtataatccatccttctgttttttcttnnnnnnnnnnnnnnnnnnnnnn

SEQ ID NO: 93040 - DNA, 725 bp, Arabidopsis thaliana columbia
accactcactttagggaaagctcgtacgcctgcaggtaccggtccggaattcccgggtcgacccacgcgtgcggccggggagttttttattttgtttcttcccaccttataatcgccgtgttgaatcttcaatttcgtttttttgtctaatttcgagctcgattttgacgattcgttttgtttgtgatctgattttgagttgtttctccattacgcttggatttcgccgtcgcagatctcaaaaggaagtacgatcatggaggaaggttgcaactgtgtttactcaaggatggcctcaaaattcagcattggtttattgattattttggcgatcgttcttctaatggttcgtgtactgtatgttatataccgatgtggcaaaccacttccaaaaggagcttcacagtcttttactactcttattgttcttggttctgggggacacacagcagagatgttgagtctcctctctgttttgcggaaggatagatttacaccaaggttttacattgctgctgctacagataacatgagtctccagaaagctcgtagttttgaagattctctagctgagaagcctgctgttaaggaagcatcatcacagttcatgcaaatttaccggagtcgtgaagttggtcagtcttatgtgacttctgtttggactaccattgctgctattcttcacgctctgtggctaatgatccggatcagaccacaagtgattc

SEQ ID NO: 93041 - DNA, 590 bp, Arabidopsis thaliana columbia
cgcgtccggggcattgccacagtatcgagtgtcactttctcaatcaaaaggttttctctctcttctcttttttcctctcctgcgcgaaaacaagacgaagagagagagagagagactcagacacacacagacacagagtttaggtttgctttgtaaatctgtctctgcacttatcatagtttcgtttctcttttgagaaagaaaaacccaaacttgccatgttttagatctggtcctttttaagctccaaaagattgttgctttttctcttgcttaagtttttgattccttcttcttcttcggaaagtctgtacctcgcaagagtttgattgtccttgtgttgcgatttccatgtttagtatctgcatttgatagccttcgatgctgcatgcaattcccaagactctttctgattgctacaacgccgtgatttctctctgccatttccttcgatttgatttctgggttctcttcttctcgtctctcttctgcatgtttcgccactctaccttagaaaaaaggttactttcgcctccgatttaggctcgatttgatgaattcgtcgtcgtgtggctatttatcaaattgag

SEQ ID NO: 93042 - DNA, 516 bp, Arabidopsis thaliana columbia
ccagctcctatcgactcacttagggaaagctggtacgcctgcaggtaccggtccggaattcccgggtcgacccacgcgtccgcccacgcgtccgcggacgcgtgggatttgttgtgttcccggcgacttctacttttcacctttcttctcggcgtcgtctaatttctagggttcccctgtatttcaccgtcaagagcaaatccaacatgtcgtcgctgcgtaatgctattccacggcctgctcataaggagcgatctcaaccggaagcgaggaagaggtttggcatcctcgagaagcataaggattatattatccgagctaatgcttatcacaaaaagcaggaaactttaaagatacttaggcagaaggctgcattcaagaatccagatgaattcaactttaagatgattaatagtaaaacagttgatggacgtcatagaccaaaagatgaggtaaataaatactctgcggaagagcttatgattatgaagactcaagatattggatatgtgttcc

SEQ ID NO: 93043 - DNA, 506 bp, Arabidopsis thaliana columbia
gaccatattggaatgttgacgcctgatgtaccggtccggaattcccgggtcgacccacgcgtgcgtcattcacacacactcatggcttcttcttcttcttcttcttcctccatcacaatcatcaccaccttcctcttccttctcctccacacaaccgccaaaaaaacctacatcatccgcgtcaatcactccgataaaccggaatcattcctcactcaccacgattggtacacatctcaactcaattcagaatcatctcttctctacacttacacaacctccttccatggcttctccgcttacctcgactccaccgaagccgattctctcctctcctcctcaaactcaatcctcgatatcttcgaagatcctctctacacacttcacactacgcgtactcctgagtttctcggtctcaattccgaattccggtgttcacgatctcggttcttcttctaacggcgttatcatcggagttttagatactggcggttaggccggaatct

SEQ ID NO: 93044 - DNA, 311 bp, Arabidopsis thaliana columbia
ggtcgacggcaaaagttgaaaataaaacaataaacagtcgaaattctccggcgaagatgagaaccggaaaaggaaatcaagaggaagaagattacggagaagaagactttaactctaaacgtgaaggtccttcttccaacactactgttcatagcaacagagattcaaaggaaaatgataaagctagtgcgatacgttctaaacattcggtcactgagcaacgtagaagaagcaaaatcaatgaaagatttcagatattgagagacctaattcccaacagtgaacaaaaacgtgacactgcttcattcctt

SEQ ID NO: 93045 - DNA, 734 bp, Arabidopsis thaliana columbia
  unsure (1)..(734): unsure at all n locations
gctctcnnnnnnnnnnnnnnnnnnnnnnnnnnnnnnnnnnnnnnnnnnnnnnnnnnnnnnnnnnnnnnnccacgcgtgcgatgtcttgctagaaggaacactcttgaaacctaacatggttactccaggatcagagagtgcgaaggttgcaccagaggtgattgctgagcacactgtccgtgctcttcagaggacagttccagctgctgttccagccatagtgttcttgtctggtggacagagcgaggaagaggcgacaagaaaccttaacgcgatgaaccagttgaagacaaagaagccttggtcgttgtctttctcctttggaagggcgttgcagcagagcactttgaagacttggggaggaaaagaggagaatgtgaagaaggctcaagaagcgttcttggtcagatgcaaagctaactctgaagcaacacttggtgcttacaagggtgatgctaagctcggtgaaggtgcagctgagagccttcacgttaaggattacaagtactgaagaaagaggctgaggatcgtagtttttatatcatcgtttatgttcttgctttcactttctctgttttttgtttggtgttttgtttagaagagtggtggcaccaaagaaccccgtttattcttttttatgaggtctttgtgttcttaaaaaaaaaaaaaaagggcggccgctctagaggatccaagcttacgtacgcgtgcatgcgacgtcaaagtncttctat

SEQ ID NO: 93046 - DNA, 445 bp, Arabidopsis thaliana columbia
gagagaaagaaagcgaacaagggttgttgtctgagacgacgaaagctatgggtctagaggatgctggagatttggttctccacatcgtcttatccaaaatcggccctgaaaacaccgcgagagtggcttgtgtcagtaaacgccttaaggtctccgcctccgaggaatctctctggtctatcttctgctccaatgatcttaatatctctactcctctcgatccccatggagatcctgctccttccttcaagagagcatatcaattgtggagggagtcatttagaatgtatcccttggaatctggttaaaagagttagactttgttggggcaacctcaaaacaatggttgaccttaaacttccctgaagcaaaaggcaacacttgaggaaaggtgtcacagaagatgatcttcaagaattcgagacttctctcaaagtgaaacttc

SEQ ID NO: 93047 - DNA, 527 bp, Arabidopsis thaliana columbia
aatacgactcactttagggaaagctcgtacgcctgcaggtaccggtccggaattcccgggtcgacccacgcgtccgacaaaatggcggcaatcagaacgatgacgaacatgattctacgcgagttcatccatcatccacttctccttcactcttcatcgaaatcgtgtcaatctcttttaccatgtctccgtctcactcccctaatttctccaattcactctaattcccggctcgtatccgtccgatgtgcggcatcgacctccggtggaagcggtggtgatcggaaggtctcttcacggttgtcgcaggtgcaacagatgcttcatgaagccgaagagagagctagttccgctggcaatgagcctactcctcaaatcactctagacaatgttacacttaactttgctagaagtggtggtcctggaggccagagtgtgaacaaattgaataccaaagtagatatgcgcttcaatgttaagaacgcgtattggctgagtgacaggatcagagagaaaatcttactgac

SEQ ID NO: 93048 - DNA, 354 bp, Arabidopsis thaliana columbia
  unsure (1)..(354): unsure at all n locations
cttctgtctgggtgctagctttttcttntgtttctgtgtcagaaatggagataagtatgcaggagagtactttggagacaagattcatgggtttggtgtgtatcgatttgctaatggacactgttatgaaggagcatggcatgaaggtcgtaagcaagggtttggtgcttactcgtttagaaatggtgatgctaaatctggtgaatgggattcaggggttcttgtgacttcacttcctcttacgagtgagccagtttcaagagctgttcaggtaatatttgttctcacccgaggtggttggaatcgcaattgccaaaaagtggagaactttaacttgaaaataatgcaggcggc

SEQ ID NO: 93049 - DNA, 618 bp, Arabidopsis thaliana columbia
atacgactcactttagggaaagctcgtacgcctgcaggtaccggtccggaattcccgggtcgacccacgcgtccgtgggtttggtgtgtatcgatttgctaatggacactgttatgaaggagcatggcatgaaggtcgtaagcaagggtttggtgcttactcgtttagaaatggtgatgctaaatctggtgaatgggattcaggggttcttgtgacttcacttcctcttacgagtgagccagtttcaagagctgttcaggcggctcgagaaacagcgaataaggcagtgaatcggagacgagtagatgagcaggtgagccgagctgtggctgcagctaataaggctgctacggctgcaagagtggctgctgtgagagccgttcagaatcaaatggatggtaaattttgtcaaagttgaaaaaaggaaaatgtaaaaaatctttttttttaccggtttctctgtaaccctgaatcgaaagtttgtttcagaggtttgtaacagagagttaattttcgatctttttactaatgtaacaaaactgtaaatagttgaagaagaagctttgtttttgttgtaaaatcaacggcttgaaatggagcttattttggttttgatcg

SEQ ID NO: 93050 - DNA, 532 bp, Arabidopsis thaliana columbia
  unsure (1)..(532): unsure at all n locations
cannnnnnnnnnnnnnnnnnnnnnnnnnnnnnnnnnnnnnnnnnnnnnnnnnnnnnnnnnnnnnnnnnnccacgcgtccgacttcttcctctatgctgctgcttcggaacttctctacggtgggaagagttgctcaatctgttcgtgtgacttcgaggatcttcttctccaccggagaattgattagggttcttccttatactcgttctaaaagattgatctgttctactcgtgctgctcataatgaagaagccgccgcgaaagctgcggcttctgttgctgacaccggagctccgaccatatttgacaagattatagcaaaagagattccctcagatattgtctatgaagatgaaaacgttttggcattcagagacattaaccctcaggctcctgttcatgttttggtcattcccaagttgagagatggcttgacctcgcttggcagggctgtaccaagacacgcacaggttcctggccaacttctacctgcatcgaagattgttgctgaaaaagagggaattccttgtga

SEQ ID NO: 93051 - DNA, 415 bp, Arabidopsis thaliana columbia
gaacttcaacaacaaggaatttgttgagcccaccaaaattcaacgatgggttgttgtcaatttctctgctcgctgtaatgtacgtcaagttgttgatgatctgataaaaattggaggatcaaaaggaattgaaattgcttctccctttcaagtgtttgaggagggtaatcaattccgccgtgctcctcctatgattcgtgttgagaacatgtttaaggacatccaatcgaaactccctggtgtcccacaattcatactatgtgtgctccctgacaaaaagaacagtgatctctatggtccatggaagaaaaaaaacttaactgaatttggcattgttactcaatgcatggctccaacgcggcaacctaatgatcagtatcttactaacttacttctgaagattaatgcaaaactt

SEQ ID NO: 93052 - DNA, 517 bp, Arabidopsis thaliana columbia
acgactcactatagggaaagctggcacgcctgcaggtaccggtccggaattcccgggtcgacccacgcgtgcgcgaacaaagagagaacaaaagaaacagaacaacaatggcgaaattaaatcgttccaacattggtctctcactgttactatctatgttcctcgcaaactttatcaccgatcttgaagcttcttctcatcaagatctcaaccaaccgtaccggaccggttatcactttcaacctctcaaaaattggatgaacgatcctaatggaccaatgatatacaaaggaatataccatcttttttaccaatataacccatacggtgccgtttgggatgtgagaatcgtgtggggacactccacgtcagttgacttagtcaactggatttcacaacctccagcttttaatccatctcagccgtcagatatcaacggttgttggtcaggctccgtcacgattctaccaaacggcaaacctgtgatcctctacaccggcattgaccaaaacaaagg

SEQ ID NO: 93053 - DNA, 698 bp, Arabidopsis thaliana columbia
attcccggcccagacccacccgtccgaaacaaatcaaaaaatggatttttgttcaagaatgaaatcttattggaggtgtccatatccggttcatgcttccgaaccatatcacatcccagatctgatgaaataggatgaattgagacggtattttgtaaatacgtaattatcttgaatatattaactatttctttattttccgatcgcctggaagggacaaaagaaacatcttgttctttcttcaacaatttctgatccctagtggacctctcagtaggattcgaacccagatgaagttctgaccatctgtcagagaaaaaagaacgaatggctcttgtaggattcccaagaaattcttcgctttcttccggaagcagatgattattcattcgcttctcacgttccgtgaatagccggggcattgaggaatagccagaaaggtatttagggaatcggtctgattctatctctcttccttccgtttgaataaaggaaggatccaaaagaatcgatctttcttttagttgttgaatctctctttgattgatcaatgtgtgatagtgatattccgaatcctcattactaatggaatcgaaaggatctatgaattgatcagaagatccgttcaattggctagaatccgttccttgaacgaaactagatcttgtagaatcaaattgaatatttgacgatacgtt

SEQ ID NO: 93054 - DNA, 504 bp, Arabidopsis thaliana columbia
ctacaattgtctcaaaaaatccaatatacatacattattggaccttttgaataacagtcaagaagaccttatcaaaattgaacattttcacgtagaagatgtaaaaaagatattagacattctagaaaaaaaatagaaaaaacatttcaaaaaaaattgactaagactaaaaagtcaatttgaaattgaaatggattttcaaatttcaacgtaatttctattttccagtcgaacccattttaattaattaattaaattaattagaattagatatgtatctagggagaattcatttggaaatgactactccctagatacctccctagatacccacgtcgtttattttacaattgaataaattgaattaaaaaagacctaaagttagagatttatcaatcgggaatgttgctccaatacctaaccaccagggccggcgggtgccaatcaaaaaagacggtgtcgctactggacgacgaatatggattttgaaacttattaacattt

SEQ ID NO: 93055 - DNA, 725 bp, Arabidopsis thaliana columbia
acttcttagttcttacagtataaatacgttattttctttaataaaagagagatacgttgatgagttcactatggttaagaaataaagagttggttccactaaattccatcaattaaatatgatcgtcactttctttgtccccaagttgcgtatacctataaatacatctctttaccttctcctctgtttcctactcatctttcctttttccacatcaagttagaaaaacaaaagtagaagaaattatctccaaaacacacaagtccagagagaaacaaaaagagattacacacaacaacaacaaaaatgagaccattgagcgtacaatcgaagtttgaagatgtggcaacgtcaacctccgttaatcaccacggagtgacgccgcaatcaccgtggcactcgccggttccttacctcttcggcggtttagcggcgatgctaggactaatcgcctttgctcttctcatcctcgcttgctcttactggcgcctgtcttcctccggcgaagaagatggtcaaaacgtagatgaagagaaagagagccggtctggagataaggcggcgaacggagcttacgaggagaagtttcttgtcataatggccggagaagatttgccgaggtatctggcgacaccggcgatgaataagtgtacgtgtggggtcacgagggtaaaatggggatttctcaagaagaagtgttgccaaagaggaagagaagatgagag

SEQ ID NO: 93056 - DNA, 507 bp, Arabidopsis thaliana columbia
ggcggcacggtttcacagccaccatttacaatgtctccgcctcctcttttaggtggtggcgcggcgggaaccacagattcacctcctccgcctcttttaggcagtggcgctccgggaatcactggttcccctcctcctcctcttttaggcggtggagctccgggaatcactggttcacctcctcctcctcttttaggcggcggtgctccgggaatcactggttcaccccctcctcctcttttaggcggcggagctccgggaatcactggttcaccccctcctcctcttttaggcggcggagctccgggaatcactggttcacctcctcctcctcttttaggcggtggagctccgggaatcactggttcacctcctcctcctctttttggcggcggagctccgggaatcactggttcacctcctccacctctttttggcggcggagctccaggaatcgctggttcaccccctcctcctcttataggcggtggtgctccgggaatcacc

SEQ ID NO: 93057 - DNA, 626 bp, Arabidopsis thaliana columbia
aaaaaatatcacaaatcccatgaaaaatcacagagcttagaactctccacactctcaaactccgacgacttgactttaagatcatccctgaggagatcggtacttagcaatgggaggaaaatcagagccagcgaaatcggaatccatggcgacgaagccagatctactcaacactagtttcttctcattcaaatccctaaaattgaagacgaaacaacaagagctcttactccgtatctcgatccttggtctcgtctacatcttagctttcatagctcgtctcttcagtgttctccgctacgaatcaatgatccacgaattcgatccgtatttcaactaccgtacgactcttttcctcacagagaaaggcttctacgagttttggaactggttcgattccgagagttggtatcctctaggtcgaatcatcggcggtactctttatcccggtcttatggtcacagctgcgttaatctactggacattgcgatttctccgattcttcgttcatatccgtgaggtttgtgtgttaaccgcaccgttttttcgcgtcgaatacgactctcgttgcgtagttctttggtaaagagctttgggatacaggagctggtcttgttgctgctgtt

SEQ ID NO: 93058 - DNA, 1065 bp, Arabidopsis thaliana columbia
cttcttcagtcgtaaaaccgccgcgtctctgctgacccttctcttctcatttcatcgacgggagaaaatccgataccatctgagatttccaacagtgaaattaagatgtcaacaggaatatccactgatctccacgtccattttggagctctgaatttctcaaaaacctacaaatctggtttaagcaatcgaacggtgtctttttcgagagtcgggtatgctcagaacaggaaattgagctgcagtgtttccaacacagagaatgtagctcctaaggatgatgaaagaggaaaggatagacctttggttaagatgtgtggcatcacatcagccagagatgcagctatggcagttgaggctggtgccgattttattgggatgattatttggccacattcaaaacgatccatttctctttctgtcgcaaaggatatctcccaagtggccagggaaggtggggccaaacctgttggtgtttttgttgaagatgatgagaacacgatactcagagcagctgattcctctgaccttgagcttgtgcagcttcatggtaatggttcgcgtgctgctttctcgaggttagtacgcgagaggagagtcatatatgtccttaatgcaaatcaggatggaaagctcctgaatgtagttcctgaagaggatggtcatctcgctgattggattcttgtggatagtgcaacgggtgggagtggacacggatttaactgggctcaattcaagttgccttccgtcagaagcagaaatgggtggctcttagctgggggaatcaatccaacaaatgtttcagaagctctttctatccttcaacctgatggaattgatgttagtagcggtatttgcggtacagacggtatccagaaggataagtctaagataagctcctttataactgcagttcgctctgtacactactaatggcaagcaatataaaccccggtaatttatcttgtaactatagttttgagcatcaacctgttgtttccaatccatgtcattaagttttgaattgtaactggctgataataataataatgcccttttttttcc

SEQ ID NO: 93059 - DNA, 1986 bp, Arabidopsis thaliana columbia
gaattcggcacgaggttgaaaccattttatatttatctcttcttattttctgcatggtggtttgaattaggccaccaaaaaactcttggataaaaaaaaaactgagaaacagaaaaaagaaaaaacaaaacacacattctcgatttgtctgtgccacacacactctcttgcacattcttgtctcgacaatactctcagaatacgatcttgaagagcaaagattgttcctttattgatgaattgagtgcaaaagagtgttatataatggctactgcagctgttataggactcaacactggcaaaagattgttgagttcatcgttttatcactcagatgttacagagaagtttctatctgtaaatgatcattgttcatcacagtatcatattgcttcaacgaaaagcgggataactgcgaaaaaggcgtcgaactatagtccgagttttccttcgtcgaatcgtcacacacaatctgctaaagctttgaaagagagtgtagatgttgcttctactgagaagccatggctacctaatggaactgataaggaattggaagaagaatgttatgatgatgatgatctaattagtcattctgttgaggcaattttactgttacagaagtctatgttagagaaaagttggaatctttcatttgaaaaggcggtgtcgagtgagtatccgggcaaggggactatacggaagaagaagattccggttatcacctgttcagggatttcagctcgtcaaagaaggattggtgctaagaagaaaactaatatgactcatgttaaagcagtttctgatgtttctagtggaaagcaagttagaggttatgtgaaaggtgtaataagtgaagatgtgcttagtcatgtggaagttgtgcgcttgtctaagaaaatcaaatctggtcttcgtcttgatgatcataagtcaagattgaaggatagattaggctgtgagccttctgatgaacagcttgcagtatctttgaagatatctcgggccgagcttcaggcgtggttgatggagtgtcatctagctagagagaagttggctatgagtaatgtgcgtttggttatgtctattgctcagcgttatgataatttgggagcagaaatgtctgaccttgttcagggtggtcttatcggacttttgcggggaatagagaaatttgattcttccaaaggtttcagaatttcaacttatgtatattggtggattcgacagggtgtctcaagagcactagtggacaactcaagaaccttgaggttacctactcacctacatgaaagactcggtttaatccgaaatgcaaagcttagacttcaagagaaaggaatcacaccctccattgataggattgcagagtctctaaacatgtcgcagaagaaagttagaaatgcaacagaggctgtaagcaaagtattttctctagacagagatgcatttccttctttgaatggtctccctggagaaactcatcacagttacattgcggatactcgtttggagaacaatccgtggcacgggtatgatgatttggcactcaaggaggaagtaagcaagcttataagtgcaacactcggagaacgggaaaaagagatcattcgattatactatggtctagacaaagaatgtctcacatgggaagacattagtaaacggataggattatcgagagagagggtgagacaggtagggcttgtggcactggagaaactaaaacacgcagcgaggaagagaaaaatggaggcaatgatccttaagaattgattttgtttttgtacattttgattacatcagagccatagagagcggttgtgaatgtgtatatatacaggacaaaaaagggggaagagtactactctcttttatttttttatcttccttgcttctttcgtaaactgagttgagaaacaagagacagttatgtaatatggcttcacgtaaacttcatcattcctcataaattatcaactaaaaaaa

SEQ ID NO: 93060 - DNA, 628 bp, Arabidopsis thaliana columbia
aacaaacaaacatttagaaacacaacttaacaatgtaaaaaacaaaaaaaaaaggaaaattcttatttcttttcatagattaacctgaagcaatgcttttagatttggtaaaagaactgccattgacaagctcctcatgcttctttcgcaatgcagattgtctctttcaaaacaatcaaaacacagtaccaattggaatcatcaagattggaattttgcagagctcaatgaaacagaacataatgaatttgctttaccaagaaacgtatgcgatttcgatcttcctcactgagaacaaactgcattttcaattgaacatttccatagccattgaatgaaagtttctcttccaagaaaccactctctattatcattcttggctctatctctacctccaaaaaccctcaaattcagaaaatctaataaaaccactaatttgatctctagagttgtaaaaagaacacacctttctgtaatatttggtttccattaacatctaacagagtaacaatcaaattctctcggagcctcgtaactggactgtgccacattgaatccaagaagaaacaataaactgtcaaaatttctcaaaaagttccaaactttagaaattcaaaaggatcagtag

SEQ ID NO: 93061 - DNA, 631 bp, Arabidopsis thaliana columbia
  unsure (1)..(631): unsure at all n locations
atcgatattcttgtttactactcagtaaacgtctatcaacaagctaaaaagtgaatttttttgggggggaagttcaaattagactagacaaacaaaaaaaagttcattttcctcccttgcttgcatatgtatagataattcaaatatagatagatgcagatctatagagagtcttccatctttttgcatttcccgaaaattccctgttgttagatcagattctaatcaattttgtagaaatttgtaatggaagaaaaatttttctttattaatgactattaactattataagatattaagacaaaaagaataataaatctaacaaggggattatgatacatctagttgtagttgattttgaaagatgaataagtccatttatttagtttggctttttttgtacctatttttttattctatttctatttctattcggnnctattctatatattnctatcaggttggatatcaatattagatatattattacttaaagatacttagtataattatatattagatataatagaaataatttaaattcaagatattcttagatttttttagaattcaaaatttttcattatcaggtacaaatattaaaatgtggttcccattttttgacaacctt

SEQ ID NO: 93062 - DNA, 575 bp, Arabidopsis thaliana columbia
accacgcgtccgattagatagatagatagattattttcaccatcaacatcaccatcaccgccactatcacaccataacccaccactcttcttcttcttcttcttcttctctctctttctctgtatctagaaacagagagtttttgattctctctgttttcaaatctgttccactaagctctcttgctttcgggaagattctgtttcactgctgcattttggatttttccgatggatcgtaagagttggccatggaagaagaaatcctctgagaaatcagctactgtcacagaagttgttgatcaggaaaatgggaagaagccgagttatatccagatctcatttgatcaatacacgaatctaaatggtttaaaagatgaagtcaagagctacgaagaaaaagttacaaagcttgaggatcagatcaaagatttggatttgaagctatcaacagctaatgcagatattgtagcaaaggaggttttagtcaaacaacactccaaagttgctgaagaagctgtcacaggttgggaaaaagctgaagcagaagcatcagctttgaaaacacatctcgaa

SEQ ID NO: 93063 - DNA, 518 bp, Arabidopsis thaliana columbia
agccatttcgaatgtgaaagtgcctttctctctataagaacggtgcgttccggggtgtgaagtggaatgatttcataattggggttttgaataagacaaccttttcatttttcatttttttttcaatatgaaaaagtaataagaatgagaggtgttaagcttttcatcatcctggcgtcgagctatttttccgcaggacctcccctacagtatcgtcaccgcagtagagtttaaccaccaagttcgggatggatcggtgttgttcctctacgcctaggacaccagaatatcgaaccatgaacgaagaaaggcatgcgagaaaagcatattggctagtgatcgtgaggctccaattcttgactggagtggacaccaaaggcctctgcccccccatcctttggatagaagggcagaatattaggtgttttcatgtcgacaaagatgtgaacaatggttgtttcttgccggcaaagtggtgaactatgaaaatagatcgcgagtgcctgttcgaattgatc

SEQ ID NO: 93064 - DNA, 499 bp, Arabidopsis thaliana columbia
cggcacgagcggcacgagcggcacgagcaaaaacaaaatttgcttcgccgttttcggctccggcgtgattcttgagaagaactgaagtggagagagagatctgaaatctcaatctccgatttaacttgcgacaatgcttcaaattcgtcttcggagggattccccgacggaaactggaaatggtgcgaggccttctccgacggagacggttactgtagcctgtcccgaccatctcgtcctcgccgatcttcctgttgcgaaaggaatcggttccgtgactcccaccaccgtaatcaagcccgtcggtcgtcgttctcgccgtcagctaggcgagagagttcacttctgcgttcgttgcgattttccgattgcaatctatggtcgtctgattccttgtgatcatgccttttgccttgaatgtgctcgcagtgattccatctgctatctatgtgatgagcggattcaagagattcaaacaatcaagatgatggaagggatc

SEQ ID NO: 93065 - DNA, 505 bp, Arabidopsis thaliana columbia
cgccacgcgtcacgcagacggagacagctcacggtttgatgatgctcctgaagagatggattgtggtgactctagttttggggattcgagtagttctttacctgctcatgtgaggaaggagattttagagttagggtatcctgatgatggttataattacttggagcatttgagagagattaagaatactggtggtggttctaatttctatgtgaatcctaaatatgaggttgctcagttacctcgtgatgttaaggcttatgatgcgtctcgtgttaagatctctggtatggtgaatgaagaaggtaatgataataagttgatgtatagtgttgcgtccaagactgtctaacgttcaggtgcagaaagctattgatcctgaagttgctgcgttgcttgaaaacagtgatgggtctgagtttggttctgatgttgaggatttggaagaagatttgttgttcaagctaatcttactcaaaagggtgaatcttctggtgtgagcaat

SEQ ID NO: 93066 - DNA, 1080 bp, Arabidopsis thaliana columbia
  unsure (1)..(1080): unsure at all n locations
nnnnnnnnnnnnnnnnnnnnnnnnnnnnnnnnnnnnnnnnnnnnnnnnnnnnnnnnnnnnnnnnnnnnnnnnnnnnnccacgcgtccgcccacgcgtccgcccacgcgtgcgtacggctgtgagaagacgacagaaggggacccatatctcacgcttaattacagtattgccactcattaaaaccgtaccatcttaaccaaagcgataacccgtaccaccggttcagctatggaggatttattggaggagaggctaactcggactgactctgtcgggaataaacgagtcagagacgggttagacctcgactcgccggacgtgaagcggttaagagatgatttgttcgatgactcggggcttgacccagtgagtcaagatcttgactcggtgatgaagagtttcgagaatgagttatcgacaacgacggcggcgctaagctccggtgaaactcagccggatcttggataccttttcgaagcttctgatgacgagctgggtttgccaccgccgcttacgccaccgcaaacgcttcttcctccgtcctgtgaggaaacggtgacggaattggtaccagccttcgtcggattcatcaaacgttggagagttaagtgggtttgaggatcatgttacggagttcggaccttgcgatcttggtgatgatgggcttttcgaatatttcgatgggtgtttagattccggcgatttgttttcatggcggccggagtttttaccggcggagtaacaacataccggacctttttaaaaaagcgggctacgaacggtgacgttttgttaagcgttttgcctcgctttttcttttttcttttttttccctctattattggataataggtattaggatctatatattttgttaagttattaggattagaaaaatcaaaatgtttttagtaggagtaagtggtttagattagtttgtaagaacttttttctcttcaggaactgttaatctttaatcgcccaaaaaaaaaaaaaaaaaaaaaaaaaaaaaaagcggccgctctagaggatccaagcttacgtacgcgtgcatgcggcgtcatagtctagctatagtg

SEQ ID NO: 93067 - DNA, 521 bp, Arabidopsis thaliana columbia
gctaagtgctcatccaccaccttcctcctcctccttcttccctcaccttttgtgtttctttcgtctcgtggcttttcattaattagggtttcgcattttcaatcaccatcatcccaccacgttttcgttaatgaactgagagcatttcctagggatctcaatggcaatggagaaagatctcagtccaaattctccacggattagaaagctaagggatactagttaccctactacaccaacgtctcgaatgaatactaataaccagagagataaccattatcctaacattcctaattcaccaagggattacaattatactcctagctctccaacagctcgcattcgacaccgcaggcgatcaagcgagaatttagctgaggtgaacagaagcaatgtaagcagagtaagcaatttgttacttggtgataagaacaagtacagatcaatgtggataaggacatgctcatctctctggatgctcgggtggagtgtgttataatctacatgggtcatctctacat

SEQ ID NO: 93068 - DNA, 411 bp, Arabidopsis thaliana columbia
tagacccacgcgtacggtctctctctcagtctctctctaaacgcataatcttacaataaaatggtgaaactcgcgacggcgcgtgagattagaacgtacggccctcggcttgggaggagcagagccgagtacatcaacgcaggtctatacttgtttgcaaccgtggtgctcatcggcggtttcacagcgacaggattctcatgggaaccaagatccggcctcgtccttattctcttagctctcgttcttataaccgccgtgaatgttcatgatcttgtggctcatctagctggaatcgattaccggttaaggttaatggagtatgatttgcaactggggctagtggaatttgcagtccctctggttcagatagcgggttcggtagtgttttttcttgggaatcttttttcg

SEQ ID NO: 93069 - DNA, 503 bp, Arabidopsis thaliana columbia
  unsure (1)..(503): unsure at all n locations
ttttcttagtcttggttacgaaatttagctggtctactggtgttctgtgcttgattgcgaatattgcatgcaaaatggatcccataaacatgtgtcgttcttaggttacttaatttcatatgacctctcaagccgctacttcagaatttctttgtcatgtaagacatcattagaactatagatgtacttgttggtttccatatctctggtctctatggcagttgaaggaaagagagcctcagattctaaattctctgttcgtgggactgcgtttttgctggcttctgatgctacacagtttctttgtttctgtaatagattttagataaacttttgttgagacttgctttctgttaattttgaatgaagcgccagaaaacttttataaagggaatgtaatgttaagtttcaacacaaaaaaaaaaaaaaaaagagnnnnnnnnnnnnnnnnnnnnnnnnnnnnnnnnnnnnnnnnnnnnnnnnnnnnnnnnnnnnnnntgtcc

SEQ ID NO: 93070 - DNA, 803 bp, Arabidopsis thaliana columbia
aaccggggattaacacaatttttccaccccaggggaaaccaagcgtattgccccattggctttaccccccaggtcttttaaatacggccctccaccaataagggaaaacctggtaccgccctccaggtaccgggtccggaaattcccggggtcgaccccagggtccgcggttttaaaaatgtggaatgtgcatggtcctataagtacggcatgtcggtttcaagcccaagccccagcaattgaaaatttgtactgcatgcagccaatatttaaggtaagggagacatttttttactgttctgaactagttagaaattagaagtgttgattacttttgagttgtgcctattttgctagtttttcttagtcttggttacgaaattaagctggtctactggtgttctgtgcttgattgcgaatattgcatgcaaaatggatcccataaacatgtgtcgttcttaggttacttaatttcatatgacctctcaagccgctacttcagaatttctttgtcatgtaagacatcattagaactatagatgtacttgttggtttccatatctctggtctctatggcagttgaaggaaagagagcctcagattctaaattctctgttcgtgggactgcgtttttgctggcttctgatgctacacagtttctttgtttctgtaatagattttagataaacttttgttgatacttgctcttctgttaattttgaatgaagcgccaaaaaaaaaatataaaaaaaaaaggccaagggcggccgctctataggatccaagcttacgtacgcgtgcat

SEQ ID NO: 93071 - DNA, 2017 bp, Arabidopsis thaliana columbia
ggcaacgaaacggagagagggaattaggcaaattagaagagagaagtcgtagaccatacaatttgcacacaaactatatctctccactgactccaatcatctccttcctccgctcccatctgcgtctcaatggcttccttcaattcgttccccattcccaaacagattgttggttcttcttcttcgtcgtcctcctctacttctcggccacgtattttagtgcgatcgagtttaacatcgtctatgacctctaccaatagtatgctggtctttgtacatcctcatcctttgattaaacattggctctcgttattgagatctgaccaaacttctttccccattttcgttagaattccaatgacttctgtggttgcaacgaggtggtcgtttctatcctcagtcaaagaggaaagcagaatttatcagaacgattctctaaaagcatgtggctgcgcatctgtatctccttacactgcacaaaataatgtttatgttgagctcaaagacccaaaggaaaatattggcgtgggttctgcagaaagatcatattcatctcgtagcatgttgcaatacaatttactggcaaagaaccttttggcactagaggaaacgtttgttgccttggattctgtaagaatggaaagagatattatgttgcaaatggggaagttgggggctgctgagttatttaaaacctgtctatctaggtatcgtggttcctcaatcacgtcgtgcttatctgacacaactgagttggtggatactacgccgaatcaacaagtctttgtatcctcgaggagaaaagtaaaaaagaaagcaaggaggtcgagtgtgacagctgagaatggtgatcagagttctctgccaatcggtttaagaactacatggaacaatattgatgtccctagagtgagaagaccaccaaaatatagaaagaaaagagagaggatctctagaaacgagactgagatgtcaacaggagtcaagatagtggcggacatggagagaatcagaacacaactggaggaagaaagtggtaaggtagcgagtttgagttgttgggctgcagcagctgggatgaacgagaaactcctgatgcgcaatctacattacggttggtactgtagagatgaactggtgaaaagcacccggtctttggttctcttcctcgcaagaaattaccgtggactgggaatcgcccacgaagatttaattcaggcagggtatgtgggggtgttacaaggagcagagaggtttgatcacacaaggggttacaagttttcaacatatgtgcagtattggataagaaaatcaatgtctacgatggtgtcacggcatgcaagaggcgtccatattccttcatcaataatccgaactatcaatcatatacaaaaggctcgtaagaccctgaaaacgagccatggtataaaatatgcggctgatgaggagattgcaaaactaacaggccactcggtgaagaagattcgagcagctaaccaatgcctaaaagtggtcggttcaattgacaagaaagttggggattgctttactacaaaattcctggaatttacaccagacacaacgatggagagtcctgaggaggccgtgatgaggcagagcgcgaggagagacatacatgatcttctagaagggttagagccaagagagaagcaagtgatggtcctacgttatggtcttcaagactacaggcccaagtccctggaagagattgggaagcttcttaaagttagcaaagaatggattcggaagatcgaacggagagcaatggctaaactcagagaccaacccaacgccgaagacctcagatattatttgaatcagtaaaaaatagagatttttggctccaatgactcttatgtcttctgtcacagtgtgattgtgtaatcttgtgtgtttataatagtaacattggagatcctcgagtgtaaaatgtcttgtacggggttgtaaacttatatagttatattacagtgaaaatagatattgtacaagttat

SEQ ID NO: 93072 - DNA, 737 bp, Arabidopsis thaliana columbia
ataagataaataaatcaattttttttttagggaggggctccctgtatttcgatttcaaaaatcggttactactcctgaattgtagaaaagaaaaagagagaaaaaactggggatattgtgtgatttgtttagttgggatccaaaactaaaatataaaatttaagtaaataagtaaaaaaaaaggggggtcttgaatcaaaataatttaaagttcttatttctgtcagagggcaatatgaatgttttatcatgttccatcaacacactaataaaagaagggttatatgagatatctcgtgtccaagtaggccaacatttctattggcaaatagggggtttccaggtccatccccaagttcttattacttcttgggttgtaattgctatcttattaggttccgcagttctagcgattcgcaatccacaaacaattccaactgacggccaaaatttctttgaatttgtccttgaattcattcgagacgtgagtaaaacccagattggagaagaatatggtccatgggttccctttattggaaccctgtttttatttatttttgtttctaactggtcaggagcccttttaccgtggaaaattatccagttacctcaaggggagttagcagcaccaacgaatgatataaatacgacggttgctttagctttactcacatcagtagcctatttttatgcggggcttagccaaaaagggattagggttttcagtaaatacattc

SEQ ID NO: 93073 - DNA, 438 bp, Arabidopsis thaliana columbia
gataattattagaggaaaaagactaagcttgtcctacacaaatagacaacaaagctgtctcgtgtccttaagaatatacactgcaaagcgattttcattaaaagatgtgggaatcacaaataaagctttataagataatgaaagcattcaattagaatctctggacccagatcccaacctttatctaatttactactatatgttttgactttagtttatactattagtactttgttttaaggtaaactccattaataagctgttttctcttttgtttacaaagggacaaataaattataaaactgcataaaattaacgtgaaaaacatatataatcgttgattctgaaaatatgatggttcataacgtgtaaagaattaaaagatttgacgacttgattatcaatttatgaacatcaaagcacaatttgtttttttca

SEQ ID NO: 93074 - DNA, 652 bp, Arabidopsis thaliana columbia
  unsure (1)..(652): unsure at all n locations
cccccccctttgatttgacattccnatgtacccgtccggaattcccggttcgacccacccgcccgtgctcaccgcttctccacgccgccgcatccaactggacgcaacacagaactactaagttcgctttgataatcagaggcgaatgttcttttgaggataagctgctcaatgcccagaactcaggttttcaagctgtgattgtctatgacaacattgacaacgaagatctcatcgtcatgaaggtgaaccctcaggacattacagttgatgcagtcttcgtttcaaatgtcgccggtgagattttgagaaagtacgcgagaggccgagatggtgaatgctgccttaatccgccagacagagggagcgcttgggctgtgttggccatctccttcttctctctccttcttatagtcactttcctgttgattgccttctttgcacccagacactggacccaatggcgagggaggcacaccaggaccatcaggttagatgcaaagctcgtccacacactcccctgcttcaccttcactgattctgctcaccacaaggccggggaaacatgtgctatatgtctcgaggattacagatttggagaaagcctcagacttctcccctgcccacatgcttttcacttgaattgcatcga

SEQ ID NO: 93075 - DNA, 783 bp, Arabidopsis thaliana columbia
  unsure (1)..(783): unsure at all n locations
gatacgtcnnnnnnnnnnnnnnnnnnnnnnnnnnnnnnnnnnnnnnnnnnnnnnnnnnnnnnnnnnnnnnnnnnnnnnccacgcgtccgcaaatttctaactaaagcattcatagtctctcgaaagcctcttttcagaaccgaagctctttactttcgtccaccgggaaatatgccagtcgacgtagcctcaccggccggaaaaaccgtctgcgtcaccggagctggtggatacatcgcttcttggattgttaagatacttctcgagagaggttacacagtcaaaggaaccgtacggaatccagatgatccgaagaacacacatttgagagaactagaaggaggaaaggagagactgattctgtgcaaagcagatcttcaggactacgaggctcttaaggcggcgattgatggttgcgacggcgtctttcacacggcttctcctgtcaccgacgatccggaacaaatggtggagccggccgtgaatggagccaagtttgtaattaatgctgcggctgaggccaaggtcaagcgcgtggtcatcacctcctccattggtgccgtctacatggacccgaaccgtgaccctgaggctgccgttgacgaaagttgtcggagtgatcttgacttctgcaaaaacacctatatttggtattggtacagcaagatggtggcggtacaagcggtgtgggagacagcataggagataggaggtgacctggtggggttgaatccggagctggttctgggcccgcggttcatgcaacgatcaacgccggtgttt

SEQ ID NO: 93076 - DNA, 608 bp, Arabidopsis thaliana columbia
  unsure (1)..(608): unsure at all n locations
gtaatctccggcaccgaggaacaaagatggcttctttcacaaccaacagtctcgctcttcgcgcttcaattctcgcaaaccctagactacctcctccgatcatccgtccccgtntctntcttccccgtaaactctctttcaatctctccctccataacgctagaaccatcgtttcctccgccgttacctcctcgtctccggtactctcctctaaacccccttctcaattccccttctccgactcaactagatcgatcaccaccctcgtgcttctagccggcgtcgtaatcaaatctctaaattcaggaggctctctgtcggaaattgtgaaccctattttccacaggatttcaaggcatcattttccggaacagcaaagtccggtggttcttcggggctggttccggtgattgggcccggccgggtaatttggaacaanttccgtgacggtagtttacacgggtnttgnaaggtngtanataaaggggggtttatggcaagttttgcaagtggtncaaaaaatcanggggggnaacttttaaacataagggtttgggcccaattnatttnnggaaatncccagtttnaggtaggagcttnttttngtt

SEQ ID NO: 93077 - DNA, 1054 bp, Arabidopsis thaliana columbia
  unsure (1)..(1054): unsure at all n locations
ttaggtgccactatagaagagctatgacgtcgcacgcacgcgtacgtaagctcggaattcggctcgagttctgaggagtgagtaatctccggcaccgaggaacaaagatggcttctttcacaaccaacagtctcgctcttcgcgcttcaattctcgcaaaccctagactacctcctccgatcatccgtccccgtctctctcttccccgtaaactctctttcaatctctccctccataacgctagaaccatcgtttcctccgccgttacctcctcgtctccggtactctcctctaaacccccttctcaattccccttctccgactcaactagatcgatcaccaccctcgtgcttctagccggcgtcgtaatcaaatctctaattcagaagctctctgtcgcaattgtgaacctatctccacagattcaagcatctttccgaacagcaagtccgttgttcttcgcgtcgctccgtgatcgacccgccggttatctgaacactccgttgacggtagttgcagccgggctatcgaaatggctcgatatatacagtggtgttctgatggtcagagttttgctcagttggttcccaaacattccatgggatcgtcagcctttgtcagccattagagatctgtgtgatccttatcttaatctcttcaggaacattatccctccagtctttgatacgcttgacgttagccctttgcttgctttcgccgttttgggaactctaggttcgattctcaacaacagcagaggatagtcaatagccactacttactctgctttgagtgatgatgcaaaggttatggatcgtattccgtttatctttggcgtttatattgtctatagttatagcatttggaagtatttataaggtaatgatgtattagactctaaagtttcagtctttacttctgttatgtgttatttatgtaaatgcacgaatatggtttcaataatagaactggagtttcgaggnnnnnnnnnnnnnnnnnnnnnnnnnnnnnnnnnnnnnnnnnnnnnnnnnnnnnnnnnnnnnnnnnnnnnnnn

SEQ ID NO: 93078 - DNA, 721 bp, Arabidopsis thaliana columbia
aatttagaactttgaaggaagaaaaaggtattccgacgggcgaaatctgttggcgaaatcgaaaatgggttcgatgaaattgggggtttagggttcatcaaaatttgtcgaaacaacaacagagaaagagagaaatggggagtttagtgaaagcatattactgtaaccagatgcatcacaacagcatcatcccccactttcaccattacagaccttcaagccttcaaaaccctatctccctcttcgccatcacttctccctcctcctctgaacctccttctcctcctgttaaacatccccttcctcaattcggcggcggcggccacttcatcatccccaccatcgccgtcgctgcttccgcctggttcttcttccgtctacaccaataccctcctatcatcacctcccccgttgatctccacctcgattttggagaagaaggcgcttttaaagggcttcctttggagagcaagcctggttacgttaaagctcttcacttctacaaaatcaagccaggtaccgtcttgaaactcttggacgttttcgactccgacagctacgactccttgaaagcccggattcgtttatccgccgagtggttagaaactgccaggagagaattggaggaggtggttgagagagaccctggtcgggtcatggagtattctcaggtggttgatgagctcatggagattctcaaggacatggaggtttacattga

SEQ ID NO: 93079 - DNA, 396 bp, Arabidopsis thaliana columbia
catcgccgacacttcaagaaaaattaaagaaaagaaagtaaactctttcaccaaaaaaaataaaggaaatttattgttccatctttctgataatcggatcttacagagagagagctccatggatcgccgcatctatggtggctccgccgtcattcatctctttctcttcttctccgtcctaatcttctccgccgcatctgcattatccaagaaccagtctccttcttccgggtcgggtcagatcaactccaactctgtcctcgtagctcttcttgactctcgttacactgagctagctgagctcgtcgagaaagctcttctccttcagacacttgaagacgctgttggtcgtcacaatattaccatttttgctcctcgcaatgaagctcttgagcg

SEQ ID NO: 93080 - DNA, 513 bp, Arabidopsis thaliana columbia
tgctcttcctatatctgaagttaagaatgggcatactccaagcatctgaaaagaaaaaagatgtcttggtggtatgcggagaaacaggctctggaaagactacacaggttcctcaatttatattggatgatatgattgattcggggcatggtggatactgtaatatcatatgcacacaaacctcgtcggatagcggctatctctgttgctcaaagagttgctgatgagcgttgtgaatcctctccaggcttagatgactcattggttgggtatcaagttcgtcttgaaagtgcaaggtctgctccttaattttgagatttttttttgtattgttttacgagcttattagattttactgtattcggcttctatgcatttccattgctactgtcctcaaggacccaagttaaatgatcatggaattctatcaaacccaaccccaaagggcgaccgctttagaggatccaagcttacgtacgcgtgcgtgcgacgtcaaaatcttgtaagtgtcac

SEQ ID NO: 93081 - DNA, 494 bp, Arabidopsis thaliana columbia
cagagatagaagaaacagattatccttttgacatggctaaggaatctgaagcagttaacgataaattaaaaggcttgcctcgtggaatcatacagtctagatcagatcttgaattaaagcctctctggtctagaggtagtctgaggtcaaagggtgtggaaatgactaaccgtaacttgttggcaatacccgtaggacttaagcaaaagggtaacgtcgacgctcttgtaaagaagtttcttcccgcgaatttcacgattgttcttttccattatgatggaaatatggataaatggtgggatctggagtggagttcaaaagccatacatatagttgcacaaaaccagactaaatggtggtttgcaaaacgattcctccatccggatgttgtatccatttatgattatatttttctttgggacgaggatcttggagtagagaatttcaatccagagagatatttgaagatagttaaatcagtgggactggagata

SEQ ID NO: 93082 - DNA, 390 bp, Arabidopsis thaliana columbia
agtgagaatccaaaaacgtcttatggtttagctctcaaatttctccttcgattccatcttcctccggcttcaagtcgccggatcttcttgatttccgattcacttggctttcctcttctcttccttttaacacacgacgacgcttcatagttttttgttgtgattcaggaagaggtatgtaattcaggattttccggtgattttggtgggaacgtttggagaaatttcgagcttagtagtattcgtaggaaagttttcttcttttatgatttgtagtttttgtggattaatggttgaaggtgagaaatggggcttcgatggatttgaaaagattttgtatcttcgtggaaatgagatcgttggagattgcagcaagtcatctcattcgta

SEQ ID NO: 93083 - DNA, 641 bp, Arabidopsis thaliana columbia
aggctcaaaatgataatcacaatgccaatcttctcattttgcaaataaagaaaagaaaataataaaaattgattactagttttgagtattgacaaccttaataagcaagcaacaacaggcttgaatgcaatgacgtggtcatgattaaggaaaacagcggttggtccaaatcggaacacttgtcctcgtaacaacttcaaaacctggtttgacttatattacagtcctcactcatcacggaaccacgccgaaaattcatggcgaagactagcattttggcagctctaccctttaccaacttcgaattcccgtcgctgttccgggtcaagaactcttcgattatcagtttcagcgaaacccattttctccgacaatcaatttcgaccgcaatcgtaagatctccgactaagaggggaattgggtccgtctaatgttcttccgtcacggacgaagctttttctgaagagctacaagttcgaaccttgacatggaagtggaaaggttattcgataagatatcaatgtgctggaaccagtgcccctgctttgtcttggtcatggttcgtgctacagtgccatggaggagacacactatcttggaacacatggtgactcatcactatcgtatgtctcgtaacgatc

SEQ ID NO: 93084 - DNA, 578 bp, Arabidopsis thaliana columbia
cggtattgaagggccggcccacgcgtccgcgatcagatttttttttgctttcaccgttcataacttctcagaaaggaagagcttgtgcgtgtacggttctcttctccgtagattgacttgctctaatgatggaggtcatattatggaacgacaaacgcgagagagagatgtatgagaattttgcagagctttttgcaatcatcaaagccacagagaagctagagaaagcttatataaagagacctaatcaatccttcagagtacgaatctgaatgccagaaactcattgtccacttcaaaactttatccgctacactcaaagacacggtgccaaacattgaaagatttgcagacacatacaaaatggactgtccagctgctctataccgcctggtgacatcaggtcttcctgccacagtggaacaccgagctaccgttgcggcatctacgtcgaactctgcatccattgttgctgaatgtgtacagaatttcatcacttcaatggattctttgaaactaaacatggtggctggcgatcaagttatcctctcttgactgatctatctgcttctctcaac

SEQ ID NO: 93085 - DNA, 486 bp, Arabidopsis thaliana columbia
gcttcctcttcctctgagaaatcaaatcactcacactcccaaaaaaaaatctaaactttctcagagtttaatgaagaagcgcttaaccacttccacttgttcttcttctccatcttcctctgtttcttcttctactactacttcctctcctattcagtcggaggctccaaggcctaaacgagccaaaagggctaagaaatcttctccttctggtgataaatctcataacccgacaagccctgcttctacccgacgcagctctatctacagaggagtcactagacatagatggactgggagattcgaggctcatctttgggacaaaagctcttggaattcgattcagaacaagaaaggcaaacaagtttatctgggagcatatgacagtgaagaagcagcagcacatacgtacgatctggctgctctcaagtactggggacccgacaccatcttgaatttccggcagagattacacaaaggaattgg

SEQ ID NO: 93086 - DNA, 773 bp, Arabidopsis thaliana columbia
atcacgtttctctcactctctctccttcgcttgtgtgtttaagctaagccgttagtcgttaatcatctcgtatcctaaaacgccgtcgttttagctatggcgttgagctcagctacgcttagacttacctctctgtcgttctcggcgaagaagacgaatcgaaaccctagaaatccagctctctccttcaccatcactagctcatcgtcctttgacgaatcacccaaaccttcttctctcgccacttcctcttctacgtcacctattcgcgtctcctctagttctacccccaaagctcgattcatcgctcgtcagaaacaatccgtctccgttcgtcagctacagcgacctctaattgagtatatgagcttacctgcgagtcagtactcggtgcttgatgcggagaggattgagagagttgatgataacacgtttagatgttatgtttatacgtttaaattcttcaactttgaagtctgccctgttttgcttgtcagggttgaagaacagcctaatggctgctgcatcaagctcttgtcctgcaagcttgagggatctcctgttgtggttgctcaaaatgacaaatttgatgcttctatggtgaaccgggtatcatgtgatagcactcaggagggctcatcagagcaacaaattacttcagatgcagtcattgaggtcaatatcgagattccttttgcatttagagtcttcccagtgggagcaatagaggcgactgggacacaagttcttgatcaaattcttaaactcatgct

SEQ ID NO: 93087 - DNA, 623 bp, Arabidopsis thaliana columbia
gagagaaagttaaagctttcttctgtgcatgtggtgagagaagaagaaatagaaaagttcggattttgatctgtgtggttggattgttgcaagaactaaaccagacccacctttcaaaactttgtccctaacgaacaacattaatcattcattctcctgtgtgagctcttcctcttcttctgtttaaggttctttctccttcttcttttgagggggtttaaagcttcagtggacgaaaagagtttgttttttgggtgacaatgggaggagtggtgcatcttagcacggcgaagttagctagaggtttcttagtgtgtttatgtctttggggttttttctcgctatcatacgccgcaaggtccggcgtatcaaagcagaagtttgaagtgaagaaacatttgaacaggctgaacaaacctgctgtcaaaagcattcagagttcagatggtgatgtgattgactgtgttccaatctcaaagcaaccagcttttgatcatccgttcctcaaagatcacaagattcagatgaagcctaattaccaccctgaaggactctttgatgacaacaaagtgtctgctcctaaatcaaatgagaaagaagggcatattcctcagttgtggcat

SEQ ID NO: 93088 - DNA, 896 bp, Arabidopsis thaliana columbia
  unsure (1)..(896): unsure at all n locations
gtctctctctctctgataaaatcttaaacccacctcgagatcatagtcttcatcaattagccataaaaaagcacaatgctttcttcaatcaaaccatcttcgtcttccttctccaccgctatctccggcagcgtaaggcggtcaattcctacgacgctcaatttttctcctttacccatcatcaaaaactgccataaccaaagctttcactctaatgttgtctcccatcaaaagcctctacacatttcatctgcttcgaatttcaaacgtgaggtcaaagtcgaagcttacgaggcagatcgatcccgtccactggacatcaacatcgagcttcccgatgaacaatccgcgcagaaactgaaaatcggaatctacttcgcaacttggtgggcacttaacgttgtcttcaacatctacaacaagaaagtcctcaatgcttttccttacccgtggcttacttcgacgttgtctctcgcttgtggttctttgatgatgcttgtctcttgggctactagaatcgcagatgctcctaaaactgatctcgagttctggaaaactctgttcccggtcgctgtagcacacacgataggacacgttgcagcaacagtgagtatgtcaaaagtagcagtttccttcacacacatcattaaaagtggtgaaccagctttcagtgtcttagtctcaagattcttcatgggagagactttccctcttcctgtctatctctctctcttaccaatcatcggaggctgcgctctcgcggccatcaccgagcttaacttcaacatcactgggtttatgggggcaatgatatcgaatttggncattgtgttccggaatatcttttcgaagaaagggatgaaaaggaagtcagtgagcggaatgaactactacgc

SEQ ID NO: 93089 - DNA, 517 bp, Arabidopsis thaliana columbia
aaatcgccagaagtgacgaaattgaaaatctcagatttctcttaatcggcgacggagtaacgaaacaaggagaagaagaagaagaagaaaatgacgactcgaatcgctcctggtgttggagctaatcttctcggccaacactccgctgagaggaaccaagacgccactgtttacgtcggtggtctcgatgctcagctttctgaagaattgctttgggaattgttcgttcaagctggacctgttgttaatgtctatgtaccgaaagatagagtgacaaatcttcatcagaactatggattcattgaatatcgtagtgaggaagatgctgattatgcgattaaggttcttaacatgattaagctccacgggaagcctatacgggttaacaaggcatctcaagataagaagagcctggatgttggtgctaaccttttcattggaaaccttgaccctgatgtggatgagaagctattgtttgatactttcagtgcatttggtgtgattgcttctaatccta

SEQ ID NO: 93090 - DNA, 937 bp, Arabidopsis thaliana columbia
  unsure (1)..(937): unsure at all n locations
cagagatctgacggcggtagcagagtaatctattccttcccaaaatgtctcgcaattagattctttccaagttcttctgtaaatcccaagtcccgctcttttcctctttatccttttcaccagcttcgctactaagacaacaaatctttccctctctctctcgcctgatcgatcttcaaagagtaagaaaaatgcaggaacaagcgactagctctttagctgcaagctctttaccatcaagcagcgagaggtcatcaagctctgctccacatttggagatcaaagaaggaattgaaagcgatgaggagatacggcgagtgccggagtttggaggagaagctgtcggaaaagaaacttccggtagagaatctggatcggcgaccggtcaggagcggacacaggcgactgtcggagaaagtcaaaggaagcgagggaggacaccggcggagaaagagaacaagcggctgaagaggttgttgaggaacagagtttcagctcagcaagcaagagagaggaaaaaggcttacttgagcgagttggaaaacagagtgaaagacttggagaacaaaaactctgaacttgaagagcgactctctactcttcagaacgagaaccagatgcttagacatattctgaagaacacaacaggaaacaagagaggaggtggtggtggttctaatgctgatgcaagcctttgatctccttcttcttcttgtgttatatttttgtggataaaatttacagagaattgtatcaataattatcatgttaaaattatatgggatgtgagagctaatattgcaattgtagaccaagttctcttaaaaaaaaaaaaaaaaaaacgcggccgannnnnnnnnnnnnnnnnnnnnnnnnnnnnnnnnnnnnnnnnnnnnnnnnnnnnnnnnnnnnnnnnnnnnnnnnnnnnnnnnnnnnn

SEQ ID NO: 93091 - DNA, 588 bp, Arabidopsis thaliana columbia
aaggaaaactcgtaatgggataccgtaaagcgacgaactctacagcgacacagatgttcaagggaagcagtgaacccaatctgaacatgttttccaacagcttgaatccgggatgtggtgacatcaattggtctaaactagagaagtctgaggacatggcaaaggataacttatttcttcagtcgtccttaacttcagctaggaaacgggttcggaacattgggactaagagcaagcgtctgctcattgatagcgtagatgttctggaactgaaaataacttgggaggaggcacaggagctgttgcggcctccccaatccaccaaacccagcatctttacgctggaaaatcaagattttgaagaatatgacgaaccaccagttttcgggaagaggaccctttttgtctcacgtcaaacaggggaacaagagcaatgggtgcagtgtgatgcttgtgggaaatggcgacagctgccggtggatatttttcttccaccaaagtggtcgtgctctgataatctcttggatcctggcaggtctttcatgttcccgcacctgatgaactctctccaagagaacagtgatacac

SEQ ID NO: 93092 - DNA, 532 bp, Arabidopsis thaliana columbia
  unsure (1)..(532): unsure at all n locations
ctaacccaaatnccanggggttgntcctaaatccaaaattcacacctttggttctcaaatccaaaaaccccacactcaaaggcttcttaatatgaataacttgatgcctcccttgagccaaccccccaatccgacaaccagcttgaacaatgaaactccttatgaaactgctgcataccatctaagtagccaaaccttaccttaaattagtttctccaatgcaggacaaggtatcttctggaatcaaactcgaagagagaaagaagaagaaataaatccaaatcaaatcaaggatctgtggtggaaacggaatcctagtattttttctgacaaaaagaatcgaatcggatcggaaaacacacggtggttgatctgaccacggatccgaatctgagagagagtgaagaaaaattggctgaacgaatcagctttttggagcttccatggaatctgagagagaatccaagagagatggagggagagagagagagagtggtggtgagtagtgaaagagagagaggacaccgaacag

SEQ ID NO: 93093 - DNA, 513 bp, Arabidopsis thaliana columbia
cacatcatcacacatgtttagtttaggtaatacatacaaggtatatcgagtcttaacaaaatttaacaaaattttcgtacatgttcgagcctatgtgatttatttaataggcattaaatagaaataaagcttttaataatttcaatcacgtgtgaagcggcgattgaattgcgaacggtgatgagatgcatttctattttctgatctattttttctatgaacaagtcaaaagtctttctaatagaaaaagggaaaaagaaaaataattttaagtaatttagtccaaaaaaaagaaaaatctataatgagaattatgctaaaaatagttttttcttatctaaagctcctatatttgactatcaaccaaggattcaaagttttactaattaggacaaagtctttgaaaacatttcgtagattagagtgcttttttaagaaaaaatattcttcggtgagatttttcagtagaatagactggtcaatattaatttatataatcccaatatatataac

SEQ ID NO: 93094 - DNA, 614 bp, Arabidopsis thaliana columbia
  unsure (1)..(614): unsure at all n locations
atcagtgtggctgttgcatccgctacacagattaacgagaaagaccactggtatagacttggagtggaggctcttcgccaaggtaattctggaattgttgagtttgcataccagcagacaaagaactttgagaggttatcttttctttatctcattactggaaatttggacaagctttcaaagttgatgaagattgcagaagtgaagaacaacgtaatgggtcagtttcacaatgctctctacctaggagatgttaaagagcgtgttaagatactggagaatgctggtcatttgcctctagcttatatcacagcttcggttcatggtttaactgacattgctgagcgactggcaactgagctaggagacaacgtgccctcattgcctgaagggaagactccatcgcttctaatgccaccgtctcccatcatgtggtggtggtgattggcctcttctgagacgtgatgaaaggaatattttgaaggaggacttgaagagtgcaaacagaagngggcttgttnnntgaaagaagaaggangnatntttgaaagnccgacttggggttnagggggcctttgccaaatttcctntttttcaattgaattgttggncca

SEQ ID NO: 93095 - DNA, 850 bp, Arabidopsis thaliana columbia
  unsure (1)..(850): unsure at all n locations
gatttccgaagatcatcaaatccaaaaccctagaaaccgaacaaaagctagcagaagctaggactattcaatggcgtcgaaaagaattaacaaagagcttagggacttgcaaagagatcctcctgtgtcctgcagtgcaggtcctacgggagatgatatgttccaatggcaagcaactatcatgggtccagcagatagcccgtttgccggaggtgtgtttcttgttaccattcacttcccaccagattaccctttcaagccaccaaaggttgccttccggaccaaggtttatcacccaaacatcaacagtaatggaagtatctgttttgacattctgaaagagcagtggagccctgcacttaccgtatccaaggttcttctgtcgatatgctcattgctgacggatccaaaaccctgacggtcctttggttcctgaaatagcgcacattttcaagacagcccgagtcaagtacgagtccacagctcaatcctgggctcagaagtttgcaatgggatgataacaagcaataatacccaccaccagtacattgcgtatttaccaggagaaataagaaagaaagaaaaaaactcagtttggcttttactttggctacttttgcttattagttttttttttttttaattatatccttgaagcttgtgtgcttgggtgtgtacatgagctttatgccttattttgaaacattgggatcttgcaaatgcttttaagccaataatccgctnnnnnnnnnnnnnnnnnnnnnnnnnnnnnnnnnnnnnnnnnnnnnnnnnnnnnnnnnnnnnnnnnnnnnnnnnnnnnnnnnnnnnnnnnnnnnnnnnnnnnnnnnnn

SEQ ID NO: 93096 - DNA, 494 bp, Arabidopsis thaliana columbia
cctgcgctgcaggagttcgggacgaggaagatcaaacacgtcttcttttctctctctctctttgtcgcctaaaattccagaatcactctgctttttacccttttaatcaatgatttttccttttagtagcaatcgttggtgattcgaaaaaccaaacttttctcggactaggattctagggttttagtgatcatctgaatattcatggcaaaccctaagctcactagggttctaagcacaagggatcgcgtgcaagacacgctttccgctcaccgcaacgaactcgttgctcttctctccaggtatgtggatcaggggaaagggattcttcaaccacataacttaattgacgaactcgaatctgttatcggagacgatgaaacaaagaagagtctctctgatggtccttttggagagatccttaaatcagcaatggaagctatagttgtaccaccttttgttgcgttagccgttagaccaagacctggtgtttg

SEQ ID NO: 93097 - DNA, 1678 bp, Arabidopsis thaliana columbia
  unsure (1)..(1678): unsure at all n locations
ttcttctaatagacttcttcgtcactgatctcccacgacgatctcccaaactcatttctctacgttcatcgatctctctctttctcgtttgctctacgaaaatcagccatggatgaagagtacgaggttattgttctcggcaccggtctcaaggagtgtatcctcagcggtctcctttccgtcgatggtgtcaaggtgcttcacatggacaggaatgactactatggtggagaatcaacttcccttaatctcaatcagctttggaagaagttcaggggagaagagaaggctcctgagcatttaggcgctagccgggattacaatgttgacatgatgcctaagtttatgatgggaaatggcaagcttgttcgtacccttattcatacagatgttacaaagtatttgtccttcaaagctgttgatggaagctatgttttcgtcaaaggaaaggttcaaaaggtgccagctactcctatggaggccctgaaatcttctctcatgggcatatttgagaaacgtcgagccggcaagtttttcagttttgttcaagaatacgatgagaaggacccaaaaacacacgatggaatggatttgaccagagttacaacaaaggaactgattgcgaaatatggtcttgatggcaacactattgactttattggtcacgcagtggcacttcacacgaatgaccaacatctcgaccaacccgcctttgatactgtaatgagaatgaagctctatgcggaatctcttgcacgtttccaaggaacatctccatatatttatcctctctatgggttgggagaactaccccaggcatttgcacgacttagtgctgtctatggtggcacatatatgttgaacaaacctgagtgcaaggtagagtttgacgagggaggtaaggttattggtgtaacatctgagggagagactgctaaatgcaaaaagattgtgtgtgacccttcatacctgccgaacaaggttaggaagattggcagggttgctcgggccatcgccattatgagccacccgattccgaacaccaatgattctcactcagtgcaggtcatcataccccagaaacagttggcccgcaaatcggatatgtatgtcttctgttgttcgtactcccacaacgttgctcccaagggaaaattcattgcatttgtgtctacagatgcagagactgataaccctcaaaccgaactaaagcctggaactgatcttttgggtcctgttgatgagatattcttcgacatgtatgatagatacgagcctgtcaacgagccagagttggacaactgctttatatcaacgagctatgatgctacaacacactttgagacaactgttgcggatgtgttgaacatgtataccctaatcaccggaaagcaactggacctaagtgttgacctgagtgccgcaagtgctgcagaggaatgaagaatcatcaccagatcgctccctctctagttgattttctaaaagcttgttttgctcatttctctgtttccgactcttgctttcgtgttcttttttggtttgaactttgaatacaaaatcagaatgatccttcatgttttagaaactaacaaccatgtgtctccgtttgatgttggattcctcggttaaagacttataaatgctctttaaaactcaacnnnnnnnnnnnnnnnnn

SEQ ID NO: 93098 - DNA, 1740 bp, Arabidopsis thaliana columbia
  unsure (1)..(1740): unsure at all n locations
ggcacgagcaatcaccgccgattctctctctctctctctcgagtctctcgacggtcgcatatcaaaagtccatttctttcttctctttggaggatcagcaactatggatgaagagtacgaagtcatagttctgggtactggtctcaaggagtgcatccttagtggtcttctctccgtcgatggtcttaaggtacttcacatggacaggaatgactactacggtggagagtcaacttctcttaatctcaatcagctgtggaagaagttcaggggagaagagaaggctcctgctcatttaggttctagcagagactacaatgttgacatgatgccaaagtttatgatggctaacggaaagcttgttcgtgtccttattcatacggatgtgaccaagtacttgtcttttaaagctgttgatggaagctatgtttttgtccaaggcaaggtccaaaaagtgccagcaactcccatggaggccctcaaatctcctcttatgggtatttttgagaaacgtcgagctggaaagtttttcagctatgttcaagaatacgacgagaaggacccaaaaacacatgatggaatggatttgaggagagttacaactaaggatttgattgcgaaattcggtcttaaagaagatactattgactttattggtcatgcagtggcacttcactgtaatgacaatcatctccatcaacctgcctatgatactgtaatgagaatgaagctctacgcagagtcccttgcacgttttcaaggaggttcaccatatatctatcctctctatgggttgggagaattgcctcaggcatttgcacgacttagtgctgtctatggtgggacgtatatgttgaacaaacctgagtgcaaggtagagtttgacgaggagggtaaggtttctggtgttacatctgagggagagactgccaaatgcaagaaagttgtctgcgatccttcttacctaaccaacaaggtcaggaagattggcagggttgctcgggcgattgccattatgagccaccctattccaaacaccaatgattctcagtcggtgcaagtcattctaccccaaaaacaattgggccgcaaatcagacatgtatgtcttctgttgttcatattcacacaacgttgctcccaagggaaagttcatagcatttgtgtcaacagacgctgaaactgataaccctcaaaccgagctccagcctggaatcgaccttcttggtcctgttgatgagctgttcttcgacatctatgatagatatgagcctgtcaacgaacccactttggacaactgcttcatatcaacgagttatgatgctacaacacactttgacacaactgttgttgatgtgttgaacatgtataaattgatcaccggaaaggaactggatctaagtgtggatcttaacgcagctagtgctgcagaggaggaatgatggaaaatattgcaagctctgtctctctctgttagtcaccaaatgatgtaaccggttctctttctccctcttcttaaaagttgtctcaccaaatgttctgttaaaatactaaatcaaaccgatctcatcatgcgtacctattcccggttatcgcagtctgtttttttcttctcaaaaaactaaaatgttggatttcgtggtttttgtttggagtgtctaatatatcatcatgctcttccgtttgagcnnnnnnnnnnnnnnnnnnnnnnnnnnnnnnnnnnnnnnnnnnnnnnnnnnnn

SEQ ID NO: 93099 - DNA, 466 bp, Arabidopsis thaliana columbia
gacgacgaaagattatatactggacgaagcattgagcttcacatcgagccacttggagtcactagctgcaaatggggcgtgcccgcctcatatgtcaaggcgtatacgaaatgctctcaatgcatctcagcattggaacatggagatgctagtcgctgtggaatatatatcattctacgaaaaagaaaaagaccacaacgagatgctactcaagttttctaagctcaatttcaagtttctacaactccaataccttcaagaactcaaagttcttacaaagtggtacaaggaggtagattttgtatctaagttgccaccttacttcagagacagaatcgtcgaaaaccatttctttatacaaacgttgtttgtggagtcacaacaactacgtgcaaggattatgatggctaagtacttcattcttttagtaattcaagatgacaccttggacagatatgcgtccctt

SEQ ID NO: 93100 - DNA, 929 bp, Arabidopsis thaliana columbia
gcagaaacagcaggaaggaacagatggctccaatcttccatcacctcagtttaacaacaacatgcttcctcctcctcctcctaacagatatgccaacgttcaagcatccacagttgtagacgcaatggtggactcctcaaacgcttacagttccaccactggtgctccaccagcaaagcccacctccacgttatttgatcccaacagcaacaacactgagaatccaaatggtcctggcttcaagccaccacaacaacaacaacaacaatcttctcaggagaagaacacgcagtctcagcatgttggtgggcccagccaccaccaccaacaccagcaccatcaaaaccggagatcgggctaccatggcagaaaccaacccatggccagagagagaggctttccgaataacccaaaggtcaagcaaatctatgtggctaagcagactggtaacagctgtgcctctgctttcctctactaccaccaccacttccccctcaatttaatgattcttcaccatccaggtccgttcagatataaactcatcccaataacccaaccagctttggcttcataagaagatttggactttttttcctttcaattttcccatatatcaattagcttcctttttttctactttttatcctcgttagataattagattttgttctctttactcgtttggggattcattatatggggactttggtaatgcttaatttcgtcatggttggtaaaaatattgtcgtgaggttttcggtgtagaatacccaattcacggccccaatgtatctgttgtcaacattatctttatagcttctacaaatcagtacacactcttattaaaagaaaaaaaaaaaagggcgaccgctctagaggatccaagcttacgtacgcgtgcagtcgacctcataactcttctatagtag

SEQ ID NO: 93101 - DNA, 1023 bp, Arabidopsis thaliana columbia
aaatgcgccctcaaggcgttttcccgcccacaaagtggcccccctgggaagtaccgatggagcccgaatccagatcgccgcgaccagccactttttcccatttgtaacaacgaacgacaaacaaccagagactgctaaacaggggaaaaagccaacgctcaagcatcccacagatgcacgacccgatggcggacaccccaaacgcttacagttccaccactggtgctccaccagcaaagcccacctccacgttatctgatcccaacagcaacaacactcagaatgcaaatggtcctggcttcaagccaccacaacaacaacaacaacaatcgtttcaggagaagaacacgcaggctcagcatgttggtgggcccagtcaccaccaccaacaccagcaccatcaaaaccggagatcgggctaccatggcagaaaccaacccatggccagagagagaggcctttccgaaaaaccccaaagggccaaagcaaaatcaaagtgggctaaagccagaactgggaaacaagctggtggccacttggggttaacctcttaactaaccaaccaacccaactttcccccccttcaaaattgggaagggaatatcctttcaacccaaaaaccacaggggccccgggttccaaggcaaaatataaaaactctccatttcctccaaagaaaaaccgcccaaaaccccagagctttttgggggcctttccctttaaaggaaaaggagaattgggggacccctttattattttccgcactttccaaaatgtgttccccccataaataattcaaggttgagggcccttcacctttttcacatcaccttgcccactgctaaaccccccgcggttgggaaaaaactcaggaaatttggggggcccccctttaacccccgcagttggggggggatatcaaataaaaatgggggggaccctctggggaaagcggccaaaaatatcccacaaagggggggggaaaaaaaaaatgggccgggaggggttttcgggggggaaaaa

SEQ ID NO: 93102 - DNA, 995 bp, Arabidopsis thaliana columbia
taacggcgtcagacgccgtgaaaaggccgagagtggtgacgagcgagagaacaacgacgtcgttttcaaacgaggttcacggcgacggcgccgtcgatgtcctactcctacgctcatcctttcactcaaaagattagctgcgcgatgactcgaaactccacagatttcgattgctccgttggtaaagacgatcacatctggtgcgccggcgaacgaaccaacggatctgttcatagccgattcagaccaatcggtgacggcggcgtagcgctcgcgaacaatccagtttccggtaaaccttcaagctctgctgattactctttctttccctcggagttaccggctcggccggggaatgaagtcacgatctccggcgattcgaggaagaaagtagctaacttggaagataacgatgcggttagatcggggagggtgttatacgacatcgggtcgaaatcgatttcttctgtggctttgattattcaagggatggctgatgaaactctagaatcagctaaagagtatctaaggaacttgattgattcaccggagaagaaggagaagctggtgaatcttcagaaccagattgataaaaggtctgatcttagtaaggagacgttatcgaaatgtgttaaagatcagcttgatatcttggtagctgtaagaacagggcttaagtatttcctctctggtaagatcagaatccctatgaacgaattggtagagagctttctcttcttgagatgtaggaatgtgaattgtaagagtctcttgcctggtgatgattgtgaatgcaagatctgttccaacaacaaaggcttttgtagctcttgtatgtgtcctgtttgtttgagatttgattcagctagcaatacttgtagttgggttggttgtgatgtgtgttcgcattggtgtcatgctgcttgtgggattcagaagaatttgatcaaaccgggacatagtttgaaaggtcagagaggtactactgagatgat

SEQ ID NO: 93103 - DNA, 460 bp, Arabidopsis thaliana columbia
gttcttatcacattattcttaaaatgcattcgttatgttatgtgaatgcactagccaaaaataaataaatgcaactaccatcattggttaatattcatgaaactttttttttttttcatgaaacttatatatctattaaaagtttaaaaccttattatacgaaatgtttgagaatctattatctgtcaccacccgtttgtgaccagagagtagatttctaaagtgttttggataagtttagtgttttagagtattaaaaaatttagaagcacttttcattagactctatatatgacatatctataataatattcctgaatttgaatttagcatctacttatatcgcataactcatttatggtactgaaatttagtggaaaacagctagtaaaagagaagtattggtgtgataaattaagctcagaggcttatgttaagttaggattccttaactgatttt

SEQ ID NO: 93104 - DNA, 470 bp, Arabidopsis thaliana columbia
ccaaattcgagaatacaaagctccagggatcagagctcatatatggcctcttacaagaatctccagtcgtattcatactctccaattgttggcccagctttgaaagcaaggctgcatttgctgtggctgagaagcttgtgcgagagatagaagtgtctcattgggggaatgtgcaggtcacggagaattacaatgttgtccaccgtggggctcaactcaagggcgagttttcaaggttagattttcaagccagacctaatccccgtggagcatctgcctttaggcatttacttgctagattaccccccagagcccattccatatattacagggatgatattggaaatatctccacgtctgagatgaaaagtgattcgaaaaagacagagctactaattgagcctaggtttcctttgtttggtgggtggaaaacttttttcacgataggttatggtttgccacttaccgac

SEQ ID NO: 93105 - DNA, 464 bp, Arabidopsis thaliana columbia
acttatttaataaggtcgattggtttatgcgaattgattttctgttacgataaattgacgagactatagctaatccaatagctgcttcagcggctgcaattgctataacaaaaatgcagaaaatttccccttttagttgggaattatcaaaaaaatcagaaaatgttacgaaattcatattaactgcattgagtataagttcaagacacataagagccctaaccatatttcgacttgtgatcaatccataaagaccaatcaaaaataaataggcactcaaaacaagtacatgttcgagtatcattcagcaactccttatcaattttgattcatttcaatatgaaaaataattcaccggattccatcaactagaatataacaaaaaagtacgaataaaaaaaatatttaggtaaaaaaaattttcaaatatatatcaaatacaaatatatatcaaatataaaaat

SEQ ID NO: 93106 - DNA, 4485 bp, Arabidopsis thaliana columbia
agagagtcgatgtcgtggaactaagttctggtttggttttatgctatgggtgagaaagcgattgacgaagacaaagtagaagcgatgaagggcagcaagacctctcttgttttcgccattaacggacaaagattcgagctcgagctctcttctattgatccttccaccacactcgtcgatttcttgcgcaacaagactcctttcaagagcgtcaagcttggttgtggcgaaggtggttgtggcgcttgtgttgttcttctttcaaagtatgatccattgctcgaaaaagtcgatgaattcacaattagctcgtgtctcacgcttctctgtagcattgatggctgttccatcactacctcagacgggctcggcaacagcagagtcggtttccatgccgtccacgagcgtatcgccggttttcatgccacacaatgcggtttctgtactcctggaatgagcgtttcgatgttttctgctctcttgaacgctgataggtctcatccacctcctcgcagcggtttctcaaatctcacggctgtagaggctgagaaggctgtgtcagggaatctttgccggtgtactggatatagaccgcttgtggatgcttgtaagagttttgcagcggatgtggatatcgaagatctcggattcaatgccttttgcaagaagggagaaaacagagatgaggttttaagaaggttgccatgttatgatcatacatcatctcatgtctgtacatttccggagttcttgaagaaggaaatcaagaacgatatgagtcttcattcaagaaagtatcgatggtcaagcccggttagtgtctcagagcttcaagggttattagaagtcgagaatggtttgtcggttaagttagttgcgggtaacacgagcaccgggtattacaaagaagaaaaagagaggaagtacgaaagatttatcgatatcaggaagattccggagtttactatggtgagaagtgatgagaaaggagttgaattaggagcttgtgtcactatatcgaaagctattgaggttctaagagaggaaaaaaatgtttctgtgttggcgaaaatacgctactcatatggagaaaattgcaaacagattcgtgaggaacacgggaacgataggtggaaacattatgatggctcagagaaaacagtttccttcggatcttgcaaccatacttgttgctgctcaagcaacggtgaagatcatgactagcagctcgagtcaagaacagttcacattggaggagtttctacaacaacctcctcttgatgcaaaatctcttcttttgagcctcgagattccatcttggcactccgcgaagaagaacggttcttcagaagatagtattttgctatttgaaacttacagagcagcgcctcgtcctctaggaaacgcattggcatttctgaatgcggctttctcagctgaagttactgaagcacttgatggcattgttgtaaatgattgccaattagtttttggagcttatgggaccaaacatgcacacagggcaaagaaagtagaagagtttcttacaggaaaagtgatatctgatgaagttttgatggaagctattagcttacttaaagatgagatagtacctgataagggtacttcgaatcccgggtatagatcaagcttggctgttacttttctcttcgagttcttcggatctttaactaaaaaaaacgctaaaacgacaaacggttggctcaatggaggatgcaaagagattggttttgatcagaatgttgaatctttgaaacctgaagctatgctgtcatctgcacaacaaatagttgaaaatcaagagcatagtccggtcgggaaaggcattacaaaggctggagcttgtctccaagcatctggtgaggctgtttatgtagacgacattcctgctccggaaaattgtctatacggcgcatttatttacagtacaatgccgctagcgcgaattaagggtataaggttcaagcaaaacagagttccagaaggagttcttggcattattacttacaaagatattcccaaaggcgggcaaaatatcggtaccaacggtttctttacctcggatcttttgttcgcagaagaagtcactcattgtgcgggtcagataatcgcctttttggttgcagatagtcaaaagcatgcagatgttgcagcaaatcttgttgtgatagattacgacaccaaagatttaaaaccacctatactgtccttagaagaagctgtcgaaaactttagccttttcgaggtccctccacctctgcgtggttacccggttggtgatatcaccaagggaatggatgaagctgaacataagattcttggatcaaagataagtttcgggtcacagtacttcttctatatggagacacaaacagctcttgcagtgccggatgaagacaactgtatggtggtttatagctcgactcaaacccctgagtttgtacatcaaaccatcgctggatgtcttggagttcctgagaacaatgtgcgtgtcatcactagaagagttggaggcggattcggtgggaaagccgtgaaatcaatgcctgttgctgcagcttgtgcacttgcagcatccaaaatgcagcgtcctgtgaggacatatgtgaaccgaaaaacggatatgataactaccggaggaagacatccgatgaaagtcacatatagtgttggattcaaatccaatggaaagattactgctttagatgtagaggtgttacttgatgcagggttaaccgaagatataagcccgcttatgccgaagggaatacaaggagcactaatgaagtatgattggggtgctctgtctttcaatgtgaaagtatgcaaaacaaacactgtgagcagaaccgcgctgagagctcctggggatgtacaaggatcatatataggagaagccatcattgaaaaagtagcttcatatctttcagttgatgttgatgagatcaggaaggttaatcttcatacatatgagagcttaaggttgtttcacagtgccaaagctggtgaattttctgagtatacgttaccattgctttgggacagaatcgatgagttctcgggatttaacaagcggaggaaggtggttgaggagtttaatgcatcaaacaagtggagaaagagagggatttcacgtgtgcctgcggtttatgcagtgaacatgcgatcaacaccgggaagagtaagcgttttgggagatgggtcaatagttgtggaggttcaagggattgagataggacaagggctttggacaaaggtgaaacagatggctgcatattcccttggtttgatccagtgcggtactacaagtgatgaactgcttaaaaaaatcagggtcattcaatccgacacactaagtatggtgcaaggctcaatgactgctggtagtacaacctctgaagcgagtagtgaagcggtaaggatttgctgtgatggcttagttgaaaggcttttaccagtcaagaccgctttggtggagcaaacaggaggacctgtgacttgggatagtctcatcagtcaggcttatcagcaatcgataaacatgtccgttagtagcaaatacatgcctgactccactggcgaatacctgaactatggaattgcagcgagcgaggttgaagtaaacgttttgacgggagaaacaacgatcctgcgtacagatattatctatgattgtgggaagagtctcaatcccgctgttgatttaggacagattgaaggagcctttgttcaaggacttggtttcttcatgcttgaagagttcctaatgaactcagacggtctcgtggtaacagacagcacatggacttacaagatcccaacggttgacacaatcccaagacagtttaatgtggagattctcaacagtggacaacacaagaatcgtgttctttcatccaaagcttcgggtgaaccgccattgcttttagcggcttctgttcactgcgcggtacgagcagctgttaaagaagctaggaaacagatcctgtcatggaatagtaataaacaagggactgatatgtacttcgaattgcctgttccagcaacaatgcctattgtgaaggagttttgtggacttgatgttgtcgagaaatacttggaatggaaaatccagcaaaggaaaaatgtttgatagcttgtgtttgtgttttcgatgtgaatgtaaaattgctctgtttttgtttgtggtttgattcgtttgaagcgtttgatagaatgtttgggattgtgatgtacttgttgttgtaataagctgcatggcaatggcaatggcaatggcaatggcaatggcggtgttctgcttaggaaaaattatgtcgatggcaatggattgtgatgtaattttccattgttgtaataaaaattatgtctttcctgccatattatatatttaggaaaaaattatttaagaggcttctgtttatatgtataatacgatattattttttcctaaatataatatgg

SEQ ID NO: 93107 - DNA, 466 bp, Arabidopsis thaliana columbia
atcaatttgtgtttttctcatactttcattgaaatagccgctaaaacagtaaacacagacctccaaatcctgaagccaaacttttactttctcccgctgccgtctccttgcattgtcacctctatctactacttcttcggaaattagcttgttacattccataacaagttcaccattgcaattttcacaatgaaaagaatcgtcttccatagaaattaatctcagggcatccagtgcattatatctataccagaaatgagaatctatacaggtttagtgaaaataatacaactcaccatgtaaagatttaaaaacataaagaatagtggactttactttcttttgcagttaggacagccatactcctgaacaagtaattctgtcttctagttcatctttgaactttttcttgagcccgggcagtttataacgaacaatatcatatatctgtaagagaggagaagtg

SEQ ID NO: 93108 - DNA, 541 bp, Arabidopsis thaliana columbia
  unsure (1)..(541): unsure at all n locations
gccgagtatttcaattatcatccaccagaaactcttctcctccttcctcccggatcacccaccccatgtgtaccggttagagaaacgcggcgatctcttcctcctaaccctaaccggagacggcgaacacagattccaccccgacacaattgccaccattctctcccttctcgaacaagccaaatctcaatccacccgtggatccatcctcatcaccaccgccaagcggcaaattcttctccaacggattcgatcttgcatgggctcaaaccgccggatccaaaaccggagccgcaaaccggcttcaccaaatggttgaatcattcaaaccggtggtagcagcgcttctcgatctccctatgccgacgatcgccgccttgaacggccacgccgccgccgcgggggttgattttggctttgagccatgattacgtgttcactgcaggaaagatcgtggggttctgtatatgagtgaagttggcatcgggctttgatgccggttatttttcggggttggtagggntaaaatcgggcgngttcg

SEQ ID NO: 93109 - DNA, 741 bp, Arabidopsis thaliana columbia
ttgtaattcgtggtttaattagacaacacctggcttcgaacataggagttgctaagaggggggttcgtgaaaaaaagccgggggtctgggaaatccttcaagaagtcatgcaggggcatcccgtattactgaatagagcacctaccctacatagattaggcatacagtcattccaacctattttagtggaaggacgcactatttgtttacatccattagtttgtaaggggttcaatgcagactttgatggggatcaaatggctgttcatgtgcctttatctttagaggctcaagcagaggctcggttacttatgttttctcatatgaatctcttatctccagctattggagatcccatttcggtaccgactcaagatatgcttattggactctatgtattaacgagcggcactcgtcgaggtatttgtgcaaacagatataatccatgtaatcgaaaaaactatcaaaatgaaagaatttacgaaacaaactataagtatacgaaagaaccctttttttgcaattcctatgatgcaattggagcttatcgacagaaaaaaatcaatttagatagtcctttgtggcttcggtggcaattagatcaacgcgttattgcttcaagagaagttcctatcgaagttcactatgaatcttttggtaactatcatgagatttatgcacactatctaatagtaagaagtgtaaaaaaagaaaatttttgtatatatattcgaaccacag

SEQ ID NO: 93110 - DNA, 620 bp, Arabidopsis thaliana columbia
  unsure (1)..(620): unsure at all n locations
agctctccnnnnnnnnnnnnnnnnnnnnnnnnnnnnnnnnnnnnnnnnnnnnnnnnnnnnnnnnnnnnnnnnccacgcgtccgcggacgcgtgggcggacgcgtggggcttacagagctttctcagaaacgtcaccgtttcttcaattcgtcaacttcacagcaaaccaaacgattctcgagtcattcgaagggtttgatcggatccacattgtcgatttcgatatcggttatggaggtcaatgggcgtctctgattcaagagctcgccggaaaaagaaacagatcttcatcagctccgtcgctaaagattacagctttcgcttctccttcaactgtctccgacgaattcgagctccgattcactgaagaaaatctcagaagcttcgccggcgaaacaggtgtctccttcgaaatcgagctcttaaacatggagattctcttgaatccaacttattggccactgtctttattccgatcatcggagaaagaagcaatcgctgtgaatctcccaatcagctccatggtctccggttacctcccattgatacttcgtttcctcaagcaaatctcaccaaacgtcgtcgtttgctcagacagaagctgcgaccgtaacaacgac

SEQ ID NO: 93111 - DNA, 973 bp, Arabidopsis thaliana columbia
gttctaacaaatggagttcactaccttgtgttcataaaggaatccttcgatcgaaacttcaaatcaaaaaggatgaaggataaaaacctatattgtataaatttaggtaacacaaaacgatctcaaaaatgacgacctgaatctcgatttctatttttttataaacaaaatcaaaatgttgtgaatcaattcgaagtttaagaaataatatttcttgattaaaataaaattattcacttcatagtctgatagatccttgatggaacttaattaatcggacgagaataaagatagagtcccattttacatgtcaatactgacaacagtggaatttatagtaagatgaaaatccgttgacttttaaaatcgtgagggttcaagtccctctatccccagctctactccccgaaaaggttgacaccttacctttttttcgttattatttatttgaattatttataatctatatcatttttcattttcaaacttagaaagtcttcttttatttataaaatccaagaaattcccggtccacaactttttgaatttactacttttgagtttcttttcattgacatagacctaagtcatatattaaaatgatactgatacttcagtagattatacttcggtaatggtacacatagcttaattgcgggggactgaaaatccttgtgtcaccattagtaaaagcaagatgatccttcggtaatggtcgacataccttagttgcagaggactgaaaatccttatgtcaccattagtaaaagcaagatgatacttcagtagatgatacctcagtaatggtcggcatagcttaattgcgggggactgaaaatccctgtgtcacatgataatgatccttcagtaaaggtagacatagcttttttgcagaggactcgaaatcctcgtgtcaccattaggaaaacgagcatgatacttcagtagatgatacttgatacttcagtagact

SEQ ID NO: 93112 - DNA, 655 bp, Arabidopsis thaliana columbia
tacgactcactttagggaaagctgctacgcctgcaggtaccggtccggaattcccgggtcgacccacgcgtccgtgaatctgtagtttcgtcagaaattgatgataatccatatcagacacagagccatccagtagagcaccacaaagatgaagatgatgtttcatctggttcagccagttttcaacaactagatagtcatgatcaagaagtctcacatgtaaaggatagacctgctgttgtaattccaaaccatttgctaattcacacagaagaatgcgcgcaattaagttttggaagctttggaggttttggatcaaggcctttgagcaacagcgtagaagcgacttctgatgtagctccacaaatcgaacattcagatgcaagaaatactgagttctatggagatgaacatctgggaagtacaaccaatggaaatatggtccacacacctgctactggaaattatgatgattctttagaaacgaggcgagaggtgttgaagcaagaaaactctgagggcgctcaggagcaccagtacacatttacccagtctgagcaagggtatgcgtatgaaaatgctaagcagcagcagatgaattctgcatatgatgcctcacacacaaattcacagaatcagatgcataatcttgatt

SEQ ID NO: 93113 - DNA, 604 bp, Arabidopsis thaliana columbia
  unsure (1)..(604): unsure at all n locations
aaaataaaaagagtatatctctcacacacatacacaaacttgacagttttttaatttctctgttagtgaactcaaaccttcccatttccatggacaccaaaatcggatcgatcgatgattgcaagccgacgaacggcgacgtctgtagtccaacaaacggcaccgtcgcaacaatccacaactctgttccttcctccgctatcaccatcaactactgcgacgcgactctcggccgtcacttagctcgtcgtctcgtccaagccggcgttacggatgttttctctgttcccggagatttcaacctcactttgcttgatcacctcatggctgagccggaccctcaacctaatcggatgttgtaacgagctaaacgccggttacgctgccgacggttacgctagatctcgtggcagtcggcgcttgcgttgttaccttcaccgttgggggacttagcggtttaaaacgggntcgttgggggttanagngggaattttccncttatctgaatcgtcgggggcctanctttacggttatggnnctaanccgggtttttatnaaaccattnggtnccngattngcaagggtngggnttccaacgggggnc

SEQ ID NO: 93114 - DNA, 582 bp, Arabidopsis thaliana columbia
tgatcaacgcttttaagactatccgatcactgccctcgaataccaccgtctcgttctgctcaacaccatctcgattaggccggaaagtcactggagttagttttgccaccacttctgatcagcaaaagatggataaaaagcctgaaaatccaaacgagaaaaccggtgacgtgatgtcgcattcttatggagaagggtacgcaacaaggtctgacgaagaagggtttggaggaatctatggaggaaatcaaacacttcagaaggaaaacgagatccatgagaatcaccctgattacgacaaaacgcaaggtagcgaatcgaaggagaaggagaaagcaaggaaccagacacaatcccactgctaaagaaaaaatgatgatttagtgtctttgttctttatgctttaataaaatcagacttgtgctctgtagttcgtagactctggttagagttttttttttgttaattgcgttttttgacccgtaacctttaccgggtttttgttggttatccttatcacttttgtaacactcgttgaattagtagtttttgttgattgttgaacattcccttaatttgact

SEQ ID NO: 93115 - DNA, 472 bp, Arabidopsis thaliana columbia
accgcaaaagtgttcgtgaactttttggttaaagctcgtagctcgtgtatttcgtaataacagttattgtaatctgcgaactagtttcgatatgaattttggctcttggaaagtctcctgagttgggcttgtactatgatccaatagtaaataatcacttaaaaagcaacataaacgataaaaatatgataagtatgagccggctctaaaagtcaccaattttccattctcatgatcaaacataattagcaagtattatatttgagatctcataatagatcgtacgttttcattacttgttgaaataccaagattttaaaacaaacttatttagcttctacaccatcaatttttctaagcttatctaatcgaaacaacttttaataaatgaaacaagctgtataagtttattgataattgttatctataacatggtgttaagtcattctggcgccgaatgataacgcgaact

SEQ ID NO: 93116 - DNA, 502 bp, Arabidopsis thaliana columbia
cgcctgcaggtaccggtccgcctttcccgggtcgtccaccccgtccgcggacgcgtgggcttttttttttcctccttggtagaaaaaagttctgaaatttgcacattcttggctctttttttcttcacaccgaaatcttctccctatttctccgacgtccttcttcttccttcttcggtcaactccgaccggttctccacggagactctcgtctcccattttttttttttgtacggctactttgatcgatcgccattgctgaatttcaaagccttctctgtgtcattttttctgtaactggaagtgtgagcttccatcaattgagagttgaaagttgactcttaattaaaacctgagagagagagagagattcttctttttatttaatagagcaagatctgggttttagtcagattattaagtcgagatcatcgggggccaccttaaaaccaaaaatccgggcttttcgaggggtgattaatgccaacagatgcgtggggag

SEQ ID NO: 93117 - DNA, 553 bp, Arabidopsis thaliana columbia
gaaagacgacattaaaagaaaaaagataaaaaacagacgagataatggagagatctacgctcaaacgaacatcgagttttccagatattgaggctgttcaggggtgttcgactttgaatttgctgccaaaagccggatctagatctacgctcaaacgaacatcgagtattcctgattttgagcctgttaagtctctgcgttcgactttgattctgcagccaaaagccggatctccattgctgatgctgattgcagaagagtatggttgtcgtatttacaacccagaagatggtagggtttacgagccgaagagtgacttttcagggtatcgattcctgggaagctcaggtaagtggtttctggtggtagattctcgaatgaaactctatattatagatgtatttagcgagaagaggatcgatcttccaccactagaatcatttaagggtagccattttaagatttggcgtgaaggagaggagaatgtcaagcatatggtaatggatgatgaggatccattttgtgatgaatttcctcatgctgccgaagatct

SEQ ID NO: 93118 - DNA, 433 bp, Arabidopsis thaliana columbia
cgataacgtttccgtctgtatctctctcttccgtcttctactcttcttcttcttcttcttcttccactcacaatctatcgagctaaaacactgaagcagacattagcgttgagaaaaaaaaaaaagtaagaacgagagagagaaagccatgtctgcgaaaacaatcctatcatcagtagttttggtggttctcgtcgccgcatcagcagcggctaatatcggattcgatgagtcaaacccgatccgaatggtctccgatggtctccgggaggtagaagaatctgtttcccagatcttaggtcaatctcgtcacgttctctctttcgctcgcttcactcaccgatatggtaaaaaagttatcagaaccgtggaggagatgaagcttcgattctcgattttcaaggagaatcttgatttgatcagatccaccaac

SEQ ID NO: 93119 - DNA, 615 bp, Arabidopsis thaliana columbia
  unsure (1)..(615): unsure at all n locations
agcctgggaccggcccaaaccggtcctggtccttaaaggggagcccccaaaaccatggaacctccggtcccaaacccaaagaatgggaaaaaaaatggattggtaggccctggggaaaaaccaggaccattttttttttgggggaacattaaccacaccgggagctctggaagcggctacccatcagccttttggaaaaggaatatcttggcccgaccacagctggggaatgggcctgggcctttcaatacctttggtggcaatgggggactcccttctaaagcctttgaatacattaaatacaccgggggcctcgacccggaggaggcttatccttacaccgaaaaagacggtgcctgcaaattttcagcggaaaacgtcggggtacaggtccgcagactcagtcaacattactctgggngctgaagatgaactgaagcatgcggttngattggtacgggcnantaagcatagcattttagggttatacactcgttccgggtttttacaaanaggtggnggtttacactgatagtcacctttggaaggtacctccaaatggntnttgaaaccncggcgggtttttggncccttgggttattgngggtttaaaga

SEQ ID NO: 93120 - DNA, 1480 bp, Arabidopsis thaliana columbia
  unsure (1)..(1480): unsure at all n locations
cgactcactatttggaaagctggaccgcctgcaggtaccggtccggaattcccgggtcgacccacgcgtccgcccacgcgtccgcatgtctgtgaaactaaacctatcttcctcaatcctattgattctctttgcggcggcggcgagtaaagagatcggattcgatgaatctaatccaatcaaaatggtctccgacaatctccatgagcttgaagacaccgtcgtccagatcctaggacagtcccgtcatgttctatccttttctcgcttcactcacaggtatgggaagaagtatcagagtgtggaggagatgaagttaagattctctgtttttaaggagaatcttgatttaatcagatccactaataagaaaggcttatcctataaactctctcttaatcagtttgctgacttgacatggcaagagtttcaaagatacaagcttggagctgctcaaaactgttctgctactttaaagggtagccacaagatcactgaagctacagttccagacacaaaagattggggggaagatggtatttttagccctttgaaagaccagggccattttgggtctttttggacatttagcacaactggagctcttgaggcagcttaccatcaggcatttggaaaaggaatttctctctctgagcaacagcttgtggattgtcctggagctttcaataactatggttgcaatggtggccttccttctcaagcctttgaatacatcaaatccaacggtggcctcgacacagagaaagcttatccttataccggtaaagatgaaacctgcaaattttcagctgaaaacgttggtgtacaagtcctcaactcagtcaacattactctgggtgctgaagatgaactgaagcatgcggttggattggtacggccagtaagcatagcatttgaggttatacactcgttccggctttacaagagtggagtttacactgatagtcactgtggaagtactccaatggatgtgaaccacgcggttttggccgttggttatggagttgaagacggtgtaccatattggcttattaagaactcatggggagcggattggggcgacaaaggttacttcaagatggagatggggaagaacatgtgtggtattgctacatgtgcatcataccccgttgtggcttgagatgatcagcgaatgtggttggtcaattatcaaattacgaaatgttcacgtatttattggattaagacattacgtaaaagttgggacttgggaatgcatatggtttatgcttgttgtaacataaaaaggtctgttaatatgtacaaaataaagccaaaactatagacgacaaatttataatattttcatgttaaatttatgcacataaattgatttaaaaaaaaaaaaaaaagnnnnnnnnnnnnnnnnnnnnnnnnnnnnnnnnnnnnnnnnnnnnnnnnnnnnnnnnnnnnnnnnnnntcctaannnnnnnnnnnn

SEQ ID NO: 93121 - DNA, 1177 bp, Arabidopsis thaliana columbia
  unsure (1)..(1177): unsure at all n locations
atgatctccagctacaatacgactcatttagggaaagctcgtacgcctgcaggtaccggtccggaattcccgggtcgacccacgcgtccgcggacgcgtgggcggacgcgtgggctaaaacactgaagcagacattagcgttgagaaaaaaaaaaaagtaagaacgagagagagaaagccatgtctgcgaaaacaatcctatcatcagtagttttggtggttctcgtcgccgcatcagcagcggctaatatcggattcgatgagtcaaacccgatccgaatggtctccgatggtctccgggaggtagaagaatctgtttcccagatcttaggtcaatctcgtcacgttctctctttcgctcgcttcactcaccgatatggtaaaaagtatcagaacgtggaggagatgaagcttcgattctcgattttcaaggagaatcttgatttgatcagatccaccaacaagaaaggcttatcttacaaactcggtgttaatcaatttgctgatttgacatggcaagagtttcaaaggaccaagcttggtgctgctcagaactgctctgccactttaaagggcagccacaaggtcacagaagcagctcttcctgaaacaaaagactggagagaagatggtatcgttagtccggtcaaagatcagggaggttgtggatcttgctggacattcagcacaactggagctcttgaggcagcttaccatcaggcatttggaaaaggaatatctttgtccgagcaacagcttgtggattgtcctggtactttcaataactttggttgtcatggtggacttccttctcaagcctttgaatacattaaatcacaacggtgggctcgacacggaggaggcttatccttacaccggaaaagacggtggctgcaaattttcagcggaaaacatcggtgtacaagtccagtgactctgtcaacattaccctgggtgcagaagatgaactgaagcacgcggtcgggttggtaaggccagtaagttttggcggttttgggttgtacatggaattcaagggtttttttagagcacgggnggtttttccttggcaattccatggtgggaacactcccaattgggtgtaaacccatgcaggttttaagttggttttggggttaggcggcggcccgtccngnttttaagnccnatggggggg

SEQ ID NO: 93122 - DNA, 4228 bp, Arabidopsis thaliana columbia
gatttagtggtgaaagcgatattcactctggcttcaagatctcatcgaggtctttctatgtggacaaggaatatttcggatacgttacactcttacagacacagatagagagaaagagaaaaagagagataatgagcttggttttcgccattaatggacaaaggttcgagcttgagctctcctctgttgacccttcaacaactttgttggagtttcttcgttatcagacttctttcaagagtgtcaagctcagctgcggtgaaggaggatgtggtgcttgtgttgttcttctctccaagttcgatcctgtcttacaaaaagtcgaagatttcactgtgagctcttgtcttacactcctctgcagcgtcaaccactgcaatattacgacatcagaaggacttgggaacagcagagacggtttccacccgattcacaagcggttatccggtttccatgcctctcaatgtggtttctgtacacctggaatgtctgtttctctcttctctgctcttttagatgctgacaagtctcaatattccgaccttacggttgtggaagcagagaaggctgtctcaggaaacttatgtcggtgtactggttaccgtccgattgttgatgcttgtaagagctttgcttcggatgttgacattgaggatcttggattaaactctttttgtaggaaaggggataaagattctagtagtttaactcggtttgatagtgagaagcgtatttgtacatttccagagtttctcaaggatgagattaagtctgtggattctggaatgtaccgatggtgcagcccagcgagtgttgaggaactctcgagcttattggaagcttgcaaggctaatagtaatacagtttctatgaaattggttgctggtaacacaagtatgggatactataaagatgaaagagagcagaattacgacaaatacatagatataactcgaatcccgcaccttaaagagatcagagaaaaccagaatggggttgagataggatcagtggtaacaatctctaaagttattgctgctctgaaggagattagggtctcaccgggagtggagaagatatttggaaaacttgctactcatatggaaatgatagcggcgagatttatcaggaactttggtagcattggtggaaaccttgtgatggctcagaggaaacagtttccttctgatatggctacaatacttcttgcagctggtgcatttgttaacataatgagctcatcaagaggactcgaaaagctaacacttgaagagttccttgaacgttctcctcttgaggctcatgatctggttctgagtattgaaattcctttttggcattctgaaacaaactctgaattgttctttgaaacctatagagctgcacctcgtccacatggaagcgctctggcctacctgaatgctgctttcttggctgaagtgaaggatacaatggtagttaactgtagattggctttcggggcttacgggaccaaacacgccattaggtgtaaggaaatcgaagagttcctgtctggtaaagtaatcactgacaaagttctgtatgaggctattaccttacttggcaatgttgtggtgcctgaagacggtacaagcaatcctgcttacaggtcaagcttggcgcctggcttccttttcaagttccttcacaccttaatgacccatcctactacagataaaccttcaaatggttaccacttggatccaccaaaaccgttgccaatgttgtcttcttcacaaaatgttcctataaacaatgaatataatccagttggtcagcctgttactaaagttggagcttcccttcaggcttctggtgaggctgtttatgtggacgatattccatctcccacaaactgtctctatggagcatttatctatagcaaaaagccattcgctaggataaaaggtattcacttcaaggacgatttggtacctactggagttgttgcagtcatttctcgcaaggatgttcctaaaggcggaaagaatattggtatgaagattggattaggctccgaccaattgttcgcagaggatttcaccactagtgtaggcgaatgcatcgccttcgtggttgctgatacgcagagacatgcggatgctgcagtaaaccttgcagttgttgaatacgagacagaggatttggaaccaccaatcttatctgtagaagacgcggtcaagaaatctagtctgtttgacattatccctttcctttatccacaacaagttggtgatacatcaaaaggaatggctgaagctgatcaccaaattctcagctcggaaataagactcggatcgcaatacgtcttctacatggagacacaaacagctcttgcagtgggagatgaagacaactgcattgtagtctatagttcaacacagacccctcagtacgtacagtcatcggtcgctgcttgcctaggcatccctgaaaataacatccgtgtcataaccagacgtgttggtggaggttttggagggaaatctgtcaagtcaatgccagttgcaacagcgtgcgctcttgctgctaagaaactgcagcgtcctgtgagaacttatgtcaaccgcaagaccgatatgataatgactggtgggaggcatccgatgaagataacgtatagtgtggggttcaaatctacagggaagatcacagctttggagctagaaatactaattgatgctggggcaagttatggttttagtatgtttattccatcaaatctcatagggtcgctaaagaagtacaattggggcgccttatcttttgatatcaaactttgtaaaacaaatcttctaagcagagcaatcatgagatccccgggggacgtgcagggtacgtatattgctgaagccatcatcgaaaatatagcctctagcctctctttggaggttgatacaataagaaagattaatctccatacacatgagagcttagccctgttctacaaggatggtgctggtgaaccacatgagtatactttatcttcgatgtgggataaggttggcgtatcttccaagtttgaggagagggtttctgttgtcagagagttcaacgagtctaacatgtggagaaaacgagggatatctcgagtacctattatctatgaggttttattgtttgctactccagggagagtaagtgttttgagcgatgggacgattgttgttgagattggtggaatcgagctaggacaagggttatggacaaaggtgaagcagatgactagttatgctcttggtatgctacaatgcgatggaacggaagaactcttggagaagataagagttatacaatcagattcattgagcatggtccaaggaaatttcacaggaggtagcacaacatccgagggaagctgcgcagctgttcgtctctgctgcgaaaccttagtcgaaagattgaaacctttaatggaaagatcagatggtccaatcacctggaatgagttgatttctcaggcttatgcacaatccgtgaacttatcagctagtgacttgtatactccaaaagacactcccatgcagtacctgaactatggtactgcggtcagcgaggttgaagtagaccttgtgacgggacaaaccacagttctacagacagatatcttatatgactgtggaaaaagtctcaatcccgctgtcgatttaggacagattgaaggatcttttgttcaaggacttgggtttttcatgcttgaagagtacatagaagatccagaaggactccttctgacggatagcacatggacatacaagattccaacagttgacaccattcctaaacagttcaatgtcgagatactaaatggtggatgtcatgaaaaacgcgtactctcttctaaagcctcgggagagcctccgttgctactggcagcttcggtgcactgcgctaccagacaggctgttaaagaagcacgcaaacagctatgtatgtggaaaggtgagaatggttcctccggttcagcgtttcagttgccagttccagctacaatgccggttgtgaaggagctatgcggtctagatatcattgaaagctatttggagtggaagttacacgacaactcaaacctatgagtaaacaacaaacaatacatgaaagaaggtaatttgtttcctactgttttcttaaacttggagattaatcgctgtgcaggagtatcttctcttttgctctgtttatttctttgaaaacactctgtttctgg

SEQ ID NO: 93123 - DNA, 852 bp, Arabidopsis thaliana columbia
aattcgaattagcaaaagcaatgtctccttgcataatatggattccaaacattcatgatcttgatgtgaatgagtcgagttacttagccctcggtctattggtgaactctctctccagggattgtgaaagatgttccactagaaatattcttgttattgcttcgactcatattccccaaaaagtggatcccgctctaatagccccgaataaattaaatacatgcattaaaatacgaaggcttcttattccacaacaacgaaagcactttttcactctttcctatactaggggatttcacttggaaaagaaaatgttccatactaatggattcgagtctataaccatgggttccagtgcacgagatcttgtagcacttaccaatgaggccctatcaattagtattacacagaagaaatcaattatagacactaatacaattagatctgctcttcatagacaaacttgggatttgcgatcccaggtaagatcggttcaggatcatgggatccttttctatcagataggaagggctgctgcacaaaatgtacttataagtaattgccccatagatcctatatctatctatatgaagaagaaatcatgtaacgaaggggattcttatttgtacaaatggtacttcgagcttggaacgagcatgaagaaattcacgatacttctttatcttttgagttgttctgccggatcggtcgctcaagacctttggtctctacccgtacccgatgaaaaaaataggatcacttcttatggattcgatgagaatgattcggatctagttcatggcctattagaagtgcaaggcgctatggtgggatcctcacggacagaaaaag

SEQ ID NO: 93124 - DNA, 488 bp, Arabidopsis thaliana columbia
tttagctgtagatgcggttctctctgttatagatccggaaaagcctgagattgtggatttgcgtgatattaagattgttaagaagcttggtgggactgtggatgatacacatactgtgaaaggtttggtttttgataagaaggttagccgtgctgctggtggaccgactcgtgtggagaatgctaagattgctgtgattcagttccagatctcacctcctaagactgatatcgagcagagtattgttgtctctgattatactcagatggataggatcttgaaagaagagaggaattacatattggggatgattaagaagatcaaagcaactggttgcaatgtgttgttgattcagaagagtattttgagggatgcagtgactgatctatctcttcactatttggccaaagctaagattatggttattaaaggatgttgagagagatgagattgaatttgtcaccaagacattgaactgcttgcctatc

SEQ ID NO: 93125 - DNA, 558 bp, Arabidopsis thaliana columbia
atcgagaggcttctcacctctccgtacgattcatatctcttacgttcctgaagaagagatcggtggattcgacgggatgatgaaattctccgcgtcatcggagtttaaggatttgaatttgggatttgctatggatgaagggcaagctaatcctggcgatgaatttagggttttttacgctgatcgagttccatggcattttgttattaaagctgaggggattccaggtcatggtgctaagctttatgataattcagctatggagaatttgatgaagagtgttgagttgatttctaggtttagagagacgcagtttgattttgttaaagctggtaaagctgcgaattcggaggtaacccctgtgaatccaggttatcctaaagctggaacccctactactactggggttgtgatgaatatgcagccttcagaagcagaagctggggatgatttaaggttgcctccaatggcagatcctgatgttttgaagaaaagaattgctgaagaatgggctccttctattaggaacatgacctactcgatacaagagaaaggaaa

SEQ ID NO: 93126 - DNA, 563 bp, Arabidopsis thaliana columbia
  unsure (1)..(563): unsure at all n locations
gaagcatgggaaatagtgttgctgggcttggagctttcggcttcctattgaatatggcaggaacaggtatggggggaaccggaatctcatcgtcaatgtctgtccctggcatcggtaatatgggccagaacccaatgaatctgaatccagcatcaaatttgattgctataagccagcaactccgatctggtgcattaacaccacaccaaaacgctctgtttacacagattaggatgggcatggcaaaccgaggaggtgtaatgggtgctcctcaaaccgggataagtggcgtgtcaggtactaggcagatgcaccccagctcagctggtctttccatgttggatcagaacagagctaacctgcagcggagctgctgcttatgggtaacatgggccccacccaaagcttgatgcctggacatgattgaatctttaccatgaatcaacaaccatccagcagcagcaaccttccacgcagcaacccccaggcaaccacccagttgcagcagttatagcaaccngnttccaggtaggcntatgtttnggccgttttttggagttggt

SEQ ID NO: 93127 - DNA, 517 bp, Arabidopsis thaliana columbia
  unsure (1)..(517): unsure at all n locations
tgtaaatgagagaacgataaccattgatgctgttattcatatggtaaggtacactccttttaatgccatgaggtgtaagggatacccaaaataacttcggacccattccccctatacccccctgcaatcataggccccccccaataagaatggccaatggtccttttttcccatgaaccttaaaaaacaaactggtaccttgttgatttgaagagctttgcgtacattcacgtcattgacccagtacgtagttagcaaatatcgataaatctgcaaaagcaaccttgtatacatatatatatatattttctcaaatggtttaacggttaagagagggcaagatacttggattacttacatagcaatttggagtttcagttacgcacaatggttttattacaacttcttggnatactcctttggtacactaaaacacacaataaccacaaaagtnatgttgtttatttactaagggagacagacacacacacacacaacagctnaaatatgattcttc

SEQ ID NO: 93128 - DNA, 594 bp, Arabidopsis thaliana columbia
aaagtgtattgggttcctcaagaaggcatcataagctgcagttgccaactgtttgagttctctgggtttctctgcaggcacgcattccgtgttctctccacaggaaactgttttcaggtccctgataggtatcttccacttaggtggcgcaggatcagcacgtcgtttagcaagacgttcagaagtaacgctgaggatcatggagagagagttcagcttctgcagaatctggtttcgactctggtctcagaatcggctaaatcgaaggagaggctagatattgcaactgagcaaacctccatcctcttatcccgtatcagagagcagcctgtctcctcacttgctatcagagacatttcttcttctgtgcagaggaatttttgataccacaaatgctatgcgtgtctaactatttttagataacataattactttattaacctaatcttacaagattgtaactcttatcttaacttatgcattgttaaaaatatcaatcttatattcgttgacaaaaaaaaaaaaaaaagggcgaccgctctagaggatccaagcttacgtacgcgtgcaggcgacgtcataactcttctatag

SEQ ID NO: 93129 - DNA, 441 bp, Arabidopsis thaliana columbia
taaatctatctacacagatattaattatattttcataactagattttttttttaaacgtgtttatatatatgctctattatattcgttctttgttaaagaatcaatctaaatattaaaacgttttcatgtgttggatacttggatatatgatgctttaatgatggcctagtggtagagtaaaataatgtaaaatacttttttaaaacatcaaaaataaatgatacacgtatttttatactcatatgtcatatgtgctactactaattataattatgtgaatatatatccacgtagtaagagtcatattgattgtgatgattgataatatgaatgtatataggtctaaaacgaaccgggaaaagttgccggctccggtggctgaactatctccgccccgacgtacgacggggaaacatcactccagaagagcaacttatcat

SEQ ID NO: 93130 - DNA, 1725 bp, Arabidopsis thaliana columbia
  unsure (1)..(1725): unsure at all n locations
ctttgcttttatagttctctttattctctcaaaaagcctctctttctctctcttttgtttctcgctaccatggctaagtcttgctatttcagaccagctcttcttcttctgttagttcttttggttcatgccgagtcacgcggtcggttcgagccaaagattcttatgccgacagaggaagctaacccggctgaccaagacgaagatggtgtcggtacaagatgggcggttctcgtcgctggttcttctggatatggaaactacagacaccaggctgacgtgtgtcacgcatatcaaatactaagaaaaggaggtttaaaggaagagaacatagtcgttttgatgtatgatgatatcgcaaaccacccacttaatcctcgtccgggtactctcatcaaccatcctgacggtgacgatgtttacgccggagtccctaaggactatactggtagtagtgttacggctgcaaacttctacgctgtactcctaggcgaccagaaagctgttaaaggtggaagcggtaaggtcatcgctagcaagcccaacgatcacattttcgtatattatgcggatcatggtggtcccggagttcttgggatgccaaatacgcctcacatatatgcagctgattttattgaaacgcttaagaagaagcatgcttccggaacatacaaagagatggttatatacgtagaagcgtgtgaaagtgggagtattttcgaagggataatgccaaaggacttgaacatttacgtaacaacggcttcaaatgcacaagagagtagttatggaacatattgtcctggcatgaatccgtcacccccatctgaatatatcacttgcttaggggatttatatagtgttgcttggatggaagatagtgagactcacaatttaaagaaagagaccataaagcaacaataccacacggtgaagatgaggacatcaaactacaatacctactcaggtggctctcatgtgatggaatacggtaacaatagtattaagtcggagaagctttatctttaccaagggtttgatccagccaccgttaatctcccactaaacgaattaccggtcaagtcaaaaataggagtcgttaaccaacgcgatgcggaccttctcttcctttggcatatgtatcggacatcggaagatgggtcaaggaaggaggatgacacattgaaggaattaactgagacaacaaggcataggaaacatttagatgcaagcgtcgaattgatagccacaattttgtttggtccgacgatgaatgttcttaacttggttagagaacccggtttgcctttggttgacgattgggaatgtcttaaatcgatggtacgtgtatttgaagagcattgtggatcactaacgcaatatgggatgaaacatatgcgagcgtttgcaaaccgttgtaacaacggtgtgtccaaagagctgatggaggaagcttctactgcggcatgcggtggttatagtgaggctcgctacacggtgcatccatcaatcttaggctatagcgcctgagagattttgaggcttttctgattttcaagtgtttcgaattataacgttaaagatgtcaaaataaaagaaatgtttagtatgtaaatacgtacgtagcaataaggtcgtctaacttttttttatcgattgtaatctttttaataaaactttgctaaatattgtngttaccatttacatctaaaanctttagtgatc

SEQ ID NO: 93131 - DNA, 670 bp, Arabidopsis thaliana columbia
  unsure (1)..(670): unsure at all n locations
acaaggcatgcnttgaagcatatgaaggaaggaagcagcattatcaacaccacttcggtgaatgcctacaagggaaacgcttcacttctcgactacgccgctacaaaaggagcgattgtggcgtttactcgaggacttgcacttcagctagctgagaaaggaatccgtgtcaatggtgtggctcctggtccaatatggacaccccttatcccagcatcattcaatgaggagaagattaagaattttgggtctgaggttccgatgaaaagagcgggtcagccaattgaagtggcaccatcctatgttttcttggcgtgtaaccactgctcttcttacttcactggtcaagttcttcaccctaatggaggagctgtggtaaatgcgtaagcgtggagtggacaagaccggtcttaacgtcttagaccattaaatatgatatgatgatgttgtttgagtttaggggctttttgttatgttggtaatgtgttacgtccgtatatgttggtaatgtgttgcgtccgtaccttctgtagcaaaagtatgtgtttaataaagactttacctcgacaataagtcggggcctgttccccttaaacctaaaaaaagatgttagttacanaataaaagggnggnccgtttttgggggtcccangtttacggaangggnttt

SEQ ID NO: 93132 - DNA, 419 bp, Arabidopsis thaliana columbia
aagagggaggcgttgcaaactcaataaagctcaaaactttccgccgtcgttttcgtcgtcggagaatacaacaaaagacctaaagcagatcaaagtaattgtagttgacggagatggagaaagtaaagattgaagaaattcagtccaccgctaagaaacaacggattgctactcacacccatatcaaaggccttggcctcgagccaactggtatccctataaaattggcagctggatttgttggtcaacttgaggctagagaggcagctggtcttgtagttgacatgattaagcagaagaaaatggcgggcaaggctcttttgcttgctggacctcctggaactgggaaaacagctttggctcttggaatctctcaagagctgggaagcaaggttccattctgtccaatggttggatct

SEQ ID NO: 93133 - DNA, 349 bp, Arabidopsis thaliana columbia
ataagagtagactagagtcttcttggttgtgatattcttttccaatttcgtaattttagaaaagctgtacaagatggcgagtgtgtcgtggcgggctgtggctgtagctatggtggtggtgttgctgtcattgcagtggtttgcaaaagggtacccggaagaagatttggtggtgaggctgccaggtcaaccaactgttgggttcaaacaatacgcaggttatgtcgatgtcgatgtgaaagctggtcggagtctgttctattactatgtggaggctgtgaaacaacctgactcaaagccattgaccctttggctcaatggaggtccaggttgttcttcaattggtgga

SEQ ID NO: 93134 - DNA, 637 bp, Arabidopsis thaliana columbia
gtaagaattgatatatagaataactttttacttgattgataatcacataaaaccgaagaaattttagccatttgcatcaaacttaaacttccttcttgcattcgtgctcctccggaagaacacactaaaataagaggtaaacattgattggtagcatactcgatcaaacgagttattttttcgcctactacggatcccatactaccccccataaaccgaaaatccataaccccaagggctaccggaataccgtttagttgacctgtacctgtttgaacagcgtcagtcaatcctgtagttttttgcgcagagtcaatacggtttttataaggttcctccttcgaatgaaatttaatgggatccgcagagaccatgtcttcatccataggattccaagtacccggatcaatcgaaagctcgattctttctgaactactcattttcaaataatgtccacattgttcacaaacattcattttgactttcttatacattaatccataacaattgtcgcattgaatccacaattgattgtagttttgagttatatcgaaatccttagaacttattaaattactacgattcctcttagttcttatcttgtaatttttactttcacgaatctttccgctttcac

SEQ ID NO: 93135 - DNA, 594 bp, Arabidopsis thaliana columbia
  unsure (1)..(594): unsure at all n locations
atataacaataacaggtacaaatattaaattgaggtacccattttatgacaactttcaataacttaccctctatttttgtgcctttagtaggcctagtctttccggcaagtgcaatggcttctttatttcttcatattcaaaaaaataagattttttagatcggctgagaccgaatcatatcacctttttttttttattttaaaaacttcgattcgataagacccatttggtagaatgttgtataacacatagattcctacaaacataaataaaaaaaactcttatgcatgtgtaaacgtaaaaaaatttgcgctcttttgaaaaatggatcatcgtcgggccgatgtctgaaattccagtcaatctatttatttgtatgtatataacctataggggatcatataaaggaaggagatgttatttttttagatataaacaattctatgaattactcctaaggtaaaggttcacaacaaaatagtttatattataagagttaccttgaaaacaaaaaaaaagggggcggccagnggccagctcgnccngggatnggggcagccncnagggnccaatcatccggnggngttaagggc

SEQ ID NO: 93136 - DNA, 474 bp, Arabidopsis thaliana columbia
  unsure (1)..(474): unsure at all n locations
aaactccgcctccgtttgtnggctatttacactcactctgtctccgccggtagatttntcagctgcgtcttcctcgttttctctctctctgtctgtgtctcttagaatgcaatcagctatggcgctttcgttctcccagacgtcgtttacaagaccaaaccacgtgctcggatcatctggttctgttttctctacgcccagaagtctccggttctgcggactccggcgggaagcgtttggtttctcaacgtcgaatcagttggctattcgcagtaaccgaatccaatttctaagtaggaagtcattccaagtctccgcttctgcttcaagtaatggtaatggcgctccaccgaaatctttcgattacgatttgatcatcatcggagctggagttggtggccacggagctgctttgcacgccgttgaaaagggacttaaaacagccattattgaaggagatgttgttggagggac

SEQ ID NO: 93137 - DNA, 1364 bp, Arabidopsis thaliana columbia
ctcattttataataattttctccatcttcttccttcctcttcaagcttatagaacctccaagaaccataaaactctctctgcaacaatctatactttcttcattacttttataaaaaatgggaagacattcttgttgttttaagcagaagctaagaaaaggcctttggtctcctgaagaagatgagaaacttctcaattacatcactagacatggtcatggctgttggagttctgtccctaaactcgcaggtttgcaaagatgtggaaagagttgtagacttaggtggataaattatttgagaccagatttaaagagaggagctttctctcaagacgaagaaagcttgatcattgagctccatgctgcattaggcaacagatggtctcaaatcgcaacgcggttaccgggaagaacagacaacgagatcaaaaacttttggaactcatgtcttaagaagaagctgagaagaaaaggcattgacccaacaacacataaacccttaataacaaacgagcttcaatctcttaacgtcatagatcagaaactgacgtcatcagaagtagtaaagtcaacgggttcgataaacaacctacatgatcagtcaatggtcgtctcatcgcaacaaggtccatggtggttcccggcgaatacaactacgactaatcaaaactctgcgttttgctttagttcaagtaatactacaacggtttcagaccagatcgtatctttaatctcttcaatgtctacgtcatcatctccgacaccaatgacttcaaacttcagtcctgctccaaacaactgggaacaactcaactactgcaacacagtaccaagtcagagcaacagtatcttcagtgccttctttggtaatcaatacacagaagctagccaaaccatgaacaataataatccactagtagatcaacatcatcatcatcaagacatgaagtcatgggcatcagagattcttcattacacagaacacaaccaaagctcagaaactgttatagaagcagaagtgaagccagacattgccaactactactggagatcagcatcatcatcgtcgtcaccaaaccaagaagctgcaacattactacacgatgctaacgtggaagtgtacggtaaaaatctacaaaagcttaataacacggtgtttgatcagagcctttagattattaacatgtgttatagagagtttcattttctattcatattcatagacctgagtttattgattgatccatacatttgttatgcttgtgtgtaaagtatgtatatggtttttgatttatgtaaattttctgctcgagtgaatttttttggtgctaagatgtagttctttattccaaaaaaaaaaaa

SEQ ID NO: 93138 - DNA, 690 bp, Arabidopsis thaliana columbia
  unsure (1)..(690): unsure at all n locations
atgatcnnnnnnnnnnnnnnnnnnnnnnnnnnnnnnnnnnnnnnnnnnnnnnnnnnnnnnnnnnnnnnnnnnnnnnncttttttgttttttttttttgagtagaattgtgtctatatatatatatatataagttgcataacaatcaacagaagctgaagacacacatacacaagatttctgcctatagctctgcagtctacaatacaagaatcaaatcagaaactctttctaaggcaattcatgtcaactgaggctctctcattcgttctaaagaagtgatcaagattctctaacctaagaatctctccacgtggtttgattggttgtgtcatagtagaaatatcagcaacggaagcaatgagaagcagaagacaacaatgttgtttagttgggccacagaagctaaagatcttgagaactgaactgaacctgagtagcttccacctgagttgcttccagccgttgaatccatgcttggagttcttgtctgtacagtaacatttttgcatgaaccataagctgctcctggctgcaacatcaagaaccaaaatacgggtgccggttttagataatttaggcttgtaagatcttatttcatacccataagtaactttggcgcgagttaataagttaatacctggcaagcagaaagagtttcacaaccgcaaagtaccggtccattcattcta

SEQ ID NO: 93139 - DNA, 850 bp, Arabidopsis thaliana columbia
ccaacacttggcagatccaaccgcgattactcaagctctttgctggaaatgcatacttggtggataacaagaagaggaaggagaagaaggagaagaaagagtatggtgaagaaagcaaagacattcaatgtttttgaatctgaaccggatttcgagagcccctacggtagtactataacgattaacaggaaggatctgaaagttttaaaaggctcaatggttggagtttccatggtgaatctcactcaaggatcgatgatgggaccgcactggaatccatgggcttgcgagatttcaattgtgttgaaaggagcaggaatggttagggtacttaggtcttcgatatcatcaaactcatcatccgactgtaagaacgtgaggtttaaagtagaggaaggagatattttcgcagttccacggttacatccaatggctcaaatgtctttcaacaatgactcgctagtattcgttgggtttactacttcagctaagaataacaagccgcagttcttagccggggaggactcggctttgcggatgcttgaccggcaagtattggctgcgtcgcttaatgtgagtagtgtgacgattgatggattgttgggagctcagaaggaagctgttatcttggaatgtcattcttgtgcggaaggagagatagagaagcttaaggtggagatagagaggaagaaaacagatgatgagaggaagaggagacatgatgaaaggaagaaagaagaagaagaggcgaaaagagaagaggaagagaggaggaaacgtgaagaagaagaagagaagaagcggtggccacctcaacaaccaccacaagaagaagaacttagggaacggc

SEQ ID NO: 93140 - DNA, 429 bp, Arabidopsis thaliana columbia
  unsure (1)..(429): unsure at all n locations
aaacattggaaacaagaattctcttacacatgtatcggtagttggaaatgccgacccaaaaggtccaaaactcaccattatctcaagtgggagagcttctcaagaaactactccaccatttccacaatctccttttgtatttcttcatcctctggatcggcgggatagtcggaatcattgtttatccctctctacaaggattatcttcgccttcttcgctaaccatccaaagtgtctcccaactcttctttgtaacccctcctcctcctattctttctccttcatttcaggacaatgggcttgacatggttctgataccactgaagaacatcatgcacgatatggaagataatgaacttctggggagagcttcaatggatcctaagatcagggattacccttatcctagaatccnaaagttgctttcat

SEQ ID NO: 93141 - DNA, 569 bp, Arabidopsis thaliana columbia
aaccgaaagagagtaatagagacaaaatgggttcatcatcatctccatccccgaacgacgccgtactggaatcagcccgaccttttctccgaggagagcttgaaaagatcgaccccaaactcccgtcgttaatcgccgtcctcaaaagcgtcggtgccggcgagtgttggcacaaacacggaagcttcctagatcacttaatcgatatctacaagatcctcaagctatggaaagctcctgaatccgtctgtctctgtggtctattccactctgcttactccaattcctatgtcaatttagctattttcgatccttccactggtcgtgacgtcgtccgtgatcacgtcggtgaagctgccgagtcgttgatccatctcttctgcgttgtaccgagacaaactctgattcacgatgagcttttgtttaagtactctgattgtgagcttgttgagcatcttgattgttctgaggtttccctgaggaacccaaaggacaaagggatttttgatggaatatgaagtgtgggggaagaagatgtatgataatgtttttgcccccccccccccccc

SEQ ID NO: 93142 - DNA, 2898 bp, Arabidopsis thaliana columbia
  unsure (1)..(2898): unsure at all n locations
acttatcttcttttgatgttcttgtagcgtctgtacgaaatctcacaaggtttcttcttctcagatttagaaatacttgtgtgatatcttctgagtaaccaaattcttgataaagtttctagctttattcaaacccatttgaaaaatccggtggtgaatcgccggagaaatgtgtttttcgtttctccactgagttttttttgttaagaaatctgttaaaactctagatttcaaacgaatgacattttctgagattgaggaacattgtgaatcgaggactggagtgaagattctctgatgagtgattcagaagaagacgaagaagaagaagaagctagtgaagtcattttaagcagcgtcgttcagaagaagaagaagaagaatctgcgtttcggtgaagaagtagagagacgagacggtttggtgttgttagctcaatctactccaatggtgagatcgagatctcaaggaacgactcggcgcgtgactcccacgcctttagtagatgttgagaagccgctaccaaacggagatctttacatcggaagtttctccggtgggtttccacattggatccgggaagtatctatggaaagatgggtgcatgtacgaaggagattggaaacgagggaaagcttcagggaaaggcaaattctcatggccaagtggagctacttacgaaggtgaattcaaatctgggagaatggaaggttttggtactttcactggagctgatggagatacttatagaggaacttgggttgctgatagaaaacacggacatggacaaaagcgttatgcaaatggagatttttatgaaggtacttggagaaggaatctaccagatggtagaggtaggtatgtgtggagaaatgggaatcagtatactggagagtggcgtagtggtgtgatttctgggaaaggtttgcttgtttggcctaatgggaatcgatatgaaggtttgtgggagaatgggattcctaaagggaatggtgtgtttacttggagtgatgggagttcttgtgttggtgcttggaatgagagtaatattatgaggagtttctttaatggtgttgagaagaatgatttgattgtggggaataggaagagatcttctgttgatagtggagctgggagtttgggaggtgagaaagtttttccaagaatctgtatttgggaatctgatggtgaagctggagatatcacttgtgatattattgataatgttgaagcttccatgatttatagagataggatctctgttgatcgtgatgggtttaggcagtttaagaagaatccttgttggtttaatggtgaggctaagaaacctggacagactatttctaaagggcataagaaatatgatttgatgctgaatttgcaattaggaatcaggtattctgttggcaaacatgcttcgattgttcgtgatcttaaacagactgatttcgatccaaaggagaaattttggacaaggtttccaccagaagggactaagacaacaccgccgcatcagtcagtggatttcaggtggaaggattattgccctttagtgttcagacgtctcagggagcttttccaagtggatccagctaagtatatgctagctatatgtggaaatgatgctctccgcgaactatcttcacctggaaagagtggaagccttttttacctaactcaagatgatagatttatgatcaaaacggtgaagaaatcagaagtcaaggttcttctaagaatgcttccaagttactacaaacatgtctgccaatacgaaaactcccttgtgactagattctacggtgttcattgtgtcaaacctgttggtggccaaaagactcggtttatcgttatgggaaacttattctgctccgagtatagaatccagagacggtttgacctcaaagggtcttctcatgggcgtagcactgcaaagcctgaaggagaaattgatgagaccacgactctcaaggaccttgatctcaatttttctttccgtcttcagagaaactggtatcaagagcttatgaagcaaataaaacgcgattgtgagttcttggaagcagagagaataatggattatagccttttagttggtgttcacttccgtgatgacaacacaggagaaaagatggggctttctccattcgttttgagatctggtaggatagattcatatcagaatgaaaaattcatgcgcggttgtcgcttcctagaggcagaacttcaagacatggaccggattttagctggcaggaaaccatcgatcagattaggcgcaaacatgccagcaaaagctgaacgaatggcccggagaagcgattttgatcagtattcatcaggaggagccagttatccatcacacggtgagatgtacgaagttgttctctactttggagtcattgacatcttgcaagactacgacataaccaaaaagatcgagcatgcgtataagtcactgcaagccgatcctgcttcgatctcagctgttgatcctaaactctattcaaagaggttcagagacttcatcagtaggatcttcattgaagagggctaaagacaagaaggctaaagtttttaactaacattctcggctctacggaaatgtgaagaaagctgcgcgggaagagtaaaaaggtaaatctcaaggatagaagaaaagcgatttcggaattttatgtttatatattttgagatgaccaatcaagtttttgggttggggaggggctttatttatttttgtggtgagccgtttatatatataatatttatatatgtgaatatagattgaaggtttttagtaaaaaaaaaaaaaaaaaaagnnnnnnnnnnnnnnnnnnnnnnnnnnnnnnnnnnnnnnnnnnnnnnnnnnnnnnnnnnnnnnnnnnnnnnnaaatc

SEQ ID NO: 93143 - DNA, 858 bp, Arabidopsis thaliana columbia
  unsure (1)..(858): unsure at all n locations
caaaaacccatttttttctccttctttaaatcccaaaccaacgnnnnnnnnnnnnnnnnnnaatttgggggcaataaaaaaaaaaacctaatttttctctttagtgatgagattgttgttgatgatgaaatgattggagatctaatgaagaataacaacaatggcgacgttgtggataacgaagtgaacaaccggttaagccggtggcatcacaattcttcccggataattagggtttcacgagcttccggtggtaaagatcgacacagcaaagtcttgacttctaaaggaccacgtgaccgtcgtgtccggttatcagtctccaccgctcttcaattctatgatcttcaagatcggttaggttatgatcaacctagcaaagctgttgaatggttaatcaaagctgctgaagattcaatctctgagcttccttcactcaacaacactcattttccgaccgatgacgagaatcaccagaatcagacattaacaacagttgctgctaattccttgtctaaatctgcttgtagtagcaattcagacacgagcaagaactcttctggtttgtctttatcaagatcggagcttagagataaagctagagagagggctagagagaggacagctaaaggggccaaggagagagatccataaccacactttcggtttcggttttgtttaaattcccggttcaaatncccggttaaatttaaaccgggnaattggntnggntttaangcnccctttttaaaatccccaangggggtttttcaatttcngggtttaattnncgggggtgggggtaaaaaaacccttttccccntttttaaanaaatntttnanccnttttaaanaatc

SEQ ID NO: 93144 - DNA, 999 bp, Arabidopsis thaliana columbia
  unsure (1)..(999): unsure at all n locations
nnnnnnnnnnnnnnnnnnnnnnnnnnnnnnnnnnnnnnnnnnnnnnnnnnnnnnnnnnnnctgggaagaccacgcggccgcacaacaatatcacactcagataaatatcaagagatagagagagtaacagtgatatagtcgagaaaatggcgtcgtggatgaaagcggtgctaatctctactggcgtcgtagccacggctatgcatctaaaggttattgttcctgtggctatggatttctcacaaaatccgattattttgagctctttcctcacgtggctgaaaccgccgtatctttacgtcatcactaacgtcatcatcatcgttgtcggagtttcctaccggattactactgtctccagccacgtcgacggcaaagactatgaggcttcttacagtggcgacaataagtttcagactgatcatcagcagatcgtccaagaagctcctctaaggcgacgaacggagacgaaagatgcggattttggtttcatcggcaaagttttgcagatcgttaaggagccggaggttgtgtatgaagagaaggagaggccggcgacggtagaggaggaggagaagaagtgtataattgtggtgagcaaatcggaaaatcaacctccggtggagaagcctcttgttacggctaggatcggccaaaagaaaccggtggttaagactacaccagcagaaaggaattctatgagagcgttgagagttgcgaaaccgaaacgtaacgagacgttagagaatacgtggaagatgattatggaaggcaacaaagtcaacgcttcccgttgaccagttattacaagagacccgacacgttcggacttggcgaagagacaaaacaatcaggtgttttgaagaaatcggagacgtttagtgacagaactaactgttaccagtctctgccgccgccaccttcgccgctagtgaaggtgaagaaggtgaaagtgtcacggagtanggatgagctttaaccgaaagtagaagcgtttat

SEQ ID NO: 93145 - DNA, 673 bp, Arabidopsis thaliana columbia
  unsure (1)..(673): unsure at all n locations
acattgtcatccgggtatttcgtggcacctagctctaagatttgatgttcaagacgtagacaaccccaatacttcacaagtgcatttatcggataccctgtggtgtgatcctcacgactggagtcatgaactggtttcaacaagcacagcctgctttgttatacattgtcccagccgtaattgggttcttggcttctcactgcatttggaacggtgacatcaaaccgttgttggcgtttgatgaatcaaagacagaggaagcaacgactgatgaatcaaagactagtgaggaggttaataaagctcatgatgaatgaggaaaaatcgagaaagaagggcagaggagaaatatatacacataaatgtgtcttaatatatggaacaagaaggaaaacaattttgtttccaaatgatcatcaatcagtcccttctaaccccttttttgtttttttagattttcaaactttcttttggccaagacttgtgtaagttactataagttacaacaaattttctttgacttttctttctngttttatgttaaattcngttaggagactggagangttatatatcaaaaaaaaaaaaaaaaaaaaaaaaaaggcgaaccgctctagaggatccaagcttacgtacgcgtgcaggcgacgtcatagctcttctatagtgtgtc

SEQ ID NO: 93146 - DNA, 779 bp, Arabidopsis thaliana columbia
ggcaaagtgacgactatggagagaatggagagagacgcaatggagacggtggctccatatgctccggtgacttatcaccgccgtgttcgtggtgacttggatgacacacttcctaaaccttatttgccgagagcactacaagcacctgacatggaacacccacaaggaacaccagatcatagacataatggccttagtgttcttcagcaacatgtcgctttcttcgatttggacaataatggcatcatttatccctttgaaaccttctctgggttccggttactcggtttcaatttactcgcgtcgcttatcttggctgctggtatcaacatagctcttagctatgctactctcccgggatggttaccgtctccgttcttccctatatatattcacaacattcacaaggcaaagcacggaagcgactctaaaacatatgacaatgaaggaaggtatacaccagcgaatcttgagttgatgtttagcaaatacgcgaggaccataccagacaagttgagtcttggagagctatgggacatgaccgaaggaaaccgcgatgcctttgacttttttggatggttagcgagcaaagtggaatggggtgtattgtatgcattagcgagtgatgaagaaggattcttgtctaaagaagccacaaggcggtgcttcgatgggagcttgttcgagtattgtgccaagaactacgctgagatcaaggagtacaagacgtactactgatcatgatgatcggtggtttttgtattcaaagcaacacgctc

SEQ ID NO: 93147 - DNA, 480 bp, Arabidopsis thaliana columbia
tccggaaggagtggaggacctccctgtggaggccttaagtccaactccactagctcaataacatgcgtatcaacagccgcacaatctgtatcttgcaaactgcttttgctcatgctgtctttaactagacccagaaggattgctgtcattgaagtagaccgggaatttgtgacaagggctcttaaaacgtcaaacctatgaggagctgggatatcagaaagaaccctcttcagtgcctcaaatgtctttttcctcagatctgcgtctggcgcatacatgatcagtaatgtatcagcctggttgaaagaaacgagacacttggagcgctagtaattggtaaacctgaatggtgtaaagattaaggagaagaatattacacctgtaaagtagcgtagatgccaggcgtgtagtccgagcaatctatttgctcatcatagcctcgagccgaattccgagcttacgtacgcgtgcatgcgacgt

SEQ ID NO: 93148 - DNA, 975 bp, Arabidopsis thaliana columbia
  unsure (1)..(975): unsure at all n locations
gttatcgcagttttccttacgacaagttagaaaacaatttttttnnnnnnnnnnnnnnnttagcgagaaaagcaagctactctcatttgcacagaaaggggcattttctctatttctcggtatgtatgtaatgtttgtctttttaagcatttaccttaacccatatcattgcattgcctaaagggcttatagtatgcacatgaaaagagaaacaaaacatacttttaaagaattgatataggaaaagaaaagatcaccgcatcactctggtccggaaggagtggaggacctccctgtggaggccttaagaccaactccactagctcaataacatgcgtatcaacagccgcacaatctgtatcttgcaaactgcttttgctcatgctgtctttaactagacccagaaggattgctgtcattgaaggagaccgggaatttgtgacaagggctcttaaaacgtcaaacctatgaggagctgggatatcagaaagaaccctcttcagtgcctcaaatgtctttttcctcagatctgcgtctggcgcatacatgatcagtaatgtaacagcctgtaaagtagcgtagatgccaggcgtgtagtccgaacaatctatttgctcatcattgcattgagatgaagtaactccttttgttatgtcaagcaagaactcgatagcatgtcttttgaattcccagaccagatctccagaggaaagtatatatttcaacatcccataagcttgccaccttttcactggattgttggaagcgatcaacaacacttcctaaaaccgcaatagccgcctctgcaacctcatgggagatctttgcacagatgaataaaagcgatgcacccaagctgatgtcagggaaagaggtgataaactcatcatcatctccagcaaccgtgctcattaatttttcagtgtcattcccccggacgcgtgagtcgacccgggggttccggcgagggccgct

SEQ ID NO: 93149 - DNA, 881 bp, Arabidopsis thaliana columbia
  unsure (1)..(881): unsure at all n locations
aggccggacaannctatttgcncaatcattgcattgagatgaagtaacnccttttgttatntcaagcaagaactcgatagcatgncttttgaattcccagaccagatctccagaggnaagtatatatttcaacatnccataagcttgccaccttttcactggattgttttgaagctcatcaacaacacttcctaaaaccgcattagccgcctctgcaacctcatgggagatctttgcacagatgaataaaagcgatgcacccaagctgatgtcagggaaagaggtgataaactcatcatcatctccagcaaccgtgctcattaatttttcagtgtcattccccgtgattaacccaagttgtgttaacccacaggatgtcaagaacggttctaactgaatcaccagaggaatacaagaggccgctttgtctctgatgctaactgaaataatagccgttatctgtatcacatagagacaaagtagacaacggacttttgcttcttcttcgttattagaccagttttgaagaaacgtctcgaattgaagaggcaatgcctagagccttatcaaataaatcttcaacttgcacgtctgtttccaatgaaatgtccttcaaaacgttcaggacaattggaactgcaacctttaattgctcgtagtgacgcctctggatcaaaataaatactttagagagcccatgcaataaaggagtagaacaagtggaggctgaatgatagcaccgtgcagcatcgagtgcctcacaaagaattgaaagcatatcccgtggattgcatgcttccacaaaccgatcaacgatttcctcaactaaccggacgcgtgggtcgacccgggaattccgaaccggtacctgcaggcgcacc

SEQ ID NO: 93150 - DNA, 738 bp, Arabidopsis thaliana columbia
ccaattctcctaaagtttgttttctctcgcctctaagaaacaatgttgagtgcctttttgggtcatgcgtcagctattgctatagcttcaccagtagtcagcattgtgggcatcaggcgacaaacatatggagagatgaaacacgtgggggtcgttgaaaaacaaagagaaatgccaacatttcctcaatcgtttcctatgaacggtggtgatggtccgcacagttacatccacaattcctcttatcaaaaagtagcgatagatggcgctaaagaaaagacaagtgaagccatcctaaaaaacctcgatctcgaactcttgaaccgtaattctgatgaaaatatcttaagaattgcggattttggttgttctattggacccaacacgttcgaagtagtccaaaatattatcgatacggtgaagcaaaaaaacctaaaagaaaacaatgcctatattggtgctcctctcgagttccaagtttgcttcaatgatcaaccaaacaatgattttaacacactttttagaacccaacctatctcttccaaacaagcatatttatcggttggagttccaggatctttccatggtagagtattaccaaaaaatagcctccatatcggtcacattacctatgcgctccactggctttctacagttccccaacatgtttgcgacaagaaatctccggcattgaataaaagctacattcaatgtaataatttaatagaggaagtgact

SEQ ID NO: 93151 - DNA, 471 bp, Arabidopsis thaliana columbia
gccgaagctgaaacccgaatatgctcgagcggctcgagtgaattttttctagtgatcttctttttgattgagaacatgagtgatcaagaaggagactgggatttttacctcagaatcctaagcaacagcgcgcgggattctacggatcctgcttctgatccatctatactacaatcagtgaagaagctgcatgggttctgtaaaatggagaaatcagatgatcttgtggctagaatttatccacaattcaataaagtcttccatcgttcggttgcttcactatctcagtccgagtcaggggcgtccaaaggccttctcttgctagccattcttcagttttttcttgattttggggatatggttctgcacgattctgacccaagtttgaggacattcttccgctcatgtcttagccgtgagttctcagatgccgctgtggcagaggcaacttgtgaatttcttgttgtgaac

SEQ ID NO: 93152 - DNA, 385 bp, Arabidopsis thaliana columbia
gattggtttttaataatgttagtctccatggagaattagttaattggtatatgattatacttatatgggttatagcgtgaaaaaaagaaacatctactttaagcaacagcagaaagcattaaagaatagataaccccaatttccgagaggaacgttaggagaaagtttttgaaaatttacaaaactttctgttagtagatgcttaatttcatcagtgttttccaagcaattttgaattaaggattaataaaattgttatgtatattatgaaataatgaagatatttcgctatctctagagtctaaagagattagcagttggtgccttggtggttgacaaaagaaaagaagaagagattagcagttgcgtctaacattgcttttat

SEQ ID NO: 93153 - DNA, 576 bp, Arabidopsis thaliana columbia
caaaaaccctaaaaagcttaccgaatttttcttgtggtaatgcagagtcaatgtacctggacataaatggtgtgatgatcaaacagtttagcttcaaagcctctcttctcccattctcttctaatttccgacaaagctccgccaaaatccatcgtcctatcggagccaccatgaccacagtttcgactcagaacgagtctactcaaaaacccgtccaggtggcgaagagattagagaagttcaagactactattttcactcaaatgagcatattggcagttaaacatggagcgatcaatttaggccaaggctttcccaatttcgacggtcctgattttgttaaagaagctgcgatccaagctattaaagatggtaaaaaccagtatgctcgtggatacggcattcctcagctcaactctgctatagctgcgcggtttcgtgaagatacgggtcttgttgttgatcctgagaaagaagttactgttacatctggttgcacagaagccatagctgcagctatgttgggtttaataaaccctggtgatgaagtcattctctttgcaccgttttatgatt

SEQ ID NO: 93154 - DNA, 1402 bp, Arabidopsis thaliana columbia
ttggagatggaaaatacgaccaccgggttttattaatttgcaaattcttcctgaactagttaaaagaatgaaattggctgatattatgacgatacgcgggagcagagatttaattatgggagaagttgatcgttaaaatgataatttatgcaacagcagtccaaactataaattcttttgttaaattggaatctttaaaagaggtctatggactcatatggatatttgtccctatattttctcttgtattgggaatcataacaggtgtactagtaattgtgtggttagaaagagaaatatctgcagggatacaacaacgtattggacctgaatacgccggcccgttgggaattcttcaagctctagccgatgggacaaaactacttttcaaagaaaatcttcgtccatctagaggaaatactcctttatttagtattggaccatctatagcagttatctctattttactaagttattcagtaattccctttagcaatcaccttgttttagcggatctcaatatcggtatttttttatggattgccatctcaagtattgctcctattggacttcttatgtcaggatatggatcaaataataaatattcttttttaggtggtctgcgagctgctgcccaatcgattagttatgaaataccattaactctatgtgttttatcaatatctctactatctaacagtttaagtacagttgatatagttgaggcacaatcaaaatatggtttttggggatggaatttgtggcgtcaacctataggttttatcatttttctaatttcttccctagcagaatcggagaggttaccgtttgatttaccagaagcggaagaagaattaatagcaggttatcaaactgaatattcaggtataaaatttggtttattttacgttgcttcttatctaaatctattaatttcctcattatttgtaacagttctatacttaggcggttggaatatttctattccgtatatatctattctggagctatttcaaagggatcaaatttttggaacaacaattggtatctttattacattagctaaaacttatttgtttttgttcgtttctatcgcaacaagatggactttacctaggctaagaatggatcaactattaaatcttggatggaaatttcttttacctatttcccttggtaatctattattaaccacttctttccaactcttttcactctaaatttaaaatgaatctaatatattcattatttgttttaaacaagagacagaaacaaagataaaattattcagagataattacaatatgcttcctatgataaccgggttcatgaattatggtcaacataccctacgagctgcaaggtatattggtcaaggtttcatgattaccttatcccacac

SEQ ID NO: 93155 - DNA, 418 bp, Arabidopsis thaliana columbia
aatgatgctagctatgccgacgatgatgaaggatatgagaactttggaacttcttttgattatgagggtcaatccggtgatgttgatgaaaactttggccccaatgatgcagaaccaacatattcaaattttcatgaggttattaccatcgctcttctaatgatcttttttcttaatgaattttatttggtactgaaaacctgatgttttcactttgcaggaagatgaaccagcctccctgcaagacatggattcagatgacagactggagaatgttgatgactatctctttttgtcgttgggaatttcatctaagcaaaattcttgggcaggtcctgatcactggaagtatcgaaaaacaaaaggtatgcacttatatctctgatttcaagaaataacataagtcctcttagttatc

SEQ ID NO: 93156 - DNA, 408 bp, Arabidopsis thaliana columbia
aagagctatgacgtcgcatgcacgcgtacgtaagcttggatcctctagagcggccgccctctctttctttctttgcaaaaaaatttctagtcaaaaactcatgatacaaaggctttactatatgtacaagactagtaattgttcgcttgtaaaaatcgttctgagttttgtccttcaatggcggtaaattttcaaaacttgttgtattcgttcccggcaaagaggacaggtccttagttgcaaggagcatggtgtgcagcagcacatatgaccacacctacaagtccaaaccaaacaaaaagaggaatcaaaagatgccatgtttgatcagtgagagggttttcaagagcttttagaagaaaagcggtcttatacttactcaacaaaagcggtgttatacttctggtc

SEQ ID NO: 93157 - DNA, 484 bp, Arabidopsis thaliana columbia
gtggtttcaaatttctttttctcgtcagtggttagaaacttacaattttaaaaatcttatcttaagctctcctctcttctctctccaaaatctttcagagaggagagcttgataatcgttttgtctccggtttgatccggatttgtttatattctcgtctctatgcgagatcaataatttccgattacatatcggatcttctgttaccggctatgaccggtcttttctccgtttttaacggaacttgatctctatctccatcgttgctcacccatcgatctcaacgttttcttccaagatttttgttgtctccatttcttcgtggattaacatcttcgtcacctccgattgctcaagacgcaagagcaaaaatggactttagactacatcaagatagatgtagtcggtggtggagtctcccgaaactggtgattccaaagaatttatgaagcagctctaccctttaatccggtaaatgatttcg

SEQ ID NO: 93158 - DNA, 767 bp, Arabidopsis thaliana columbia
  unsure (1)..(767): unsure at all n locations
aaaatttgtggcgaaaagctaataaatagattcaaaggagaaatagaaagagacagaaagcgagggacaaaaaaaaatcgattgataattttttcggcagagtcgaaaaaattttgatatattaaaatccgtaattccttaaaaagcctcctcctcttcgtcttcgtcttcttctcctccccagtttcgcatcattctcttcgataaccgccacatcctctgaaaccctaatcgggagaatcgccgccttctccagaaaatatctatttctataccttgttcctttgatttccagattctgatgaaaccggatcggatctttctctagatccgttctaggtttatcgatttctttctatcaatctctcgcatccggatgctttttgcaagttcttgaagcggattcatcataaatcgacagagaaatgtcgcaggctccgaatccagaagaagaagacgacacgattgaaatccgcgaggtctggaaccataaccttgaacaagagatggctctgattgaacaatccatcgacgatttcccttacgtagccatggacacagagttcccaggaatcgtttgcaagacagtaacggcgaatccaaacccaaacccatactctatacactacgaatacaactacgataccttgaaggcgancgtgaatatgctcaagttgattcagctcggtctcaccttatcagatgagaaaggaaacttaccaacctgtggaaccaacaagcaatgcatctggcaattcaatttcaga

SEQ ID NO: 93159 - DNA, 484 bp, Arabidopsis thaliana columbia
aaacccgggccgaccgtcggcgctctctttttttttcttctctctttcttttcacctctcgccggatcccggcgatcttataggaggcaaatctatcagtatcgttattctaggatctctaacaaacaatgaatcgccaccacgatcccaatcctttcgatgaggacgaagaaatcgtcaatcctttttcgaaaggtggtggaagggttcctgctgcatctaggccagttgaatatggtcaaagccttgatgctactgttgatattccattggataatatgaatgactcttcacagaaacagagaaagcttgctgactgggaagctgagctcaggaagaaagaaatggatataaagcgaagagaggaagctattgctaaatttggtgtgcagatagatgataaaaactggccaccgtttttcccaatcatacaccatgacattgctaaagagatacaagttcatgcacaaaagctgcagtatct

SEQ ID NO: 93160 - DNA, 635 bp, Arabidopsis thaliana columbia
  unsure (1)..(635): unsure at all n locations
nnnnnnnnnnnnnnnctaatacgactcactatagggtacgctggtacgcctgcaggtaccggtccggactacccgggtcggcccacccgtccgtctgcttccttcttatcattcactcacgacactaaccatgaccaaattctccgagccaatcagagactcccacgtggcagttctcgcgtttttccccgttggcgctcatgccggtcctctcttagccgtcactcgccgtctcgccgccgcttctccctccaccatcttttctttcttcaacaccgcaagatcaaacgcgtcgttgttctcctctgatcatcccgagaacatcaaggtccacgacgtctctgacggtgttccggagggaaccatgctcgggaatccactggagatggtcgagctgtttctcgaagcggctccacgtattttccggagcgaaatcgcggcggcagagatagaagttggaaagaaagtgacatgcatgctaacagatgccttcttctggttcgcagcggacatagcggctgagctgaacccgacttgggttgccttctggggccggcgggaaactaatttttttgtcatntttacactgntttatnagagaaccatnggtntaaagntgtagntgnggnaattgc

SEQ ID NO: 93161 - DNA, 460 bp, Arabidopsis thaliana columbia
ctaaaacaaaaaatctcttaacaacttctccaccttctccccaccaccaccactcaccgcggagaaagaaaaaggggcaaccaccatgaaagactgtgaaaaccacggccactctcgccggaaactaataaggcgaatattttggtcaataatcttcgtcctcttcatcatcttcctaacaatcctcctcatttgggcaattctccaaccatcaaagccacgcttcatcctccaagacgccaccgtctacgccttcaacgtctccggcaatccaccgaacctcctcacctccaacttccaaatcactctctcttcccggaaccctaacaacaaaatcggcatttactacgaccggcttgacgtctacgctacttaccggagccaacaaatcactttcccaacatcaatccctcccacgtatcagggacacaaagatgtcgacatcttgtcgccgtttgtt

SEQ ID NO: 93162 - DNA, 459 bp, Arabidopsis thaliana columbia
agtaattataattctttcttacaaaaaaataaaaagatatatataaatcttttgcactctctctttgcttgttggtggtgcatatgtagtaagtaggttaagcttaaagaactgatcggagaatcacaaccatggctaaatgtcacgcggaataatatcggatctctcattcttgaccgtgctccttccacttcttcttcttctacttccggctaccatttccgtctctggagcaccttctctagatccacattccgtagaaagatcgtcgacgccgttagttgcggcggtagctcacgttaccgtcacgagctccgggaagaggacgatgaaggaagttacgtgacggtgacggcgaagtcaacagttgcatcatcgaaagatgcgaaagctaatacgatcggcgcggcgttgaacggcgtagtgttcgaggagacatccaagaaatcggagaagctt

SEQ ID NO: 93163 - DNA, 421 bp, Arabidopsis thaliana columbia
attgagcagagggaatgaaggaagctcttcacagtagaaattattacctttgtgctgtttttaataatcaaatgaaaacgtgctcttacaaaaccaaaagacacatttaacatcttaaaccatgttacttaactaatatacctcttgagatttgaaatgattggatcatataatcataggatacgtatcaccgtaccatgccatgttatttccactaatgttggaataattgatttatgacttgaccaacttatgcattaaagggttcatcgtcagctacatgccagctctttgcactctatgtatgagtcattttcggtccttttcgtattctttataaacttaatgggttccaaaaagaaaaatccaattctgattgctccatttattatagaaacttaaaagtaatgtactatagaaa

SEQ ID NO: 93164 - DNA, 536 bp, Arabidopsis thaliana columbia
caccccaaacatcacaatttcacattcttttgcatatttcttcttcttcttccattatggagatacggagcttgattgtttctatgaaccctaatttatcttcctttgagctctctcgccctgtatctcctctcactcgctcactagttccgttccgatcgactaaactagttccccgctccatttctagggtttcggcgtcgatctccaccccgaatagtgaaactgacaagatctccgttaaacctgtttacgtcccgacgtctcccaatcgcgaactccggactcctcacagtggataccatttcgatggaacacctcggaagttcttcgagggatggtatttcagggtttccatcccagagaagagggagagtttttgttttatgtattctgtggagaatcctgcatttcggcagagtttgtcaccattggaagtggctctatatggacctagattcactggtgttggagctcagattcttggcgctaatgataaatatttatgccaatacgaacaagactctcacaatttc

SEQ ID NO: 93165 - DNA, 527 bp, Arabidopsis thaliana columbia
  unsure (1)..(527): unsure at all n locations
cacaaagctcgttgtcgtcatcgcgcgacttgaaccaaaaaaaccatgaacagtgagaaggaagacgagccattggaagagatcggcgattcgaataatgttctcgatctcactagctatcagctccacagtctcgatacggtcgagttaccgccgaacctgattgagctggaccttacggcgaaccgtttgtcgggattggactcgaggatcgctcagctctccacgcttaagaagctttctctccgccaaaacctaattgatgattccgccgtcgaaccgttgtctcactgggacgccttgtccgatctcgaggagttagttctcagagataacaagctagcaaaagtaccagatgtcagcatattcacgaagcttttggtttacgacatatctttcaatgaatcactttctttgggaggattntccaaggcttttgnacactgaggnnctttnttgttntaaaantgnggtaccaagtttttggggtgacccttaaaaatttaggtttgacttgggtnanggtt

SEQ ID NO: 93166 - DNA, 461 bp, Arabidopsis thaliana columbia
  unsure (1)..(461): unsure at all n locations
accgggncggaaataccggggcggccccacgcgtccggaaccactcaacgaacccgccaaatttttagggctagaattgggagaaaccctaattttcaactttcatttccttttgctataaatctctgactccggttgttccttgatattaaaaagttgtatggtttggagatacaatctgcttttatcccacaagtaagtttctctactatcttcttctcatctagtgtcttcttttttttaaagcctttttgttgaatttctaactcaagctcatcttctctgtatttagccggcctcagatggtttcttgagaaggtttaaaaccaagtgcaagattcaagtaatctctgataacctcagcttgtcctctacttaattaaccatgtttccaagtcatcgacgtaatggattttattggatttcgaaagaacttttctggttcctcaagttgtttagga

SEQ ID NO: 93167 - DNA, 410 bp, Arabidopsis thaliana columbia
cgcgtccgaagtctttgactcagactcccaccgcgtaattccgagctaggtttccatttctccggcgaatcggacctctctctcgctctctcttccaatttccccttttttcgtttcccagcgatgatttgcaagtagcttccgctaataatcgcaactctctgacggatgctatggcaatgggacttattcgtcttctttctatagcttttacacttgttctactttcaatccttcctcttcatctctctctcgctgatgagataacatctattgaatctgtacctgaccttcagaagctaatgtatgttgctgttgatgggtttccttgtgtacgtcttctcaatctgtctggagagattggatgttcaaatcctggaataaataaagtggtggctccaatcataaaa

SEQ ID NO: 93168 - DNA, 419 bp, Arabidopsis thaliana columbia
cggacgcgtgggttccaatacccaaataaacatagctaagcttcacataaactaatgatcttaacatgaaaaagccttacaagagaatagctacaccttacgtggtcaattgaaatcattaaaaaatacatgtaaacatcataatttgagaacaaaaataagtgcaaaattaaaagatttaaaattactatgatattaatgcaataacaaaatttaaataaatatatctatttttagatatcaagaaagtcttttgaaattgtgaatattattctatgcaatttgttgaaccattgggtgaactgtttttcttatataatatttctaattctaaagaagaagaaaaatttacttgcaaacttacatataaaaacatgccaagttttaatactatattacaacctacaagaaaacatatt

SEQ ID NO: 93169 - DNA, 658 bp, Arabidopsis thaliana columbia
gaaaagtcaaacacttggtgatatgaacacaaacgttcaatatgacaaacccatgccaagtaaagagaaaatgaaaactggtgattgttgcggaaatcgtccaggattcctcgaccaggacttgaaatcgtcgaggggaaaataatcggttccgaggaatcgtcgatccggacttggaatcgtcgagaaaagtttaccgggtccgaggaatcgtcgatccggacttggaatcgtcgagaatccttcaccgggtccgaggattttgccgaccaggggttgaaatcgtcgaccaggtccgagacttcatcgaccgggtccgacgattcgtcgaccaggagtggaaatcgtcgagaaaaatctatcgggtccgaggaatcgtcgaccaggacgacgcaatcgtcgaccgggtccgaggatttgtcgaccaggggttgaaatcgtcgaccaggtccgagacttcatcgaccgggtccgaggattcgtcgaccaggtccgagacttcatcgaccgggtccaagtatttgatttttttttggaaccggtgtctcctcagacatttcaatgtatgttggtgccaagagggaaaagggctataaagctatataggggtgggtgtgtgtagcgggaattttgcccgcaccgcgcgcgcgaataagag

SEQ ID NO: 93170 - DNA, 481 bp, Arabidopsis thaliana columbia
cgcctgcatgtaccggtccggaattcccggttcgacccacgcgtacacccacgcgtccgcccacgcgtccgcgagaagacgacagaagggtcgaccaggacggcggatccctcgaccaggacgatgaatggtcgttgaaaatctatcgggttcgaggaatggtcgaccaggggttgaaatcgtcgacctcctcctgtgactgcgtcgaccgtgtccgaggagtggtcgaggatttgtcgaccaggagttgaaatcgtcgaccgggaccgagaattcgtcgaccaggacggcggaatgctcgaccaggacgatgaatgggcgatgaaaatctatcgggatagaggaatggtcgaccagaagttggaatcgtcgaccgggtccgagaattcgtcgaccaggacgaggagtggtcgaggatttgtcgaccaggagttgaaatcgtccaccgggtccgagaattcgtcgaccaggaccgggggac

SEQ ID NO: 93171 - DNA, 462 bp, Arabidopsis thaliana columbia
tcgatccggacttggaatcggggggaaatgtttaccgggtccgcggatttgtcgtccaggagtggaaatcgtcgagaaaaatctatcgggtccgaggaatcgtcgaccaggacgaggaatcgtcgaccgggtccgaggatttgtcgaccaggggttgaaatcgtcgaccaggtccgagacttcatcgaccgggtccgaggattcgtcgaccaggagtggaaatcgtcgagaaaaatctatcgggtccgaggaatcgtcgaccaggacgaggaatcgtcgaccgggtccgaggatttgtcgaccaggtccgagacttcatcgaccgggtccgaggattcgtcgaccaggtccgagacttcatcgaccgggtccaagtatttgattttattttggaaccggtgtctcctcagacatttcaatgtatgctggtgccaagagggaaaagggctataaagctatata

SEQ ID NO: 93172 - DNA, 660 bp, Arabidopsis thaliana columbia
gaacttgacataaaacttggtctcaaattctagcttaattgtaatagagtctcattattatgtattgaaaattaaaaattttggaaaatacgtttgtaaatagaataggtttttgattctgtttacaaatatccaaataggtaaatgaaattattaaattcaaatttctttttattttcaataaaaagaataaaaaaaaaaggacagagttccttttttatagtttagctagaagaggagattatatgaaaaatttaaccgattctttcgtttacttgggtcactggccatccgccgggagtttcggatttaataccgatattttagcaacaaatccaataaatctaagtgtagttttcggtgtattgatcttttttggaaagggagtgtgtgtgagttgttcatttcaagaataggctggattcacccagtggcactataactaggaaagagtgcataatcccgcgaattacttctgaataaaaaaatcatatttgagaaccatagcctttcgttattctttggtaagtccgctttactttgattctctattaaccaaaaattgggacaattaattaacatggttaaagctaacccgtttgaagtccacacgcaacatggtactctttctactatatatagtctaaatgtagactaaat

SEQ ID NO: 93173 - DNA, 1116 bp, Arabidopsis thaliana columbia
gggtatcggttcccccctcgcggtccacggtatcgataagcttgatatcgaattcgcggccgcgccggttgtttttgatttaataccgatattttagcaacaaatctaataaatctaagtgtagttttcggtgtattgatcttttttggaaagggagtgttaaatgatttattagataaccgaaagcagaggatattaaatactattcgaaattcagaagaactgcgtgaaggagctattcaacaattagaaaatgcccgggcgcgcttgcgtaacgtagaaacggaagcggataagtttcgcgtgaatggatactctgaaatcgaacgagaaaaattgaatttgattaattcaacttataaaactttgaaacaattagaaaattacaaaaatgaaaccattctttttgagcaacaaagaacaattaatcaagtccgcgaacgggttttccaacaagctttacaaggagctataggaaccctaaatagttgtttgagtaatgagttacatttacgtactattaatgcaaatattgggatgtttggtacgatgaaaggaaataactgattaattatttccttacgattattataggcattatttttttttcttccaacaaaagaatcaggacaatactcatggtaaccattagagccggcgaaattagtaatattatccgtgaacgtattgagcaatataatagagaagtaacgattgtaaataccggtaccgtacttcaagtgggcgatggcatcgctcgtatttatggtcttgatgaagtaatggcaggtgaattagtagaatttgaggagggtactataggtattgcccttaatttagaatccaataatgttggtgttgtattaatgggtgacggtttgatgatccaagaaggaagttcagtcaaagctacgggaaaaattgctcagataccggtgagtgaggcttatttggggcgtgttataaacgccttggctaaccctattgatggtcgaggtaagatttccgcttctgaatctcggttaattgaatcttctgccccaggtattatttcgagacgttctgtatatgagcctcttcaaacaggacttattgctattgaattcttgatccctt

SEQ ID NO: 93174 - DNA, 505 bp, Arabidopsis thaliana columbia
aaacaacaatcgctctctacaatggcggaaaggttctctagcggcgaggcccaatattggcccaattatggtagcaccgccaccaccaccgttagcaacagccccatctcgtcgtttttccatcagctccgatcccattcaccaacatcctcgcagctctttggtttcctcgctctctttatctccactggcatcctcctcttcctccttggtgtaagcgtcaccgctgccgtgctcggcttcattgtctttcttccattgatcatcatctcgagtccgatatggattcccctttttgtcgtcgttggcgggttcttaacggtctccggatttcttgtcggaacggtggctttagtgtcgtggacgtaccgctatttccggggaatgcacccggttggatcgaatcagatggattatgcacgtagtaggatctatgacacggcatctcacgtcaaagattacgctagagaattcacgggtactttcatggcagggctaaagatgc

SEQ ID NO: 93175 - DNA, 523 bp, Arabidopsis thaliana columbia
  unsure (1)..(523): unsure at all n locations
ttttgattcccaaaacaaaaaactttcttcaattattctattcatcttctcatggcggctctctccaccaccttctactaccacccactctgcactaaccaccgtacaaagagacaagcctcaagcagacacggagttagatctatgagagtgatgtcttgtcggaagcagaaattaccagaagagaatgaaggagtgatccagagaacattgagaaggatgatttcagaggctgggaagattgggaagaatctgaagccagagaagaagaaaggagacgtcaaggacctgatgcttatgagtctctcttttgctggttatgtttatatctctcaactattgggttgtgcttacttctcctggcaacatctcagcttccccaaatcttcatgaaaaggccaaccaaccattggggtaaactttcaaccagttagggctctttttttttgngccgaaaggngttnaagaccctnggaaannncgntggtttnccttnaaaaccaaatttttnccnaaatttttt

SEQ ID NO: 93176 - DNA, 714 bp, Arabidopsis thaliana columbia
aattcaacaagagatcgcagcagttaccgtgcaggctgcgtatagaggatacttggcacgacgtgctttcaagatattaaaaggtataataaggctacaagcacttatccgtggtcacatggttagaaggcaagctgtttcgactctgtgctgtgttatgggaattgtcagattgcaagcacttgctcgtgggagagagatcagacattcagacattggagttgaagttcagaggaaatgtcatttgcatcatcagcctttagagaataaagccaactcggttgttgatacacattcttacttgggaatcaataagctaacaggaaatgcttttgctcagaagcttctagcttcatcgccaaacgtgctgcctttgtccctcgacaatgattcttccaattcaatctggttagagaactggtcagcatcttgcttctggaaaccagttcctcagccaaagaaagcatcactcagaaaatctcagaagaagtttgccagtaatcctcagatagtcgaggctgagtttgcgagaccaaagaagagtgttcgcaaagtcccttcttcaaatctcgacaattcctcggtggcacagacatcaatctgagcttgagaaacccaaacgcagcttccgcaaggtttcaacaagccagtctgtagaaccactaccgtctatggacaatcctcaagttgatctagagaaagtgaaacgtggct

SEQ ID NO: 93177 - DNA, 1994 bp, Arabidopsis thaliana columbia
tatcaatggaggctacggcggcgccattctcttcaattgtctcttccagacaaaacttctcttcatcttcttcgattcgcgcttcttctccggcttctttattcctctcccagaagagtattggcaatgttaatcgcaaattcaaatctcccagaagcctctccgtccgcgcatcttctacctcagattctgttgtgactttgcttgactacggagctggaaatgttcggagcatccgcaatgctcttcgtcatctcggcttcagcatcaaagacgttcaaacgccgggagacattctgaatgctgatcgactcatatttccaggcgttgggccttttgcacccgccatggatgtacttaacagaactgggatggctgaagctttgtgcaaatatattgagaatgaccgtccatttctaggcatatgtcttggtctacaactacttttcgattctagtgaacagaatggaccagtcaaaggtcttggtgtgataccgggaatagttggacgctttgatgcttcagctggtataagagtaccccacattggctggaatgctttgcaagttgggaaggattctgaaattttggatgatgttggaaaccgtcatgtctattttgttcattcgtacagggccattccatcagatgaaaataaggactggatttcgtctacctgtaattatggtgaatcatttatatcttccataagaaggggaaatgtgcatgcagttcaattccatcctgaaaagagcggggaggtggggctttctgttttaagaaggttcttgcatccaaaattacctgcaacacagaagccaatggaaggaaaggcctcaaaacttgcaaagagggtgattgcttgtcttgatgtgaggacgaatgataaaggagatctcgtagttactaaaggggatcagtatgatgtgagagagcaatctaatgaaaacgaggttcgaaaccttggcaaacctgttgatttggctgggcagtattacaaagatggtgcagatgagattagctttttaaacataactggattccgcgattttcctctaggggatttgccgatgattcaggtgttgaggcagacatcaaagaatgtctttgtaccactaactgttggaggtggtattagagactttacagatgctagtggcaggtactattctagcttggaagttgctgctgagtatttcagatccggtgctgataagatgtccataggaagtgacgctgtttttgctgcagaggagttcataaaatcaggggtgaagacaggaaagagtagtttagaacagatatccagagtttatggaaatcaggcagtggttgtaagtattgatcctcgtagagtttatgtgaaccatccggatgatgtgccatacaaagtcatcagagtaactaatccaggcccaaatggagaagaatatgcctggtatcagtgcacggtcagtggaggacaagaaggtcgacctattggagcatttgagcttgcgaaagcggttgaagaattaggtgccggtgaaatactattgaactgcataaactgtgatggtcaagggaaaggattcgacatagacttagtaaagctcatctcagattcagtaggcataccggtgatcgcaagcagtggagcaggtactcccgaccacttttccgaggtgtttgaagaagacaaacgcatctgccgcgcttgctgccggcattttccaccggaaagagggtaccaatcccaatctgtgaaagagcacttacaagaggagcgcatagaagtcaggatctgagaattttctggtctgcgtgttaccataattcatgacacattcaacaagatagaatctttaccttcaataaattaaattaagtcggaaccatcggagctccaataggtctgagtgaatcctcttatagttgatttccttttgttgacagtaagactgatacaatttatggatttcccttgaaagtaagaaagcaacgtatgttcactt

SEQ ID NO: 93178 - DNA, 417 bp, Arabidopsis thaliana columbia
gcgggacccacgcaacccgtcctttaaaaactcttctagcaaagcaatgctctgttcatctgaaaagggccgtgcaatgtgaagagtgagtaaagactaaagactaagacagtagattgttgtaatctcaaactaagcattttagggaagataccagcaatagaaccaagcgcttctgcagcctcatgtctaaccattgggtgctcattcacatctctaagtactttgcttagagtagctaaagcagttttactttgcaactgacccaagacataagcaacctaagaaaaattgcatcaattacaaggcagcacttatacagatttaaggttcgagagcaataaagcaaagattcaaggtacaagattttaacaaaaacagacacatcaagtcatgacatatacaggaaagtgcaaa

SEQ ID NO: 93179 - DNA, 558 bp, Arabidopsis thaliana columbia
  unsure (1)..(558): unsure at all n locations
attaannnnnnnnnnnnnnnnnnnnnnnnnnnnnnnnnnnnnnnnnnnnnnnnnnnnnnnnnnnnncgagcgccctccctttttttgtttttttcaaaacacaaaggattctctttcttcaacaatgaaaagcttccgtaccataagacaatgtaatcttaaccttaaacatatgaatagagttatttataatcgtacataaagacatgttaaagtagcagtttcttctctctctgtataaaatgtttgctttcctttgtcggtaaatgtttgacgaagaatgattgagattcttagtgaacaagcgggtcttgcgtgaaaaaaaactcaaacgatttcccggaattttcaaattccaacatactcaatgctgcgtcattctcctttgtgcaacatttggctcagggtcctttgagaattcttctagcaaagcaatgctctgttcatcagcaatagaaccaagcgcttctgcaggctcatgtctaaccattggggtgctcattcacatctctaagtactttgcttagagtagctaaagcagttttactttgcaactga

SEQ ID NO: 93180 - DNA, 387 bp, Arabidopsis thaliana columbia
tttccggaagcttgcctcggcatatacctgcaagtcagcatcataagtcaggcgcttatctttgtgacccgatcacggagttggtcttatgtagatcgtcctgggatgttgcttgtggtagcctttatccttgcacaattggtggctactctaattgcagtctatgcgaattggagctttgctgcaatagaagggatcgggtggggatgggccggggtcatctggctttacaatatcgtattctatattcctcttgatatcatcaagttcttgattcgttatgcccttagcggaagagcctgggatcttgttatcgaacaaagggttgcattcacgaggcagaaggatttcgggaaagaacaaaaggagctacaatgggcacatgca

SEQ ID NO: 93181 - DNA, 651 bp, Arabidopsis thaliana columbia
  unsure (1)..(651): unsure at all n locations
caaaaaaagagagagtaaaacagaatagagttatcctaataaccaaacactctcaaaatcatttcccaaaaaccccaaagctttgtcacacacacttcttctcgtttagaaaatttgcatttcaatcagaaaattggtcttccccttggagacgacaatgcagaggttttgcactaagctacgttccatttccctccaatccaatcggaatctctcctttttcggtgcttctcctcaccgtctcattcaccattctccttctccgagtcgtcacttaacaacaacaacaaccctaggtttcgccaattccaccaaatggagcttccttcccgccgccggagtttctccgtcgaatgttagctccatgggctctacctttgttcctcatcacgttggtctcctgcgttatatcacttctaaggaaaaaatggcaaaatggaagaagaagtggagncctaggactccaatcacatcaaaagtcaagnaagtcaagnttaagntttattcgtcattcaaaggcaggtttaaccactaaatgatggtaccatccgtcgctggaagaaggcaagggcacaacgacatttgagcaagnaatcgagcgtgnttgggcaacctggctngtcccngattggagnatggnctatttgantc

SEQ ID NO: 93182 - DNA, 428 bp, Arabidopsis thaliana columbia
gcgctcacacaggcatcaaaagcagaaacaaatatatacatcaccataatcatcatcatcgtgagaaccttcatctttttgagcaacaaagttatgggtttctcgggaatttggttaaatctttatgtggtgtttggatctttaatggtttttgagagaatggtggtgatgaaggcacagccactggttccagcaattttcatatttggtgattcggtggttgatgtgggaaacaacaatgatatctacacaatcgtcaaagctaatttccctccttatggaagagatttcacaacccatacacccaccggacgcttctgcaatggaaagttagctactgacttcaccgctgagaatcttgggttcaaatcatacccacaagcttatctaagcaaaaaggcaaaaggcaagaaccttttgattggagc

SEQ ID NO: 93183 - DNA, 410 bp, Arabidopsis thaliana columbia
ggtcacaccggtccatgatgtggaaggagtagagttatgtgggactttgaagaatgtagttgctatggcagcgggtttcgtggacggtttggaaatgggtaataacacaaaggctgcaatcatgaggattggtctaagagagatgaaagcactctcaaagcttttgtttccatctgttaaagattgtactttcttcgagagctgcggtgtagcagatgtcattacaacttgcttaggaggaagaaaccggagagttgcggaagcatttgcaaaaagcagaggaaaaaggtcttttgatgagcttgaagcagagatgctacaagggcaaaagctacaggtgggatcgacggtaaaagaggtctacgaggtgttgaaacattgtcgatggttggagctttttaccttctttt

SEQ ID NO: 93184 - DNA, 436 bp, Arabidopsis thaliana columbia
ggggataagtttgagcggtggattttgtatggagccgccgagttcgagaccggaggaacctccgtcatgggaggacctttacaaaatcaatcttatgccgtcggagctattccttaagttccgcaaagagcttcaaggccttcgcgtcggcgtcaatcccgagttatataacgaccccaccaatgattaccacgcaaagcttgttttgaagcctctatgtccagaaaggaagtgggaggttacaatatgagccgccacaccaagaagttcgtgttttatccaagaagattcccggtcaccagatttccaaacctccaggttggtgttggacataactttcaaatgaatgcaattggttggaaatggaagcttacttcatgtttgggtggagatggtgtgtctcggattcgaaataaaactactcttggtcttagtc

SEQ ID NO: 93185 - DNA, 418 bp, Arabidopsis thaliana columbia
gtttctccttctctctgcagaaaccgtaattaaaaaccccccacaacttcttcaacataacgtcttcttcttccatctttcgttgcattcacgtttttaaaggttctctgaatcactccattaaaaatagctttgaacaagttttctcaatagtcaacaaaaacaatggccgttgaagctcaccatctaaatcctctgttctcttccaacagagaaatgattcatcccgttgaagcaagcggtgtagtctataacacccagatgagatacggcaccgttccgacgtttaaccccaccgtggaatgtcaaacttctctgtttaacccaatctacaacatctcaccagtcgatcgtttggttcatcaatccatgaaaccaacgatacagtccgttgatagttctctcacattcaacagcg

SEQ ID NO: 93186 - DNA, 584 bp, Arabidopsis thaliana columbia
  unsure (1)..(584): unsure at all n locations
tcaancccgttccccgtgcttattgtaatccgaaccttgtgaaccccctatcctcccgttccgccattagttttatggagaatccggaaccatggtgaatccaccaccaaatgcttaccgcctccggtagtggttgtaccggtgaatgtggaaatatggtgaaaagcccctaaccgctagtggtggtggttatgggcctagatgcaaagccagctaaagctagcggttgcgggggtggttgcggtggtggctgcggcggtggttgcggagacatggtgaaatcagtaaatgctagcggctgtggcggtggttgtaacggtgaatgcggaaacatggtgaaagcagcataatctggtagttgtggtggtgacctagtagagaatgcgaaaatgtggtgaacagtaaggtgcaaatggaggcggttgcggtgaggacgccatcatgtggcttaatatcaaaactgtaaattacaaataaagttgtactttgttgtttgtttatgcaatgaatggttcgtttctgttaaaaaaacaaattataatatatataattttaaaaaaattttatatatattcattatttat

SEQ ID NO: 93187 - DNA, 1235 bp, Arabidopsis thaliana columbia
  unsure (1)..(1235): unsure at all n locations
gctctctacgactcactatagggaaagctggcacgcctgcaggtaccggtccggaattcccgggtcgacccacgcgtccgaattctgactgtgagcaattttacgggagagttctcgacaattctggagttctttcttctgttgatgggaactgcaaattgaaaactgaagatttgtggaaaagattgtaccctgatgaaccttatgagcttgacttggataacatagacttagaggacatctctgagaaatcttcagctcttgagaaatgcaccaaatatgatcttgtttcagctgttaagaggcagagcccattttactaccaggtttcgaggtcccatgtaaacagtgacatttttctacaagaagctgttgctagatataaggggtttctctatctgataaagatgaacagagaaaggtctttaaaaaggttttgtgttccgacttacgatgttgaccttatctggcacacacatcagctgcacccagtttcttactgtgatgatatggtgaagctcattggtaaagtgttggagcatgatgacacagattctgaccgaggcaaaggtaagaagctcgataccggtttttctaagactactgcacaatgggaagagacattcggtacaaggtactggaaagccggtgcaatgcatagaggcaagacacctgtacctgtcacaaattctccttatgcttctgatgttttggtcaaagacccaactgcaaaagacgatttccagaatttaatccaattcccagaggtggaagttgttgaggttctcttggagattatcggggttagaaacttaccagatggacataagggaaaggtctcggttatgttcagtaaaactcagccggattctcttttcaatgctgaacgtagactgaccattttatccgaggttggggaaaagcaagtagctactttccagtgtgaacctacaggagagcttgttttcaaacttatttcctgttcaccgtctaagataccagttgtcaggacagcctaaaaacttgggttttgcttctttatcactaaaggagtttctgtttccagttattactcaactctctgttgagaagtggttggggttaanacccngtaaaggtggcaaacagttcggaacccntnagcctncgggtcgtgtctcgnttctccncagtnggggccatnagncttnacanggtcaanaaggccntngggaaaggttttgttntttcaatga

SEQ ID NO: 93188 - DNA, 555 bp, Arabidopsis thaliana columbia
tacgactcacttagggaaagctggtacgcctgcaggtaccggtccggaattcccgggtcgactcacctgatcggataaaattctcggcgaagaagtgaagtttccggcgatcagaggtgatatggataaggagaaggatcatgaagtggagtggcttgaagctcagaagatagaaataagcgttgacttattagctgcagcgaaacaacaccttttgttccttgaaactgttgataggaatcgatggctctacgatggtcctgcgcttgaaaaagccatctacaggtacaatgcttgttggcttcctttgcttgttaaatactctgagtcatcatcggttagtgaagggtctttggtccctcctcttgattgtgaatggatttggcattgtcacaggcttaatccggtgaggtataattctgactgtgagcaattttacgggagagttctcgacaattctggagttctttcttctgttgatgggaactgcaaattgaaaactgaagatttgtggaaaagattgtaccctgatgaaccttatgagcttgacttgga

SEQ ID NO: 93189 - DNA, 667 bp, Arabidopsis thaliana columbia
  unsure (1)..(667): unsure at all n locations
ggtggctgtagtggtgaatcggaaaccatggtgaaagcagctaatgctagcggttcgngcagtagttgtagtggagaatgcggagacatggtgaaatcagcagcaaatgctagcggctgcggtagtggttgtagcggtgaatgtggaaatatggtgaaagcagctaacgctagtggtggtggttatggggctagatgcaaagcagctaaagctagcggttgcgggggtggttgcggtggtggctgcggcggtggttgcggagacatggtgaaatcagtaaatgctagcggctgtggcggtggttgtaacggtgaatgcggaaacatggtgaaagcagcataatctggtagttgtggtggtgacctagtagagaatgcgaaaatgtggtgaacagtaaggtgcaaatggaggcggttgcggtgaggacgccatcatgtggcttaatatcaaaactgtaaattacaaataaagttgtactttgttgtttgtttatgcaatgaatggtttgtttctgttaattgccaaagactgtgaggatctgatccgaatgccaatttggcatgagctagaaagtaccacacataaaaaaaaaaaaaaagnnnnnnnnnnnnnnnnnnnnnnnnnnnnnnnnnnnnnnnnnnnnnnnnnnnnnnnnnnnnnnnnnnnn

SEQ ID NO: 93190 - DNA, 1594 bp, Arabidopsis thaliana columbia
  unsure (1)..(1594): unsure at all n locations
tgccgtaccggtccggaattcccgggtcgacccacgcgtccgaagataccagtttcaagagagcctaaaaacttgggttttgcttctttatcactaaaggagtttctgtttccagttattactcaactctctgttgagaagtggttggagttaacacccagtaaaggtagtcaaacagatacgaaacccataagcctgcgagtcgctgtctcgtttactccaccagtacgcagtccatcagtcttacacatggttcaatcaagaccatcgtgcaaaggctcttgcttctttccaatcattggaaagtccccgtcttgctaaaagttcaacacacattgttgatgaaacccaaacagaggtgatcacacttcaaattaggaactccgctgatggaggaatacttaaagatgatcagagacaagttatgggtgtgacagactctggtgaaactcgcgtgcttgcggtttatactggtagtttctggtctttgctggactcgaaatggtcacttaagcaaataaacgcctccactgcagataatccgctctttgagattttgggccctcgagtggtgaaaattttctcggggagaaagctggattatgaaccaaaacactgcgcaaaccttagaagtgatctagatttcatgactcttgtggaattttccaagcaacatccatatggatgttgcttggaaaaactgtgggattggttgatatgagatttggttccattgaggcgaaagagaattggttgcttttacccggaatcgtatctgctttcatactccatactgttctgaagaaaggaggttctgaaggcttcaatgtcacaaccaaagatataaaagaggaaagcaaacagactaaacttgttgctgcgacagaaaataatgtgaatgcaaactctacgaatgtggagacccaaactgctattacagcccctaaaaaaggcagcggttgcggcggtggctgtagtggtgaatgcggaaacatggtgaaagcagctaatgctagcggttgcggcagtagttgtagtggagaatgcggagacatggtgaaatcagcagcaaatgctagcggctgcggtagtggttgtagcggtgaatgtggaaatatggtgaaagcagctaacgctagtggtggtggttatggggctagatgcaaagcagctaaagctagcggttgcgggggtggttccggtggtggctgcggcggtggttgcggagacatggtgaaatcagtaaatgctagcggctgtggcggtggttgtaacggtgaatgcggaaacatggtgaaagcagcataatctggtagttgtggtggtgacctagtagagaatgcgaaaatgtggtgaacagtaaggtgcaaatggaggcggttgcggtgaggacgccatcatgtggcttaatatcaaaactgtaaattacaaataaagttgtactttgttgtttgtttatgcaatgaatggtttgtttctgttaaaaaaaaaaaaaaaaaaaaaaaaagggcggccgctctagaggatccaagcttacgtacgcgtgcatgcgacgtcatagtcttctatagtgtnnnnnnnnnnnnnnnnnnnn

SEQ ID NO: 93191 - DNA, 1691 bp, Arabidopsis thaliana columbia
  unsure (1)..(1691): unsure at all n locations
ccaccaccaccttcgatcgatttctactaacttgttcttcttcttctttctcaactctcttgtcttttgtctctccaccaattttttcttgttctttctctctccaccacataaaaaaaaaaacctagctttgtcccctcaactcactgattgaactgcttgattttcgattgatcatctgggtggttttgaatcgaagagtattgttgtattagtggctggtggctctccaaaagagtaaggccggagagagaaatcaatggcctctggcggcggagaggcggataaatcacttgaaatcgggtccgggaccgcggatcccaaaataggcggtactgggagcaggagcgccggagaagaacgatacttcagggcagatacactggatttcagtaaatgggatttgcatatgggtcaaacctctactagcagcgtcctcaccaattccgcttccacgagcgctcccgcaccggcgatgcaggaatgggagattgacctctccaaactcgatatgaagcacgtcctcgctcacggtacttacggcactgtctaccgcggtgtctacgccggccaagaagtcgcagtgaaagtgttagattggggagaagatggttacgccacaccagctgaaactacagctctccgtgcttccttcgagcaagaggtcgccgtctggcagaagctcgatcatcccaacgttaccaagtttataggagcatccatgggaacctctgatctgcggatccctcctgctggtgatactggcggacgtggtaacggtgcacatcctgcgagggcctgttgtgttgtggttgaatatgttgccggaggcacgcttaagaagttcctcatcaagaaatatagggccaaactacccatcaaggatgtcattcagctcgctttggatctcgctagagggcttagttacctccactccaaggcgattgtacatagggacgtgaagtcagagaacatgctgttacagcctaacaagacgctgaagatcgctgatttcggggtagctagagttgaagctcagaaccctcaagacatgacgggtgaaactggaacacttggatacatggcaccagaggttcttgaaggaaagccttacaacaggaaatgcgatgtctatagctttggggtatgcctctgggaaatatactgctgtgacatgccctatgctgactgtagttttgctgagatctctcacgccgttgttcataggaatctgagaccagagattccgaaatgctgcccgcatgcggtggcaaacatcatgaagagatgctgggacccgaatccagacaggcgtccggagatggaggaggtggtgaagctgcttgaagccatagacacaagcaaaggtggtggaatgatagctccggaccagtttcaggggtgcctctgtttcttcaaacctcgaggcccctgaatctctctccctctctttcccttttgctccgtgtctgatatattcttgagagctgcgtgattctttggattttgtatttactttgagctatgggagttggattggtgtgggttttgtcataagaatctttctgcgctctatgtatttatatacttaacacagtcgtgtataattcgattaagctttattttattttttgataagaaaaaaaacaaaaagggaagccgctctagaggatccaangcttacgtacgcg

SEQ ID NO: 93192 - DNA, 506 bp, Arabidopsis thaliana columbia
aatggatgaagatgttgagcaggccagtttgatgtctttcagtgacaggcctacggcttttctcaacatgcgtagtaaaacctatagtccactgatattccggattattaggaaattaaatgtccgtgtcatttcgataattctgcttttctgcttcggagcaatcttttacatgggggcaagtacttctcccatcatcgtgttcgtcttcacagtatgcatcatcagcttccttttgtcaatatatctaaccaagtgggttttagcgaaagatgaaggacctccagagatggttgagatatcagatgctatacgtgatggagctgaaggttttttcagaacgcatatagcactatatccaagatggccattttgctagcttttgtgattctttgcatatatctattccgtagcttaactccccagcaagaggctgctggtttaggaagggcgatgtctgcttatattactgttgctgcatttcttttgggggctctatgctcagg

SEQ ID NO: 93193 - DNA, 701 bp, Arabidopsis thaliana columbia
  unsure (1)..(701): unsure at all n locations
tgcagacaggattcccgaagctcatattcttgaaatggcagaacgatctgctaaaaatcagagactggagatttgggaaaactatgttgaaggagaggaagtagtaaacggtagttctaaagtagaaaccaggcagaaggaaacactaaaggttgttgttacggaagtacttggaggcggtcgtttctatgttcagacggttggcgatcaaaaagtagcttcgattcaaaaccagcttgcagctctgagtcttaaagacgctcccattattggatcgtttaatcctaagaagggtgacatcgtccttgcacaatttagcctcgataactcctggaaccgcgcaatgattgttaatggacctcgaggagcagttcaatctccagaggaggaatttgaagtgttctacatcgattatggaaaccaagaaatagttccgtacagcgcaatacgccctgtggacccttcagtatcctcagcaccagggctagcacagctctgcagacttgcctacataaaagttccaggcaaggaagaggactttggtcgtgacgccggagagtatttgcataccgtaacactcgnaagtggtaaagagttcagggcagtagtagnggaaagagatacttcaggaggcaangtgangggccaacgaacttgtacttngctcgttgtaactctcatcgttgtcgatgatgagatct

SEQ ID NO: 93194 - DNA, 459 bp, Arabidopsis thaliana columbia
caattttcttctgctgctgcttcttcacaaggttgctgctgcttcttcacaagaggttgaagaatgtcagctccgaaatcgggtggtgatccactaccacatccgccgaaagaacagcttccagatatctcttactgcattacaagtcctcctccatggcctgaggctgttctgcttgggtttcaacactaccttgtgatgcttggaacaacagttctgattccatcggctcttgttccacaaatgggaggtagaaatgaagagaaggcaaagctgatccagacaatactgtttgtagctggattgaacacattgctccaaactgtgtttggaactagattacctgctgttattggagcatcttatacatttgtcccagttactatctcaatcatgctttctgggagattcaatgacgttgcagatccagttgagcgatttaagaggataattcgggca

SEQ ID NO: 93195 - DNA, 451 bp, Arabidopsis thaliana columbia
ctgaggatgaagctcggttctacagtgcagaagttgttgatgctcttgggggtatacataatatgggactgatacatcgagatattaagccggagaatctgttgttaactttagatgggcacataaagattgctgattttggtagcgtaaagccaatgcaagacagccaaatcacagtgcttcctaatgcggcttctgatgataaggcgtgcacttttgtcgggacggctgcatatgttcctcctgaagttctaaactcctctccagcaacgttcggaaatgatctctgggcactcggctgcactctgtaccaaatgctttcaggaacttccccattcaaggatgcaagtgaatggctgattttccaaagaattatagctagagatataaagtttccaaatcatttctcagaagcagcaagagacctcatcgaccgattgctagatacaga

SEQ ID NO: 93196 - DNA, 520 bp, Arabidopsis thaliana columbia
  unsure (1)..(520): unsure at all n locations
cgttttatcttccaatcaaagcagctcaaatcaagctcgcaaagatgatgcacatgaccttctactggggaatcaaagccacaattctcttcgatttctggaaaactgactcatggcttagttacatcctcactttaatcgcttgcttcgtcttctccgctttctatcaatacctcgagaatcgccgcatccaattcaaatccctttcttcctcccgtcgtgctcctccaccgcctcgctcttcctccggcgtctccgcgcctcttatccctaaatccggtaccagatccgccgctaaagctgcttcggttcttcttttcggcgtcaacgcagcgatcggttacttgctgatgcttgcagctatgtctttcaacggaggtgttttcatcgcgattgtcgtcggattaaccggccggatacgctgtttttagatctgatgacgggggtgctgataccgccacggatgttccatgtccatgtgcttgataatgtttggtagaaaatnaaaantngggnaant

SEQ ID NO: 93197 - DNA, 561 bp, Arabidopsis thaliana columbia
  unsure (1)..(561): unsure at all n locations
agaagcttctagcttctctttcaatggcgaaagactttgcctccaagagacacaatagtttccactggacaagaaaagtcggatcagacgaaaacgacgacgtttcttctcataaacctcttcctcatcacaacaacactaaaccttcttcttcttcatcttcatcttcctctaatgtaatcactcacaaaaaaaagcttcaatctttcgccgtttctggtctccgggtcagttatcgctactctaagcagagcacggccccgggtaaccaaaactccggggcttcggggtcacggggtcgtgggtacactttttgggtctcgtcgtggtcacgtgcatttttctatccagaaagatcctaattnttccacccggcgtttttaatcggactcgntactcccgattaagtggggttagtcaaagaaatggnttcaggnctcgttagaatcggttttgggtgtnntaagggggaaagggnggagnaggnggggnaaaacggnncttttcggnnggggggggggcaancgnggcggcgncgcggggggggtttnggnggttntt

SEQ ID NO: 93198 - DNA, 626 bp, Arabidopsis thaliana columbia
gggaaactcaagggataatcgtaaatcaccatcaatgcttcattccgcgctacagtatctcttgtcgtgttcttggctttttcgatctttctaaactgaaaccactttccctttcaagttcgaatcaattcagatgattctggaattttgattaaaagacttaaatctttgagaattttgtcggctcttctcttctgggtttggttctgatcatagaaaaggatacgatggagtcttctttaattcatcatatcatcattgtgttgctgttactctggttcatctcttccttgaatcgatcccacgcctttttctatttcctcgctctcatttatctctacctggttcacgaacggtatgtgatgagattgaagagaaaattgcagttcgaagagaggaagcaagcaaatcagagaagggttctatctgattctgaatctgtgagatggatgaattatgctgtggagaagatatggccaatatgcatggaacagatagcgtctcagaagattctgggtccaatcataccttggttcttggaaaaatatagaccttggacagcgaaaaaagctgtgatacagcacctttacatgggaagaaacccacctctgttgactgatattagg

SEQ ID NO: 93199 - DNA, 410 bp, Arabidopsis thaliana columbia
ctccaaagtccaagctcacaatgaacacttccccaaaaatggaaatggaaatgaaaatggaaacgaaggcggctcctgaagctggtatgatcaaaaagtccaacgaggagtggcgtacggttctatctcctgaacagtttaagattcttagagagaaatctattgaaaagagagggtcaggagaatatgtgaagttgttcgaggaaggaatctactgttgtgttggttgtggaaatccggtttataaatcaaccactaaattcgattccggttgcggttggccggctttttttgatgctattcctggcgccatttaccgaaccggtaacctaatctccccttttttttcttttttttaatgaatattgaatttttatcataactctaaagaaacctaaactaatctctga

SEQ ID NO: 93200 - DNA, 624 bp, Arabidopsis thaliana columbia
  unsure (1)..(624): unsure at all n locations
cgagtcttcgacgagtctccggctgcnagtttctcttgctccggcaaacagacctgtcattgcttctctctccggctaactacacagaagcatggtgtttggacaagtagtaataggtcctccaggatcgggaaagaccacttattgtaatggaatgtctcagttcctctctctaatgggcaggaaggttgctattgttaatctggatcctgcaaatgatgcattaccttatgagtgtggtgtgaatatagaagaattgatcaagttagaagatgttatgtcggaacactcgcttggtcctaatggaggtcttgtatattgtatggagtacttggagaaaaacattgactggctggaatctaaactaaagcctcttctgaaggatcattacattctctttgattttcctggccaagtggaattgttcttcattcatgacagtaccaagaatgttctcacgaagctgattaaatcattgaaccttagattaactgctgtgcaactaattgattcccatctatgttgtgatcccgggaactacgtaagttcgctacttctctccttatccacaatgcttcacatggaactcccacatgtcaatgtattgtctaaaatcgatctgat

SEQ ID NO: 93201 - DNA, 408 bp, Arabidopsis thaliana columbia
cacagacactgcactcgatctttctcgtggccaaatcttttgattctccgttcattctccggttccgatctcgaagaagatgagagtagtagtaatatcttcctttgtctccgtctctttgcaactatcctttcttcttctccttgcttctgccattagatcaagctcgtctccaccgaacgatccgtttctcggcatttctcctcaagatgagaagtattacaagtcatcttcagagattaagtgtaaggatggatcaaagaaattcacgaaagctcagcttaatgacgatttctgtgattgttcagatggaactgacgagccaggtacctcagcttgtccaactggaaaattctattgccggaacgccggccactctccggtgattttgttttcttccagagttaa

SEQ ID NO: 93202 - DNA, 409 bp, Arabidopsis thaliana columbia
ctttaaattagacctaattctggcttcttctttttcgttcacgggtttcgttcagtaacgttgagagtataataaatatctcaaaaatattttcaggtcattgattatattctggtaaaagaaaacatatgtgtgcgttcataattaacatcgttctgaatcttatgatgatgatcataattaacatgtgtgtgttctttcacaaaaaaaacatatgtgtgtggtcataattaacatcgatcggctcagaaaggggtttcatcaaccaaacgctgtaagattgtaagtttttctttttttttttttttttgttaaaatgacctgagaatctcaaacttgaatctaaattggccttcaataattgtggaaagccggaatttcttataattttttggtttagataaaatat

SEQ ID NO: 93203 - DNA, 628 bp, Arabidopsis thaliana columbia
gcctgcaggtaccggtccggaattcccgggttgacccacgcgtgcgaccacgcgtccgcccacgcgtccgtacggctgcgagaagacgacagaaggggaaaaataaaaaaaaaaacagagaaaaggagatatggaatcaatcggagtccttatgatgtgccccatgtcctcctacctcgagaacgagcttgagaagcgcttcaaccttcttcgcttctggacttctccggagaaatccgtcctcctagaaactcatcggaactccatccgcgccgtcgttgggaatgcttctgccggcgccgatgctcagctcatcagcgatctgcccaaccttgagattgtatccagcttcagcgtcgggctcgacaagatcgatttggggaaatgcaaagaaaaagggatccgcgtcaccaacacccccgacgttctcaccgaagacgtcgcagatctcgccatcgggcttatcctggctctccttcgacggctgtgtgagtgcgatcgctatgtaaggagcggaaaatggaagcaaggtgaatttcaactcactaccaagtttagtggaaaatcccgggggatcattggtctaggtagaattgggactgccatcgcaaagagggctgaagccttt

SEQ ID NO: 93204 - DNA, 416 bp, Arabidopsis thaliana columbia
cccacgcgtccggtgccagtgtctcggataataccttctcaaggacataagatcctccaatcttcggctttcgtagctgaaactagcaaacaacatttcaactccactggatcatcagatcatcaaatggttgaagaatctccctgtaatcttgtggatgaacatgaaggaggatggcaaagcacaacaggatttctaacagctggagaagttgcagtaccttcaaatccagatgcgtggctgaatcaaaacttctcttgtatgtctaatgtggatgcagcagagcagcaacaaatcccatgtgaagacatcagttcgaaacgctcgcttggaagcgacgacttgtttgatatgttgggtttggatgataagaacaaaggttgtgacaacagttggggagtttcacagatgagaac

SEQ ID NO: 93205 - DNA, 409 bp, Arabidopsis thaliana columbia
tcggtgtggagtatgtagatataagcaggaacagcttctcgggttcacttgatctgggtctagcaaagtcaagctttgtttcctcgattcgtcatttgaacgtaagtgggaattctttggtaggggagctatttgctcatgatggtatcccctttttcgatagcttagaggtgtttgatgctagcagcaatcaattgtctggttctgttccagtcttcagctttgttgtctctctcaagattcttcggttacaagacaatcagttgtcggcttctttaccaccgggccttctgcaagaaagttcaaccatcttaactgaccttgatcttagcctcaatcaacttgaaggtcctatcggaagtataacctcttcaacactagagaagctcaatttgtcttcaaatagact

SEQ ID NO: 93206 - DNA, 908 bp, Arabidopsis thaliana columbia
cctgaactagaacagaaagagagagaaactattatttcagcaaaccataccaacaaaaaagacagagatcttttagttaccttatccagtttcttgaaacagagtactcttctgatcaatgaactcattttctgctttttctgaaatgtttggctccgattacgagtcttcggtttcctcaggcggtgattatattccgacgcttgcgagcagctgccccaagaaaccggcgggtcgtaagaagtttcgtgagactcgtcacccaatatacagaggagttcgtcggagaaactccggtaagtgggtttgtgaggttagagaaccaaacaagaaaacaaggatttggctcggaacatttcaaaccgctgagatggcagctcgagctcacgacgttgccgctttagcccttcgtggccgatcagcctgtctcaatttcgctgactcggcttggagactccgaatcccggaatcaacttgcgctaaggacatccaaaaggcggcggctgaagctgcgttggcgtttcaggatgagatgtgtgatgcgacgacggatcatggcttcgacatggaggagacgttggtggaggctatttacacggcggaacagagcgaaaatgcgttttatatgcacgatgaggcgatgtttgagatgccgagtttgttggctaatatggcagaagggatgcttttgccgcttccgtccgtacagtggaatcataatcatgaagtcgacggcgatgatgacgacgtatcgttatggagttattaaaactcagattattatttccatttttagtacgatactttttattttattattatttttagatccttttttagaatggaatcttcattatgtttgtaaaactgagaaacgagtgtaaattaaattgattcagtttcagtat

SEQ ID NO: 93207 - DNA, 929 bp, Arabidopsis thaliana columbia
cttgaaaaagaatctacctgaaaagaaaaaaaagagagagagatataaatagctttaccaagacagatatactatcttttattaatccaaaaagactgagaactctagtaactacgtactacttaaaccttatccagtttcttgaaacagagtactctgatcaatgaactcattttcagctttttctgaaatgtttggctccgattacgagcctcaaggcggagattattgtccgacgttggccacgagttgtccgaagaaaccggcgggccgtaagaagtttcgtgagactcgtcacccaatttacagaggagttcgtcaaagaaactccggtaagtgggtttctgaagtgagagagccaaacaagaaaaccaggatttggctcgggactttccaaaccgctgagatggcagctcgtgctcacgacgtcgctgcattagccctccgtggccgatcagcatgtctcaacttcgctgactcggcttggcggctacgaatcccggagtcaacatgcgccaaggatatccaaaaagcggctgctgaagcggcgttggcttttcaagatgagacgtgtgatacgacgaccacggatcatggcctggacatggaggagacgatggtggaagctatttatacaccggaacagagcgaaggtgcgttttatatggatgaggagacaatgtttgggatgccgactttgttggataatatggctgaaggcatgcttttaccgccgccgtctgttcaatggaatcataattatgacggcgaaggagatggtgacgtgtcgctttggagttactaatattcgatagtcgtttccatttttgtactatagtttgaaaatattctagttcctttttttagaatggttccttcattttattttattttattgttgtagaaacgagtggaaaataattcaatac

SEQ ID NO: 93208 - DNA, 944 bp, Arabidopsis thaliana columbia
cctgaattagaaaagaaagatagatagagaaataaatattttatcataccatacaaaaaaagacagagatcttctacttactctactctcataaaccttatccagtttcttgaaacagagtactcttctgatcaatgaactcattttctgccttttctgaaatgtttggctccgattacgagtctccggtttcctcaggcggtgattacagtccgaagcttgccacgagctgccccaagaaaccagcgggaaggaagaagtttcgtgagactcgtcacccaatttacagaggagttcgtcaaagaaactccggtaagtgggtgtgtgagttgagagagccaaacaagaaaacgaggatttggctcgggactttccaaaccgctgagatggcagctcgtgctcacgacgtcgccgccatagctctccgtggcagatctgcctgtctcaatttcgctgactcggcttggcggctacgaatcccggaatcaacctgtgccaaggaaatccaaaaggcggcggctgaagccgcgttgaattttcaagatgagatgtgtcatatgacgacggatgctcatggtcttgacatggaggagaccttggtggaggctatttatacgccggaacagagccaagatgcgttttatatggatgaagaggcgatgttggggatgtctagtttgttggataacatggccgaagggatgcttttaccgtcgccgtcggttcaatggaactataattttgatgtcgagggagatgatgacgtgtccttatggagctattaaaattcgatttttatttccatttttggtattatagctttttatacatttgatccttttttagaatggatcttcttctttttttggttgtgagaaacgaatgtaaatggtaaaagttgttgtcaaatgcaaatgtttttgagtgcagaatatataatcttt

SEQ ID NO: 93209 - DNA, 384 bp, Arabidopsis thaliana columbia
tggggttgagatatggctcaacgaatttgtctgtcggagctactgtcactccttttagtgcgagtgacggattgccaaaccatgcatggcttgtaagcaagatgggaagtcttacagtaggagtacaatatgagccgctacatggaagcaaagatttggcaaagtacacagacccaagaaactggagttgtgctgctggctatggagtagggtcacagagccccttgactccttcgtttaacatgggcattgaactagcaagaagctcccagtttattgcttcgttctaccaacacgtagtggtccaaagaagggtgcaaaatcctttcgaagaaaaccaagtagttggaataacaaactacattgattttggttttgagctac

SEQ ID NO: 93210 - DNA, 440 bp, Arabidopsis thaliana columbia
cagcacttcacaacttctcatgaacaagtagaaaaaaaagagcaagactaataagccatataagagacaacatgaacaacctagacgagatcaagatcgagagcaagacctgcctcaacgatcaagaacaagaagtcaaaatagacaacatgcacatgagcgaccaagacaagaacaagatcgaaatcaagaacaagagtggcctcggcgaaaagtggccagaacccatcgtccgagtccaatctctagccgagagcaacctcactagtctccctgaccgttacatcaagccgccgtctcaacgccctcaaaccaccatcatcgaccaccaaccggaagtagctgacataaatataccgatcatagacctagacagtctattctctggcaatgaagacgacaagaagaggatatccgaggcatgccgtgaatggggattc

SEQ ID NO: 93211 - DNA, 600 bp, Arabidopsis thaliana columbia
gatgttaaaacttattgttgattcttctctattcgtcgtcgacctattttcctcagccatggccgtcgggaaaaacaagagaatctctaagggtaggaagggaggaaagaagaaggctgttgatcctttctccaagaaagattggtatgatgttaaggctccttcaatcttcactcacaggaatgttggaaagacacttgtttccagaactcagggtaccaaaattgcctcagaaggcttgaaacacagagtttttgaggtttctcttgctgatcttcaaggtgatgaggataacgcttacaggaagatccgtctcagagctgaagatgtccagggcaggaacgttctgtgccaattctggggcatggacttcaccaccgataaacttaggtcattggttaagaagtggcagactttgattgaggctcatgttgatgttaaaaccaccgacagttacactctcaggctattctgtatcgccttcaccaagagacgtgctaaccaggtcaagaggacttgctacgctcaatccagccaaatccgtcagatccgcaggaagatgagggacatcatggttaaggaagcttcctcatgtgacct

SEQ ID NO: 93212 - DNA, 372 bp, Arabidopsis thaliana columbia
aatggtcctaattccaataagtatattacactctcttacagattggaccgaaacactcatgtggggatgaaaaaataaactaagaatacaaaaagaagaaaataaaagaaaaaatcagagatcccgtcggagaaagaaagagagaagatagagagatacaagtaacggcttccactaatctttcgccttctacatttttgctgctccgtccaatttttgtgtcgataaaataagacagcttctttctcttgactttccaagttcactcaactttctctcactccttttttctctcgctctctatcctctacagagctcgcagcaactagcgcaagatgttggagaaggttgaaactttcgacatgaacagag

SEQ ID NO: 93213 - DNA, 536 bp, Arabidopsis thaliana columbia
caaacggacacgcttcagctgatgatagatttaattttgccaatagtataaaccagttacgcctttttatagaacaactctgccatacttgataattcatacactctatctcttctctctctctctcaatctctcaaaagatctccggtaacgttttaacgtcggtgaaaaaatgcggaagttaacggcggttaattcactactgaaacggaacaattatcttcttccgcgccatggctcctcacaaacagcagctcagagaacatcctccgtccgcgagaccgagaccgaaacaaaacttccgaaaatgcccccgttcaattattctccgccgccttacgacggtccatctacggcagagatcatcgcaaagcggcgagagttcctcagccccgctctttttcacttctacaacacacccttaaacattgtggaggcaaagatgcagtatgtgttcgacgagaatggacgtcgatatttagatgcctttggaggaatagcgacggtttcgtgcggccattgccacccggaagtag

SEQ ID NO: 93214 - DNA, 463 bp, Arabidopsis thaliana columbia
ccactcatttcatttgaagaacaacctcctttattattctcaagattccagttcatgatcaagcaagcgtggataactcttcaaaggttgaggcgctttcttccaacccaattcacccgggtcgattccaagagtttcctgttttcgattcccttctcttcaaattctcagtttggatcagaatctgttaagcgggtcacttccaaattcttcttgcacctcctcaaagattataactttagacgtgtctcacaatcttctaaccgggaagcttccttcttgctactcttcaaagaggttcagttatcagaccgggcttttctcattcaaccgcttgtctttgattggcactcctaacgcgaagtatcagcgtccgctttctttctgtcaaaaccaaacaagcaaggcaatagctttggaacctatccccaaagctaaagataaaaattcttcaagaatcaaa

SEQ ID NO: 93215 - DNA, 432 bp, Arabidopsis thaliana columbia
  unsure (1)..(432): unsure at all n locations
gctactctcaagtgatcaaattaactccgtcgcaggtgatgaggagatacagtccgccttattacagtcctccgaggagaggatacggtggtcgaggtagaagtcctcctcctcctcctcctcgacgtggatatggtggtggtggtggtggacgtagaggatctagccatggaagtctcttggttcgtaacattcctcttgattgcagaccagaagagcttcgtgagccctttgagaggtttggacctgtgagagatgtctatatccccagagactattactcagggcaaccgccggggtttgcgtttgtggagtttgttgatgcatatgatgctggggaggctcacagaagcaatgaaccaggagaagcttttcttgaagagagattaacggtggttttttncttcnaaagtntagggaaaaggccttaaa

SEQ ID NO: 93216 - DNA, 407 bp, Arabidopsis thaliana columbia
cacattttcacattcatgtcgaattaattaagttggaaattctgcaaaatcatttcaagaaagaacttgatgagagctggtaggtcttttgattgactttcgtggtctatattctcaatatatagtatatgctttgaaagttgaatatgcactagttcttgttgtgttaagagttaattagcgtgaagtaatataattctcatatcgagtgtttaatttactagctttatgacaaaataatcataatcaaatagaatactaatgaagaaaaaggtaatatatatatgtaagaaagatgaattatgtaaagattgcttttactagccctgtgacaaaaaatgttaaatctttatcaaattgaacgatgattgataattgaaatttaattttaatgaaaagaagtagtt

SEQ ID NO: 93217 - DNA, 394 bp, Arabidopsis thaliana columbia
atctggtacttcgatccattgaatcgacgaagcatctttcgcgtttttattcaaaatcccgaatcttgatttcttcttctcgtcgtaaaccaccggagaaccacctcttatcatctccggcaatcggaataccacttgttggtctggaatcactacgaaattctcagtgatcgcgaaatcgtggatcatcgttggttgatcaagcggaatctcgacgtctggtgatttctcaccgtcggatgtgaatctgaagtattttaagtaaggctttgaaacgacgtcgtagcttaaagcgaagagttctcgggtttcgggatcgattttcgggtgggctatcattgttgattttaactgaccgtcgaaatcgtaccgacccgaagtttctaaatctccg

SEQ ID NO: 93218 - DNA, 397 bp, Arabidopsis thaliana columbia
cacaaggaatggtgagacccatgtcatgatcaaaaccaaactcttcctcagctcttctaaggagacattggaagtcaagattggtcaagaaagagataggaaccatgtatctgcttctggtggggcccacgcagacacgggaagtgtcccttgggtacaccaagtgggagagcaacctcttcatatcctcctcctccattcttcttccccaagcttgaacatctcttcagaatctgcctaagcattgctgtttgagccagttttgtagatttcttgagaatggacatttttgttttttggtggtttgagagaatcttctgggtgttggagagagagagagagagagagtttggtggatattgaagggaggggtgttaatatttataaaggcgtgcat

SEQ ID NO: 93219 - DNA, 404 bp, Arabidopsis thaliana columbia
ttctttctctgctctcaaagctcaagagaactctatccttattaacttacaaggataactaaaaccggtgtaatcacgatcatagtagaagatgggcggtcccggatcatcaccatgtgcttcgtgtaagcttcttcgacgacgatgtgcaaaagattgcatcttcgcaccttattttcctcctgacgatcctcacaaattcgccattgttcataaggtctttggtgccagcaacgtcagcaaaatgttgcaggagctaccagttcatcaaagagctgacgcggtgaatagtctggtttttgaagcaaacgcaagagtaagagatccggtctacggctgcgtaggagcaatctcctacttacaaaaccaagtctcgcagcttcagatgcaactagcagtggctc

SEQ ID NO: 93220 - DNA, 356 bp, Arabidopsis thaliana columbia
ttaaaataaaaccttaacttctttttttgtttaatttatttgcagctttgaatcagtcaatatatatatatacgatgctcatatcttattattttgtgtcttttaaaagaaaagaaaaacctttttaaacaaagttaaggtttttatatatcagccatatttcttaggcaagtaaaaaagaagtaaagttcaacgttgtaaactttagggcacaataagtttgcttcctatccaagctactattctatatcttcttccaagttgaagatactctagtttgttttcttctggaatattcttcatgagacttgtaatccattattcttttttcttactagaaattactaattggtaag

SEQ ID NO: 93221 - DNA, 264 bp, Arabidopsis thaliana columbia
aatgaacggaaaaaatcataacatacacaaagttttctttggtctttaataatttagaacattttttattgacgagccacagaaattgcacctatcaaagcaactaaaagaattattgaaatgagttcaaatggcagaaaaaaatctgttgataaatgaattcctatttgttgactattacttattaaatcttgctctagaatctggtttaattttgtagtccaaataaccccgtaccatgacgtatcgagaatagtagacatt

SEQ ID NO: 93222 - DNA, 392 bp, Arabidopsis thaliana columbia
agtaatattaatgaaattggtattttatcaatgctgaaattagtatctatgctacgttacattgtctaacaacgctgatacttcaaaattgaataccaagtaaactaaaataaaaacataaataaatgaaaaaaaaaacagaaacctcagattggatgtcttggagtttggtgaccgactgtctactttagactcataattgatctaaaattgtgtatataagttcaagaagagacgtataaaatcataaattaatatcgaattgtttagcaaatatggtcaccaaaatttaaaatgataagagttaggttttgatataaccgatatgtatgtttcattcatggggataatgtcggctaatatgtcagatgacatgttcattgatccatcct

SEQ ID NO: 93223 - DNA, 649 bp, Arabidopsis thaliana columbia
  unsure (1)..(649): unsure at all n locations
gtttcggaattncccgggggcgacgccacgtcgtccgcttcgactaataaagtatatcggcggagtaaattttgttgttatatanntggtaatccttctaagtatagaatattattatatcgtgtagctgtaccaatttgtgaataaaatngggggttgtgtaattacccacccctgttcaaaaaagtttctggattgttttaccttcgaatgaagttaaggaaaaaatgagttgataaaagttttctttcttaatcacttccgaacggcatggttcgattttgtttagatactaaagattttttttcgttcatgcttctgaaaggattcgacatatttttgtataggtatacctataggataaaaaggtaaaattttgagtaagttcttaagtataagttaataaggggacagccattttctagactccataataagtattcaaatgagtaagtgttttttcaatttcaaccattcctttcacgaagatacaattcaagattcaaaaatatcaagaaacctttttttcgtccaccaataaatatattcacagaattaaggaataacaactatgaaaataagggcttccgttcgtaaaatttgtgaaaagtgtcgactaatccgcaggaggggacgaattatagtaatt

SEQ ID NO: 93224 - DNA, 628 bp, Arabidopsis thaliana columbia
aacaagagccaagctaatgagataagtgtatcggtgaggctgagagttattcacttacaaaaaaaaaaaaaaaacttgagtgtaaccaaaaaaaaaaggttgatatactttctggttttctccttaacttttattctttacaaatccatcccccttagatctgtttatttcccgctactttgattcatttctgttagtaatctgtctttcgtatagaagaaaactgatttcttggtttgtattttcttaaagagatcaatctttttttatttttgatcttcttgtgtttttttttctttgtagaattaatcgtttgtgagggtatttttttaattccctcctctcagaaatctacacagaggttttttattttataaacctctttttcgattttcttgaaaacaaaaaatcctgttctttactttttttacaagaacaagggaaaaaaatttctttttattagaaatgacaacttctatggatttttacagtaacaaaacgtttcaacaatctgatccattcggtggtgaattaatggaagcgcttttaccttttatcaaaagcccttccaacgattcatccgcgtttgcgttctctctacccgctccaatttcatacgggtcggatc

SEQ ID NO: 93225 - DNA, 406 bp, Arabidopsis thaliana columbia
aaaacttgaaagtttaagtcactaagaaaaggaattgtagcctaaaactattctgatagttcttatggaatcctaccattagataacgagcctaaaggcgcattgagttgaagggcgcctgcacacatatcaacgatatcttgtaatgtttgcctcgcggagccaacagtaagttcctcctcaagtgaagccctagatcgagcatgaatggctgcaaccctctgaacctgtaatttttatattgggtaatgagatttaagtaagctgaaaaaccatagaagttttgatgttggacataataacttacaagcacttggaaagcaaaaccagtgggtagaaattgtccggggcgcctctcgttcataggactaataattcttctagtaattctgcggtaccactccat

SEQ ID NO: 93226 - DNA, 753 bp, Arabidopsis thaliana columbia
gaagtgagatgtgtacgagaggatcttacatagagctgtgaaaccggtgagaaggttgttggtgtaggatcttttaatgtttggagcactaaaccttgcgagagaggtatttggtctcgtggagtggaggttgggtcattcgtttgctctactaatgatctgtcttctgataataaagccgccatgaacattgcgtgtttgaaaaatctcgacccgagcctacaaggtatgccaaatcttgatcaggtccatgcacttattcaccattatggaccgatggtctacttccatcccgaagagacttacatgccttcgtctgtgccatggttctttaaaaacggagctttggggcaccggtttgggaaatctcaaggcgaaccgattaactcagctggctcgaacttgcctgcgggtggagaaaacgatgggagcttctggattgatctccctgaagatgaagaagttagaagtaatctaaagaagggaaatatagaaagctcagagctttacgtccacgtgaaacccgcgcttggcgggattttcacggacgttgtaatgtggatattctgtccatttaatggtccagccactctcaaaatcgggcttctcacggtaccaatgaaccgccttggagagcatgttggtgattgggaacatttcacattcccgattagccaccttcaacggcgatcttacacagatgttcttctcacagcatagtggtggaggaatgggtgatgtatccgatcttga

SEQ ID NO: 93227 - DNA, 526 bp, Arabidopsis thaliana columbia
cagctctctacgactcactattgggaaagctggcacgcctgcaggtaccggtccggaattcccgggtcgagaaaaaagaaaagaaaaaagaacttgttttcctcttcagcaagacacataaatcgtaatccattttctctcaactttaggaatctcaaatctccgatttggaaatccggcgacaatggtgagagatattgaagatgagattagagacgagaagaatcctcgtcctcttgatgaagatgatatcgctctcctcaagacttatgggttagggccttactctgcacctatcaagaaagtggagaaagaaattaaggatctcgccaagaagatcaacgatctatgtggtatcaaggagtctgatactggtttagctcctcccagtcaatgggatcttgtatctgataagcaaatgatgcaagaagagcaacctctgcaggttgcgagatgcacaaagattataagtccaaacactgaagacgccaaatacgtcataaatgtcaaacaaattgctaagttt

SEQ ID NO: 93228 - DNA, 414 bp, Arabidopsis thaliana columbia
caaaaatatcaaagattctgctttagaaactgtccatggatgctaatggaggacctgtacagatccggacccaaaactacgtcaagcttggttatcactatctgatcactcacttttttaaactcatgttcctccctctaatggctgttttgttcatgaatgtctcattgttaagcctaaaccatcttcagctctattacaattccaccggattcatcttcgtcatcactctcgccattgtcggatccattgtcttcttcatgtctcgacctagatccatctaccttctagattactcttgctacctcccgccttcgagtcaaaaagttagctaccagaaattcatgaacaactctagtttgattcaagatttcagcgaaacttctcttgagttccagaggaagatcttgattc

SEQ ID NO: 93229 - DNA, 308 bp, Arabidopsis thaliana columbia
aatcggactacgtgaagcgtccggtttcgagtaaccggcctcggtttgatactcaagaaattggttgaggtggagaaagttgaaatgaattggaatccgtatggaggaagaatgggtgagatcccgagttcgaggacacctttcccacatagaggaggcaatttgttcaacattgaatatatcatagactggtcagacgctggggatgttggggagaacgatcgtttcgttcgttcacacgttttgttcatatatatgacaccgtgtgagtctagttatccgttgttggcttttattaaattatttgt

SEQ ID NO: 93230 - DNA, 440 bp, Arabidopsis thaliana columbia
ccggaccggagggccgggctagacccacgcgtacgtaacgactcaaggaatgtaacagccaatagtatgaagcacgccgggtttcaaattcatgagggcagagctacaattatgcacataaaagaaatggtcagaatcacagagatagtttttaaaacagcagatgctttcgatacagaaaagggaatttttattactgaaagtaaatagtggcaaaatgcagcagctaaagttatattaagtaatgctgcaaataggcaaaagatctcgaaagagactaaccgaatgcgttatattctcaagagaatcaacagtgcagtgggcataatcataactcggatagatacaccacttgtcaccagccttaggatgaggtgcgaactgcaaagcatattaacaagtcagacaggaaaagaagagagagagcctactttttatat

SEQ ID NO: 93231 - DNA, 1534 bp, Arabidopsis thaliana columbia
ctaatacgactcacttggggaacagctggtacgcctgcaggtaccggtccggatttcccgggtgctgtctgataaaaagaagaggaaaactcgaaaaagctacacacaagaagaagaagaaaagatacgagcaagaagactaaacacgaaagcgatttatcaactcgaaggaagagactttgattttcaaatttcgtcccctatagattgtgttgtttctgggaaggagatggcagtttatgatcagagtggagatagaaacagaacacaaattgatacatcgaggaaaaggaaatctagaagtagaggtgacggtactactgtggctgagagattaaagagatggaaagagtataacgagaccgtagaagaagtttctaccaagaagaggaaagtacctgcgaaagggtcgaagaagggttgtatgaaaggtaaaggaggaccagagaatagccgatgtagtttcagaggagttaggcaaaggatttggggtaaatgggttgctgagatcagagagcctaatcgaggtagcaggctttggcttggtactttccctactgctcaagaagctgcttctgcttatgatgaggctgctaaagctatgtatggtcctttggctcgtcttaatttccctcggtctgatgcgtctgaggttacgagtacctcaagtcagtctgaggtgtgtactgttgagactcctggttgtgttcatgtgaaaacagaggatccagattgtgaatctaaacccttctccggtggagtggagccgatgtattgtctggagaatggtgcggaagagatgaagagaggtgttaaagcggataagcattggctgagcgagtttgaacataactattggagtgatattctgaaagagaaagagaaacagaaggagcaagggattgtagaaacctgtcagcaacaacagcaggattcgctatctgttgcagactatggttggcccaatgatgtggatcagagtcacttggattcttcagacatgtttgatgtcgatgagcttctacgtgacctaaatggcgacgatgtgtttgcaggcttaaatcaggaccggtacccggggaacagtgttgccaacggttcatacaggcccgagagtcaacaaagtggttttgatccgctacaaagcctcaactacggaatacctccgtttcagctcgagggaaaggatggtaatggattcttcgacgacttgagttacttggatctggagaactaaacaaaacaatatgaagctttttggatttgatatttgccttaatcccacaacgactgttgattctctatccgagttttagtgatatagagaactacagaacacgttttttcttgttataaaggtgaactgtatatatcgaaacagtgatatgacaatagagaagacaactatagtttgttagtctgcttctcttaagttgttctttagatatgttttatgttttgtaacaacaggaatgaataatacacacttgtgaagaaacaaacaacaaggcaagccgctctagaggtccaagct

SEQ ID NO: 93232 - DNA, 472 bp, Arabidopsis thaliana columbia
  unsure (1)..(472): unsure at all n locations
aaaatgaagtttttgaatttcgctctcttcttagatcccgtttgttctctttctcactttggctgtttaagcaaaaaccatggcttctcgctgtgagctacttctgatctgcgtcttctctctcttaattgcttttgctcactccaagacattgaagcgagatgtgaaagctttgaatgaaatcaaagcctctttgggatggagagtggtgtattcatgggttggtgacgatccttgtggagatggagaccttccaccttggtctggtgtcacgtgttctacacaaggagactatagagttgtcacagaattagaagtttatgcggtttcgattgttggacctttccccattgcagtaacaaaccttctggatttgactagactggatctacataacaacaagttgactggtccanccctccnaaaattggcggttaaaangggtnaaggccttaacctnnggggggtaacc

SEQ ID NO: 93233 - DNA, 833 bp, Arabidopsis thaliana columbia
  unsure (1)..(833): unsure at all n locations
gtcattgtttagaattaaaaaaaaagaaggtaaaagagtcagagccgcctagagaaatcgatcacaaattcagaagaaaagaacagagaaaacagaggaagaggtgagatggaggaacttgtagggcttctgagaatccgagtgaagagagggatcaatcttgctcagcgagacactctaagcagcgacccttttgttgtcataaccatgggatcacagaagctgaagactcgtgttgtggaaaataactgcaaccctgagtggaacgaggaattaacccttgcgttaagacatcccgatgaacctgtgaatctgatagtgtatgataaagatacattcacatcgcacgacaagatgggagatgcaaagatagatattaaaccatttctggaggttcacaaaatgggtttgcaagaacttccagatggaacagagatcaagagagttgtgcccaacagagaaaactgtttggctgaagcgagcagtatcgtctccaataatggcaaaatcgttcagaacatgattcttctgttgaggaatgtcgaatgcggtgaggtcgagattcagcttgaatggattgatattccaggttctagagggctttgaacatatctctttctgtgtgtaataaaaaaaaaactcagttcgttttgggtttttagacaaaagtcacaataagtagaacagagtactactctgttttgtaattgaaatatttggttttagcacctaacctaaatcgttttggttaaaaaaaaaaaaaaagnnnnnnnnnnnnnnnnnnnnnnnnnnnnnnnnnnnnnnnnnnnnnnnnnnnnnnnnnnnnnnnnnna

SEQ ID NO: 93234 - DNA, 587 bp, Arabidopsis thaliana columbia
  unsure (1)..(587): unsure at all n locations
nnnnnnnnnnnnnnnnnnnnnnnnnnnnnnnnnnnnnnnnnnnnatttgaaaatctcagctaaagagagaaagagaagctccatttttctttctcgtcgtgtcatcgttttctcagattcctgaataatcattcccttccgattccaaaatccccaaacctcatccactcctccatctcccggattcggattcccagaatcatgcccatggagaacgacaatggcccacacgttggcaacgtcgtcgtcaccgctgagcaagcgaccaagattaacgagactgatggacggttgccggagaatcggcagaccggtgttgtctctgacaccggaagtggtagcgagagaggagagcaaggggttggagagtcggcagttgctgtggcggtgccggtggaggagagcggatcgatttcggtgggagagctacctgctccccgatcttcctctgctagagttccgtttactaatctaagccaaattgatgcggatcttgctcttgctcgcacactccaggaacaggagcggtcgtatatgatgtttgccatgaatagtgaaatcagtgtctttgggtgctgggaatactg

SEQ ID NO: 93235 - DNA, 395 bp, Arabidopsis thaliana columbia
gaggaaagagaaaagtgtctatttctcatatttctaaaaaactacctactttgcaaattatttgtagaaaaagtgtatacttccaacttatctctattataaaagccccgatcaaagtgcagatatcaacaaaaataaaattgtggaatgggtgtatatatttttgttgcagtatcttttatgtaatgcatttgcaacatcttttacctatacttctcgtgtttgtgtgtttactctcttttatgtcaagaagtgaatgtgtcaatctcgtaacataagtctctatttatattcatcgacatcttattatatagctttttctcaagttcaaaattgcaaaagagaggagcatgagaaaaaaatgtcgcgttaacgacaccaatgtcgagaagttt

SEQ ID NO: 93236 - DNA, 846 bp, Arabidopsis thaliana columbia
  unsure (1)..(846): unsure at all n locations
ctcaacaaaaactcgctgatttgatctctcgtcgatataacaatagaggtgtcttacgcgtgatctgaaacctagattcgattcagtcagaacttttgtcgaagatggaaagacaaatcatggcttcttctaaaaaggtacaacgggaagagaatacgaaagaggaatatttaccaaacaagcaagtttcagatgaatcagaacaacttgagaagagttgtttgacagaagaagaagatgcgtgtttgtctgatgctagtcatagcagtaagaagacgataagggaagatgcaatttgtgaatcaaagaatagaaagaagtataagccaagcaacgaatctggattcaacacgttatttgatgatgactggctttttggtaacaatcagcaaaagaatgttgtcaccactaataaagccgctatcaaggacgatgcagagatgatcatgaagttgctgcagagatcatgtggagattccttggttcctagctaaggccccgttttcgcctcaattccggaatattggtattacccatatacagttccgttctaaactgtctctgtattgttttctcatccctcgatcggatttagccttagcctgtgatctattcggggatgtatattttcatatcctatcatgaatatctctggttaaactcgtaaatcctgtataattttttgtcgtgcgagagtttcctttttgtagatttccttttccttgtngtattggttatctacttatcttgtagtctcatattcttatcatgaatatctctatttactcatatttgtatataatttgttgtacaagtgttccttttttagatttcctttttccttgt

SEQ ID NO: 93237 - DNA, 637 bp, Arabidopsis thaliana columbia
aaaaaaagtatacttctttttgcttttgttgttttgggttctgttcattgattctttcaagatggagaaatcaacaagctcggatttgaaatcctccgttaacggtggcgttgttgatgtgtatggagaagattcagccaccattgagcacaacataactccttggtctctctctgtttctagtggatattcattgctgagagatcctcgctacaacaaaggacttgctttcactgagaaagagcgagacactcattacttgcgtggtcttctccctccagttgttcttgatcaaaagcttcaggagaagaggctgatgaacaatatccgccaatatcaatttccattacaaaagtacatggcccttgacagaacttcaggaaagaaacgagagactgttttacaagttgttgatagataatgttgaggagcttcttcctattgtttatactccaactgttggtgaagcttgccagaaatttggaagtattttcaggcgacctcagggtttattcatcagtttaaaagacaagggaaagattctagatgtgttaaagaactggcctgaaaggaatatacaagttattgttgttactgatggtgaaaggattttgggattaggggatcttggatgtca

SEQ ID NO: 93238 - DNA, 1113 bp, Arabidopsis thaliana columbia
ctcttcgttcctttctctctctagatcttaagcccaaatgttgcacaaggcttctcccgctctctctctcttgagctccggctacaccggcggtggaaatctgtttcctccgtcgagaaattcgtcgaatcttctgttttctccgagtggatccaggttttctgttcaggcggcgaaaggaacgaacacgaagtcgttaaccggagttgtattcgaaccttttgaggaggtgaagaaagaaatggagctcgttcccactaccccttttgtttctctcgctcgccacaagttctccgacgattctgaatctgccatcaacgatcagatcaacgtggagtacaacgtctcgtatgtctaccatgccctgtatgcctactttgacagagacaatgtcggcttgaaaggtttcgccaagttttttaacgattcgagtcttgaagaacgaggtcatgctgagatgtttatggagtatcagaacaagcgtggtgggagagtgaagctgcagtctattttgatgcccgtctctgagtttgatcacgaggagaagggagatgcattgcatgcgatggagcttgcattgtctttggagaaacttacaaatgaaaagcttctgaagttacaaagtgttggtgtgaagaacaatgatgttcagctggttgattttgtagaatctgagtttctaggcgagcaggtcgaagctatcaagaaaatctcagagtacgttgcacagctaagaagaataggaaagggtcatggagtgtggccttttggtccaaagcttttcaatgatgaggtttaaggaaggaaagttcagctttttaggttgatggccattttccctttgctataaggccccctttcttttttaaaaccacgttttttaagtttgttcgaaaaaaagggttctggcccgtcctttcttttcttggttttgggtaacccgaaggcttgtaagtgggtccttaataatgtacctcgtagtctgataataaatccaagtccccctgtttccaaaaaaaaaaaaaaaaaaaaaaaaaagggccgcccgctctaaaggatccaagcttacgtacgcgtgcatgcgacgtcatagctcttctataagtgtcacat

SEQ ID NO: 93239 - DNA, 1304 bp, Arabidopsis thaliana columbia
  unsure (1)..(1304): unsure at all n locations
ctcttcgttcctttctctctctagatcttaagcccaaatgttgcacaaggcttctcccgctctctctctcttgagctccggctacaccggcggtggaaatctgtttcctccgtcgagaaattcgtcgaatcttctgttttctccgagtggatccaggttttctgttcaggcggcgaaaggaacgaacacgaagtcgttaaccggagttgtattcgaaccttttgaggaggtgaagaaagaaatggagctcgttcccactaccccttttgtttctctcgctcgccacaagttctccgacgattctgaatctgccatcaacgatcagatcaacgtggagtacaacgtctcgtatgtctaccatgccctgtatgcctactttgacagagacaatgtcggcttgaaaggtttcgccaagtcagtttctttagtctaaaggaaaaccgtatttgtgtctcttcagctggtggatcatctttttgttattgttgagggtttaacgctaataggttctttaacgattcaagtgttgaagaacgagggttaatgcctgagaaagttttatggaagtatcagattgcattgttttgcgatggagcttgcactgactttggagaaacttattaatgaaaagcttctgaagttacaaagtgttggtgtgaagaacaatgatgttaagctggttgattttgtagaatctgagtttctaggcgagctggtcgaagccatcaagaaaatctcagagtacatagatggaacaaaaataagggcaatgcagtggtgaagctgagatcggatgtttttgatataagctggcaagtgaagatggagggtcaaagactaacccaaggctggcaaaagttcgcaacaagccacgatctccgagtcgtcgacatagttgttttcagacatgatggagatttcttctcaaaactttgaagtctttgaattctttgtttcgagatctatcgatactcgacatcaaagaactccttataactcttgattcattgaaacaagagtaggcatgtcaatcgagctatcccggtccgacccgaaacccgtaatacccgtatatgtttgagtttgggtcagaaaagctctgagcctatattttaatttaggtatttcctgtattttttattttttgtattcaatttctccaaaattagtggaaattatccatattttctttctaaaaaaaaaaaaaaaaaaaaaaaggctggccgctctagaggatccaagcttacgtacgcgtgcatgcgacgtcaagctcttctaannngtnnnnnnnnnnnnnnnnnnnn

SEQ ID NO: 93240 - DNA, 522 bp, Arabidopsis thaliana columbia
ctcttgtggagccattcggattagcaccttacattctcaagcgccgtagatctctcgcttcagtttttgaaataatagatcgagttcctacaatcgaacctgatgatacctcggctcttagtccgcctaacgtgtatggaagcattgaactgaaaaacatcgacttctgctacccaacccgcccggaagtgttagtactaagcaacttcagtctcaaagtcaatggcggacaaacagtagctgtggttggtgtttctggttctggaaagagcacaataatatcgttgatcgagagatactacgacccagttgctggtcaggtcttattagatgggcgagacttgaagtcatataatttgagatggttaagaagccatatgggtctgattcaacaggaacccataatcttttccacaacgatcagagaaaacattatatacgcaaggcacaatgcaagtgaagctgagatgaaggaagcagcaaggattgcaaatgcccaccatttcatcagcagcttacctc

SEQ ID NO: 93241 - DNA, 501 bp, Arabidopsis thaliana columbia
gtttattcttcacaaagttaacatttttagactcaaaactcattcttttgcccttcctctgtttctcctctcttggggtttatcttagattctccaaaaaagtctctctctttccatggcttctcttctccatcttcttctcctttctctttctcttttagttcttgcttcagcttctccttctcctccagctgatgaaggttcatatattggagtaaacatagggactgatctttctgatatgccacatccaacacaagttgttgctctactaaaagctcaagaaatccgacatattcgattatacaacgctgatcccgggttgttgattgctctagcaaacactggtatcaaagttataatctccattcctaatgaccagcttcttggtataggtcaatccaattcaaccgcagcgaattgggttaaacgcaatgtcattgcacattatcctgcaacgacgataaccgcggtttctgttggctctgaggtgctaaccag

SEQ ID NO: 93242 - DNA, 795 bp, Arabidopsis thaliana columbia
  unsure (1)..(795): unsure at all n locations
caccttattatcgattgtggagcgcacactaaaagcaactggcgcagctagtttaacaccgcagaggcgaagaacaacatcagcatccctttttggaaggatgtcacaaggattaaggggatctcctcaaagtgctggactctcttttctgaatagacaagggctcaccaagcttgacgacttgaggcaagttgaagcaaagtaccccgcactacttttcaagcagcagcttactgcattcctcgagaagatatatggaatgagcagagataacctaaagaaagagatctctcctcttcttggcttatgtatacaggcaccaaggacatcaagggcaagtttggtgaaaggaagagcacaagcaaatgctgttgctcaacaagctctgattgcacattggcaaagtatcagaaaaagcctaaacagttacttgaatttaatgaaagcaaacaatgctccacccttcttagtccgcaaagtattcacacaaatattctccttcatcaacgttcagcttttcaacagtcttcttctacgtcgtgagtgttgctcattcagcaatggggagtacgttaaagctggtttggctgaattagagcagtggtgtatagaggctaccgatgaatatgctggctcagcttgggatgagttgaggcatatcaggcaggctgttggcttcttggttattcatcaaaagccaaaaaagaccttagacggaattacaaaggggactctgtccgggggcttaagttttcaacacgtttttcnggnttncngcccnattttccntggggg

SEQ ID NO: 93243 - DNA, 1413 bp, Arabidopsis thaliana columbia
  unsure (1)..(1413): unsure at all n locations
attacccgggtccgcacccacgccgtcccggagaataaccttaacagaaagagaatctactccatcttccttgtggtacattttatacaagcgcaccaaggcacactcaaggggcatagttttggttgataaggaagtaagcacaagtcaagatgcctgcttggctcaaacgaagctactggatgtgcaacaacttggccaaaagtaatcaagaaaaatagccctcaaaccagcttactttgtatatttagatggaaaggcaacacacatgcctccatccccttcttaagtccgccagagtagttcacaccaaatattctctcttcatccaacgcttcaggcttttcaacagctcttcttctacgctcgtgagtgttcgcatcattcagcaatgggggacgtacgttaaagctggtttggctgaattagagcagtggtgtatagaggctaccgatgaatatgctggctcagcttgggatgagttgaggcatatcaggcaggctgatggcttcttggttattcatcaaaagccaaaaaagaccttagacgaaattacaagagaactctgtccggtgctaagtatacaacagctatacagaatcagcacaatgtactgggatgacaaatatggcacccatagtgtttcttcagatgttattgcaaacatgagggttatgatgacagaggactcgaacaatgccgtaagcagctccttccttttggacgatgactcgagcattccattcacggtggaggatatatcaaagtccatgcaacaagtggatgtaaatgacattgaacctcctcaactaatccgtgaaaactcgggtttcggattcttgctcacacgtaaagaaggcagtacatcgtaactgccctcggagaactgggtatggtccatcaaatacgattgcatctaccgcatatacataaatacatcgtgtgagccgctgcattcctatgggcattttgtgtatattatcttcttttcggttcccattctttcttcttctttgttttggggttcagtctccggcctttgtatttgtggagaggccgagtttatttcattctttgcatccctgtgtagttatggaaactcacaggggttatttgtttgccattttggttttgtcatagaatggctttaggtgtgtttgatgctgtcctgcccagagaggggaggagagtattgttttagcaattacttatttgttggtttgggcgagttcttatactcgttttgggaaattgtaatgaatgaactagaatttgttttcactatttatataggctgcacatcttatattaaaaaaaaaaaaaaaaaaaaaaaaaannaagggcggccgctctagaggatccaagcttacgtacgcgtgcatgcgacgtcagagnnnnnnnnnnnnnnnnnnn

SEQ ID NO: 93244 - DNA, 659 bp, Arabidopsis thaliana columbia
  unsure (1)..(659): unsure at all n locations
cctnngccccccctgcatggctgccaataccnccgctttggncncccaagngctggtatcctggatcctatcttccctaacaagctgtgtctccatgtccggtttcaccatgaggtgccctccgctattcctcaactacaagctaaaatccgtggcacatttaccatggagacagatgacttacaagtccctcaacccccattatcgacgatctctttgcctttgtcatcaaaatgccgattttacatcgactttctgtattcagagatgatgtgatattcttgatatacttataccaaaggtgggtttacccagtggataagacacgtgtgaacgagttcggttttggaggtgaggatgaaactgcagagaagaagttgatcactgagaaagaagaagaagacaagaaaacaaactaatctcttctcttcttcaaattttattacagttcagttatagtgtcttaatttatttttgttctcacttttggaaattgttttgttcaagtttaatgtcaaccctcaagacacattataaagcaactcctttggttttttgtgaaaaaggaaaaaaacaacattttctctaaaaaaaaaaaaaaaaaagggcggccgctctagaggatccaagcttacgtacgcgtgcatgcgacgtcagag

SEQ ID NO: 93245 - DNA, 756 bp, Arabidopsis thaliana columbia
ggaaaatagggaaagccatgcgcatagaggttgatcgaagtggaatgattccaaggttgaggttccatgatcgtgaatcgtatgcaagcaataaaaccaaggagtatgatgacattgccatcaaattcttatcctatgtgctcctcctccttgtcattggcttgtccatatattctctcgcttatgaacgccacaagagctggtattcttggatactatcttcactaacaagctgtgtctacatgttcggtttcatcatgatgtgtcctcagctattcgtcaactacaagctaaaatcagtggcacatttaccatggagacagatgacttacaagttcctcaacaccattatcgacgatctctttgcctttgtcatcaaaatgccgattttacatcgactttctgtattcagagatgatgtgatattcttgatatacttataccaaaggtgggtttacccagtggataagacacgtgtgaacgagttcggttttggaggtgaggatgaaactgcagagaagaagttgatcactgagaaagaagaagaagacaagaaaacaaactaatctcttctcttcttcaaattttattacagttcagttatagtgtcttaatttatttttgttctcacttttggaaattgttttgttcaagtttaatgtcaaccctcaagacacattataaagcaaaaaaaaaaaaaaagggcggccgctctagaggatccaagcttacgtacgcgtgcatgcgacgtcatag

SEQ ID NO: 93246 - DNA, 428 bp, Arabidopsis thaliana columbia
tccagcttgccttagagtttgtctcaagcttctccttttttggtattttgtcttaagcttccttgcttctctttcttcttcttctctactctttctctctatttcaaaccttcgttttctttccttttttgtaaaatcttaaaatcaaccaagacaatggaaatgaaattgctctttacatcggctttcacccaaatgttcggctactcgaaccatatggatcaagccagcaactgccaaagcacccgcaacaaaattataaagatgatgaagaaagaagaattcccaagtggattccaagtccctcttcactaccctaaatactccaagtctgattacgaagttatggatgatctccgccttgacttgctcctcaaacaatatggattctccttcgaaggatctcttgaagacaagaaggtttttgc

SEQ ID NO: 93247 - DNA, 463 bp, Arabidopsis thaliana columbia
cggacgcgtggggagatttgtaataatcaaatcatggggaagagaagaggtgtctccgccgtgaacgttgttttcgggtggctgcgacaacaatcgaacaaggttaaaatagctttaggaattatcatctctttgatcctcgtcgttcttctgaaattcaccgttaggaatcacaatcactttttcatcgcctccgagctcatccacgccgccggaatcttgatcctcatctacaaactcactcgccaaaagacttgctccggtctttctttaaaatctcaagaagtgacagcaatatttctagcggtgagattgatatgcagcataaacatggaaggtgatatccatacagttctcgatttcgccaccttggtttcgactctatgggtcatttatatgattcgatacaagctgaaagcatcttatataaagtctctcgacacttgctacaattactatgtgc

SEQ ID NO: 93248 - DNA, 424 bp, Arabidopsis thaliana columbia
gcgaaataattgaacgagtaatttttgtttactttttgtgttctttttattcgttttgttcgtttctgcgtcttcgaggctttctttttagtatttgaccaagttggtctattctattttattagtattccgttataccatgccttcgacaacgtgaacaagcaaacaacaatatttcgtaatcgaatcaatataaattgtgaaattgaattttttcatagaaaataatttaaaaatccatttttgcttttgctgttgtgtctggtcaaatcctatcatgtaactccataatgcaataactgattttttcaagtggctctactctcttacaattacaacttgcaatgttattgttatgtagataatgttattgctgtaaatggtttgagtaactccctaaggcaagtggcccttgtctcgaatc

SEQ ID NO: 93249 - DNA, 2141 bp, Arabidopsis thaliana columbia
cctacgcatccgcagctctctctagccaaattacttggccacgaccataaacacaaaacaccgcttagcttctaaaatctgaacatcgagaaaaaatgagttggtggtgggctggcgccatcggagctgccaagaagaaactcgacgaagatgaaccatcacaaagcttcgagagcgtcgctctcatcatcggcgttactggaatcgtcggaaacagcttggcggagattctccctctttccgacacacccggtggtccatggaaagtctacggcgtcgctcgtcgtcctcgtcctacctggaacgccgatcatccgatcgattacatccagtgcgatgtctccgacgccgaagacacaagatccaagctttcccctttaaccgatgtcacacatgtcttctacgtcacctggaccaatcgtgaatcggaaagtgaaaactgtgaagcaaatggctcaatgctccgtaacgttctccaagcgattatcccatacgcgccaaatctccgacatgtttgtctccagacagggacaaagcactaccttggccctttcaccaacgttgacggacctcgtcacgatccaccgttcactgaggatatgccgagattgcagatccagaatttctattatacccaagaggatattctgtttgaagagatcaagaagacagaaacggtgacgtggtctatccacagaccaaacatgatctttgggttctctccttatagtttgatgaacattgttgggactctctgtgtctatgcaaccataaacatgaagggatctccgttgttgtttcctgggagcaagaaagcttgggaagggttcatgacggcttctgacgcggatttgattgcggagcagcagatttgggcggcggttgatccgtatgcgaagaacgaggcgatcttaactgcaacaatgctgatatcttcaagtggaaggtcatctgatcggaagattctagctgagcagtttgggattgaggagtatggatttgaggaagggaagaatttggggttggtggagatgatgaaagggaaagagagagtgtgggaggagatggttaaggagaatcaattgcaagagaagaagcttgaggaagttggtgtgtggtggtttgctgatgttatacttggagttgaaggaatgattgatagtatgaacaagagtaaggaatatggcttccttggtttcaggaactccaacaactcttttatctcttggattgacaagtacaaggcgttcaagatcgtaccttgattccaaaacatacttggatgtttgtttactctggtttcatgtttatgtttctcccaaaatctcagttctttgttgtctaaatgaaataaaagcggtaccatctttttctgttcttttttttaattccatctttagtcttgtaaactctactcttttgggaatagttttcaatttttaaatatcgttacaagttgtaatggaaagatattggacaatggtgcagtgtcataaggacaaagagctttacaggctaatggaaataccagattctgtgttttgcagttggagtgtatttgtactccatatggttccataagctgggagaaggcttcacatggacttatctcaactctctttcttgcaagtaagaaagcttgcttatttccaaaggtaggctggtacgtgggaaacaaaccaaagacaacctaagagcatattcatataactacccttgtttgattcataaatcataggtctttgcataatcaatgcactagaaatcaaccagtcctcgcgcacatatgtatacatatatttaagggttttggtttccagatgcacctaaaaaaatacttatatgcaaaagaatagatttgcctttgttatcccaaagtcctccttcaagccttgcctgcttaagcactggattcacctctcccctgaaacatttttgctggattcatcaacaccagttgtgactaagttggtcggatcttctaatgatcctgaattcggaggcatgccaacagaggtttccatttctgacatcttccctacagtatgaccagctttcgtcaaaccagggatttcctttgaggcaggggaagacactggtccttggcttttttgactaaggttaccaagtttttgccccct

SEQ ID NO: 93250 - DNA, 529 bp, Arabidopsis thaliana columbia
  unsure (1)..(529): unsure at all n locations
actcacttangggaagctactacgcctgcaggtaccggtccggaattcccgggtctacccacgcgtccgaaaatcttctatgttttgaaccagcctccggaagtatgggatggtggtgttggatttgtatcaaaggaaatgattcagactcattgccctgcacctgcatctgatattcagatcctaagatgcggaccaccgccaatgaacaaggccttgtcttgcaaaccttgaagctctgggatactctccggagatgcaattccagttctgatctgaatatcttcttttggttgctctgaaacggaactcataataatttagttacaatcccaactacgagagttgtgtcttaactgagtgagagttgtatttctgttgtgtgtttgttagcccacttgaaagtttccattgattggtttacgaattggctagacattttgcgttcacctataccgggtttggtgcaaacactttgatgctaaaaaaaaaaaaaaaaggccggccgctctagaggatccaagcttac

SEQ ID NO: 93251 - DNA, 1256 bp, Arabidopsis thaliana columbia
cgcacgcgtcggggatattacaagggaaaggggtcaactccaattcaaagctctgattttttccaccaatccccattttttcccttttacaattcttaagctagttttatacttttcttcttcctttcatttgggttaagagaagccatggataccgagtttctccgaaccctagatcgtcagattcttttgggtgtcttcgttgctttcgtcgccgttggtgctggtgctgcttattttcttacatcctccaagaaacgcagagtgtgtttggatccagagaatttcaaggagttcaagcttgttaagagacatcagcttagtcacaatgtggccaagttcgtttttgaactcccaacttctacttctgtgttgggtcttcccattggacaacacatcagttgcaggggaaaggatggtcaaggagaggatgttattaagccatacaccccgactacgttagactctgacgttggacgtttcgaacttgtcattaagatgtatccgcaaggacggatgtctcatcatttcagggagatgcgtgttggagaccatcttgccgtaaagggaccaaagggtaggttcaagtatcaaccaggtcagtttagggcatttggaatgcttgctggaggttcaggcatcactcccatgttccaagtggccagagcaattctagaaaacccaacagacaagacaaaggtgcatctcatttacgccaacgtcacatacgacgacattctcttgaaggaagaattggagggtcttactaccaattaccctgaacaatttaaaatcttctatgttttgaaccagcctccggaagtatgggatggtggtgttggatttgtatcaaaggaaatgattcagactcattgccctgcacctgcatctgatattcagatcctaagatgcggaccaccgccaatgaacaaggccatggctgcaaaccttgaagctctgggatactctccggagatgcaattccagttctgatctgaatatcttcttttggttgctctgaaacggaactcataataatttagttacaatcccaactacgagagttgtgtcttaactgagtgagagttgtatttctgttgtgtgtttgttagcccacttgaaagtttccattgattggtttacgaattggttagacattttggttcacctataccggtttggtgcaaacactttgatgcttaaaaaaaaaacccaaagggcgaaagctctagaggatccaagcttacgtacgcgtg

SEQ ID NO: 93252 - DNA, 454 bp, Arabidopsis thaliana columbia
ggggcagtttgtgttcttgatgatgaaccaatgataagtggtaaacattgcggccaaatggactcaagtgtctgtcaaagtcagaagattagcttttccgttacagcaatgatccaatccgattctggacctgtatgtctttttggcactgaatttcataagaaagtatgttgggagattctgggtgctggttctgagcaaggaattgaggctggccaagttgggcttaggttgataacaaaaggtgagaggcagacaaccgttgctagagagtggtatattggtgcaaccagcataactgatggaaggcggcatacagtgacaatcacaattgatgctgatgcgggggaagctacttgttacatagatggtgggtttgatggctaccataatgggatacctctaaatattgacagagccatttgagaacaaagagctgaaattgggttgggtg

SEQ ID NO: 93253 - DNA, 460 bp, Arabidopsis thaliana columbia
  unsure (1)..(460): unsure at all n locations
gaanaaccgggccgagccacgcgnccgaaacagacacacagagcaaaaaagggcaaacaagggggccctcgcccgcgcagcacacgcgcgcggcgggcgccggaccaacgcgcccagcgaccgcaccgccgccgagnncgaagaagaagacgccaccaaccccaaaggcccaaaaaagaggaaaagccgcaaggaggcgcagaaagaacaacaccnaagagccggccagcaatagaagcgccagcaagcaaggcaaggccgaagcgaagagggggaaaacgaagacgacacggagaacccacagggacaacagcaggaacaacagcgaggccagcagggccgcaacgagccccgccaggaagagccagaagggggcggccccaccgcgaaacaagcngccaaggccggaagaccccagggacagcaccaaccaaggcaaggcaggaaaannnaccagaca

SEQ ID NO: 93254 - DNA, 776 bp, Arabidopsis thaliana columbia
cggacgcgtgggcggacgcgtgggcggacgcgtgggcggacgcgtgggctttgcgtgaaatgcaagccaaggctgagaaagatatgggtgctagtcaagacccttcaggtggtgtgagtgcggctgagaaggaagaagtggattcgcgttcaatatatgttggcaatgtggactatgcatgtactccagaggaagtccagcagcattttcaatcatgtgggacagtgaatagggttacaattctgacagataagtttggtcaacctaaaggttttgcgtatgtcgaatttgtggaagtagaagctgttcagaattcgcttattttgaacgagtcagaactacatggtcgtcagataaaggtatctgcaaagaggactaatgtacctggaatgaggcaatttcgaggaagagggcgtccctttagaccgatgaggggattcatgccaggagttccattttatcctccatatgcttatgggagagttcccaggttcagacggccctatgcgctacagaccgtactgattaggcaaatttggtgttaaaaaaagtagcagctgccttctccgtttttcggggaaagcttatcatcatcaacacggttcatcggacgctgcagttgtttcgattaacagagatgagttgaagaattgtatggcagaagagagaggggaattatattctagattttctgtacaatatttgatgacaagtgcaacattttgatgagttcctttgtttttattatcttcaaacaaaagtaacgatttcacaat

SEQ ID NO: 93255 - DNA, 642 bp, Arabidopsis thaliana columbia
  unsure (1)..(642): unsure at all n locations
cccaagcgtcagcccacgcgtccgttcccttctttcccgatttcaagccctaaaattccgagacttctgtttctcgctttaacgacagtcgccgagtgagagatatagagagagaaagatgccggtgcacgatgagcaagagcatgaggtgtacggtggagagatcccagaagaggaagaaggtgagatggatacggaagagtacgaagaacacggcggagaagaaggtgccgccgccggagatgaggagcttgaacctggctctagctctagggacttggaggatatgaagaaacgaattaaggagattgaggaagaagctggagctttgcgtgaaatgcaagccaaggctgagaaagatatgggtgctagtcaagacccttcaggtggtgttagtgcggctgagaaggaagaagtggattcgcgttcaatatatgttggcaatgtggactatgcatgtactccagaggaagtccagcagcattttcaatcattgtgggacagtgaatagggtacaatttcttacagntaagtttggcaccctaaaggtttccgtatttcgatttttggagnaganctttccaaatcnttttttnaccgtnancctcatgncgcnataangttctcaagggctttttccgt

SEQ ID NO: 93256 - DNA, 1379 bp, Arabidopsis thaliana columbia
aattttcttccttttcacacagagacatcggaggagaaaaaaagggcaaggacaaaaaacaaaggtgcggaatttttcctctggaaatatctcagtgagtgtctgtgtaaaacaaaaaaaacaaggaagaaaatttactacatttctgtattatttagcattaaatggatctgttccaacgataattctctgtctgtgataaaagaaaaattgaattttttttcttctatctatctacctctgttcttcctcgtcatttcttacccagaaaattagaggataacaaaaatctgtttctttcgatgatcatcgtgacactttctctgtgatttttcctttcttctgttgttgttgatcatcgtgatcatcgtctttccttacatgcgaacccccatgtcagacactcagcatgtacagagctctttggtgtcgattcgatcttccgacaaaatcgaagatgcctttaggaagatgaaagtaaatgagaccggcgtggaggaactgaatccgtatccagatcgtcccggtgaaagagattgccaattctatttaagaactggtctctgtggctatggaagcagttgccgttacaatcatcctactcatcttccacaggatgttgcttagtacaaggaggagctccctgagagaattggacagccggattgtgagtattttctgaagacaggagcttgtaagtacggcccaacttgtaaatatcatcatccaaaggacaggaacggtgcacaacctgtaatgttcaatgttatcggtttacctatgcgtctgggtgagaagccatgtccatattacctgcgaacgggaacttgcagattcggagttgcttgcaaattccaccattctcaacctgataatggacattctactgcatatggaatgtctagctttcctgctgcagatttacgatatgctagtggtttaacaatgatgtctacatatggaactttgcctcgtccgcaagttccccagtcctatgtgccaatcctggtttcaccctctcaaggctttttacctcctcaaggctgggccccttacatggctgcatctaactccatgtacaatgtgaagaatcaaccttattactccggtagtagtgcatccatggccatggctgtggcattgaaccgtggtttgtcagaaagttctgaccaaccagaatgtcggttttttatgaacaccgggacatgtaaatacggagacgattgcaaatacagccatcccggagtaaggatttcacaaccaccaccaagtcttataaacccttttgttcttccagcgagacctggacaaccagcttgtggtaacttcaggtcttatggattctgcaagtttggaccaaactgcaaattcgaccaccc

SEQ ID NO: 93257 - DNA, 528 bp, Arabidopsis thaliana columbia
  unsure (1)..(528): unsure at all n locations
acgcgtccgaaaaaaaaaaataaacaccttcatagagattactttatggccggaagagagcgatacctagggtgtcctgtcgagaacatatgaacagagcgacgtgatcctcgggtcaattcttcttgccgagtttcaacattcgtaccacaatcgaacctcgtcatatagtctatcaaaaagtcttccatgagttttcagttacattccgatgttcaggacattaaaaaggagacatggattctgactgatgaagggaagaaatatgcggcagaagggtcaccagaggttcaacttttcttagctgttcctgaagaaggcagcatatcaaaagatgagctccagaaaaagttagctcctgcagtcttcaagatcggctgttctcaagctggaaaaaacaagtgggtggaaatgggaaagcaagtctcgaggaaggttaaagatgttgaagataaagtgaaaggccagcttttacaaatacaacaagggnnggantttgccaangaangtntcanttctnttaaagcc

SEQ ID NO: 93258 - DNA, 498 bp, Arabidopsis thaliana columbia
aaaagctagcattttctattctctctcaactccgaaagtacaaaaccccaaattaacaaaacatgttgcgtttcgtggtactctctctaactctcatggttttcatcaactcatcaaactttccaaagacagcagccaccccaccaggcacgtaccaaaaccacacaacgtacgtaaaaacggcatgcaactcaacaacataccctacaatgtgctacaactgtctgtcctcctattcctccaccatcaagtccgacccaatcaaactatgcacaacatcgctaaatctcaacgtcaaatccgctaaaaacgccacattagtcgtctctaaccttctccaaaaggccaaagccgcgaaaagccatgaggtctcgatccttaaggactgcgtggacgagatgaaggacactatcgacgagcttaagcaagcggtcgccgagatgaagtatgtcagaggcggagggaaaactacggaggagcatttaaagaacgtgaaga

SEQ ID NO: 93259 - DNA, 489 bp, Arabidopsis thaliana columbia
ttgacgtcgcatgcacgcgtccgtaagctcggatttcggcccgagtggaaaacaaagagaccaagcaagaaccagcagcagcagctgagcaaaagaccgttccgttgatcgaagatgagatcgagaggagcaaagtcgggatcatgagagctctctgcgaccgacaagatcctgaaactaaggaggtggatgatctgatgataaggaggtttctgagagcgcgtgacctggacattgaaaaggcttcaacgatgtttctaaattacctgacttggaagagaagcatgctcccaaaggggcacataccagaagcagagattgcaaatgatctatcgcataacaagatgtgtatgcaaggtcatgacaagatgggtcgacctatcgctgttgccattgggaacagacataacccttccaaaggcaaccctgacgagttcaagcgttttgttgtctacacgctcgagaagatttgtgctagaatgccgagag

SEQ ID NO: 93260 - DNA, 468 bp, Arabidopsis thaliana columbia
cttctccgtatcggctttaggtcttctccgggaagaaagcttcgaacccaattaacgccggacggtagactgtgaccgactagtccccaaaagctcaagtcaatgagaaaatgctcctcaattttaacgttttagagatccatacccaacaagccctgttttcgcatattctttccgttggtttctcaccatcttcgtcgctatgtcaagagttttgatctctaaaatcgttggaaagcaaacacaatctcttgtctcgaaccagaaagatagagtgtctcaatggggaagctatagaactgcttttacagctgctctaaggtcgcctcagctcagaacttactcttcatctggtaggattccgagtaatgtgtattgtacttttgcctttagagatctcaaaggaagttttttaagtaatcatcttgtctgaagttatactactgcccctgcaagaaatgtagttag

SEQ ID NO: 93261 - DNA, 614 bp, Arabidopsis thaliana columbia
ggaagaccgggccggcccacgcgtacggaagcaaaagacaaatgtagtgaaagctggtttttggcatatataatggatacaaatgaaggggagaggcttaagggcgggacgggtgaacttggaagggctcactttgaaacggagagcactagattcactattttagatgctccggggcacaagagttacgtacccaatatgattagtggagcatctcaagcggacattggtgtgctggtgatttcagctcgaaaaggtgaatttgaaacaggatatgagaggggtgggcagacacgtgaacatgttcaacttgccaaaacattgggtgtctctaaactgattgttgttgtgaacaagatggatgacccaactgggaactggtcgaaagaaaggtacgatgaaatagaacaaaaaatggtaccgttcctgaaagcctctggctacaacacaaagaaagatgttgtcttcttgcctatatctggtctaatgggcaaaaatatggaccagaggatgggtcaagaaatttgtccttggtggagtggccctagcttttttgaagtacttgattctattgaaattccgccacgcgatcctaatggtccattcaggatgcc

SEQ ID NO: 93262 - DNA, 811 bp, Arabidopsis thaliana columbia
gttctgcaagtaccggtccggaattcccgggtcgacccacgcgtccgggccctagcttttttgaagcacttgattctatagcatttccgccacgcgatcctaatggtccattcaagatgccaattattgataagtgcaaggacatgggaactgttgttatgggaaaagtagaatctggcagcattcgggagggtgattccttggttgttatgccgaacaaggaacaagtgaaagttcgcgctatatattgcgatgaggataaatgtaggcgtgcaagaccgggtgagaatttgagagttcgcattactggcattgaagatgaagacatcctttctggttttgttttatccagcattgtaaaccctgtccctgctgttaccgagtttgttgcccaactacaaattcttgagctgcttgacaacgctatttttacagctggttacaaagcaattctccacatccatgcgggtgacgacgagtgtgagactatcgaattgaatatccaaattgatctctacacaaagaaaccgatgaaaaagaagttttgtttgtgaagaatggtgctgctgttgtgtgccgcatccaagatacaaattcaatttgtattgaaaaattctcagatttccctcaactttgaaagatcactctacgaactgaaagaaaacaattgctgttggaaaggttaccgagctctttaattttgtcttaagccgcttgatccaaattttgtgaagagaaaagccttgaaacgggctttccgggttgcacccagggagggagaattaggaaaaaccgctttcatgaatggatt

SEQ ID NO: 93263 - DNA, 251 bp, Arabidopsis thaliana columbia
tagagagacttttttgaccgtccagacattaccattgtttttagtaaatattctccaagacatgtgagacaacttcttttattatttaatgcgatctccaataattaacaagctatattatttaatacaaaataaacaattaaaacattgcagtagttcttgtttctttttgaaaataagaatgatctattattgagtttctatttattattgcattcacacatacagcaataaatcttaggattatgttt

SEQ ID NO: 93264 - DNA, 826 bp, Arabidopsis thaliana columbia
  unsure (1)..(826): unsure at all n locations
nnnnnnnnnnnnnnnnnnnnnnnnnnnnnnnnnnnnnnnnnnnnnnnnnnnnnnnnnnnnncggccacgcgtccggagcttcggagctatcgaaaattctgaatctgaaaggtttgagtgaagatgtcttcagatcggaaggttctaagttttgaagaagtttcaaagcacaacaaaactaaggattgttggcttattatttccggcaaggtgtatgatgtgactccattcatggatgatcatcctggaggcgatgaagtcttgttgtcctcaacagggaaagatgctacaaatgattttgaagacgttggtcacagcgacactgcaagggacatgatggacaaatatttcattggtgagattgattcgtctagtgttccagcaactaggacatacgttgcaccacagcaaccagcctacaaccaagacaagacaccagaattcattatcaagattcttcagttccttgttccgatcttgatcttgggattggctcttgtcgtccgtcactataccaagaaagactagaagaagccaaaggcttgctttgatgcttgtcattgaatatctctaccgatctctgtctatctctcttgcgaaaaaaagtactgttactgttgtttggtcttagactgattcttgttgaaattacgaaccaaaaatcattgtgttgctactagttttactgtgttgagtttatgatgacagtgttttcgactttgatgatataataaaagactgcttgatttgcccaaaaaaaaaaataaaaaaagatagggcggccgctctagaggatccaagcttacgtacgcgtgcatgcgtcgtc

SEQ ID NO: 93265 - DNA, 419 bp, Arabidopsis thaliana columbia
cttggtttcttattcgcttccctttcttgaattgtgatctttttgaggtgacaaatggagatttcggagagagctagagctcgattagccgttctcaatgcgcacttgacagtatctgagccgaatcaggtgttgccagcgatcgaaccatggtgcacatcggctcacataaccgctgcaccgcatggatcgcttaaaggaaatttgaagatcgtcgatgagcgtacggggaatgaatatcaggtcccagtctcagagcatggtaccgttaaaaccgttgatctcaagaagataacgacagggaaggatgacaaggggcttaacttatacgatcctggttacttaaacacggcttctgttcgatcttcgatttcttacattgatggagatgagggaatcctacgttttcggggataccc

SEQ ID NO: 93266 - DNA, 654 bp, Arabidopsis thaliana columbia
  unsure (1)..(654): unsure at all n locations
nnnnnnnnnnnnnnnnngccaagtcacttaccgcaggatggtttcttcttcttcttcttcgcttcctccccgcgtccgtgaattcagatattttttttaaaattttttgagaggaagaaatggagatttcgcagagagtgaaagctagattagccgttctcaccgcgcatttggcggtgtctgataccgtcggattggaacaggtgttgccggcgatcgcgccatggtgtacatcggctcacattaccgctgcacctcatggatcactcaaaggaaacttgacgatcgtcgatgagcgtacggggaagaaatatcaggtccctgtctcagagcatggtaccgttaaagccgttgatctcaagaagataacgacggggaaggatgataaggggctgaagttgtacgatcctggttacttgaacacggctccggttcgatcttcgatttgttacatcgacggagatgaaggaatcttacgttatcggggatacccaattgaagagttggctgagagcagtacttttattgaggttgcttatctcctcatgtatggaaatctgccttctcaaagtcagctagctgtttgggggtcaacttnttctaanattcagctntncccaaggngttttggnannannagccatcncatatggt

SEQ ID NO: 93267 - DNA, 512 bp, Arabidopsis thaliana columbia
  unsure (1)..(512): unsure at all n locations
caaaatccgtctcggtggaggaaaaatggctgaagaagctcaagtagatcgttctaatggctctgattcatcatctcctcccataaagttacctcctttcatcaccaacctattcgcctttcttcaacctaagcctcctcctgctactattgatgccaatgctcctaaacctaccggcgagaaggaacctctgaaatcgacctacgagactgtcactttcccttacaatccacccaaaagcgcagagccaatcaagtttgaggctgagcccagctctggcaggacttccaactctgtcatcctttggcaggtatatgcacttggagggtttcttgtcctgaagtgggcctgggcaagatggaatgaaaggaacgagagaagtgacaaaaaaggaggcgacgggtgatgatgatcagaaagatgatgatgaggatgatcaatcatctgattgggcattaagctagtcatattccttgaccncggtgaaaattttncccttttggtntttttgg

SEQ ID NO: 93268 - DNA, 1208 bp, Arabidopsis thaliana columbia
  unsure (1)..(1208): unsure at all n locations
ttcagatttggcgagcatccggaataactagtgatttacaactttattgtaccgcaattggcgcattggtcttcgcagccttaatgctttttgctggttggttccattatcacaaagcagctccaaaattggcttggttccaagatgtagaatctatgttgaatcaccatttagcagggctactaggacttgggtccctttcttgggcaggacatcaagtacatgtatctttaccgattaaccaatttctaaacgctggagtagatcctaaagaaataccgcttcctcatgaatttatcttgaatcgggatcttttggctcaactttatccaagttttgctgaaggagcaactcccttttttaccttaaattggtcaaaatactcggaatttcttacttttcgtggcggattagatccagtgactgggggtctatggttaaccgatatagcacatcatcatttagctatcgcaattcttgttctccgcgcgggtcatatgtataggaccaactggggtattggtcatggtataaaagatattttagaggctcataaaggtccatttacaggccaaggccataaaggcctatatgaaattctaacaacatcatggcatgctcaattatctcttaacctagctatgttaggctctttaaccattattgtagctcaccatatgtattccatgcccccttatccatatctagctactgactatgctacacaactgtcattgttcacacatcacatgtggattggtggatttctcatagttggtgctgctgcgcatgcagccatttttatggtaagagactatgatccaactaatcgatataacgatttattagatcgtgtcctgaggcatcgcgatgcaatcatatcacatctcaactgggtatgtatatttctaggcttccacagttttggtttgtatattcataatgataccatgagtgctttagggcgtccacaagatatgttttcagatactgctatacaattacaaccagtctttgctcaatggatacaaaatacccatgctttagcacctggtgtaacagcccctggtgaaacagcgagcaccagtttgccttgggggggcggtgngttngtagcagtgggtggcccagtagctttgttacctcctccctttggnncggcngnttttaaaagtttacttattcntgcntttcntattcatgtgccg

SEQ ID NO: 93269 - DNA, 508 bp, Arabidopsis thaliana columbia
  unsure (1)..(508): unsure at all n locations
cgcgaccgncagatagtttttgctccattttagtttagatgacccaagcgctnaaaggctggttggaatctactggacaacaacatgttcttgctcaggtttgggcgcctgtcaaaaaccgtggacgatatgttcttacaacttcaggacagccatttgttcttggtcccaatagtaatggccttaatcaatacaggatggtttcattgacgtatatgttttcccttgatggtgaacgggacggagagctcgggcttcctggtcgcgttttcaggaaaaagttacctgagtggactcctaatgtgcagtattactccagcaaagagttttcaaggcttggtcacgccttgcactataatgttcagggaactttggctttgcctgtttttgaaccatccaggcaactctgtgtaggagttgtcgagcttattatgactgctccgaagattaactatgctcctgaggttgaaaaagtttgtaaagcgcttgaggctcggaatttgaaaac

SEQ ID NO: 93270 - DNA, 451 bp, Arabidopsis thaliana columbia
tgaaggaacagttcatgagcacaaaacacattgctctggctgttagtgaagagcttgacttgcagactaggcttattgatgacttagattaccatgtggatgttactgactctcgcttaaggagagtgcagaagagccttgctgtcatgaacaagaatatgagaagtggttgctcttgcatgtcaatgctcttgtcagtgctggggatcgtcggtcttgctgttgtaatatggatgttggttaagtatatgtaataccaacatcagacaacttataagttcctctgtaggtccactggcctctactctctatgtgaatggttgcaatgtatttcctcattccacatttgtggctgagcttttcatttctcttctgttaccaaaaccctttaactgcacacattatatattacttaaagggttttggtaacatataatgtgtgcagttaaaa

SEQ ID NO: 93271 - DNA, 569 bp, Arabidopsis thaliana columbia
cgctctgtacgtacctgccacgtggcgtaatctctctgcacgacgcgcttcttttctttctatatacatctctccgacacaaacctaacccttcttctgaatcactttagttatcaatcgatagaaacgccgcccaattaccaaacatcgaaaccaccatgagggttatctcaaaactgttcgattccgacagaagacgaatacccaaatcgccgaagcatttggattccggcgaaagcgccacgtcatcttcctcactcagcgacgtaaccaccggctcaagcagccttcatagcagtctctctctccaaacgcttccttcagttccctctcttcagaaaatcccatccaccaccgtcaccgtctctcactccgttacctcctcgtttaaactccgtgatcggagtcttcctgtaacttgtctcgccgtcaacggtggctatctcttcgccgtttctggacacgaagtaagtatctacgatcgcgacatgtgtgctcatctcgacacattcaacggccaagatcctttcttaagaaccgtggaagccgacggcttctccggtgagaaa

SEQ ID NO: 93272 - DNA, 1025 bp, Arabidopsis thaliana columbia
  unsure (1)..(1025): unsure at all n locations
tcttcaaatcttcgtctttcttcttcaaatcttcttcgaattatgtctggaatcttcagatttagtggtgatgaagattgtttacttgggggatcgatgtatctatcaccagggagctgtcccggtgtatatnacccagcgcgtaanaggttacgtgttgctgcgacgtcgttttacagcggttttaaggagaagcaaacttcaatcgatgtattgcctgaagagtgtttatttnagattctaagacgtttaccttctggacaagagaggagtgcttgcccttgtntttccaagcattggcttaatcttttgagtagtatcagtaggagtgaagtgaatgagtcatcagttcaagatgtggaggagggtgaagggttttttgtcctaggcagtttggaggggaagaaggcgacgggatttgaggttggcggcggttgcggttgggccgccgagtcgtggtgggttggggaagcttcagattcgtgggagtgggtttgagagtaaggtgactgatgttggtcttggtgctgttgctcatggttgtccatctcttaggattgtttctttatggaacttgcctgctgttagtgatttgggtttgtctgagatcgcacggtcatgcccgatgattgaaaaacttgacctttcacggtgtcctggaataactgacagtggattggttgctattgctgagaactgtgtgaatctgagtgatctgacgattgattcttgctctggtgttgggaatgagggtttaagggctattgcaagacgttgtgtcaatctgagatctatctctatcaggagctgcccacgtattggtgatcaaggtgttgccttcctcttggctcaagctggttcttacttgacgaaagtgaaactccagatgctgaacgtatctggtttgtctcttgctgttattggtcactacggagcagctgttactgatcttgtgctttatggacttcaaggggtgaatgagaaaggcttctgggttatgggaaatgcaaaaaggttgaagaaac

SEQ ID NO: 93273 - DNA, 781 bp, Arabidopsis thaliana columbia
  unsure (1)..(781): unsure at all n locations
nnnnnnnnnnnnnnnnnnnnnnnnnnnnnnnnnnnnnnnnnnnnnnnnnnnaaacatttcttctgtccacgcctcctctttttgccctaatcttctagggttcttcttcttttcatgaatcttagtcttcgatctcttcaaatcttcgtctttcttcttcaaatcttcttcgaattatgtctggaatcttcagatttagtggtgatgaagattgtttacttgggggatcgatgtatctatcaccagggagctgtcccggtgtatattacccagcgcgtaagaggttacgtgttgctgcgacgtcgttttacagcggttttgaggagaagcaaacttcaatcgatgtattgcctgaagagtgtttatttgagattctaagacgtttaccttctggacaagagaggagtgcttgcgcttgtgtttccaagcattggcttaatcttttgagtagtatcagtaggagtgaagtgaatgagtcatcagtcaagaatgtggaaggaagggtgaaggggtttttggcctagggagtttggaagggggaagaaagccgaccggatttnaagggttggccggccaatttccgggttgggancgcccaaacccgtgggtggggttgggggaacctccaaaatnccgtgggantggggtttaanagnaangggnctaangttggccttgggccngttncccatgggtgcccacccccaaggngtgtnccttatgaacctnccccccgaaanaaattggggtnccnaaccccggcaccccnantaaaactngc

SEQ ID NO: 93274 - DNA, 613 bp, Arabidopsis thaliana columbia
atcaaatcagtcttctacttcactgacttactccgcactgttagcttcaaatgcaggtcccagcagggattgccctcccatgacggtgacatacagacttcaggggttagatggtgaagctactgagcctatgatcaaggaattggaagaagatagagaagaatcacaagatccagagattgagtttgcaatagcaggtgcagttcgagaatatggtggtctggaaattttacttgatatgatcaagagtttacaagatgacttcaaatccaaccaagaagagatggttgcagttcttgatctcctaaaccattgctgcaagattagagagaacaggcgagctctactcaggctaggggctttaagcttacttcttgaaacagctaggagggcattttctgtggatgctatggagccagctgaaggcatactcttaattgtcgagagtttgacgcttgaagcaaatgaaagtgacagcatcagtgccgcacaaagtgctttgactgtcagtaacgaggaaactggaacttgggaacaggccaaaaaaatagtgcttatgttcttagaaaggctaagccatccttcagggcttaaaaagtcaaacaaacagcat

SEQ ID NO: 93275 - DNA, 406 bp, Arabidopsis thaliana columbia
ctgcgttatagatacttacgcatattccatgccaggagcgttaacatggataggaacatttgtatccaaccactctatttgtagaccactttgctgcgtgtgcaactctcgatgcaagctccctttcgttcgtacgcttcccgaggacggagctgatctatacttttgttctttagaatgtgagaagaaaattgatcaggaacgtttcgaattttaaaattatgttctttactatgtttagaaaactatttatttatagatgataatgtttgctagcttgaatgactcgcaaatttggtaaaatttgtgaggaatctgggtctgttaaattattacaagtccctacaataacatttggttgtgtacttgtgttagtgtaatatatatatatatctcattgaacccc

SEQ ID NO: 93276 - DNA, 566 bp, Arabidopsis thaliana columbia
  unsure (1)..(566): unsure at all n locations
cagaaagtgaaaaagagagcgagcgatgaacagtatcttctccattgacgatttctccgatcctttctgggaaactcctccgattcctctcaatcccgactcttctaagcctgttacggcggatgaagttagccagagtcaaccggaatggactttcgagatgtttctcgaagagatttcttcgtcggcggtgagctctgagccacttggtaacaacaacaacgcgatcgtcggtgtttcttcggcgcaatctcttccttctgtttccggacagaatgatttcgaggatgatagtcgatttcgtgatcgcgattcgggaaatttggattgtgctgctcccatgacgacgaagacggtgattgttgattccgatgattatcgtcgtgttcttaagaacaagcttgagactgagtgggcactgttggtcccctccgggtnggcctgtnancctaaaatncncaaagtncccaaaacnaactcaccagnaaccagccctaccaagggacttgggaanctcctacantgggnaaantgggacatacaganaatggncannaactngtnng

SEQ ID NO: 93277 - DNA, 465 bp, Arabidopsis thaliana columbia
gagttttcgaaaattttgaagggagcttttctgacagatggctagattctttcttctctgttgcctcttcgcggcggtgctgacgtcatcattgacggaggccggcgacaataatcaagtctactcgccttgttcagattctactgttgcgatcggcgatggattcactttcggcattgccttcgctgcgaaagattctttcttcagtacaaatcgatccaaatccgttcagtactctccctgcgatcatcgccatctctcgctcaacggaaactctgaggtcgccgtgttcagacctaaagtcgatgagatcacactccttaccatcaatacctctagttcctccagtttccgcccggatgcttccaagggatatatggtagcattcgctggtgcaaaatacgctgcaagatcactccccaattatggttgcagacagcaatcacatcgtgacaagcttcaccc

SEQ ID NO: 93278 - DNA, 631 bp, Arabidopsis thaliana columbia
  unsure (1)..(631): unsure at all n locations
agcggttggtgtaagatcccaaactcacagattcccaaataatagtaatactcttcctcttctcaactctcaccagtcaccagcagatcatcggagatgggcggagacggaaaagttttcaccttgtccgaggtttctcagcacagtagcgccaaggattgttggatcgtcatcgacggcaaggtttatgatgtgacaaagttcttggatgatcatcctggtggtgatgaggttatcttgacttctacagggaaagatgcgaccgatgatttcgaggatgtgggacatagttcgactgcgaaagcatgctagatgagtactatgtgggtgatattgacacagctactgtgccggttaaagctaagtttgtgccctcctacggcgacggaaagccgtggctactcaaggctaagagctcgggttttgtttattaaggtccctcaagtccctggttccccttttcaaactttagggtttgggttttcgggattcggaccttcacttaggccaagggtccttttttcttaaaaggtttaattttggcccaagggaatttcttttttccgccggggtaaaacctggctttnccccggtttcttnnaggaacnttttttncctntccaatacctaa

SEQ ID NO: 93279 - DNA, 831 bp, Arabidopsis thaliana columbia
  unsure (1)..(831): unsure at all n locations
nnnnnnnnnnnnnnnnnnnnnnnnnnnnnnnnnnnnnnngannnnnnagcggttggtgtaagatcccaaactcacatattcccaaataatagtaatactcttcctcttctcaactctcaccagtcaccagcagatcatcggagatgggcggagacggaaaagttttcaccttgtccgaggtttctcagcacagtagcgccaaggattgttggatcgtcatcgacggcaaggtttatgatgtgacaaagttcttggatgatcatcctggtggtgatgaggttatcttgacttctacagggaaagatgcgaccgatgatttcgaggatgtgggacatagttcgactgcgaaagccatgctagatgagtactatgtgggtgatattgacacagctactgtgccggttaaagctaagtttgtgcctcctacgtcgacgaaagccgtggctactcaggataagagctcggattttgttattaagctccttcagttccttgttccacttctaatcttaggcttggctttcggcattcggtactacactaagaccaaggctccttcttcttgaaagattgaattgtggcctaagtgaattgcttgtgtacgacgtggttaaactctgtctctacctctgtttgtcttgtaagacatcattatattctctattccaatcaactgatagacctttgatttttaagccatctacctttgttgtcttatatcaatcaaatccatttacaaaatcactccaaaaaaaaaaaaaagggcgcgcgctctagaggatccaagcttacgtacgcgtgcatgcgacgtcatagctcttctataggtca

SEQ ID NO: 93280 - DNA, 750 bp, Arabidopsis thaliana columbia
gtccgttctgaattataacggttccccggaaaatcaatggaagagatcgccgttatcaagattcagacggcatttagaggatatatggcaagaagagcattgcgtgcgttgagaggtcttgtgaggctaaaatctttagtccaggggaaatgtgtgagacgtcaagccacatctacattgcaaagcatgcaaacactagctagagtacaatatcagattcgtgagagaaggctccgattgtctgaggataaacaggctttaacacgacagctccaacaaaaacacaataaagactttgataagactggagaaaattggaatgatagtacattgtcgcgggagaaagttgaagcaaacatgttgaacaagcaagttgcaacaatgagaagagaaaaagcgcttgcatatgcattcagtcaccagaatacatggaaaaactcaactaaaatgggttctcaaacattcatggaccctaacaatccgcattggggttggagttggctagaacgttggatggctgctcgaccaaacgaaaaccactcactcacaccagaaaatgctgaaaaagactcttctgctaggagtgtagcaagccgtgccatgtctgagatgattccacgaggcaaaaacctttcaccaagaggaaagacaccaaacagtcgaagagggtcaagcccgagagtgaggcaagtcccaagtgaagactcaaacagcattgtgagtttccaatcagaacaaccttgcaatcgt

SEQ ID NO: 93281 - DNA, 646 bp, Arabidopsis thaliana columbia
gtctacagcttatccgtttcacaaacctgaggaacacacacccgctgtaattttcttgtcaagaaagattccaaaattgattggaaaggctgcacgctatgctggctcggcaaaacccaagaagggtatgcaatacattccgacgataactaattacacgaagctttggtgggttcctaatgttgttgtggctcatcaaaaggaaggaattgaagctattcatttgcctactggtcgaacactttgcaagctttctctacttgaaggtggacttcacgccgacataaacggagatggtgttctcgatcatgtccagactgtcggaggcaatgttggagagagaactgtagtgagcgggtcaatggaagtgttgaagccttgctgggcagtggcaacctcaggcgttcccatccgggaacagctctttaacgtctcgatctgccatcactccccttttaacttcttgcactatggaggagattactcacgacacttcgcccaggcaagagacacctctactctggagatcgcaactcccattctcatccccagagatgatggacacaaacaccgcaaaggcagtcacggagatgtaatcttcttgacaaaccgtggagaggtgacatcatacacgcctgatgtgcac

SEQ ID NO: 93282 - DNA, 511 bp, Arabidopsis thaliana columbia
  unsure (1)..(511): unsure at all n locations
nnnnnnnnnnnnnnnnnnnnnnnnnnnnnnnnnnnnnnnnnnnnnnnnnnnnnnnnnnnnnnnnnnntacccacgcgtgcgcgggcgcgtgggtgaatttatcttcaccatcacaccaatccaactccatttaaattcacagctctataagagtcacctagacaagtcaagagagagagatagttctgacttctgacagagactcatggcggaagcttgcggagtgagaaggattaagctaggaagccaaggccttgaggtatcggcgcaagggcttggttgcatgggtctctctgctttctacgggactcccaagccggaaaccgaagctatcgctctcatccaccacgccattcactccggcgtcactttccttgacacctccgatatctacgggcctgagaccaacgagcttctcctcagcaaggctctcaaggatggggtgagagaaaaagtggaacttgcgaccaaatatggaatcaggtatgcagaggggaaagtanagtttaag

SEQ ID NO: 93283 - DNA, 534 bp, Arabidopsis thaliana columbia
  unsure (1)..(534): unsure at all n locations
gccnnnnnnnnnnnnnnnnnnnnnnnnnnnnnnnnnnnnnnnnnnnnnnnnnnnnnnnnnnnnnnnnnnnnnnnccacgcgtgcgctcgaccactccaattcaaaactcgccattgatacacgagagatagagagagagatttgtgtgagagaaatccatggcggaatcttgcagagtgaggaggataaagctaggaagtcaaggcctagaggtatcggcgcaaggccttggttgcatgggactcaccggtcattacggtgcttccaagccggaaactgaagccatcgctctcatccaccacgctattcactccggtgttactttccttgacacttctgacatgtatggtcctgaaaccaatgaaattctcctcggaaaggctcttaaggatggtgtgagggagaaagtggagcttgcgaccaaatttggaatcagttatgcagagggaaacagagagattaagggagatcctgcttatgttagagctgcctgtgaggcttagttaaagagactagatgttacctgcattgatc

SEQ ID NO: 93284 - DNA, 997 bp, Arabidopsis thaliana columbia
cccacgcgtccgcaccaccaacaacaacaactccactaaaaaattcatagctctacaagagtcacctcatagagaagtgaagagacagagatagttgtgacagagagattcatggcggaagcttgcggagtgagaaggatgaagctgggaagccaaggccttgaggtatctgcgcaaggccttggttgcatgggcctctccgctttctacggtgctcccaagccggaaaatgaagccatcgctctcatccaccacgctattcactccggcgttactctccttgacacctccgatatctacggccctgagaccaatgaagttctcctcggaaaggctctcaaggatggggtgagagaaaaagtggaacttgcgaccaaatttggaatcagttatgcagaggggaaaagagaggtcagaggagatcctgaatatgtaagggctgcttgtgaggcaagtttaaagaggctagatattgcctgcatcgatctctattatcagcatcgtgtcgatactcgtgtccctatcgaaatcactatgggagaactgaagaagctggttgaagagggtaaaataaagtacattggtttgtctgaagcctctgcctcaactatcagaagagcacatgctgttcacccaattactgccgtgcagatagaatggtccttgtggacgagagatgtggaagaagaaatcattccgacctgcagggaacttgggattgggattgttgcttacagtcctctaggacgaggttttcttcgcatctggacccaagctttttgagaacctagaaaaggatgacttcagaaaggctctaccaagattccaagaggaaaacttagaccacaacaagattgtttatgaaaaagtttgtgcaatatcggagaagaaagggtgcactcctggacaactagccctggcatgggttcatcaccagggagatgacgtttgccctatcccaggaaccactaagatcgagaacctcaaacagaacatt

SEQ ID NO: 93285 - DNA, 764 bp, Arabidopsis thaliana columbia
  unsure (1)..(764): unsure at all n locations
gggcactaatccgactcactttagggaaagctcgtacgcctgcaggtaccggtccggaattcccgggtcgacccacgcgtgttgtctcgatcgtgtaactgagaacgaaggatgcaagtagtttccaggagattagttcaacggcctctcgtcggaggagcttcgatctattcatcttcttctctcagatcgctctacggagtctctaatcacctgaatgggactgataattgtcgctattcgtcttccctcgctactaagggcgtgggacacctcgctcgcaagggtactggtgggagatcttccgtaagtggcattgtagctacagtatttggagccacaggatttctgggtcgttatcttgtgcagcagctagctaaaatgggatcacaagtgcttgttcctttccgaggctcagaggactctcctcgacatctcaagttgatgggagatttaggacaggtggtaccaatgaaatttgatccaagagatgaagactcgattaaggctgtcatggccaaggcttaatgtcgttatcaatctaatttggaagggggtccgggccaagaaatttcaatttttaagattcgatcaccataatttcctgaggaaactttcattttggtgccaaggacacgggggggttaattgggtttttcaaggttttttccactggggttttttgcaactncctcaaggatcttttgggaaaantctttttgnanttnttaccgcctccttggacccttttnncctaacctttt

SEQ ID NO: 93286 - DNA, 1314 bp, Arabidopsis thaliana columbia
attaccgtcaccggtgagattcctccaaaatcgggactttttctcaggacgtttgagatgcattcgcgctccgccttgctctatagattcctccgtccggcgtcgagatgcttctcctcttcctcggctgtaactccggtcaccgtaacgcaatctcccaagagtctcgaggctcttcgagctcggctggcgaatgagtcgccttccctaaccgatttcatccacggcgatacctattcggtggaagttggaaccaaaaagaaacctctcccgaaacctaaatggatgaaggaatcaattcccggcggcgagagatatgtccagatcaagaagaaattgagagaccttaagcttcacaccgtctgcgaggaagcgaaatgtcccaatctcggtgagtgctggtctggtggtgaaactggaaccgccaccgctacgattatgatccttggggatacatgtacacgcggctgcaggttttgtaatgtgaagacatcgcgtacacctccaccgcctgatccaaatgaacctaacaatgtggctgaagcaattgcttcctggggggttgattatgttgtgatcaccagtgtagatcgagatgatttacctgatcaagggagtggtcattttgctgaaactgttcagagattgaaattcttgaagccggagatgttgattgaagcactagttcctgatttccgcggagatggtggatgtgttgagaaggtttccaagtcagggcttgatgtcttagctcacaacattgagacagttgaagagcttcagagttttgtgcgggaccatcgtgctaactttaagcagtcattggatgtgcttaggatggctaaggagtatgcacctgcaggcaccttaacaaagacttctgtaatgctgggatgtggagagacccctgatcaagtggttaagacaatggagaaggtgagagcagcaggggttgacgttatgacatttggccaatatatgcgaccatctaaacgccacatgccagtagctgagtacgtgacaccagatgccttcgagaggtatcgccttcttggcatggaaatgggattcagatacgtagcatcaggaccaatggtgaggtcgtcgtacaaagcgggagagtactacataaagtcgatgatagaagccgatcgagtggcttctccttctacatccccgtagattacacactataatatgtgaattctttcactttattgctttgtttcttctgcgggtaagccattcacaacacttatccgccacattctgaataatgtaatactattattgtccaatcttccatgtgtgtct

SEQ ID NO: 93287 - DNA, 463 bp, Arabidopsis thaliana columbia
gcaaatgcgcgaaacgtttttggaccaattctaatttctaaagtaacgcgataaatctaatgcattcccacgatttgtgtttgtccctctgacgaaaaatcctcggatctgttgcattctctccaaagcttgaatcagaagaaagcttttgaagatcagcctaaaagtgatctctcataactgcttaaaagattgttgaaactcgaagatgtctttggccgagataaacaagaatgaagtcgacattgttattggggctcttaatgctgaccttacacagtttttgaccagctggaggcctttcttctccggattccatctgattgttgtcaaagatcctgagctcaaggaggaactcaacataccagaaggctttgacgtagatgtctactctaagactgacatggaaaaggttgtgggcgcatccaattccaccatgttctctggctattcttgcagatat

SEQ ID NO: 93288 - DNA, 732 bp, Arabidopsis thaliana columbia
  unsure (1)..(732): unsure at all n locations
nnnnnnnnnnnnnnnnnnnnnnnnnnnnnnnnnnnnnnnnnnnnnnnnnnnnnnnnnnnnnnnnnnnccacgcgtccgtacggctgcgagaagacgacagaagggtacggctgcgagaagacgacagaagggtacggctgcgagaagacgacagaagggtacggctgcgagaagacgacagaagggtacggctgcgagaagacgacagaagggtacggctgcgagaagacgacagaagggggcagcaaagccgacgttgaactttctcgccgccggagcgcgtgatctccactctctgtcatcgaatcactctaattgaagattccccgatggcgattgtctatgctgttgtagcgagaggtaccgtggtattagctgaattcagcgccgttacgggaaacacaggcgccgtggtgcgacggatcctcgagaagctttcaccggaaatctccgatgaaagactttgtttctctcaagatcgttatatcttccatattcttagatctgatggtcttacctttctctgtatggccaatgatacctttggaaggagggttccattttcgtatttggaagagattcatatgagattcatgaaaaactatggcaaagtggctcataatgctccagcttatgcaatgaatgatgaattctcaagggttttgcatcagcagatggcagttcttctctagtaatcctagtgttgatactctcaatcgtgttagaggagaa

SEQ ID NO: 93289 - DNA, 420 bp, Arabidopsis thaliana columbia
ctttttttgtatgttcatcattcaagtctaagctcatggtctgcaaggttaatcaccgcggggaaatcggtttcgcgtacttctaagccggttagagggttaaccgactatagtaccggggtctatttcgttagccaaaccggtccaccagaaatccagtttcccggtggatctccttcggaggaagagttaccttcacgaccaagtagaggaccagagttggctccattagaagttccggagcttcctaatttaccagagataagtccgtcggaaactccaccggaagttacaacggttccaagtgatccacccccgcttggaccaccgcagactccgggcccggagtttccggtttcaccatctccatctccaccgatgccagatactccaaattctcctacaccaaaatcaccacct

SEQ ID NO: 93290 - DNA, 523 bp, Arabidopsis thaliana columbia
  unsure (1)..(523): unsure at all n locations
nnnnnnnnnnnnnnnnnnnnnnnnnnnnnnnnnnnnnnnnnnnnnnnnnnnnnnnnnnnnnnnnnnnnnnnccacgcgtccgcccacgcgtccgtgcttccttaagacccaaaaatccaaacctaaccctaatcgacattttctccgatttctaaatcctcctccggtgaaaatgtctcaccttgatgatcttccttctactcccggaaagtacaaaaccgataaagttccaccgtacgggattctccaccaccaccgttacctccgtctctcaaaactcaccctttgggcttctctcttcctcgctctcttcctcttctacctcgttttatctcctcctccgtcaccatctcgccggaatctcaacgattcttcctccatttccgccgcgaaatacggcggctctcactgggagaaacaagtccgtaaatccgctcgtcctaggtctcacggcggtttaacggtattagtcaccggagcttccggattcgtcggtactcacgtctcgatcgcgttacgaaga

SEQ ID NO: 93291 - DNA, 427 bp, Arabidopsis thaliana columbia
tgaggttgttcccatggccgatggagaatcaaaacaactaaggagattttcttagagaagcttcagaggcgaatgcagtcgttatcatgaacagcataacactagttgacgcctttctaaacgctgataaatggtcagagatgttctgttcaatcgtggctagggcgaaaactgttcagataatttcatcaggagtttctggagctagtggttctctccttctgatgtttgcagagttacaggtactatctcctctggttccaactagagaagcttattttcttcggtatgtggaacaaaacgcagaaaccggaaattgggcaatcgtggatttcccgatcgatagcttccatgaccaaatgcagcgaatgaatactattactcatgagtataagagaaaaccttcaggctgcatcattcaggacat

SEQ ID NO: 93292 - DNA, 621 bp, Arabidopsis thaliana columbia
  unsure (1)..(621): unsure at all n locations
aaggcttttcacatactggacgagcgatgcttatcaagctacgggctgctacaatctcctttgttcgggtttcatacaaatcaacagtcaaatagcaatgggagcaagtatctctccggtatctggcttccataacccgcaatacgatataagtattaccatttggaaggatccaaaagaagggcactggtggatgcagtttggagacgggtatgtgttgggatactggccaagctttctattctcttacttagcagatagtgcatcaatagtagagtggggtggagaagtagtgaacatggaagaagatggtcaccacacaaccacgcaaatgggaagcggtcaatttccggatgaagggttcacgatagcgagttacttcaggaacattcaagtcgttgatagctctaataatctgaaagaaccaaaagggctcaacactttcactgagaaatcgaattgctatnatgttgnaggttggtaagaattgntgnttnggggccatnatttttacctattgggggccncgggagnaacccntatttccagngggggttaaanaaagaggtngttnangttttngnggaccccttngctgggtttttctttttaagggagggg

SEQ ID NO: 93293 - DNA, 595 bp, Arabidopsis thaliana columbia
gtcacaccttcttcgcctgagaataccacctaacaatgaccaccgggcggggcctttctcgccctcttccgctttctagtcgccgccgtttctggtgacgtcatcaaacttccttcgcgaccttctaagttcttccgcccaactgaaaacgacgatgattctactaagtgggctgttctcgtcgccggatccagcggatactggaattatcgtcatcaggccgatgtttgtcatgcttatcagcttttgaagaaaggtggagtgaaagaggagaatattgtggtgtttatgtatgatgacattgcgaagaacgaggagaatccaagacctggagttattatcaatagtcctaatggagaggatgtctataatggagttcccaaggattacactggagatgaagttaatgttgataacttattagctgtgattcttggaaacaaaacggctcttaaaggaggaagtgggaaagttgtagatagcggtccaaacgatcatatctttatatactatagtgatcacggtggttcgggagtgctcgggatgccaacttctccaaacctatatgcaaatgatctcaatgatgtcttgaaga

SEQ ID NO: 93294 - DNA, 2056 bp, Arabidopsis thaliana columbia
  unsure (1)..(2056): unsure at all n locations
cagacgcgtgggtggtttttgagaattgagaaaacccttttaaaattctctatcgatctcatcacaaattttgctatatccacaattcatgtgcttaggcatatagttattcccaagaaaccggtttaactgtttacgtatgcaacctccggcaagcgcaggacttttccggtcgccggaaaatctcccttggccttataattacatggattatttggtcgctggtttcttggttttgacggccggaatacttctccgtccatggctctggtttcgtctacgaaactcgaaaacgaaagatggagatgaagaagaagataatgaggagaagaagaagggaatgattccaaacggaagcttaggctggccggtgatcggagaaaccctaaacttcatcgcttgtggttattcttctcggcctgttaccttcatggacaaacgaaagtctttatacgggaaagtgttcaaaacgaacataatagggacaccaatcataatatcaaccgatgcagaggtgaataaagtggtgctccaaaaccatgggaacacatttgtccctgcataccctaaatcaattacggaactacttggagaaaactctattctcagcatcaatggacctcatcaaaaaaggcttcacacgctcattggcgcgttcctcagatctcctcacctcaaagaccggatcactcgagacattgaggcctcggttgttctcactttggcgtcttgggctcaacttccattggttcatgttcaggatgagatcaaaaagatgacgtttgagatattagtaaaagtgttgatgagcacatctcctggtgaagatatgaacattctcaaacttgagttcgaagaattcatcaaaggtttgatttgtatcccaatcaaattccctggcactagactctacaaatccttaaaggcgaaagagaggttaataaagatggtaaaaaaggttgtggaggagagacaagtggcgatgacaacgacgtctccggcaaatgacgtggtggacgtacttctaagagacggtggtgattcagagaagcaatctcaaccgtcagatttcgtcagcggaaagatcgtagagatgatgatacccggagaggaaacaatgccaacggcgatgaccttggctgtcaaattcttaagtgacaaccccgtcgctctagccaaactcgtggaggagaatatggagatgaagaggcgtaaattggaattgggagaagaatacaagtggaccgattatatgtctctctcttttactcaaaatgtgataaacgaaacgcttagaatggctaacattattaacggggtgtggaggaaagctctcaaggatgtagaaattaaaggttacttaataccgaaaggatggtgtgtattggcatcattcatatcggttcacatggatgaagacatttatgataatccctatcaattcgatccgtggagatgggacagaattaatggatcggcaaacagcagtatttgcttcacaccctttggtggtgggcaaaggctatgtcctggtttagagctgtcgaagctcgaaatatccatctttcttcaccaccttgtaacccggtacagttggacggctgaggaagacgagatagtgtcatttccgactgtgaagatgaagcggaggctcccgatccgagtggctactgtagatgatagtgcttctccgatctcacttgaagatcattaatagatcatttcaaagaacaaaactgtttgtgcaaagaggaagcagagaagtaaacaaatgatcttattaacaaatagtagagaagagaagcaaacaagattggtgggtaagacagaaagaaccaaacgtacagctagtgatggctcaaagatgagagattctaattataattttttttgtttgtcatgtcaaattataagcgttggttaggttgtccctttctcttttatttatcgtaccaaacgcaagttgagatatgattccatatatatggatgatagatatgtatattaatataaccctcctcctttaaaaaaaaaaaaaaaggggggcgncnggggc

SEQ ID NO: 93295 - DNA, 592 bp, Arabidopsis thaliana columbia
  unsure (1)..(592): unsure at all n locations
gcaaatcaaaagagtttaaaaaccacttgccaccgtatgagaaccttgtctctgacggtcgattctccgctcgccacgacgacgccacgtcagcatccacatagattcctctaaatctcacnaataccatcaaaccgattttcgaagattcgaatccaattcttctcctcctcctccttcttcttctgagaaaatctcatcggatttcatatttttgtcctattgactattcaacgtgacagatcgaatacaaagctttttggttttgaatcggggattgttgcgactgagacggtgccgtttcaattcgctgcaaatgcttccctgagaaataccttttggttcttttatgtaaataaaagaatcgaggaggatagtaaatatgggttggagcaacttttggttcaccggaggaagcattcatggccgactggggaattcatcagcaggagtactttgcaatggctcgatttggatggggcggctccgccaccacacgcatggaggaggagattaaactgccatgccaatatcttaaaagaattcactattacttttagggaagccattaaaatggtacgcttggggatac

SEQ ID NO: 93296 - DNA, 1136 bp, Arabidopsis thaliana columbia
tttatttctctggtcttatttatttattaataggcctctctgtatcttcttcggtacgagtatgagccacgatagagagttggtttcgatcgttaggggtattttggtcaattgacatgttcgttggcccatctccgccgcacacaccactcgttaaccgccgtaacatcaacaaccaccggcctcgtaacgcaaccgtcacctccgctttacctgatattttcctcgcggcggtctctctccttttcctctggtcatctcctaaacctctagtctctcttcctccggacagattctctttccctctaaatcctcgccgtcgatccatcaccgccatgtctcgccgatctcctcctcctcctcctcctactcaacgcttcgctaatcctcaatctctctccgtttggctcgaatcgcgattaccttccgattcattcgccgcttggggagtcaaaccgggaaccaaaaacgttcataacctctggctagaactctccgacggcgaaacttctctcgccgattcaactcctccagtacgcaccgtcaacgtcgtcaccgttcgagtaatcggaaaaaacggacgaatcctagtggaagctcatcaggaattatccgatgggagtattcgtgaaagatttcgtcctttatcagagaaaatgaagcctgaagaatctcccgacgaagcagtttttcgcgccataaaagaagagctcggatctatcttcaatggcgatggtgataacattggacagagaattaagattcgggcggaacttataacagaagagttgaagaaaggaactcgctatcgtatccagggattacgcgcgcgttacgctcttcactctgtgaatgcaacggtggagggattaccggagcaagatttctgtacggtggaaaaagagtacgagggaggagactcgacgaaagattcggttgaaacactcgccgctgggaatgctgtaactgtgaaacgacattactggaaatgggttagtcctgattcgattcgatcttaaaaaaaatctcaaaacaaagcttttcacaaattttatcaatcttgcttttgatacatgaataatcagagagccatgtagagatacatatacacatttatatatgttcataatcatctt

SEQ ID NO: 93297 - DNA, 759 bp, Arabidopsis thaliana columbia
cggaaagttaaatcgcggggaaaaaaataacacgggaccggaaattccccttaggtgggaaaaggcttcatccctggggaagtttattcccaaatggggcaggtatttcgttggaaagatttttggtcccttaatccagagaaaattaaaggccttaaagaatctccccgacgaagcagtttttcgcgccataaaaaaagagctcggatctatcttcaatggcagatggtgataacattgggacagagaattaagaattcttcccggagcttataacagaacagtttgaagaaaggaactcgctatcgtatccaggattaccggcgcgttacgctcttcactctgtgaatgcaacggtggagggattaccggagcaagatttctgtacggaggaaaaagagtacgagggagccgactcgacgaaagattcggttgaaacactcgccgctgggaatgctgtaactgtgaaacgacattactggaaatgggttagtcctgattcgattcgatcttaaaaaaaatctcaaaacaaagcttttcacaaattttatcaatcttgcttttgatacatgaataatcagagagccatgtagagatacatatacacatttatatatgttcataatcatcttcttcgtttggctatttttgtgttagtggatactattctccagaagttttgatctcacatagcaatcttcttcgagttcattgttttgtgctcaaccgacccgatatgcgatttctagctcattcatc

SEQ ID NO: 93298 - DNA, 777 bp, Arabidopsis thaliana columbia
cattaaccccttttacagtgaacggaacctgaacctggaggcgggcgctctagaactagtggatcccccgggctgtttgatttttcggtcgcggtcaattgacatgttcgggggcccatcgccgccgcacacaccactcgttaaccgccgtaacatcaacaaccaccggcctcgtaacgcaaccgtcacctccgctttacctgatattttcctcgcggcggtctctctccttttcctctggtcatctcctaaacctctagtctctcttcctccgaacagattctctttccctctaaatcctcgccgtcgatccatcaccgccatgtctcgccgatctcctcctcctcctcctcctactcaacgcttcgctaatcctcaatctctctccgattggctcgaatcgcgattaccttccgattcattcgccgcttggggagtcaaaccgggaaccaaaaacgttcataacctctggctagaactctccgacggcgaaacttctctcgccgattcaacttctccagtacgcaccggcaacgtcgtcaccggttcgagtaatcggaaaaaacggacgaatcctagtggaagcttatcaggaattatccgatgggagtattcgcgaaagaattcgtcctttataagagaaaatgaaagcctgaagaaatttctccgacgaaagcagtttttttggcgcccataaaaagaaaaaaccttcggatcctaattcttttaaatggcccgaatgggtggattaaccatttgggacccggaggaaattta

SEQ ID NO: 93299 - DNA, 418 bp, Arabidopsis thaliana columbia
gagaaagttaaagagagaaggagagatccatagagaaagagaaagagaatgggttctaagggagacaacgttgctgtatgtaacatgaagctcgagagacttctcagcatgaaaggtggcaaaggacaagacagctacgccaataactctcaagctcaagcaatgcatgcacggtccatgcttcacctcctagaggaaacacttgaaaatgttcacctcaactcctccgccagtccgccaccgttcacggcggttgatcttggctgttcctccggcgcatatactgtccacataatcgatttcatagtcaaacatatctctaagaggtttgatgctgccggaatcgaccctccggagttcacagctttcttctccgatctcccaagcaacgacttcaacacgctttttcagctttctt

SEQ ID NO: 93300 - DNA, 417 bp, Arabidopsis thaliana columbia
tagagtttctcatgtctgaggcaaatgaggtgagaacacatggcgattttagggaaatgggtcagaggcttgcgcaggaagttgtttcttttttcaagaggaaaaaggataaacatgcgagatacgggcgcttgaaaaacatcaagctgagttttgttggacattcaattggtaacgtcatcatcagagctgcaatagctgatagtttgatggatccatacaggaagtattttcatacatatatatcgctttcgggtccacacttgggttatctatacagttcaaattccttgtttaattctggactttggctcctgaagaagttaaagagtactcaggttattcatcagcttacactcacagatgatcctgatctccagaatactttcttttacaagctctgcaagcaaaagacgt

SEQ ID NO: 93301 - DNA, 514 bp, Arabidopsis thaliana columbia
  unsure (1)..(514): unsure at all n locations
nnnnnnnnnnnnnnnnnnnnnnnnnnnnnnnnnnnnnnnnnnnnnnnnnnnnnnnnnntatctctcagcttgagcccacccctccgcgaaagaactcaagctttccaacactataaatctataatacagcttttattctcaaattttgtttgtcttaccatcattaccaaaccatgcaagccgcaacgtcgtgtgatctcaagttccgatcaacagatccgacgtctaggaacaaatgtttctcccacgcgattccaaagcgcgtggctgttacgtgcggttataggtcggagtcgtttagcttccctaacggtgtctccgtgagtcgatctgattggcaaagctcatgtgccattttatctagtaaagttgcttctgttgaaaataccggtggtttagcggacaaaatcgccgccgttaatggtcacacgaacggctctgtgaatcttggtctcgtcgccgttgagtcaactaccggaaagttagctcctggtcacccgttgactattactga

SEQ ID NO: 93302 - DNA, 556 bp, Arabidopsis thaliana columbia
  unsure (1)..(556): unsure at all n locations
cttgttttgagagaaagggtagagaatatgtctgcctgtttgtgtcttgttttcctgttcttctctattgttgcagaagcagcgtattctccaggaggtttccaccatctttcttctctaagactaaagaagaaggtgtccaagtcaaaacatgagttaccttttgaaactcgttacttccctcaaaatcttgaccacttcagtttcacaccagacagctacaaagtcttccaccagaagtacctcatcaacaaccgtttctggcgaaaaggtggtcccatctttgtttacactggaaatgaaggagacatcgactggtttgcttccaacaccggtttcatgctggatattgctcccaagttccgggctcttcttgttttcattgaacaccggttctatggagaatcaacgccatttggggagaagtcgcataagtcagctgagacattggggtacctaaactttcagcaagcgtggctgattatgnaacctgntaagagntttangangattttcgtttgggangcnnnggttgntttgggggcnttntgggngc

SEQ ID NO: 93303 - DNA, 762 bp, Arabidopsis thaliana columbia
ccatttgccggtccgcaattcccgggtcgacccacgcgtccggacagctacaaagtcttccaccagaagtacctcatcaacaaccgtttctggcgaaaaggtggtcccatctttgtttacactggaaatgaaggagacatcgactggtttgcttccaacaccggtttcatgctggatattgctcccaagttccgggctcttcttgttttcattgaacaccggttctatggagaatcaacgccatttgggaagaagtcgcataagtcagctgagacattgggttacctaaactctcagcaagcgttggctgattatgcaatcctgataagaagcttgaagcaggaatctatcgtctgagggcatcgcctgtgggttgtcttttggtggctcttatgggtgggatcccttgcaagcgtgggtcaagacttcaaggtatccccacataaacaatccggggcattggcatcctccgccccaatactttcatttcgataacattgtaccattgacaagcttctatgatgccatttctcaggattttaaggatgcaagtattaattgtttcaaagtcatcaagagaagctgggaaaacctagaggcagtttcaactatgaaaaatggcttgcaagaactcaacaaaaagttcccaacttgcagggcccttattctcaatattcagccagagattggttaagtggagcatttgtttatacagccatgggtaattattcaactgcagctaatttcatggcgccactgcct

SEQ ID NO: 93304 - DNA, 549 bp, Arabidopsis thaliana columbia
tggcgatgtacactggctataatcagcttggatacgaggtggcattgactggtcaacaagttcagttacatccatcgtgttcattgctagcatttggccagaagccaagctgggttgttttcggtgaacttctatctattgtggaccagtacttggtatgtgtaactgcgtgtgattttgaagctttgtatatgcttgatccaccaccaccttgggacgtatcccagatgggtgggcggaggctccgaattaaaaaagtggttggttgtagcagcactgtgctaaaacgattctgtgggaaatctaatcgtagtctgctttcaattgtttctcgtgctaggtctctttgttcggatgaaaggattggtattcaagtcgatgttgatcagaatgagattcgactgtatgcgcctcccctcgacatggaaaaagtgtcagcccttgtgaacgatgcattggaatgtgaaaagaaatggatgcataatgaatgtttggagaagtatctatattatggtctgggacaagtacctattgcactgtttggatctt

SEQ ID NO: 93305 - DNA, 948 bp, Arabidopsis thaliana columbia
ttttaaaatctcaacagcttccaaaaccaaacaacaaaaaaacattcttaataattatctttctgttatgtcgatgacggcggattctcaatctgattatgcttttcttgagtccatacgacgacacttactaggagaatcggagccgatactcagtgagtcgacagcgagttcggttactcaatcttgtgtaaccggtcagagcattaaaccggtgtacggacgaaaccctagctttagcaaactgtatccttgcttcaccgagagctggggagatttgccgttgaaagaaaacgattctgaggatatgttagtttacggtatcctcaacgacgcctttcacggcggttgggagccgtcttcttcgtcttccgacgaagatcgtagctctttcccgagtgttaagatcgagactccggagagtttcgcggcggtggattctgttccggtcaagaaggagaagacgagtcctgtttcggcggcggtgacggcggcgaagggaaagcattatagaggagtgagacaaaggccgtgggggaaatttgcggcggagattagagacccggcgaagaacggagctagggtttggttaggaacgtttgagacggcggaggacgcggcgttggcttacgacagagctgctttcaggatgcgtggttcccgcgctttgttgaattttccgttgagagttaattcaggagaacccgacccggttcgaatcaagtccaagagatcttctttttcttcttctaacgagaacggagctccgaagaagaggagaacggtggccgccggtggtggaatggataagggattgacggtgaagtgcgaggttgttgaagtggcacgtggcgatcgtttattggttttataattttgatttttctttgttggatgattatatgattcttcaaaaaagaagaacgttaataaaaaaattcgtttatc

SEQ ID NO: 93306 - DNA, 374 bp, Arabidopsis thaliana columbia
tttcctaccatataggcgcttgttgtcctggtgcatgatatggggcctaactgggagctcattagtgatgcaatgaacagcactcttaaaattaaggtaagtgcctgttgttttgaaaaatcttgggattctttctttggtacctttcgaacagagtggcagagctatacttcaatagttttttttttttctattctagtgaatggttgtgttggatattgttgtccaggttattgctttctcgtatcactgaacaacttggttttggttactggctgcttgattcttccactgttgtctcccctttatttttcgcaatccgactgagtgcaaggaccggcataagattctgatggataaaacttgtggtgatg

SEQ ID NO: 93307 - DNA, 1108 bp, Arabidopsis thaliana columbia
cattgttactctttggggataaaatttttatcttgtataagcttatccatcaggttcgaaaatggatcgaattgcgtctgcgactttctcttgccctgcgatttcattgtcccgcgtctgtagaatcagcccttttggcttaaacattaaaaccaaccatagaaagagattctcgtgtcgagtagctgtagcttctggagagacttcggccagggtcgtcgtcgacaatgaacttgacttagaacacaagaaacacgatctactgagagctgttcaagacactcaacgaggactcactgccacttctgatcaacgatctatcattgaggaggctctggtgactgtggaagggtttaatggcggtgaagaaattgatccagtgaagttagatggaacatggaggctacaatatacatctgcacctgatgttgttgttctgtttgaagctgcttcaaagacttcccttctttcaggtagggcaggtctttcagaagtttgagtgcagagatagatccgacggtgggatcattcggaatgttgttcagtggagtcttccaagcttgttggaggagcaagaaggtgcaccccctgttgttcccccggaatttgataaggcctctagtcggaacatctacccttccagtttgaagagattagtgtttgaaacctttacctcaattgagccggcttcaagctcttatccgcacctgcaatacttcccacgctcatttctaagcctacagcttttgcagtttacccgtactttcaaaagctcagattccagtaaacgcaaccagcccaggaaggagatctgtaggtggattgtattacctatcgtatctcgataacaacatgcttttgggacggtctgtaggaggaggaggagtatttgtctttacaaaatctcaacccctcgagctgtgagcatcagacaaatctataaaactctgtttttgactgtataatcacagaaaaaagaagaacattatgttagcagattctgtttatgtacaatctattcgggttttattgaaaaaaaaaaaaaaaagggcggccgctctagaggatccaagcttacgtacgcgtgcatgagacgtcataatagtgt

SEQ ID NO: 93308 - DNA, 393 bp, Arabidopsis thaliana columbia
ttttcacacaaaacagataaaattcatagtttggtaacgaaacacttatcaaacccattggttgatctacattacaattacaacttcataacataaaccaaaacgacccaaaaagaaaaacacataggcgggtggtgaaatccctcctctgcccctacccacttctgctttttaaaccacaagacagaagcttgaaaaaagaagataaaacaaaataaaaaaattataaaacaaaggaacccattggtgaaacatagaggtcccttaagacacaccactctactactcaacacccacttactaaaaccctaatccttaacatgactaaaagagcccttattaaacaagcttttttttcattttacccctcaagagttaaagaaaaagttttaa

SEQ ID NO: 93309 - DNA, 434 bp, Arabidopsis thaliana columbia
atctatcggtcctgtggttggaggcgttgattatgcctatgctgttcgcgcgcgcttggcgtgtgtctttatgcgaaggaagggaagcgacctgctagagttcaaagtccaagcagcaacatggctattcatccgcatcattcgggtgacaacgatgacattaaactcactgttgcagcttctagtcttaacagtggtggaggaagtgatcgctacagtcacagcggaagtgcagcgagtgatattcacgttgttgaagctgcgaacttggttatatcgatacaggtccttgaggaatgtgacgaataacttcagcgcagagaatattctcgggagaggtgggttcggcacagtttacaaaggcgaaactccaccatcggacaaaaatagctgtgaaaagaattgagtcttcctttgtgagtgatcaatgtctt

SEQ ID NO: 93310 - DNA, 440 bp, Arabidopsis thaliana columbia
ctcctctgaatttttaagacaaaatagatttcttcttctctttgtttgacccacattttctctggaaaaaattcgtctactttctccgatcgtctcttcattgatcggagggccaacaacgacccattatgcctctcctgtttctggcgcaaacccttgtagcaagttttgattttggtgagaaaatattttagggatctgaagagaaagaacacgatgatgacgagtatggaagggatggtggagaaaggagtattggatgatattataagaagattgttagaaggtaaaggaggcaaacaggttcagctttccgagagcgagattcgtcaactctgctttaacgctcgtcaaatcggcctctctcaacctaatctccttgatctccatgccccaattcgcatctgcggtgatattcatggtcaatatcaagatctttt

SEQ ID NO: 93311 - DNA, 399 bp, Arabidopsis thaliana columbia
gagatatggaattcttctcaggtagagaaggagttccatattccacagaaagttcatggctctgtatacgttgatggatggcttgaagggatctcttggaattcagatgagactcatgttgcgtatgtcgccgaggagccatctcgtcccaagcctacatttgatcaccttggttattacaagaaaggaaattctttggacaaggatattggaagctggaaaggtgaaggggattgggaagaggaatggggagaagcatacgccggaaaaaggcagcctgcgctgtttgttatcaaatgttgacagtggagaggtcgagccaatcaaaggaattcctagatcaataagtggtggacaggttgtttggagttcaaacaggtaccgatcatcttaatattt

SEQ ID NO: 93312 - DNA, 590 bp, Arabidopsis thaliana columbia
  unsure (1)..(590): unsure at all n locations
nnnnnnnnnnnnnnnnnnnnnnnnnnnnnnnnnnnnnnnnnnnnnnnnnnnnnnnnnnnnnnnnnnnnnnnnnnncttttttttttttttttatcataaagaatatatgttttcattaattctttttaactttcttcattattggacaaaaattttatattacacctacatccatttatcaaataatatacttttcaacatgacatccatctaaattcaagctaagatcatctttcgaatttttcgatcagatcattgccgttaagcaaatataaaacaaatcaggagcaaaccttattgttcttccttaggtatgcatgtgcacctcttctgttcttctgttaactcctggatctgcctttgaagaactttcacgtattctactgcttcttctaacatgtctgcagtgttggtttgcttgtccatgttaggtacaagctcttgtagcttccttatccgatcactaatccgcgtccttcgtaccctctcggcaatgctgcggggatgagttgcgcaaccacgtttagcccgaaccctaaaagcaacagagtcctccataaggttctccatgttcatatccgacatgcttg

SEQ ID NO: 93313 - DNA, 770 bp, Arabidopsis thaliana columbia
taggtaccactatagaagagttatgacgtcgcatgcacgcgtacgtaagctcggaattcggctcgaggactcctcaaagatgccttccattttgacacgtcatcatcggacttgagctgtctttttgattttccggcggttaaagtcgagccaactgagaactttacggcgatggaggagaaaccaaagaaagcgataccggttacggagacggcagtgaaggcgaagcattacagaggagtgaggcagagaccgtgggggaaattcgcggcggagatacgtgatccggcgaagaatggagctagggtttggttagggacgtttgagacggcggaagatgcggctttagcttacgatatagctgcttttaggatgcgtggttcccgcgctttattgaattttccgttgagggttaattccggtgaacctgacccggttcggatcacgtctaagagatcttcttcgtcgtcgtcgtcgtcgtcctcttctacgtcgtcgtctgaaaacgggaagttgaaacgaaggagaaaagcagagaatctgacgtcggaggtggtgcaggttaagtgttaggttggtgattagacacgtgttgatgagttattggtttcataagtttgatcctgtgtgttttgtagttgaatagttttgccataaatgttgaggcccccagtaaaaaaaaaaaaaaaaaaaaaagggcggccgctctaaaggatcccagcttacgtacgcgtgcatgcgacgtcaagattcttctatagtgtcgcccc

SEQ ID NO: 93314 - DNA, 1016 bp, Arabidopsis thaliana columbia
  unsure (1)..(1016): unsure at all n locations
agataaatcaatcaacaaaacaaaaaaaactctatagttagtttctctgaaaatgtacggacagtgcaatatagaatccgactacgctttgttggagtcgataacacgtcacttgctaggaggaggaggagagaacgagctgcgactcaatgagtcaacaccgagttcgtgtttcacagagagttggggaggtttgccattgaaagagaatgattcagaggacatgttggtgtacggactcctcaaagatgccttccattttgacacgtcatcatcggacttgagctgtctttttgattttccggcggttaaagtcgagccaactgagaactttacggcgatggaggagaaaccaaagaaagcgataccggttacggagacggcagtgaaggcgaagcattacagaggagtgaggcagagaccgtgggggaaattcgcggcggagatacgtgatccggcgaagaatggagctagggtttggttagggacgtttgagacggcggaagatgcggctttagcttacgatatagctgcttttaggatgcgtggttcccgcgctttattgaattttccgttgagggttaattccggtgaacctgacccggttcggatcacgtctaagagatcttcttcgtcgtcgtcgtcgtcgtcctcttctacgtcgtcgtctgaaaacgggaagttgaaacgaaggagaaaagcagagaatctgacgtcggaggtggtgcaggtgaagtgtgaggttggtgatgagacacgtgttgatgagttattggtttcataagtttgatcttgtgtgttttgtagttgaatagttttgctataaatgttgaggcaccaagtaaaagtgttcccgtgatgtaaattagttactaaacagagccatatatcttcaatccataaacaaaatagacactttaacnnnnnnnnnnnnnnnnnnnnnnnnnnnnnnnnnnnnnnnnnnnnnnnnnnnnnnnnnnnnnnnnnnnnnnnnnnnnnnnnnnnnnnnnnnngga

SEQ ID NO: 93315 - DNA, 407 bp, Arabidopsis thaliana columbia
gaacttgtcccagcggcgaattgtcgaacatctggatccctctggcgaagcatttcgtcggatcttcgaattcgtgctggagaacaccttcgtaagggtatttcactagggagaggtaatggaaccagatccagtagagtgggattcgatctctagagatgaagaatccggagaagaggaggaaataagcgaggattgctacaaccaccgtgaatccgatcatcacgtgtgagactacgccggataagaacgtcacgaaggaacttccggcccaaaacgcggtgaggattgtgaagaagaagaagaggaatccctcggagcctccggcgagtcctacggccgaaaatgttgtggcggcgaatgcggcggataagattatgagagcaaggatggagattatgtgtgag

SEQ ID NO: 93316 - DNA, 672 bp, Arabidopsis thaliana columbia
ggacgaactcgattcattatttacaaaatatagatcgttcatatactctattgtgtctgaaacttgggggggacattggtgcagagccaagcaactccattttttagaaaacccccaatgataacaaatgagtatccattaagcgggggaaattccattttttagaaaaaagattccactcttgaaagaaaagaacggactaacagggtaaatgacctaatcaattttcaaaatgaaataccgttactgtataaaggggatctcattgtgaaagacctattactggaatattcatggggtagagccaaagaatgtgaattgtacaagttaccaatagtattgattaattaaaagaaggagctccggtgtatagagaggacctcaccgttttagaagtaaccatagaaacgatggaacccactatttatccaattctatttactacgttttgtagttattctatttttttatatcaaggcctttcaaagtaaaggaaaatacctagcaaaaaatagtggtggggaaggttagagtagcaaaagccattggaattttttttatacattggaataattcgttcgggtattaatagactagtaaaggggaaaagaataacttaaaaaagaattagttattcatcaaagtttgatttattcaatgacttgatttaaa

SEQ ID NO: 93317 - DNA, 579 bp, Arabidopsis thaliana columbia
  unsure (1)..(579): unsure at all n locations
cttggagtctgttatcaggacccgtattccaagtatactatccttaataaacaaaagcattgaagaacttgaaagagagttagaccgaatgggtcggcctgtcgcagttgatgctggggctcaactatacactatattggagatgtgccgtgcattcgataagatattcaaggaacatcttgatggcgggcgtcctggaggtgaccgtatctatggagtctttgacaaccaacttccagctgcacttaaaaagcttccttttgatcgccatctttctctacaaagcgtgaagaaaatcgtgtccgaggcagatggttatcaacctcacttgattgcaccagaacagggttatcgccgtctaatcgaaggggcactgggttactttagaggtccagctgaagcttcttgtggatgctgttcactatgtcttgaaagagcttgtgaggaaatcaatatcagaaactgaggagctaaagcgtttcccttcactgcaagtcgagctttcttcagcagccaacaggtccttgggaattaaggggtggaacaagaacgccgggtnttcgcctttttttcccatgg

SEQ ID NO: 93318 - DNA, 491 bp, Arabidopsis thaliana columbia
cggacgcgtgggttcttcttcttcttgttcttctttctttgggttagctgagaaatggatgtaatgaagcttgatcacgacagtgtattaaaagagcttgagaggatcacctcgaaagctgctgaagttcaagataacattttacgtgggatcttggaaagaaacaaggacacagagtacttgagtaagtacatgaatggctctaaggatgttctggagtttaaacgcgctgtgccaatcatcacatacaaagatatctatccgtacattcagagaattgctaatggagaagactcatctctttattactggccattctattactgaaatattatgcagctctgggacttctgctggagagccaaagctaatgccaaccattcctgaagatcttgatcgccgtacttttctctacaattttatcattccaatcgtgaacaagtacttaacaggacttgtcaaaggaaaagcaatgtaccttaaatttgtaa

SEQ ID NO: 93319 - DNA, 351 bp, Arabidopsis thaliana columbia
ctctttgtacgaacaaactgcttcgagtttttgttaacctttttctctgatctaatggcgatggaagatcaatcggcggcgagatctatcggaaaagttagttggtttagcgatggaaaaggctacggtttcattactcccgatgatggcggcgaagagctttttgttcatcaatcctcaattgtctccgatggatttcgtagcttgactcttggtgaatcgggtgaatacgaaatcgcgcttggaagcgacgggaagaccaaggccattgaagttactgctccccgcggcggttcacttaataaggaggaaaacagctccccgggatccggaggtaattgttttaattgc

SEQ ID NO: 93320 - DNA, 665 bp, Arabidopsis thaliana columbia
tttttcaattttgatgaaatactaaataaataaaatcagaaaaaacttctatttcgattctattatagtatagaccaaattttaaattttaatgatagatctaatgataaaaactattgtgtcagccggggaagcaggaaaagggaatgaagtgattccccttttttattctatctttgaaagattaaaaaatactatatgttcataatatactaatttagttaagttcatttttcaaaaacacgataaaaaattgttctgattattagcagttcaacgggaccccctcgaatcagacaaagaaggaagagttgggccccgttgagttcttatgttttcacgtctataactcagctcatccaatttctacagggatgaacctaatcctgaatatgaaccataaaagaaaatacctattaaaccgatcacaagaataccagctacagtacctattacccaaagaggaatccttccagtagtatcagccatttatcccgcttccctccacatttaatcgagtggtcatgctagaaacataaacagtcagagataattattatatataatccatccgaatgggataataaaattactactctttattttttattttattattctacgctcttttcttaattgaagaaataattcgaaaataaaacagc

SEQ ID NO: 93321 - DNA, 634 bp, Arabidopsis thaliana columbia
  unsure (1)..(634): unsure at all n locations
ctttcatctttttcttcatatattattatattcgattttcagattctctgggaagacgatattagcaatcatggagcgtctaacatctcctcctcgtttgatgattgtctctgatcttgatcatactatggttgatcatcatgatcctgagaatctatctctgctgagattcaattcgttgtgggaacacgcttatcgccatgactctcttcttgtgttttctacgggaagatcaccgacattgtataaagaactcagaaaggagaaacctttgttgacccctgatattaccattatgtctgtaggaactgagattacttatggtaactctatggttcctgatcatggttgggttgaggctctgaacaataaatgggatttgggtattgtcaaacaagaagctagcaacttccctgagttaaagcttcaggcagaaactgagcagaggccacacaaggttagctttttattgttgaaaagnggaaggnncaggnaggttcctaagggnctatcacagngggtcctgaacgngggctggattcaaaaaatttccagtgggggtttgggtttgggnttttccccaaggtcccgaagggcaagggtttnattctcctgagacctngcttggggaccc

SEQ ID NO: 93322 - DNA, 582 bp, Arabidopsis thaliana columbia
acccacgcgacccatcacaatataatggtctaataaagaataattctgattagttgataattttgtgaaagattcctgtgaaaaaggttaattaaatctattcctaatttatgtcgagtagaccttgttgttttgttttattgcaagaattctaaattcatgacttgtagggagggacttatgtcaccacaaacagagactaaagcaagtgttgggttcaaagctggtgttaaagagtataaattgacttactatactcctgaatatgaaaccaaggatactgatatcttggcagcattccgagtaactcctcaacctggagttccacctgaagaagcaggggctgcggtagctgctgaatcttctactggtacatggacaactgtgtggaccgatgggcttaccagccttgatcgttacaaaggacgatgctaccacatcgagcccgttccaggagaagaaactcaatttattgcgtatgtagcttatcccttagacccttttgaagaaggttcggttactaacatgtttacctcgattgtgggtaatgtatttgggttcaaagccctggctgctctacgt

SEQ ID NO: 93323 - DNA, 529 bp, Arabidopsis thaliana columbia
  unsure (1)..(529): unsure at all n locations
tcttcttcttcctcctctgtactctctctttctcacatnaacagagcctctctctctctctccttgcttcctttaatctctctgtttctcttcagtcgctgtgtatacccctttctctcctcctctgtccctctctctagcggcggactgatgcacatacctttgtattctccgccgtaactaacttacataatggggtgcatgttctctcacctcgccgccaaattcgccttcttcccaccctctcctcccacttaccacctcaccaaaacccccgacggcaaactctccgccgtatcctccgcttcctcctcctcctccacttttccctccgccggagacccatctctcgacgtcaaagtagtaaagacaagacgcggcaacaaagtcacagctttttaccttagaaaccctaacgcaagactcacacttctctactctcatggaaatgctgcagatttgggacaactcttcgatctctttgttcaactcaaagtcaatctccgagtcaatctcatggggtatgatt

SEQ ID NO: 93324 - DNA, 570 bp, Arabidopsis thaliana columbia
  unsure (1)..(570): unsure at all n locations
aaaaaaacatggagacaattgcggcgtgtaggctttctgttttcattcttcacaagaagggccacatggccgtacgatcatgtgactctgtggcccatagtcagagaaaagaaaaaatatgacgccagaaagcttgttagcgtcggcgtcgatcacccgtgcccccgccgtacgttgcactctggctcttctccgtcctcaagaagcagccccgtaacgccgtcgtgtactatgctcgccgcctctccgatcgccaccaccaccgtcctctgtctctacactcatccctttgcctccctcgtttccttccttccgttgcgtggatcccacgcgccttccgtgtccccgaggacgagatcctcagccgccacggccttgatgctctcgtcctcatcaggctcttcaaattcggaattagattcttcctgatgtgttcgttactttggagcatcactacttctttccggtttgattaattacaaatgacgtcagatcttacccacacgatggagagtattcaactggattgcttttcacaattttcaaatatcacacgnggttttaaaaagt

SEQ ID NO: 93325 - DNA, 1510 bp, Arabidopsis thaliana columbia
gctttttgtgttgaagagagagtttcctatcttctccattcctcccaccatctccctcatcttcatcttcctctctctttctctctttctcaacaatctctattagatctttctccattaccattacctctggctttctcttaaatccaccatcatgaggagaggaagaggctcttccgccgtcgccggacctaccgtcgttgccgccatcaacggatctgtaaaagaaatcagattcagaggcgtaaggaagagaccttggggacgattcgcagctgagatccgtgatccatggaaaaaagctcgtgtttggttaggtactttcgattccgccgaagaagctgctcgcgcttacgactccgccgctcgtaacctccgtggtcctaaagccaaaactaatttccccatcgattcttcttctcctcctcctcctaatctccgatttaatcagattcgtaatcaaaatcaaaaccaagtcgatccgtttatggaccaccggttattcaccgaccatcaacaacagttcccgattgttaaccggcctactagtagcagcatgagcagcaccgttgaatcgtttagcggacccagacctacgacgatgaaaccggccacgacgaagagatatcctagaactccaccggttgttccggaggattgtcacagcgattgcgattcgtcgtcgtctgtaatcgacgacgacgacgatatcgcatcgtcttcacggcgacggaatccgccgtttcaattcgatcttaattttccaccgttggattgtgttgacttgttcaatggcgctgatgatcttcactgtaccgatctacgtctctaatgaattggtaaaatcaaactcaaaatcacagatccgtgatcggtttgattttaatcgaaaacacacaacaaaatccttttttttttttttttaaattttctgtttcgttgatctcatataatttttactatgcgggagaaatagaaagacaaagaaacgaagaagaagaagaagatggtgatgagcttgagagagcttgagctggttctgtgtttcttctgtgatgatattgtaagagtattattattttactattattactaaatcttcaaaaccaagaagaagaagaccgaacacgatgatctgttgtgtctgtttgttttactgtaagaaaaacgcagatctgggtttcgtttttttcttgagatagatcaaacaacccccatctttgtaacatatacatttggaacactcatgattctaaataaaaaatctagaatctttttttcatcttctagagctctgatgagttttgtccaaagatcagttcttgttcacgtgaattaagctagaagaaagacaaatgaagctagttttgtaacctgttcatggattgaatcttaacaagttctgtagcagtgagtgttttggttaattagagattaagatttttggttgttaaaaaaaaagaataaccaaaggtcggcagctctagaggatccaagcttacgcacgcgg

SEQ ID NO: 93326 - DNA, 486 bp, Arabidopsis thaliana columbia
caaagaacaaaaatgggtctggtaacaaaagctctcaaatatctcttactcctttctatttccttgactttcatctacaccaatgcagtttcatccgcttctccaatgactccaccgtcatcgccggctaagatgagcaggagacttgtggcagttgaaggcatggtttattgcaagtcatgcaagtattccggcgtcgatactctcttggaagcatctcctcttcaaggagcgaccgtaaagcttgcatgcaacaacacaaagagaggtgtgacaatggagacaaaaacagacaaaaacggatacttcttcatgctagccccaaaaaaactcaccacctacgctttccacacgtgccgggcttggcctacgaatcctggacccacgactgcaacgatgacatgcaccgtgccgtcaaagctcaacaatggaataaccggtgctatgcttaagccttctaagacaatcaacatcggtgaacacgac

SEQ ID NO: 93327 - DNA, 458 bp, Arabidopsis thaliana columbia
tgatgatgttggaggaagaaatttggatgtgtcttctgtcgaggaaaactgtagaagcaaggacacgaatgttacacctgatgatgatgtgtctgggattcgaagcccgtcagcttttttcaaacagcccactcatctcgtaactccttcagagatattgatgggcgtttcttccactgaagcctccattactactgaagacaagagggatagagatgcaaatattgaggaagtgaataatgatgcaagaggcttagaagttgagttgaaagaagtaggcgaagcacagacttcgcagaatggtgaaattaactatcacgaaacaactgagaatcacacttcagaaagtagagaaaatatcttctgctcacaggcttcaaatctcagcactgagatggcaagagaccgtcatcctattacaaaaggaagtgccattcctggggattctatggcttatg

SEQ ID NO: 93328 - DNA, 421 bp, Arabidopsis thaliana columbia
accatatctctcatgaaggttttcatgacctttcagggctggacaacgcaaccacagacattgtcccgagcgttgagcttgatgtgtctgataatgacaatgacacttccagtggtggtgttaatcatgccgtttgtctgtcatcgactcgtgggaagggttctctgccttggatttcgaccaatacttatcaatcgtcttctgatgctggagagattttccatgatacagttgtagagtctgacgggacactactggaagacaataatccagagtcggaaataaaaatgcataaaagccctctggaagtgtcttcagaaggtctgagtactgaaccagacaacaaggacgtagaaagtattgaatctacaagtcccaaggcatctctggatcaaaggaacagggacacagaaaccaaatc

SEQ ID NO: 93329 - DNA, 694 bp, Arabidopsis thaliana columbia
  unsure (1)..(694): unsure at all n locations
gcttctctagaacctctccatctttctcactatcactcccccccccaagtataaaccctaattgtgaggatcacagtaccaaaaaaaaatggacagccgccgcaccagccaccgccaccaacagcagcaccggaaccaaacatggtggcaccactaatttcacgcaatcggccacccaatgttctcccggatccgtctggcaacaccgtccgatgtcccattcatccacaaactaattcaccaaatggcagtcttcgaacgtctcacgcatctcttctccgccaccgaatcaggtctcgcttcaacactcttcacctctcgtcctttccaatcattcacagtcttcctcttagaagtctctcgttctccatttccagcaaccatcacttcatcaccatctcccgatttcacaccgtttctcaaaacgcataaccttgatctcccgattgatgatccggagagttacaatttctcgccggatatgttgaacgacgtcgttgtagctgggtttgttctggttttcccgaattactctagctttttgtccaagcctggggttttacattgagggatatttgtgagagagccttataggnggnaaaggggtttggtagcatnnttgttnaactnctttgggccaaanaagcggtgaanattgggtantggaannagnggaaatnggttttctttnant

SEQ ID NO: 93330 - DNA, 658 bp, Arabidopsis thaliana columbia
cacgaagagaaaagaagagaagaagaagaagaagaagcagcagaagaagagaagaagaatccaatcatggcggctgctgtatcatctgtttgggcaaagcctggtgcttgggctcttgaagccgaggaacacgaagctgagctcaaacaacaaccctctcccaccaaccagaaatcctctgccggagattcctccgatttcccatccttagccgctgcagcgaccaccaaaacgaagaagaagaagggccaaaccatctctcttgctgaattcgctacctacggtactgctaaggcaaagccggctccacagacggagcgtctcactcaggctgagctggtcgctcttccgaccggtccacgtgaacgctcttgctgaggagcttgatagatctaaagcttggaggtggtttccggagccatggtggtggtcgttatggagatgagtcgtccagctcgaggtggggttcgtctagggtttcggaggatggggaaaggagaggcggtggattcaaccgggatagggaacctagcagggattcgggtccgtcgcgtgcggatgaggatgataactgggccgccgccaagaaaccaattagcggaaacggattcgagagaagagagagaggcagcggcggaggattcttcgaatctcagtc

SEQ ID NO: 93331 - DNA, 557 bp, Arabidopsis thaliana columbia
acgtaccgggcccggaatccccgggattttgtacttctgcatcggtgcgttcttcttagccacctgtagtaaccaaagttacattggtgggtagccaaaatattagccgcggggtgtatggcgtggacatacaaatcaactgcaactaaaccgaaccatgtgttttcatgaatggttagattggtttatatatgtaaatccaaagaaaccgaagcttaagccaaacttaaaccaattaatttgagtataaacgaaccacacgaacttaaattaagaaataatttctatgttaaactatctaagaaaaattagatcgaaccatgttcaatatttcttaaaaataattatagctaagtacatagtagctatgcggatatgttcgttacatcaacctgacccaaatctatcatagttatttatgtcttatatttatttgttattcataaaagaacaaaagtaaatttgacagaaactacatcaacctttccaaaaaattatccaaagaaaaccgaattgattatatacaaattatcttatatttagtattaatcttatat

SEQ ID NO: 93332 - DNA, 419 bp, Arabidopsis thaliana columbia
ctttcgtcacgaaagggcgatatgtattgtttctcagtgcgaagctcgttactctgatgcgattcgatcctcaatcctttcatcaaaccgttttgggactgcggattttcatattaagttttcaaagcagtcaattagggtttgtagactaattcggatttggagacggtagcggttatggacgctcctggaatcgcgagtagtttaaatcaagctcccgttactcaggatcttaagaaatgtggagataattctacaggtaacacaatgtttgatgcatctcaatatgccttttttgggaacgatgttgtcgaggaggttgagctgggtggattggaagaagaagatgagattttgtctttcactggaatagcagaagacttttcatttgataaggaagaggttggagattctagact

SEQ ID NO: 93333 - DNA, 723 bp, Arabidopsis thaliana columbia
  unsure (1)..(723): unsure at all n locations
gttgaccatggaagactaaggctttcaccctggacgtattatgaaactgaaaccgagatcagcgtgctggtccaatggcttcatgatgatgatctgaaagaaagagacctgagagagtctattttgtggtggaaaaggttacgatatggagacgttcaaaaggaaaagaaacaagctcagaatttatctgctccggtatttgctacgggtcttgagaccaaggctgccatgtcaatggagaagagatatggtccatgcatcaaactggagatggaaaccttaaaaaaacgggggaagaagacaaaggttgcagagcgagagaaattgtgtagatgcgaatgcttggaatccattttgccatctatgattcactgcctcatatgccataaaacattcgcaagtgatgatgagtttgaggatcacactgagagtaagtgtattccttattcattagcaactgaagaaggcaaggncatctctgattcttcaaaagccaaagaaagtctgaaatccgattatcttaatgtaaagtctagtgccggcaaagatgtagctgaaatatccaatgtttctgaacttgantctgggttgataaggttatcaaggaggaggatctnttttccccataccntttttgaggngntcctttnccaagttntgnccaaagggttcnacanaggtttggttaaaagngtncggtttgtncagttcaaanngcattcc

SEQ ID NO: 93334 - DNA, 403 bp, Arabidopsis thaliana columbia
aatgaacgagactcattgcttctctctttccctccgtttcttactcattaactactccaaaaaccgaacaaaggccttcagaatttgcgagttcatccaatttcaacattgatttgtgaggggaatttctaaaaatggatattggagaaatcattggtgaagtagctccttctgtgagtatcccaacgaagagtgctatatacgtttggggttacaatcaaagcggacaaactggtaggaatgaacaagagaagcttttgcgtatcccaaaacagcttcctcctgagctttttggttgccccgctggtgccaattcgcgttgcctcgatatttcttgtggtcgggaacatacagctgcggttgcatcagatggttctctctttgcttggggtgctaatgaata

SEQ ID NO: 93335 - DNA, 1166 bp, Arabidopsis thaliana columbia
  unsure (1)..(1166): unsure at all n locations
nnnnnnnnnnnnnnnnnnnnnnnnnnnnnnnnnnnnnnnnntatacgactcatatagggaaagctggtacgcctgcaggtaccggtccggaattcccgggtcggtcgacccacgcgtcccactctctctctaatctatctatccgagaatggccaagatgggcttgaaacccgacccggctactactaaccagacccacaataatgccaaggagattcgttacagaggcgttaggaagcgtccttggggccgttatgccgccgagatccgagatccgggcaagaaaacccgcgtctggcttggcactttcgatacggctgaagaggcggcgcgtgcttacgatacggcggcgcgtgattttcgtggtgctaaggctaagaccaatttcccaacttttctcgagctgagtgaccagaaggtccctaccggtttcgcgcgtagccctagccagagcagcacgctcgactgtgcttctcctccgacgttagttgtgccttcagcgacggctgggaatgttcccccgcagctcgagcttagtctcggcggaggaggcggcggctcgtgttatcagatcccgatgtcgcgtcctgtctactttttggacctgatggggatcggtaacgtaggtcgtggtcagcctcctcctgtgacatcggcgtttagatcgccggtggtgcatgttgcgacgaagatggcttgtggtgcccaaagcgactctgattcgtcatcggtcgttgatttcgaaggtgggatggagaagagatctcagctgttagatctagatcttaatttgcctcctccatcggaacaggcctgagcttttaacggtgtcgtttcaattcgaagcgcatgcgtttcttcttctttttgagctgtgaaaattcgttttctcatagtttttcctctctctctctctcagtctaaatttattaccagtttttagaaagaaaaaacagattaaatctgagagagaaaaatataattttagctgacatggatcgttatgtacatattattacataaccggagatctgaacttttgttgtgtgcttttaattttttgcgacttggtttcaccccatgttgtttctctattttttttactactttttttttttttgttcttccaaattttcaatcaataatttggtaatcttccaggaaaa

SEQ ID NO: 93336 - DNA, 475 bp, Arabidopsis thaliana columbia
aaaaaatctgttgtcatctgcaaattggttttattctatcagttggtgttgtgggggggtggaagatgtgaatcgcctctactagggttcgattccaacataaaattgtacttttggaagatacagagaaagagatgggcaaatctcagattcttctaaacgctgagagctttacttgttcttctttcaatactttcttcactttatggatcttctttactcttcactcctttccatttcaagctcaagctgctccttctggttccttgattaagcacatgtcatcggttctcaagtggactactggatcatcctctaaattatcccaatcagacactaatgttcttcagtttgagaatggttacttggtcgaaactgttgtggaaggaaacgatattggtgttgttccttacaagattcgagtttctgatgatggagaactttatgctgttgatgaacttaatagcaacatcat

SEQ ID NO: 93337 - DNA, 376 bp, Arabidopsis thaliana columbia
ccagatgctagggatggagaatctggttggagtagtcttcaccgagctgtgcattttggccatctcgcggtagctagcgtattgattgactcaggtgcttcttttactctagaagacataaaactgcgaacaccggttgatttggtctcaggtccagtggctcaggttattggcgagcaacatagttcggtggctacagaggttttcagctggggaaatggtgcaaactaccaacttggaactggcaatcaacatgttcagaaggtaccagggagagttgattcactgcatggttgttttattaagttggtctccgctgcaaagtttcatagtgttgccattagtactcatggagaagtctacacgtggggatttt

SEQ ID NO: 93338 - DNA, 451 bp, Arabidopsis thaliana columbia
  unsure (1)..(451): unsure at all n locations
cggacgcgtgggtttgcatttcgaaatctccctgggtccgacattcatgttgtcatcagggtccgtcaactttcataaagatttgtcttcctgtctgcattgttttgttaatctcatcttctacttcactttcagtcaaatccttctcatccatcaaatctattttcgttatatctttttcaaatgacttcttatctttctcttgtttagactcaacctcctcttgatgcagttgcaagtctttcttcaattggacgaccccaacatcatcacttttctcaaccattatattaccaacagaatggtcctgtagattcttttcagcttcactttctgagttcacctctccaattccttcagacctagacccatcgtggactgaatgatcatcgctctggcttaaattgacttgcgatgagcccccctcaatatcagaacttgnacacttctc

SEQ ID NO: 93339 - DNA, 599 bp, Arabidopsis thaliana columbia
  unsure (1)..(599): unsure at all n locations
tgatacttccnnnnnnnnnnnnnnnnnnnnnnnnnnnnnnnnnnnnnnnnnnnnnnnnnnnnnnnnnnnnnnnnnnnnnnnccacgcgtccgcggacgcgtgggatttgaccattttcatcttcaaacaatggcggtttcaaagcttacattggctgctacgagcggtaagagctgcaaaatactcttagggctgagattacttgccttctcagccacgttatctgcagctattgtaatgggactcaacaaagagacaaagacttttattgtgggcaaagttggaaatactccaattcaagctacttttactgctaagttcgaccacacaccagcttttgtgtttttcgtagtagctaatgcaatggtgagcttccacaacttgttgatgattgctcttcagatatttggagggaaaatggagttcactggttttcggcttctctcagtcgccattcttgacatgctaaatgtgactctaatttcggcggcagaaaacgcggcggcgttcaatggcgggaggtaggaaagaacgggggccaacaacggcggggttggggccaaaaacntgtngttggntttnnccnccttncngtntnt

SEQ ID NO: 93340 - DNA, 404 bp, Arabidopsis thaliana columbia
gacttcgccaatgcacccgattaaacaaatgcagacaaacctcctcgcggacaattgttttggggggggtagaataaacaggaaaatcttcagcagcctgacacaggatatttaaatctttagcagctacaaaggtatttatagaataaggttgtgagtactaaacctcggcgtgtaccgcagttggaatgggtggaccgactggtggaacagcaggagagacctttggaatggggtccatctagatgccggaggtcgatgtatttggttcaacatcagatccgagagtggtatcctgaatggagtgatgattagtaataaagtcagcaactaacagcaatatcaggtaactgatagctaagaaaattagacaactaacctcggttatttcagattttggggga

SEQ ID NO: 93341 - DNA, 489 bp, Arabidopsis thaliana columbia
  unsure (1)..(489): unsure at all n locations
gccccagatccgggattcgccgcgcatcggcgcccggcaagcggtcatttctcagtttatgaggaccggacctcccgtttttttgctcctgctccaagacctcgaaagatgcctggactggtagctggtgactccagtttcatggatgacggtgaagactctttggcagagctatccaatacctcattccggaagtttaacattctttgcactggtgatcgtgatgggaacatatgcttcagtatatttggaatatttcagataggaaagattaacatacacgagctgtctcttcctgtgcctcatctcgatgagcatgcctcttgcaaactatttaatgcttccatttacaaggttgctctgtcaaaagacctttgccgtctggtagtaatgtgcacaggagagcttaaagattgtgatatcaagccaagagaggaaaaaataaatgttcaagatctggccgggttacatngcctttgcatggacaca

SEQ ID NO: 93342 - DNA, 375 bp, Arabidopsis thaliana columbia
cttcttaaatccattcccagattcacacttttgatttcgtgatacacgggtacattttaggtgaggtggttgggttgggtgagacttttatggggtttgagatgaaaccagagaaagaggttttggaattgatttctagttagaatcaatgcatgtctaatcccaattctgtgaagaagtagaacaaaaacaagaataagaagatgatgatgacgtggcgacggaagaagattgattccccggcggatgggatcacggcggtgcggcggttgtttaatacttgcaaggaagtgttctctaatggtggtcctggtgttattccttctgaagataaaatccaacagctacgagagattcttgacgatatgaaaccag

SEQ ID NO: 93343 - DNA, 660 bp, Arabidopsis thaliana columbia
accgcattccggattaccggtcgtcccacgacgacagagactcgtggattttagcggggtttggtgagacttttatggggtttgagatgaaaccagagaaagaggttttggaattgatttctagtaagaatcaatgcaagtctaatcccaattctgtgaagaagaagaacaaaaacaagaataagaagatgatgatgacgtggcgacggaagaagattgattccccggcggatgggatcacggcggtgcggcggttgtttaatacttgcaaggaagtgttctctaatggtggtcctggtgttattccttctgaagataaaatccaacagctacgagagattctcgacgatatgaaaccagaggatgttcggtttaactccgaccatagccgtatttccgaccaaactcccggagtcgaagcttcggtcttcgccaccaataacgtatctgcatctacaccagtgtgatcaattctcgattgggattttctgtttgccaccttctggtgttattcctcttcataaccatccagggatgacagtttttagtaagcttctctttggtacaatgcacatcaagtcatatgattgggtggttgatgctccaatgagagaatcaaaaaccaggctagcgaaattgaaagggattcaacattcaccg

SEQ ID NO: 93344 - DNA, 473 bp, Arabidopsis thaliana columbia
gtttgaaggaaactaactttattatataagattaatatcacatctttctacaagccaatggcatcaagaagctgtgaatgcttggaaacaggaactagcgaattcgccacaatcgcgccgctagctgccactgcaggaactccgatcccgggaaaggtcgagtcaccgcaacacaaaagctgcggaatgggagtggaatggccaggaaaagtacctttacctgcctctattgcaggcccatatgttcctctattcctccttagaaacctctgatgcgtcaatggtgttccaaccaaactcacctcgcacttttctcttttgaaccctggccctaatgcccgctcaaccgctctccacatcaccttcaccaaacggtaccaggacattttggttaagatttgttttttcgtattcagagaactgaagattacaaaaatgaataggtacctcggaccgttgggatttgagattct

SEQ ID NO: 93345 - DNA, 1178 bp, Arabidopsis thaliana columbia
  unsure (1)..(1178): unsure at all n locations
aattttatcaatggcgactcctaacgaagtatctgcactttggttcatcgagaaacatctactcgacgaggcttctcctgtggctacagatccatggatgaagcacgaatcatcatcagcaacagaatctagctctgactcttcttctatcatcttcggatcatcgtcctcttctttcgccccaattgatttctctgaatccgtatgcaaacctgaaatcatcgatctcgatactcccagatctatggaatttctatcgattccatttgaatttgactcagaagtttctgtttctgatttcgattttaaaccttctaatcaaaatcaaaatcagtttgaaccggagcttaaatctcaaattcgtaaaccgccattgaagatttcgcttccagctaaaacagagtggattcaattcgcagctgaaaacaccaaaccggaagttactaaaccggtttcggaagaagagaagaagcattacagaggagtaagacaaagaccgtgggggaaattcgcggcggagattcgtgacccgaataaacgcggatctcgcgtttggcttgggacgtttgatacagcgattgaagcggctagagcttatgacgaagcagcgtttagactacgaggatcgaaagcgattttgaatttccctcttgaagttgggaagtggaaaccacgcgccgatgaaggtgagaagaaacggaagagagacgatgatgagaaagtgactgtggttgagaaagtgttgaagacggaacagagcgttgacgttaacggtggagagacgtttccgtttgtaacgtcgaatttaacggaattatgtgactgggatttaacggggtttcttaactttccgcttctgtcgccgttatctcctcatccaccgtttggttattcccagttgaccgttgtttgattagttttttttgagtttttgaacgatgtgtatgctgacgtggacgtacacgtaggtgcatgcgatgaaaaaaacatctatttgttcatatttttgcgtttttctatttgttcattctttttcacaattcacaatacattatttcagttaatgatcacggataatttagctttaaaaaaaaaaaaaacccaaaccaaagnnnnnnnnnnnnnnnnnnnnnnnnnnnnnnnnnnnnnnnnnnnnnnnnnnnnnnnnnnnnnnnnnn

SEQ ID NO: 93346 - DNA, 470 bp, Arabidopsis thaliana columbia
gtcggaatctgatggaggagaagaagaagaatggcgatgatgaattgaactcgaaaccgccggtaatggcgttgaaccatgtgtcaaggctttgtaaagacgtcaaaaagtctctcgagttctacacaaaggtattagggttcgtggagatagagcgtccagcttctttcgacttcgacggtgcgtggcttttcaactacggcgttgggatccacttggtgcaggccaaggaccaagataagttaccttctgacacggaccatttggacccaatggataaccacatctctttccagtgtgaagatatggaagctttggagaagaggctgaaggaggtgaaggtaaagtacatcaagaggacggtgggtgatgagaaagatgcagctatcgaccagctcttcttcaatgaccctgacggctttattggtgaaatctgtaactgcgagaatctcgaacttgtcccgcgccat

SEQ ID NO: 93347 - DNA, 599 bp, Arabidopsis thaliana columbia
  unsure (1)..(599): unsure at all n locations
agagacaggagctggaactactagagtactttctttaagcgacatactatatagatcagaggccaacagtgacagttcacatgatatgtcgagatccgaaagagaagattctnattatnatgaggaattggagttggatattcaaacttcgttgtctgatgatgaaggacgagatacagactcaaagttctatgcgtggcagtctcaacttacgaattcatagagtaggtgatgataaaccgatggaaaatacagttgacaatgcctcctcaggaactgcatcgtcatctcaaaatgatagaacgtcttatcagccagagggagccattgatatgaaacgtagatatgttggccactgtaacgtaggaactgatattaagcaggccagttttcttggtcagagaggtgaatatattgcaagtggaagcgatgaccgttcggtggtttatatgggagaaacagactggaaggcttatgaaagtgctcgttggcgatgaatcagttttgaactgcattcaatgccatccgtttgatagtgttgagcaacgagtggaattgataacacaataaagatatggagcccaaccgcatcagtccca

SEQ ID NO: 93348 - DNA, 493 bp, Arabidopsis thaliana columbia
gattttcagacaaaagtataatcaatcattctgtaacttaaggtttgatattcagacggacgacaatcaattcgcgattggtctcagaagatgcattcttgttctcatactcacttcgcgtctttcaagcttcctcattgcttcgcgcctaagagttttgtggtgtcttcacggagagaattaagagtgttcgcagtggcaactaccgtcgaggaggcgtccggtaacataccagcggctccgatttctctacctctagggtcatggaaacagatagctggtggagttacagctgctaaagggtttaaagctgctggtatgtatgctggattacgagctgcagggaagaaacctgatctcgctcttgtaacatgtgatgtcgaagctgtagctgcaggtgtgtttactactaatgtggttgctgctgctcctgtagtttactgtaaaaaagttcttgagacttcgaaaacggctcgtgcagtgttgatcaatg

SEQ ID NO: 93349 - DNA, 442 bp, Arabidopsis thaliana columbia
ccacccgtccggtccctttcacaagagataaagaggtttatcaaagatacttgggttcaattgattcgcctccgtgaggcattcaaaatccatgagtgccttccttgtcaagacttattcctcaaccaacaaagcatttcttttgtagtggcctaatgggtaatggcaaccattataggtcccccaaatctcacatctctcctttttttcataatcaagaattttataaagaaacaaacacacacagatttatgaaattgatatacttcacttagcaattaattgtggttggatcgggtagtcatggatcccacaattatgacgtggactccacactctctttgatgaaaagtttcaatgaaaagtttgataaatctgaagaatttttgttaattttatatgaatcttgaaaacaggaaccatatccattttctaattgatc

SEQ ID NO: 93350 - DNA, 720 bp, Arabidopsis thaliana columbia
ccaagctctccttctgactcacatctatggaaagctggtcacgcctgcagtgtaccggtccgcaattcacgggtcgacccacgcgtgcgcccatctgtgacgataactccgagaaatctattgagctcttcattagtattggtttggacgagaaaacagctcgtaataccatcaataataacaaggtcaccgccaatctcaccgccgttatccacgaggctgctgttactgatgggtgcgatcgaaatactggcaatctgttatactcggtcgctactaagttccctacaaatgctcttgtgcatcgccctacattgctcaagtacattgttaactctaagattaaaactccagcccaattggaagctgcatttgccttttttgccagtaccggtcctgaggactttaagctgaatgagtttgaagaggcatgtggtgttgggattgaagtttccccagaagatattgagaaagcagttaaaggaatctttgaagagaataagaaaacaatattggagcagcgctatcgaactaatgtgggtgaattatttggacatgtccggaaaagtttgccatgggccgatcctaagattgtaaagaaactcatagatgagaaaatgtatgagctgcttggtgagaaaaccgctgctgataatgaaaaacctacaaaaaagaaggagaagaaggagaagcctgccaaagtcgaggaaaagaaagctg

SEQ ID NO: 93351 - DNA, 402 bp, Arabidopsis thaliana columbia
attgtctgaccagtttgaggttaagagggctcagaacaaggctagccgagagaggaaacatgctcgacgagaggagcgtcttgccaagggtcctggaggagacatacctgccgctgcaccacctgcacaaaccgctgaggtacctgcgaaaaagtctaagaagtgagaagcttgctcggtagtgaattctcttataagcagtgattttgaatggtttatgtgatatagctttgtgaaaactctttatttgtcacaaatatgagaacctttgtcagtagttcgtactgtttcaggagacttaactctatcttcaagtgcttttctctctcacagcaacaacaagaacagaaaaacttgtggagcggggtcgacgcacaagtcatagctcaagcattgaaaatt

SEQ ID NO: 93352 - DNA, 611 bp, Arabidopsis thaliana columbia
  unsure (1)..(611): unsure at all n locations
cgccacgcgtccgatttggcaatgaaatcatacaaactaatatttcttanttactcatctccacgcacacacatgatggactcttcttatcctcttctccattcaatctcttattctcttttccttccttcatataccttaaacagcaacgttctctgttcttcttcttctttttcttcctctggttttctttcacaacttccatgttggactcggacacagacacggactcaggtcctgtggttgcaacaaccaaactcgtcactttcctccagcgtgtgcagcacacggcacttcgatcataccctaaaaaacaaacgcctgatcccaaatcctacattgatctatctctcaaacgtccctacagtctctccaccatcgaatcagccttcgatgatctcacgagcgagtcacatgaccagccagtgccagtggagacgcttgaaaagttcgtcaaggaatattttgacggtgcaggggaggatctgctgcaccacgaaccagtagatttcgtctcagatccctccggctttctctccaacgtggagaacgaagaaatcagagaatgggcgcgtgaggtacacggtctttggagaaatctgagctgcaga

SEQ ID NO: 93353 - DNA, 1962 bp, Arabidopsis thaliana columbia
atggcggaatccggcgatttcaacggtggtcaacctcctcctcatagtcctctgagaacaacttcttccggtagtagcagcagcaacaaccgtggtcctcctcctcctcctcctcctcctttagtgatggtgagaaaaagattagcttccgagatgtcttctaaccctgactacaacaactcctctcgtcctcctcgccgtgtctctcaccttcttgactccaactacaatactgtcacaccacaacaaccaccgtctcttacggcggcggctactgtatcttctcaaccaaacccaccactctctgtttgtggcttctctggtcttcccgtttttccttcagaccgtggtggtcggaatgttatgatgtccgtacaaccaatggatcaagactcttcatcttcttctgcttcacctactgtatgggttgacgccattatcagagaccttatccattcctcaacttcagtctctattcctcaacttatccaaaacgttagagacattatcttcccttgtaacccaaatctcggtgctcttcttgaatacaggctccgatctctcatgctccttgatccttcctcttcctctgacccttctcctcaaactttcgaacctctctatcagatctccaacaatccttctcctccacaacagcaacagcagcaccaacaacaacaacaacagcataagcctcctcctcctccgattcagcagcaagaaagagaaaattcttctaccgatgcaccaccgcaaccagagacagtgacggccactgttcccgccgtccaaacaaatacggcggaggctttaagagagaggaaggaagagattaagaggcagaagcaagacgaagaaggattacaccttctcacattgctgctacagtgtgctgaagctgtctctgctgataatctcgaagaagcaaacaagcttcttcttgagatctctcagttatcaactccttacgggacctcagcgcagagagtagctgcttacttctcggaagctatgtcagcgagattactcaactcgtgtctcggaatttacgcggctttgccttcacggtggatgcctcaaacgcatagcttgaaaatggtctctgcgtttcaggtctttaatgggataagccctttagtgaaattctcacactttacagcgaatcaggcgattcaagaagcatttgagaaagaagacagtgtacacatcattgacttggacatcatgcagggacttcaatggcctggtttattccacattcttgcttctagacctggaggacctccacacgtgcgactcacgggacttggtacttccatggaagctcttcaggctacagggaaacgtctttcggatttcacagataagcttggcctgccttttgagttctgccctttagctgagaaagttggaaacttggacactgagagactcaatgtgaggaaaagggaagctgtggctgttcactggcttcaacattctctttatgatgtcactggctctgatgcacacactctctggttactccaaagattagctcctaaagttgtgacagtagtggagcaagatttgagccacgctggttctttcttaggaagatttgtagaggcaatacattactactctgcactctttgactcactgggagcaagctacggcgaagagagtgaagagagacatgtcgtggaacagcagctattatcgaaagagatacggaatgtattagcggttggaggaccatcgagaagcggtgaagtgaagtttgagagctggagggagaaaatgcaacaatgtgggtttaaaggtatatctttagctggaaatgcagctacacaagcgactctactgttgggaatgtttccttcggatggttacactttggttgatgataatggtacacttaagcttggatggaaagatctttcgttactcactgcttcagcttggacgcctcgttcttag

SEQ ID NO: 93354 - DNA, 3973 bp, Arabidopsis thaliana columbia
  unsure (1)..(3973): unsure at all n locations
atgcataaactagaatgaccaacaaagatactctcaaagtctcacttgtctaaaaaacagataaaaatcatttccaattttgagaaaaggaaaaaaaacaactccaataatactttttgattttcttttcgttgcattaaaataaatgtggcaaaaatccaataatattactattataagttaaaaaaactcaaaaaaaaaaaaagtatattccgtcaactttttctcagtccggttcaatcatctccatcatcgttgatctctctctctccgtcaacgttctctctataaagcagagagtttcacagcgcgtgaaaaatggcttttcccacttagccacaacgacgcgtttcaattctccatctctccctctctctctctctttcttcaaagattccaccaacctatacatatacttatatataatctatgctacgtgtatatacttccgatatccttcaaccaactctttgaattccgactttggatctatgaaaccgttctcaaagaacgatcggcgacggtggtcatttgattcagtttccgccggaaaaaccgccgtcggaagtgcatcaacttcaccgggaactgaatactccattaacggtgatcaagagttcgttgaagtcacaatcgatcttcaagacgatgacacaatcgttcttcgtagcgtcgagccagcaaccgccattaatgtcatcggagatatctccgacgacaacaccggaataatgactccggtttcgatttcgagatctccgacgatgaaacgaacttcatctaatcggttccgacaattctcacaagagcttaaagccgaagctgtggcgaaagcgaaacagttatctcaggagttgaaacgattctcatggtctcgttctttctcaggtaacttaaccactactagtaccgccgctaatcaaagcggcggtgctggtggtggtttggtgaactcggctttagaagcgcgagcgttgcgaaagcaacgtgctcagttagatcggactcggtctagtgctcaaagagctcttcgtggtttgagattcattagcaataagcaaaagaacgttgatggttggaacgatgttcaatcaaatttcgaaaaattcgaaaaaaatggttacatctatcgctccgatttcgctcaatgcataggaatgaaagattcgaaagaatttgcattggaactgttcgatgcattgagtagaagaagaagattaaaagtagagaaaatcaatcacgatgagctttatgagtattggtcacaaatcaacgacgagagttttgattctcgtctccagatcttcttcgacatagtggacaagaatgaagatgggagaattacagaagaggaagtaaaagagataataatgttgagtgcatctgcaaataagctatcaagattaaaggaacaagcagaggaatatgcagctttgattatggaagagttagatcctgaaagacttggctacatagagctatggcaactagagactttgcttctacaaaaagacacatacctcaattacagtcaagcattgagctatacgagccaagcattgagccaaaaccttcaagggttaaggggaaagagtcgaatacatagaatgagttcggatttcgtctacattatgcaagagaattggaaaaggatatgggttttatccttatggatcatgatcatgatcggattattcttgtggaaattcttccaatacaagcaaaaagatgcatttcatgtgatgggatattgtttactcacagccaaaggagcagctgaaacacttaaattcaacatggctctaatacttttcccagtttgcagaaacaccattacttggcttagatccacaagactctcttacttcgttccttttgatgataatatcaacttccacaagacaattgctggagccattgtagtagctgtgatccttcatattggagaccatcttgcttgtgatttccctagaattgttagagccaccgaatacgattacaatcggtatctgtttcattactttcaaacaaaacagccaacatacttcgacctcgttaagggacctgaaggaatcactgggattttaatggtcattttgatgattatttcattcacattagcaacaagatggtttaggcgtaacctagtcaagcttcctaagccatttgatcgactaaccggttttaacgccttttggtattcgcatcatttgttcgtcattgtttatatcttgcttattcttcatggtatcttcctctatttcgccaagccttggtatgttcgtacgacatggatgtatcttgcagtaccagttttactctatggtggagaaagaacacttaggtacttccgttctggttcttattcggttcgactgcttaaggttgctatatatcctggtaatgttctaacgctacaaatgtcgaaaccaactcaatttcgttacaaaagcggacaatacatgtttgtccaatgtcctgcggtttcgccattcgagtggcatccattctcaattacttccgcacctgaagatgattatatcagcattcacattagacaacttggtgattggactcaagaactcaaaagagtattctctgaagtttgtgagccaccggttggcggtaaaagcggacttctcagagccgacgaaacaacaaagaaaagtttgccaaagctattgatagatggaccgtacggtgcaccagcacaagattataggaaatatgatgttctcttattagttggtcttggcattggtgcaactccatttatcagtatcttgaaagatttgcttaacaacattgttaaaatggaagagcatgcggattcgatctcggatttcagtagatcatcagaatacagcacaggaagcaacggtgacacgccaagacgaaagagaatactaaaaaccacaaatgcttatttctactgggtcacaagagaacaaggctcttttgattggttcaaaggtgtcatgaacgaagttgcagaacttgaccaacggggtgtgatagagatgcataactatttaacaagtgtgtatgaagaaggtgatgctcgttctgctctcattacaatggttcaagctcttaatcatgccaaaaatggtgtcgacattgtctctggcactagggtcagaacacactttgcaagacctaattggaagaaggttctcacaaagctaagttccaagcattgcaatgcaagaacaggagtgttttattgcggagtaccggttttagggaaggagcttagcaaactatgcaacacattcaatcaaaaaggttcaaccaagtttgaatttcacaaggagcatttctaaaagacaagaaggaagaagccaaaagccctctagattctttaatatctcaaatttagccacttatagtataaaggcaatctcttcactatttaattcaaagtgattaaacgttaacacactgtcaaaagtgagtgtgttaacgtttagctccacacgttctaggtttatatacaccgaggcatacgtgtaaatatacgagacagaagaaattcaagggggtttgatagaagcatatagtaaaattttaaaatttcttgtatagtaagcaaatgagatggagactctagaagagaggtgaggtttggtgagggatagcgacagtaatacgacgtcgtattcgattgtagaggaagtgcaatacagctgcagggaagataaatgatggaagcaaataatgcgttgataaggtccatgtgattaggaagatgacactctttttgggggatatttttttctattttttttttagtggagtcggtgaaagagagactagagtttttagaatattggaagaatatttgggaataagggagttataatatttttgtatcattgtattatataactaatgtaaggtgtacaaagcataaaatttgatagttcctttcttctnnnnnnnnnnnnnnnnnnnnnnnnnnnnnnnnnnn

SEQ ID NO: 93355 - DNA, 762 bp, Arabidopsis thaliana columbia
  unsure (1)..(762): unsure at all n locations
tgatttggttaaattatctatatttcttttttgataaaggatttggttaaatttttaattgcaggtaatactcgtaagatttatcaacacaagcaaaaaagatggcccaaaagctagaagcaaagggtggtgagatgggagatgtatgggatgatggtgtttacgaaaatgttagaaaggtatatgtagggcaagcacaatacggtatagccttcgtcaagtttgagtatgtcaatggttctcaagtggttgttggagatgaacatggaaagaagacagagctaggagttgaagagtttgagattgatgcggatgactacatcgtatacgtggaaggttaccgtgagaaagttaacgatatgacgtcagaaatgatcacgtttctttctattaagacttttaaaggcaaaacctctcatcctatcgaaaaaagacctggggttaagtttgtgctacatggtggaaaaatcgttgggtttcacggacgttcaacagatgttttacactcccttggggcctatgtttctttgtcatccactatcaaattgcttgggaagtggattaaggtggggcaaaaaggagaaggtccaggggctaagattctcacatggcatagctacaagtaggcaaccaagggtttactcccttttggtggcgggtttcacanccaaatnagncccttcgnnaaacacctttacggttttaacccttggngncccggnttttggnccattttttcctnccnnccggggggcgggtccc

SEQ ID NO: 93356 - DNA, 674 bp, Arabidopsis thaliana columbia
  unsure (1)..(674): unsure at all n locations
atgatatgccagctctatactgactcacttagggaaagctggtacgcctgcaggtaccggtccggaattcccgggtcgacccacgcgtccgcccaggtaatactcgtaagatttatcaacacaagcaaaaaagatggcccaaaagctagaagcaaagggtggtgagatgggagatgtatgggatgatggtgtttacgaaaatgttagaaaggtatatgtagggcaagcacaatacggtatagccttcgtcaagtttgagtatgtcaatggttctcaagtggttgttggagatgaacatggaaagaagacagagctaggagttgaagagtttgagattgatgcggatgactacatcgtatacgtggaaggttaccgtgagaaagttaacgatatgacgtcagaaatgatcacgtttctttctattaagacttttaaaggcaaaacctctcatcctatcgaaaaaagacctggggttaagtttgtgctacatggtggaaaaatcgttgggtttcacggacgttcaacagatgttttacactcccttggggcctatttttctttgtcatcccctttcaaattcctttgggaagtggattaaggtgggccaaaagggagaaggccccgggtctaggaccccctcggtggccagttgggaccaaggtttnnccttnttc

SEQ ID NO: 93357 - DNA, 441 bp, Arabidopsis thaliana columbia
gatcaacgttgaatttcaaaactgtttcatcttcatgctcttatgtctcttctcactccgcggggactctctgctcttcaggaaaccaagctcaagacaaaactcctatgactgtgatctgcctccaagccctccttctatgccaatcatcggccatcttcaccttatcctctcttctcttgtccacaagtcttttcaaaaaatctcctccaagtacggacctctcctccatctccgcatcttcaacgtccccatagtcctcgtctcctctgcgtcagtggcctacgattatcttcagggtgcacgatgtaaacgtctcttctcgcggtccccctccattcgaggagtcactcttgttcggatcttccagcttcatcagcgctcccctccctatggagattactggaagttcatgaagaagctaatggtcacaaagctgct

SEQ ID NO: 93358 - DNA, 793 bp, Arabidopsis thaliana columbia
cccccccttgatgtcgacgggattcattagcctggtcttcgtaagttccgccgaaaagaaccaaatccttcactactctgtctcagctttcgacctctctcttctcattcctttgcaacttctcacttctcgaattccttctcttcaaaatcagaaatggctcaagtggttgctaccaggtcaattcaaggctcgatgttatctcccaacggtggatctgtgtctacaagatccgagaagctattgaaaccagcgagttttgcagtgaaggttcttggcaacgaagcaaagagaagtggaagagtctctgtaagaagcagaagagtggttgatactactgtgagatccgctcgtgttgagactgaagtcattcctgtttctcctgaagatgtgcctaacagagaggagcagcttgagaggttgttggaaatgcagcagtttggtgatacatcggtagggatgtggtcgaagccgacagtgaggaggaagacaaagattgtttgcaccgtgtggtccgtcgaccaacacacgagaaatgatatggaaattggctgaagctgggatgaatgttgctaggatgaatatgtctcatggagatcatgcttcacataagaaggttattgatttggttaaagaatacaatgcacaaactaaagacaacactattgctatcatgcttgacaccaagggtccggaagttaggagtggagatttacctcagccaattatgttagatcctggtcaagagtttacctttacaattgagagaggagtcagcacaccaagttgtgtc

SEQ ID NO: 93359 - DNA, 605 bp, Arabidopsis thaliana columbia
atgttttaggtgcactatagaagagctatgacgtcgcatgcacgcgtacgtaagctcggaattcggctcgagcacacgtttgcgaatctccgacgtccgtttctcctcgccgtagaatcgccgttcattctttcgccgccttcagtcttccctccattgaccctttttttgaagaagagcgattacaagcgcaagtgtgtataatgacttaaagagagctcctgttactccgagtgatagatagtctacaattatatcttactctgagtgaaagcaatggcgtacggtggtccgtccatgaatccaccggctttgagtggagctgttcccgggtctgctaatctgaagcaagtgaaattggagagagaaagcgagctcaggatcgaagtctctgaagagcctctcagactccgtgtggttaacgggaccgctgagatttttggctctgaactgcctcctgaaatatggcgtaccttccctcctcgcatgaaatttgcggttttcacttggtatggagcgacaattgagatggatggtgtcacggaaactgactatacagcagatgagacgccgatggtcagctacattaatgtgcatgccatact

SEQ ID NO: 93360 - DNA, 421 bp, Arabidopsis thaliana columbia
aaaagtttctctctgtactttttcacgtagttaagtttaaccttcctggtgcaatcttcggcaccggtgccgccgtcaacaggtcctcccaaagcgacagaaaaaagctcacggagccagagaagctctacaaaaaaggagaagaagaaactccaagctatgacgtagcacattaatgttcttgctggactacattccagagaaacaagaacaaaagatctcctaagaaatgttccggtagacaaacttgctgaaaagggaggaggaaagaataattattaagttttataagataaattattttaaaaatatttttattttacttttaagaaactcacttaaaaggaattagacaataaaaactgtaaggactcatcaacaactctaaactttaaaattatcaaaatttagtatcaaacaa

SEQ ID NO: 93361 - DNA, 559 bp, Arabidopsis thaliana columbia
aaaaaactaaacggagaagacaaacaaaacaaaggatgccgaagaagaagccggcgaaacattccggcgttgatgacatcaccattccggtatcaccacaaaccggatcttcgattgatacttggtggtggctaacacataaaggaaccacaacttcatttctctgcatctccctcttcgcattactgatccgatctgctgtaacaatgtatccatactccggcgccggaattcctcctaaattcggcgatttcgaagctcagagacattggatggagataaccacaaatcttccagttatcgattggtatagaaatggcacttacaacgatctcacttactggggattagattatcctcctttaactgcttatcaaagttacatccatggaatcttcctccgattcttcaatcctgaatctgttgctcttctaagctctcgtggtcacgaatcttatcttggaaaattgttgatgagatggacagttttatcgtctgatgctttcatattttttccagcttgttctgttttcgtgtggtgtaccataggaatcgaact

SEQ ID NO: 93362 - DNA, 1275 bp, Arabidopsis thaliana columbia
ttttcaaaataaaaattgaaaaaaccaaaaagacacactcataaaagatttattttagagaacaaaaaaatcagaaatataaaaaactgtcttaaggaagagaaaggaacaaaagaaaacagatgtgagctcttcttcttcgtcttcttctctctattttattctcatcctctcctcacagttactataagctcgtctatggccagagacggtggtgtttcttgtttacgaaggtcggagatgatgagcgtcggtggtatcggaggaattgaatctgcgccgttggatttagatgaagttcatgtcttagccgttgatgacagtctcgttgatcgtattgtcatcgagagattgcttcgtattacttcctgcaaagttacggcggtagatagtggatggcgtgctctggaatttctagggttagataatgagaaagcttctgctgaattcgatagattgaaagttgatttgatcatcactgattactgtatgcctggaatgactggttatgagcttctcaagaagattaaggaatcgtccaatttcagagaagttccggttgtaatcatgtcgtcggagaatgtattgaccagaatcgacagatgccttgaggaaggtgctcaagatttcttattgaaaccggtgaaactcgccgacgtgaaacgtctgagaagtcatttaactaaagacgttaaactttccaacggaaacaaacggaagcttccggaagattctagttccgttaactcttcgcttcctccaccgtcacctccgttgactatctcgcctgaatcgtcgccgccgttgactgtttcgactgaatcgtcggattcgtctccgccgttatctccggtggagatcttttccacctcgccactttcatctccgatagacgatgaagatgatgacgtgttgacgtcgtcgtcggaggaatcgccgattcgacggcagaagatgaggagtcccggattagattagtggaactattctgggatgccgtgtaatattatctatctccgttaacttcgtttttacctctgacggtgtttttaattgcacgttgacttgacgccgtcaaattttatagatgtccctttaatctctcgcgcctccacgtgggccttttttccttttccttaaagcttttcgaatatcttttaattattttaatttctgcacaaagttacgtttttaacttttggagccgcggcccctcgggaacttggcaatcgaaccttcgacattcaccatttattatgataacgagacttgaat

SEQ ID NO: 93363 - DNA, 649 bp, Arabidopsis thaliana columbia
  unsure (1)..(649): unsure at all n locations
gtttctctgatgagagacaacgtaattcactaagcagcaaccctttgtttgcactccggggtttgggtggtacaatgcctgagatcgtgtctcctttagtagctgaaaactctcaagaacaagaagaaagtgtgttaatttcattggatattgaagaagacaagttgtttctcttacatttcatcataggaacttactttggacaagatttaagaaaacaacatcatcgtccaaagcaatcagcttttcagattcaagcgttgaagaatgttgtggtagatgagttaagtggctcacttatgaagagagctgagctagaacgtgtgtattatcacattattagaaatgttgatccgtctctagtcatgaagccgaaaaagttacgtgaatatttcaatgcgaaacgcaatgattcgaacagggattaccctcttttcgtggatctttttccgcgaaattgcaccctgaaacccatgttaggcataagnttaagtttatccggagcattgtgttcattaatgatccagatacttctttgtatgagagaagattgtgttgcgcggtttaagcggcttacggggattggatagctttncttttgagccttagtgttgatgtaaactaaaagtaccggcgttnttgcagctaa

SEQ ID NO: 93364 - DNA, 644 bp, Arabidopsis thaliana columbia
  unsure (1)..(644): unsure at all n locations
gtcgataattatggagagaataacgaccttatggttttggtttagtcttatgattttcttaggaatctctatcaatggaggtttgtctcaaggacagcaacatgttatgaagaagacacgttcttctgcagttgtagtaggaactgtctactgtgacacttgttttaacggcgccttctcgaaatcacccaaccacttaatctcaggtgctttagttgcagtggaatgcattgacgagaactcgaaaccgagtttcagacaagaagtgaaaacagacaagcgcggcgaattcaaagtgaagctaccattctctgtgagcaaacatgtgaagaagatcaagagatgctctgtgaagttgctaagtagctcacagccttactgttctatagcttcgtctgctacttcttcttctctcaaacgccttaaatcaaaccatcatggagagaatactagggttttctctgcagggttctttcacttttcagaccccgaaaacccaaccagagattttgtagccaaaaaccttatcaattntncggnggttccaagcctttttnaccggatccttcatttctccacggttccaggtccnctaatcttcccctttccaaattcctttgtccnccttncaaattncntcnaag

SEQ ID NO: 93365 - DNA, 656 bp, Arabidopsis thaliana columbia
  unsure (1)..(656): unsure at all n locations
tgaaaccagccaaccccggctattccaaggtgttcttcccatcctctgggaccaaccttgtgaggaggtccaagagttgctctgggaagttgctaagtagctcacagccttactgttctatagcttcgtctgctacttcttcttctctcaaacgccttaaatcaaaccatcatggagagaatactagggttttctctgcagggttcttcactttcagacccgaaaaccaaccagagatttgtagccaaaaacctatcaatctccgcggttccaagcctcttttaccggatccttcatttcctccaccgctccaagatcctcctaatccttcccctctcccaaatctccctatcgttcctcctcttccaaacttacctgttccaaagttacctgttccggacttacctcttcctctagttcctcctcttcttccaccagggcctcaggaaatcagcttccttgcataacaaggaaatctggtttcccttgaaaggcaaggaaaaccggacggaacttaaaaacccaatttttttcttttccggccaaacccggttaaacccggcaatnttttaatccggtccaaacccgggtaaattcctttttttccaaacccgtatttttcctcaaaacggtttttttttttnccaaggttttnt

SEQ ID NO: 93366 - DNA, 357 bp, Arabidopsis thaliana columbia
agaagacaatggatgacgtaagccgatgagattctgaagatcctctacgacccgagtccgtgggagatcctaacccggtgacccgtttacctggtttcctctcaccaccaagttttgcttctaaaattttctggtagatctgtgtccacaatcatcagaaatcaactttgtgaattgaaggccgatcactcctttgactttgttcttaggcgttcatctctcaaaggtaatcaatctatatcgattacgcaattttcttaacgaaattgattaacttgcaattacctgaacccccaaaatcgtaaattgtagggttctctggtgatttgatatgccttaaagttatgaattttagat

SEQ ID NO: 93367 - DNA, 466 bp, Arabidopsis thaliana columbia
atttaagtggctttgctctgttcttctcgacccttctctcagaaaaacccaaaaaaggaaggatgttcaagttttcaactgtcaaaatcttgtagtagtaatggaaaatcatcaccgaatatccgccacaaaatacgacggcgaagcagtgtcggacgatgtgggccaggggaagctatattctccaaaccacgcgatcaaaatctctccagaatccgacgaaaacgtgggccaagggaacctctactctcctgaccacgcgatcaaaatcgcaacgaaccctgattccgtggattcctcatcagaggaagaagaaggagagaagcagaggaagacgatcatgttggggctgaagaatcttgcggcggttaaggataaagtgttagaaaaactatcggctgcttcggttccatctgagtcgcttgaaaacgctaaacagtttttggaaagagccattaaggatttc

SEQ ID NO: 93368 - DNA, 363 bp, Arabidopsis thaliana columbia
gaagatatatagatctgaccaaagtaagaagggcttttactaagagtggaacagaggaatatggggaccaccgtgaaaaacaagcaagtgatactgagaaattatgtgaagggtatccctaaagaatctgacctaatgattatcacagcttcagaccccgtggaactcaaggttaagcccggatcagcggcggttatggtgaggaatctttacttgtcttgtgacccttacatggggattctcatgagagaaccaactccttccactctagcacttttggatgccttcatccccggaaaggtaacaactctccacacacatacatacatacacaaggccttaataagaaaatggtgctgattc

SEQ ID NO: 93369 - DNA, 536 bp, Arabidopsis thaliana columbia
tgatcctgccaagctacactacgactcactctagggaaagctcgtacgcctgcaggtaccggtccggaattcccgggtcgacccacgcgtccggaggaatctttacttgtcttgtgacccttacatggggattctcatgagagaaccaactccttccactctagcacttttggatgccttcatccccggaaagcctatagctggaattggagtgtctcaagtaatagattctgatgatccatcttttacgaaaggcaatatgatttggggaattgtgaactgggaggagtttagtactatcaacccggctgctatattcaaaatcgacgtcaatatcaatgttcctctcagctactatactggaatcctcggtatgataggtttaactgcttacgccgggtttttcgagatatgttcacctaagaaaggagacacagcgttccgtgtctgctgcttctggcgcggttggacagctcgtgggtcagtttgcaaagttgatgggctgctatgttgttggaagtgccggaagtaaacaa

SEQ ID NO: 93370 - DNA, 578 bp, Arabidopsis thaliana columbia
  unsure (1)..(578): unsure at all n locations
taaacnccaccgnctnanaatngcccnaaaccgctccccggcctcccctccnccnccgntnaccccncctcngaaccccgcaactgttttcaaaaccccaggccttgaagtgacgggcagtgttcccttagataatcaaacccatctgacctcataacagcgatgagattttctgctgcgaatttcagacaaacggatttcaaggcggaagcattgtaacggtcagcaagcgccaaaatatttgcaacggaatctactgatatatccttgcagagcactgactcgcacattagacttaatctaggcaacttgtatttatcagcggctcctagtagctttgcagctaatgtgtctgaggcagatggaccaacagatgaaccggaagatgatgatgactctgcatcttcaatgagagcatccttgtatatgtagtggagcaaagccttgaaaacctcggataggctccatgtcagtaacttcgatattacgatcttcttctcccgtaacatcgaggaactngctttcaaagacaggagatcgagcagccaatactaacctgtgagcacggaacttttcac

SEQ ID NO: 93371 - DNA, 707 bp, Arabidopsis thaliana columbia
taagatccacattatcaagtattaagtacaccatcttccccatgggtttttcatccggcttatctgatcttgaggtttcggaagtagactcgagagtctttatcacactactaaaggcttcacgaagcaagttgacaaaatcagatggcttgtcacatcgtttcgcactagaatacccgtttaaagaacacttcctatgtagcaacgactgattcagaatcgactcaaacaagatacggggattgtaacacgtacgacagcttgaataaacaaagggacgattgagatgcctgagcacctgaagaacaacactggtttttcccgtagaagcacctccatagatcattattggaagagtagggcaatctagcggccccataagtcgaataaagtcgaaaatctgagagcgtctgcctggaaaattagatagaacagcatcaattgtgattgattcttccccaaatgtgagatcatcaatggttggtgtgtgggatgcaataggttctgagttctcaacagttacagaagctgatgacctagtgcttcttcgagtgactttcgaactctcctctttaggaggcatgttcttaaaacctgcaagtctccgattcccaatcccaacagaactaaacgagaaaagaagataagcaacacagacaaaggacgttgtcgtgctctgtgtgcgtcagtagtggcgattcactgag

SEQ ID NO: 93372 - DNA, 415 bp, Arabidopsis thaliana columbia
ccatccatcgactgggttgagggaactaaactgaatgagcaacttcccattgagagtcagcgattgaaggttctggatctcgcgaatacaggaatccagtgtagcctaaggcaactcttggagtatggctttttccatgctgaccctcatcctggtaatctcttggcaacacctgatggaaaacttgcctttctagactttggcatgatgagtgagacaccagaggaagctagatttgctatcataggccatgttgtccatttagtgaaccgagattatgaagccatggcacgagattactatgctctgaagttcttgtcccctgatgtggatgttactcctatcataccagctctcagagacttctttgacgatgcacttaattataccgtgagcgagctcaatttcaaaactt

SEQ ID NO: 93373 - DNA, 431 bp, Arabidopsis thaliana columbia
gttggctttgttagttttgctaatgtcttggggaggcctccgacaagtgggtggggagagagtcctctggaatcagcagaacaaaattaaatggatcatgtttgagaaaatcactgggtcataaatttgtttcgatctcttcaaaagtgattttaaaaagggtcttacgtacagtccttgtagattcactaggttccctagttccttaggaatagttccagaaaattgattggcttcaagaactctgcaatcaaataaaaagacgaaagatttagttttcaaaaaggacaaaaagctttatatgtaatctcataagatcaacaaaataatgttaagaacatacaaaagggtgaggttaataaacttccccaatcctttgggaatgtctcctgataagcggtttgcacagacagagctacagagaaatattt

SEQ ID NO: 93374 - DNA, 506 bp, Arabidopsis thaliana columbia
  unsure (1)..(506): unsure at all n locations
aggtgcactatnagaagattatgacgtcgcatgcacgcgtacgtaagctcggaattcggctcgagtgcccaattcttcaatttcttcaaccctaattcttctctctttctcagatctaccaaacttgatctccaatggcttcctcagcaccaccagtcctcccaatctccaatccccaaaccgttccatccgccgctccttcctccgtcgaatctcaaccaccgatcgctactccagctttccgcaatttcatcaatcagatcaccgaaaccgttaaaaacggtctctctaagcgtcgtccttgggctgagctcgcggatcgttccgcattatccaaacctgagtcgatctccgacgctgctgttcgtatccgcaagaattactcgtatttcaaggttaattacctcaccgtcgctacagcgatcgtcggattctctctcgtcactcatacctttctctctcgtcttgctcctctggctcctcgcgtcgtggctgtttctgtactt

SEQ ID NO: 93375 - DNA, 437 bp, Arabidopsis thaliana columbia
cccaaatttcagagaaaggagttttacaaattttgctggatttgagatttgcagctgacgtgcgttctgggggtgatactagcaccaatgtggagacaccaaagagcacaataaatagatcggcttacaggcgaaggcaggagcaacagaaaacaaagttagtcaatagaggtcgcattgatggagtgacctcccaactaacccaaaagttggatcccatagactggcttacgtacgagccttatctttgggagaacgtaaagcagtcgtacctacgccatgctgtactctttggtttctttgtgcaacgtaaccgaatgttcacagatactgcgcagagactatcaatttatatagaatcaaatatcatgccatgttccacagtttcccgcttcaaatacctttccataagcgctccaactctgtcatttagaagt

SEQ ID NO: 93376 - DNA, 170 bp, Arabidopsis thaliana columbia
gagtataacagaattccatactcgatttcagagatacatatataattctgtggggagccgggttcgatgaaagtcgtatgtacggtttggagggagatctttcatatctttcgagatccaccctacaatatggggtcaaaaagccaaaataaaagatttgagcccttata

SEQ ID NO: 93377 - DNA, 753 bp, Arabidopsis thaliana columbia
  unsure (1)..(753): unsure at all n locations
tgctacttcattgttcttctttttctgattgatcagaagaagtacaacgaggctaaagcttgttcttcagcaggcattgctcgtctcaagaacgtcaaccgaaggaccattgatgtgatagcatcaagactctacttttaccattctttgagttatgaacaaaccggtgatcttgctgaaattcgcggtactcttcttgcgttgcatcattctgcaacgctaaggcacgatgagctgggtcaggaaacccttctgaacctgttgctacgtaactatttgcattacaacctctatgatcaggcagagaagctaagatcaaaggcacctcgctttgaggctcattcaaaccaacagttttgtaggtaccttttctatctcgggaagattcgtactattcagctcgaatatacggacgcaaaagagagccttcttcaggcggccaggaaagcccctatagcagctttgggcttcaggatccaatgcaataaatgggcaattctggttcgtctactgctgggtgagataccagagcgttctatcttcactcaaaagggtatggagaaggccctcagaccctacttcgagctaacaaatgcgggttaggattgggggccttcgagttgtttaggccagtccaggtggaggtctttgggccaacatttgctncaaggccagaacggancaattttcaatcgttgngnctcccgccacaattgtcatnanggcntggccttgggancataaaggntntnc

SEQ ID NO: 93378 - DNA, 605 bp, Arabidopsis thaliana columbia
  unsure (1)..(605): unsure at all n locations
gcgcggcccgtagtatcgccggctcgtnnnnnnnnnnnnnnnnnnnnnnnnnnnnnnnnnnnnnnnnnnnnnggaatgcttggcacatactccaggggcccggctctatggatgctgttccttctatttgccagttggattgcttttgttatgtttgaggacacgcagcagggcctcacggtcttcacttcatatggtgcaactctttaccagatgtttattttgttcacaacatccaacaatcctgatgtctggattcctgcatacaagtcttctcgctggtcttcggtgttcttcgtgctctacgtgctaattggcgtctactttgtcacaaacttgattcttgccgttgtttatgacagtttcaaagaacagctcgcaaagcaagtatctggaatggatcaaatgaagagaagaatgttggagaaagcctttggtcttatagactcagacaaaaacggggagattgataagaaccaatgcattaagctctttgaacagttgactaattacaggacgttgccgaagatatcaaaagaagaattcggattgatatttgatgagcttgacgatactcgtgactttaagataaacaaggatgagtt

SEQ ID NO: 93379 - DNA, 446 bp, Arabidopsis thaliana columbia
cttccctggaatgttaccttttggagaggaacatggaagctatcttgcagatccggctgaagtagagattgtgaatttcaatacatgtcaaggagctgtggaaaaatatcaacatctggaggattttcattgggctgtgagacctttgcttattgctatgggtctattgacagcgatgaagttagggatctgtgtcaggaagaaaataggaaggtcaaaggatgggaaacaacgcgatggctcgactggacaaggtgactgtaagattccggatggtaagggctctgacaaatctaaatggcttgtgttcttttaggtctgctatgagacacagaccttgtctggtccatatattatactgttctagtcataataacgtttcatgtacataatgacgttttttttttttttgctctttaaaattaccaaaaagctttcacgcacca

SEQ ID NO: 93380 - DNA, 765 bp, Arabidopsis thaliana columbia
gtaatacaactatcaaacaacaatcttacaacctcatcaagaagccgatacatataggttcttccaaccggtttttggccggttacagcggaataacacaagagttacaaatcttagaatacacccaaacaaaaatgccccacgatacagtaggagcctataataataatgaaaagtagatagcatctatgagtgtatttatattatatatattctttcatctaaacagcctctcgctctctggatatatcaatgacccgttgattgcggctgcaaccggaatgagccagacgcatatagagcttgataaaccgggcgaattctcactgccaaaataatgctcagcagggttccaagcccacaaacaccggctagaaccaagaatgttactcggaagcaatctggaccaatgcaggtcatcttcccttgcttatcagcctccctggtcatagatgtatcccgcgaggatggccgagaaaatgggggcaccaagcgggtttcccagcagtatgaagttgaagttgattccaaaatgtctaagaccaaatagctcggagatggttgcgatagataagaactgaaaccccatgcatattcctattagagcagtcgcaacgtaaatggtgtggtcgatagccatggcgaagaggaggaatgtgaacaccataactagctgcgcggctcccatccatagtgttcttggaagcgttcttgacctgagagacaaataggagagtcgtatgaaacagctattttccagagaga

SEQ ID NO: 93381 - DNA, 673 bp, Arabidopsis thaliana columbia
ttttcataattctgctgggcaaaaatcggatatgcacttgaaatggatgcccaagttattatatatattatgagtgagacagatatggagcgagtaatctcttcccttatccaagaaaaggtatttctagtttgcatggtccaatcatttaatcccgaaaatttctacaataaagttagctaggtcgataatatacttccctagccacaattctgctatttacatttactgaaaaaaatcaaattttttttgttgaaatatacaaggaatccctcatgggtaaaaaaagtaaagtaaatacgactttgatttggttatgatgtataaggtacgaaagattaaaattggatcagtgaatctttttttagtcgtttattgcatgataaatcactacaagtgacggagatacacgatttaaataacgaaaaatccaatatttaaaaattgtatcaagaattactggaaaggtagaaactagaccagataaaatttgctcataatgagcaaacccaaaatctttgtaaatataaccaatcattagttcccaaccgtgaggcgaatggaatccgatacataaatcagttaataaaagaatcgaaaaagctttaattgtatcacttaaattatataggaattcttgaacccaagaattcagaataaaaagcttttcctt

SEQ ID NO: 93382 - DNA, 1109 bp, Arabidopsis thaliana columbia
gaatagattgttagggcacaaatctttttggttcttaaaaagaaacagtttgagaaggttcaatggattcgccctctgaaacaagaagttctaggcctcgagggataatatcaataacttcgcgtccattcgatgcatccactatggttatttcgtatccccccttttcttttcgtaaaattttacttattatccctcctgccgtagcattataaactgtattgttacttttgctaccatcaggataaatctgaccccttcccctgtttccacctacatatataggatattttaagaagtgaacatctttattagtagcagggtctggagcaagaataggaaaggttatttcactatatttttgaccaggaacaggacctatcacaagaatattttttttattgggacgataattctgaaaagaaagatttcctatcttttctttcatctcgggtgaaatacgatcggggggggctaattcaaaaccctccggtaaaataagaacagctcccacattcaaagccccttttttaccattagctagaacttgttttagttgcatatcataaggaattttaacaactgcttcaaatacagtatcaggaagtaccgtttgtggaacctcaatatccacgggcttattagctaaatggcaattggcacatacaatacgcccagtcgcctctcgtggattttcataattctgctgggcaaaaatcggatatgcacttgaaatggatgcccaagttattatatatattatgagtgagacagatatggagcgagtaatctcttcccttatccaagaaaaggtatttctagtttgcatggtccaatcatttatcccgaaaatttctacaataaagttagctaggtcgataatatacttccctagccacaattctgctatttacatttactgaaaaaactcccattttttttgttgaaacatccaaggaatccctcatgggtaaaaaaagtaaagtaaatacgactttgatttggttatgatgtataaggtacgaaagattcactgataaatcactacaagtgacggagatacacgatttaaataacgaaaaatccaatatttaaaaattgtatcaaga

SEQ ID NO: 93383 - DNA, 1071 bp, Arabidopsis thaliana columbia
  unsure (1)..(1071): unsure at all n locations
ggcaaaaagattattttcacaaacgttgggaacctttatgctttatgacagaagccattgacatttcctcgccaggtggttgcgctttgccaagctccgtttctactagatgacccaaatgttggaatgctatttccagctgatgctattgcaagagctaaacattatctttccttgacttcaggcggtttaggtgcttacagtgattcaagaggccttccaggagttaggaaagaggttgctgagttcattcaacggcgtgatgggtatccaagtgacccagaactcatctttctcactgatggagctagcaaaggtgtgatgcaaatcttgaattgtgttatacgcggtaatggagatgggattctagttccggttccacagtatccactttactcagctaccatatcactgttaggtggtactcttgttccttactatcttgatgagtctgaaaactggggacttgatgttgctaaccttcgacaatccgttgctcaggctcgttctcaagggataacagtaagggcaatggtgatcattaaccctgggaacccaactggccagtgtctaagcgaagctaacataagagagatattgaagttctgttataacgagaaactggttcttctgggagacgaggtttatcagcagaacatataccaggatgagcggccctttatcagctccaagaaggttttgatggaaatgggttcgccgttcagcaaggaaagttcagcttgtatcttttcacacagtctctaaaggatattggggtgaatgtggacagcgaggtggttactttgagatgaccaacctccctccgagggttgttgaggagagggacggcgttgcatcaattgccctcagccctaatgtctctgcgcaaatctttctaagtcaaaggtcttaaagtaatgtggttttacttttctagaaatcatcgccttgttctgcgagtaattatttccctgtgcagatgggtttaatggttaatcctcccaagncttggggcntttcantatggccnnttcggccgtnaaaagcaaagggggttcttgaatctttttg

SEQ ID NO: 93384 - DNA, 1117 bp, Arabidopsis thaliana columbia
  unsure (1)..(1117): unsure at all n locations
ttggggcccactatagaagagctatgacgtcgcatgcacgcgtacgtaagctcggaattcggctcgaggccagtgtctaagcgaagctaacataagagagatattgaagttctgttataacgagaaactggttcttctgggagacgaggtttatcagcagaacatataccaggatgagcgtccctttatcagctccaagaaggttttgatggaaatgggttcgccgttcagcaaggaagttcagcttgtatcttttcacacagtctctaaaggatattggggtgaatgtggacagcgaggtggatactttgagatgaccaacctccctccaagggttgttgaggagatatacaaggttgcatcaattgccctcagccctaatgtctctgcgcaaatctttatgggtttgatggttaatcctccaaagcctggagacatttcatatgaccagttcgcccgtgaaagcaaggggattcttgaatctttgagaagaagagcaaggctcatgacagatggattcaacagctgcaaaaacgtcgtgtgcaatttcacagaaggtgcaatgtattcgtttcctcaaatacggttaccaacgggagctctccaagctgcaaaacaagctggaaaagtgccagacgttttctactgtctcaagctcttagaagccacaggaatctccacagtacctggctctggatttggacagaaagaaggtgtgttccatctgaggacaacaatcctgccagcagaagatgagatgccggagatcatggatagcttcaagaagttcaacgacgagttcatgactcagtatgataataactttggttattcgaaaatgtgattacttcttcttctgaacgactattgtgttctgctacactctttaaagctaaatctctgtagtacactctttctctttgccctattctataaaccatatctctctctttgtgtctctttttttttgggtgtaaactctctcttgtgtctctatttctattttcaattggaaactgattaagatcaaaaaaaaaaaaaaagnnnnnnnnnnnnnnnnnnnnnnnnnnnnnnnnnnnnnnnnnnnnnnnnnnnnnnnnnnnnnnnnnnnnnnnnn

SEQ ID NO: 93385 - DNA, 836 bp, Arabidopsis thaliana columbia
  unsure (1)..(836): unsure at all n locations
tgatctgccagctannnnnnnnnnnnnnnnnnnnnnnnnnnnnnnnnnnnnnnnnnnnnnnnnnnnnnnnnnnnnnnnnnnccacgcgtccggtcaatttcagaggctctgctgcttcctttgttgtgaagccacatagattagattgaggaatgatccaaactcatgtcatacacacatttgtaatctgctacacaaaatacttttaaaatcacacacactaatattttaactctccccactctttgccttgcccttggctctagaaccgaacgtgactctccagatagacttttggagtcacaacattgagtttgaagaggagggaagaagtgagctagggattggttcagagtgaacataaatggctctcaaggcattagactacgatactctgaatgaaaacgtcaagaagtgtcagtatgccgtaagaggtgaactttatctccgagcttctgagctgcagaaagaaggcaaaaagattattttcacaaacgttgggaaccctcatgctttaggacagaagccattgacatttcctcgccaggtggttgcgctttgccaagctccgtttctactagatgacccaaatgttggaatgctatttccagctgatgctattgcaagagctaaacattatctttccttgactttcaggcggtttaggtgcttacagtgattcaagaggccttccaggagttaggaaagaggttgctgggttcattcaacggcgtgatgggtatccaagtgccccagacctcatctttctccctgatggatttaaaggttgtgaaanctnnattgtttttcgggatgggtgggtttntncggncnag

SEQ ID NO: 93386 - DNA, 421 bp, Arabidopsis thaliana columbia
caagagcccactaaataaaaacaaataattgaattaagtttgcaaaggattatacattatgaagttgttaatgctaagatgcaacttatagcaagaacaaaagaacgatttgcaatagtaaacgccaatttaatggagataagtataaatagttagcaattgatagatagtggaatcatgcctaaacaatttgcctaatcttttcaagtggtgtatagtcttcttgatatgtaagtatatgtttaattataattcgttatcaagaatatttgtctggatatatcaagtgttgtggccttgcgggacaaggacaacaaatgctcgacaatattgtacatatataagtatttatctttttaaccaaaccaaaaaaaatggtattttaggcagtaaagctatgtgaaatgagttatggaggaga

SEQ ID NO: 93387 - DNA, 517 bp, Arabidopsis thaliana columbia
ggccggccgacgcgtacgcttctccctacgaatttacaacaattcctcttcttcttcctccttcccatcttcaacacctatcctatctccgcctccttccaccgctttctccgtcatcgtacctcgtcggagatgtctcagattggttacttcttgtgtctccaccgttcaaagctccgtcgcaacaaacggttcctctccagctcctgctccggccgctgttgtcgttgagcgtgaccagattcgtcttggtcttcctagtaaaggacgtatggctgctgatgcaatcgatcttctcaaggactgtcaactgtttgttaaacaagtcaatcctaggcaatatgttgcacagattccccagttaccaaacactgaagtctgggttcaacggccaaaagatattgccaggaagttactctcaggagatttggatctaggtatcgttggtcttgacacacttagtgaatatggtcaggaaaatgaagatcttatcattgtccatgaagctttcaacttt

SEQ ID NO: 93388 - DNA, 820 bp, Arabidopsis thaliana columbia
  unsure (1)..(820): unsure at all n locations
cgggccggcccactgacacttgaaaaaactcaaaaccgtctcatcatggcggcgtcacagacattctcactcctcgccttcactttctccctcctcgcctttgcttccaccgtgagtagccacaacatcactcaaatcctcgctgattctccagattactcttccttcaacagctacctttctcagacgaagctcgccgacgagatcaacagccgcacgacgattacagttctcgtccttaacaatggcgcaatgtctgctctcgccggaaaacatccactctccgttattaaaagcgctttaagcctcctcgtcctcctcgattactacgatccacaaaaactccacaagatctccaaaggcacaactctctccaccacactttaccaaaccaccggaaacgctcccggaaacctaggattcgtcaacatcaccgatcttaaaggaggcaaagtcggatttggctccgccgcttcaggttccaaactcgattcatcttacaccaaatccgttaaacaaatcccttacaacatctcaatcctcgagattgatgctccgatcatcgctcccggagttttaaccgctcctgctccttccgcctccttgtcaaacatcaccggattactcggaaaagccggttgcaaaaccttttgctaattttgcttgtctcaagtggagtactcctgacttacggttccgccgtggaaaaagggtttacgggttttttgnacccgtccgntgaaggtttttaaagnttnanggtgttccanttttttcgggggttanaaaagntggggnnggcntgctttttnggntttaa

SEQ ID NO: 93389 - DNA, 1008 bp, Arabidopsis thaliana columbia
  unsure (1)..(1008): unsure at all n locations
acgcgcnnnnnnnnnnnnnnnnnnnnnnnnnnnnnnnnnnnnnnnnnnnnnnnnnnnnnnnnnnnnnncgggccgacccacgcgtccgcccacgcgtccgcggaaacgctcccggaaacctaggattcgtcaacatcaccgatcttaaaggaggcaaagtcggatttggctccgccgcttcaggttccaaactcgattcatcttacaccaaatccgttaaacaaatcccttacaacatctcaatcctcgagattgatgctccgatcatcgctcccggagttttaaccgctcctgctccttccgcctccttgtcaaacatcaccggattactcgaaaaagccggttgcaaaacctttgctaatttgcttgtctcaagtggagtactcaagacttacgaatccgccgttgaaaaaggcttgacggtttttgcaccgtccgatgaagcttttaaagctgaaggtgtaccagatctgacgaagctcacacaagctgaggtagtctcgctcttagagtatcacgccctcgctgagtataaacctaaaggctcattgaagactaacaagaacaatatctccacgttagccactaacggcgccggaaaattcgatctaacgacctctacctccggcgacgaagttattctccacaccggcgttgctccgtcgagactcgcggacactgtgctcgacgcgactccggttgtgatattcactgtggataatgtccttctccctgctgagctattcggaaaatctaaatctccatctccggcaccggcgcctgagccagttaccgcaccgacaccatctccagcggatgcaccttcacccaccgcagcttcaccaccggcacctccgacggacggagtcaccggaaagtggtccttcagactcgncaacaggttcagngaacagtaagtcaagttacggagngggtggnggtnaacaaaacgncgntggttcaccgattggcangatcgncgcatagccgnttccgngtttttntttt

SEQ ID NO: 93390 - DNA, 643 bp, Arabidopsis thaliana columbia
  unsure (1)..(643): unsure at all n locations
aactaagnttttagctnaaagaaatcccngtnccatacggccggaaattgattaggctttccncggggagaagttntcccacaccggnttncnccgttggagactcgcggacaatgtgtcgacgcgaccccggttgtgatattccctgtgggataatgtccttctccctgctgagctattcggaaaatctaaatctccatctccggcaccggcgcctgagccagttaccgcaccgacaccatctccagcggatgcaccttcacccaccgcagcttcaccaccggcacctccgacggacgagtcaccggaaagtgctccttcagactcgccaacaggttcagcgaacagtaagtccactaacgcagcggttggcgtgagcacaccgtcgttgttcaccgcattggtcacgatcgccgccatagccgtctccgtgtctctctgctcttaaaacctttcgtaattacgcaggctgccactccctttgtttatttttaatttaattatcttttcaatttttatttttgtggttatgtgttgttgagtttgaaaacatgggattagtgagtgaggttttatttaaatcgtttgttaatcacattttcattattgctttcagtgttgatctgatagtatcttgtttggg

SEQ ID NO: 93391 - DNA, 1379 bp, Arabidopsis thaliana columbia
atttttctcttttccctctccttctttcttcctttataaatccatttattctcctctcatctctcagcaaaatcaaatcctcatagttgattctctctatctctctcacgagtcacgatcctactcttcttgatatggctgaggttttgcgtcccgagatgttagatatctctaacgacacttcttcattagcatcaccgaaacttcttcatgttcttgctgttgatgatagtatggttgatcggaagttcatcgagcggttactcagagtctcatcttgtaaagttactgttgtcgatagtgcgacaagagctttacaatatcttggattagatggagagaataatagttcggttggatttgaggatctgaagattaatttgataatgacggattactctatgcctgggatgactggatatgaactactgaagaagatcaaagaatcatcagctttcagagaaataccagttgtgattatgtcttcagagaacatcttgcctcgtatcgatagatgtcttgaagaaggagctgaagatttcttattgaagcctgtgaaattagctgatgtgaagagattaagagattctttaatgaaagctgaggaaagagcttttaagaatattatgcacaagagagagcttgaagctaatgatatctactcgcagctaaaacgcgcaaagatctgagtttatcagattccacgtacgatatgttctttaaaagctcaaagattcacacacatgcatgtcctgattctttcggcttacaatttttgagacattacggcttcttttgctgatagaaccaagactgatcaagagtgacaaagatgggtttttataagatagaaatgtaaattgtagacttggattcattagagaggagaagagatacattttttttttctttacatgagagatatgtaaaatggtggtgtgttattttggaagttaacatatgaatttcttttgtttagttcttttcgccttcatttgcgtgggaaaaagcgttgttcacaatatatgatttttttgttacattacttaaataatgatttaggaatggattagtaccgttcattacacgaggacaagctaatcttttcctaattaaaataaagctgtctatatgaatcgaatccagcgagataagttagttattttaagcgttggttgggaccactttacatggcttttcttagaaatttccccaagttgggttttattaagaccaagaaaattctagtccctagactgttcatctatctgaaagccaaaaatggtatgcaatccggtatatcctatagccaaaaaaacaactaaaattaatccggtccagttactcctaatccaccaattaaattcaatgccaaaacg

SEQ ID NO: 93392 - DNA, 620 bp, Arabidopsis thaliana columbia
gggagaatggccgttctaagcagccagaagagtctctctaactcaatcctgacggtttcagaggtagaggagattgattatgctgaccccacgatacaaagcagtaaatccatgactctgcagagttcgcgttcagtgtccgaggatgagtacccgcagggccaagctggggaggacgcatgtgaggttccagtttaccgcgtccaagtggttgggatggggcccccagtgagggaagagctaattggatctgattacgggcgaaaagagccgggtgttgccatatataatgggccactcgtatgtgaaatcgaggaaatcctcgtcttggttgaagaagatggcgatagacatcggttattctttcttgaggaagaactgcagagggccagccgtagcactcaacattcctcacatcagcctcattgaagttggcatgatttactatgtttaagccactaatatgagtagcattcataattcatggggggaataatgggaacaatctattcaagtttcaagtgtccccaaggcaaaaattgtatacttaaatattcttctggttgggaatgtagtctgcgaaacattatatcttaatcctgaaatgtgtgcttggaagt

SEQ ID NO: 93393 - DNA, 632 bp, Arabidopsis thaliana columbia
  unsure (1)..(632): unsure at all n locations
gccggggtgggnttgtttccccccccgtcaaccagtacccatgccccncangttccntccattggcggggtggttcccgcaaggccaagtgaggaggaggcatgtgaggttccagttaccgccgtcaagtggtgggatgggctcctcagtgagggaagagctaatggatctgatacgggcgaaagagccgggtgttgcatatataatgggccactcgtatgtgaaatcgaggaaatcctcgtcttggttgaagaagatggcgatagacatcggttattctttcttgaggaagaactgcagagggccagccgtagcactcaacattcctcacatcagcctcattgaagttggcatgatttactatgtttaagccactaatatgagtagcattcataattcatggggggaataatgggaacaatctattcaagtttcaagtgtccccaaggcaaaaattgtatacttaaatattcttctggttgggaatgtagtctgcgaaacattatatcttaatcctgaaatgtgtgcttggaagtgtagcggccgcgaattcgatatcaagcttagcgataccgtcgtagtcgagggggnnnnnnnnnnnnnnnnnnnnnnnnnnnnnnnnnnnnnnnnnn

SEQ ID NO: 93394 - DNA, 467 bp, Arabidopsis thaliana columbia
ggatcttggtccgcgtcgtcgtcgctaaactacacatttccattcgccgagtctctatctctccttttgcttcatcggtgtgatctctgagacgaaagaagaagaagatggtggttattgagcagatcaagaggtttgctgtgtttttagcgacgtgtgattcagagttcgtgaagaagacttacggtggttacttcaatgtcttcgtttcaactttcggcgaagaatgtgagcaatgggatctatgtccgagtcatcgacggacaatttcccgacgagaatgatttagacaagtacgacggtttcggtatcagtggtagtccacatgatgctttcggagacgccgattggattgttaagctttgcgaagtttgtcagaaacttgatcacatgaagaagaaagttctcggcatctgcttcggccaccagataattactagagttaaaggtgggaagataggaagagc

SEQ ID NO: 93395 - DNA, 618 bp, Arabidopsis thaliana columbia
  unsure (1)..(618): unsure at all n locations
gcggtttgaatttatttggaagaatttagctgggacaacaaaaattaatgagttgaacagcgtangggttaaggggggtggcggatgcattatttcggataaggctggaactggtaagacacgtttgaccgtcgtttttcttcagtcatacttaaaacggtttccaaatagccatcctatggtcatagctcctgcaactctaatgcgtacttgggaagacgaagtcaggaaatggaacgtaaacattccattttataacatgaatagtctgcagttatcagggtatgaggatgctgaagctgtctcacgtttagagggaaataggcatcataattccatccgtatggttaagctagtttcgtggtggaagcagaaaagcattcttggaattagctaccctctgtatgagaagctcgcggcaaataagaacactgaaggaatgcaagtgtttaggaggatgttggcagaattgccggggttgctggtccttgacgagggccacaccccgagaaaccagagtagtctcatttggaaagtgcttactgaagtcagaacagaaaagcgtatctttctttcagggacactgttccagaataatttcaaggaactttctaacgt

SEQ ID NO: 93396 - DNA, 556 bp, Arabidopsis thaliana columbia
  unsure (1)..(556): unsure at all n locations
gcgtttcagagtcaccatgttttacgacgcgtntntctttttcagccgnttttcttctcgctggttacatcagagcttcggaganantatataactcaacgacgtagctgttgcatttnttnttttngcaatnatcttcatcttcatgaccggataaactcttagagaaagattcaaagtgattatctttgtggatccctccattgctatgtggaatttagcttcaaaatcgatcagagaaggttttatatcgaagggagaagaagctgctacaaaaccaagaagagctactttagatagatcaggagatggaagaaagacaacaaaggaagaaaaattggagtgtcccatttgctgggaatcattcaacgttgttgagaatgtaccttatgtcttatggtgtggtcatacaatctgcaagtactgtctcttagggcttcaacgtgccattgtcatcaaatcctctgctttaccattccagcttcccttcttcgttgcttgcccttggtgcaatattctctctttaaggctggtttgcaatggaaccatcagattt

SEQ ID NO: 93397 - DNA, 426 bp, Arabidopsis thaliana columbia
gttaaagacttgtatcgaggaataacacactttttgtataatcattagtttcagtattcgtcctcttctttgattgatggagagacttcatctattattgatttgatatgtttatatgattagtaacgtatcttgttggttttaacattaagaattatttaatatcatgtaagaaagaccataaataatcgaattataaatcgattaatgatttttagtcgcgtaaagccgttagtgtaagcagtttatgatccaacaaatgaaaaatgtgttgtacgagcctgaaagaaacctgtgttggccgatgagcaggcccaataaaggcctaactaagttaaattgtcccgtctgcgatatgccaaatcgtctccttttcacgtatatgctgatcactatttgctgatagctaaaatcattacggaccta

SEQ ID NO: 93398 - DNA, 837 bp, Arabidopsis thaliana columbia
agctgaaaagctgtattttactttttctttgttccatggaagctaataagcttgagcttttataagcatctacggcgaaataacttatgaatttgaatacattactggctgtttatcatctgcataatcgaaattcaacatcttaacagtcacaaacattctctttgaaaaaaacaggagcaaagatctttactcttccttcttcaccttcttcttggactttgctgatcgttctgaagagcctgaaaccgtacttgttgagctccgatgtttacctgaggaagactctgaattttttctttttggcgactttggagtctcggtgaagccagagaacatgctcttctctctgcttgctacgtgtgccgcttttatgccggctgctttgagtaaggttagatgatttcttagaggaattcgtcactgatccgacaagcttctgttgtgttctagccttcattttctgaagcaactcgtttggttcagggtaacgaactaatgcaactcgccgagtaatcttcccaacaatcattgattcttcagaaggtataatcaactctgcaccagcatcttgagaatgaaagctagcaagatcatactttgcaccatttgaatccttgaattctccaaataacccatctttgtctggctcaatcttaagagtgttctcttcgatttctggaaattggcctaaaggggcttggataagccaaaactcatcagaacgcgtcaaatcagtgtcatctagctgctctgcgccactgactatgaaatctccggaaactttgaaatcgaaatccatctctgctcaaatcagctctcgcgatttcacaaaac

SEQ ID NO: 93399 - DNA, 401 bp, Arabidopsis thaliana columbia
aaaggattaggaagctgcaggaagaagaggaagctcgcaagcaggaagaagctgagaggctcaagaaggtagaagctgaacgcaaagcaaacttggataaagcttttgagaagcaaaggcagagagagatagagctggaagagaaaagtaggcgggaacgagaagagctgttgagaggaactaatgcaccacctgctcgccttgcagagcctactgttactcctgttggaactaccgcaccagcagcagcaccagcagcaggagcaccagcagcaccttatgttccgaagtggaagcgccagactactgaggtctcaggcccatcagcaccaacatcatcagaaactgaccgactggtcaacccggggccgcctcccggagatgaccactggggaagcaac

SEQ ID NO: 93400 - DNA, 776 bp, Arabidopsis thaliana columbia
agaaaattgatttgcatgccttcgcagtaccggtccggaattcccgggtcgacccacgcaaccaaatcctcggcggcgattgaagaaacctttccgatggatctgctcagggaagagattctgaagaaacgtaagagtctagctgaggaatctggtggtaagaagttcttcaagcggtctgagatcgagcagaagaaaatccagaagcttcgagaggaagaacgacgcgagcacgagcttaaggctcagcggagagccgccgccgccgcttccggtggagatggaaaatcatccggctctgctcctggttcttctaacgcagctacgtctgcgtcttccaaatcctctgcatcggacgctgctgctatcgccgattcaaaagccctaaccgacgaaaacctaattctcccgaggcaggaagtgattcgtcgtttgagattccttaagcagccgatgactctcttcggagaagatgatcaatcgcggctcgatcgactcaagtacgttttgaaggaaggattgttcgaggttgatagtgatatgactgaaggacagacgaatgatttcttgcgtgacatcgcagagcttaagaagaggcagaagagtggtatgatgggagataggaagaggaagagtagagatgagagaggaagagacgaaggtgatagaggtgaaacaagggaagatgaacttagtggtggtgaatcgagtgatgttgatgctgataaagatatgaaacgtttgaaagctaactttgaggatctatgcgatgagga

SEQ ID NO: 93401 - DNA, 561 bp, Arabidopsis thaliana columbia
gagaaacacaccaatatcgcaacagcgctcttaggacagatcaaggagagatctatggacgcgttcactaagaaagaaagcgacatgatgatgaggggcggaatcgacagaaccgaacttatggctgctctgaaaggcaaagggacaaagatggacaagctccggtttgcaatcatgtacctgatctccacagaaaccataaaccaatcggaagttgaagcagtggaggcagcattgaatgaagctgaggctgatacaagtgcgtttcagtatgtaaagaaaatcaaatcgttaaacgcatcttttgcagctacatcagcgaattcagctagcagaagcaacattgtagactgggccgagaagctttacggacagtctataagcgcagtgactgcaggagtcaagaatctgttatctagtgatcaacaattggcagtgactcgaacagtcgaagctttaacagaaggaaaaccaaacccggagatcgattcttaccgcttcctggacccaagagctccaaagtcgtctagcttccgtggtagccatgtaaaaaggaccgtc

SEQ ID NO: 93402 - DNA, 390 bp, Arabidopsis thaliana columbia
cgggggggaccaacccgtccgttctttttatctagaaatcgaggaagctatacaaggtttttctcaagcctgttcatatgatacctaataatatgctattaaaaaaaaggaattctaggacacccgtgtgaattcggacctctccgattcaaatcggaccatagttcctgacctaaaattctacgcaaatcaagatcgagaaaaggaagttttgcaatcattgactcaaactcattgtcgaatcccattcagcagaatatggaggtacttatggcggaacgggccaatctggtatttcacaataaagtgatagatggaactgctattaaacgacttattagccgattaatagatcacttcgggatggcatatacatcacacatcctagat

SEQ ID NO: 93403 - DNA, 870 bp, Arabidopsis thaliana columbia
ttgaaaaatatattttaagttatcaagttgaaaatatttaattaaagagatctgattataagttagtaaaggcaaaaacgaataaaaatttgaaattggggtagctgttcctaaggggcccgacgaatttttaattgtaattagagtatttttttttattgattggtttatcacattgtgatgttttacatgattaaatggacccattctaaaacaattagatgatgataaaattaacaaagattgggactccttatttcgatttaagaacatgcgaatagttccgtgattttgtctaagtgattgttgaagaatgccagacttgggcgaaatcgaataaaacggattcatgtgatctgcagagatcaatcccgaatctggcgaattattcctttttcttatatatgaaatatgggatttcactaagccaattcttatgaaatcttgaatcaaaccctttgtacttacttcaacaaagaaagcacggacctcctcgagagaagaatttttgtcccaattcaagactaaacaagttcgaactaattgaatacttgtgtcagaaattcctcgagttggtttgccatttccataaaggatatagttgaaaactcgaagttgaatattatccttttcccgaaagagatcttgtgggaagagtgttgccaaatttatactgtccgctatctcataggtggctacgggccgcaccaaaacaaaaaactttttcttggttggtgtaatccgttggacataaatccaatttttaaattttttggattccttcgagtttgtttttcctcttcctggcggtatcaagatgccactgtgtcgggatattttatctgtcttgtccggaaaatggatatcccc

SEQ ID NO: 93404 - DNA, 455 bp, Arabidopsis thaliana columbia
ctcatcaatcaatggcgtcgtctctatcgccaccggaagaagcttcgtatcaccaccgtcataccaaaagatacaacacctcctcttcttcaaccaccaacggaatcatcgaatcatcggtttccgatttcgtcaaacgtcccaaaatctctcatccgaattacatatcaagttccgagatcgaatcagagttttctcatcacgatccagatttcgcaagaatcaacaacggtagttttggttgttgtccgtcatcaatcctagctttacaacgagattggcagctccggttccttcgtcaaccggatcgattctatttcgacgaactcaaaccaaaaatctccgattctagatctgtaatcaaacggttaataaacgccgagcatgacgatgaagtctcgatcggtcggataacgcaacaaccgtagcagcaatctgtctttaacaaaccgttt

SEQ ID NO: 93405 - DNA, 672 bp, Arabidopsis thaliana columbia
  unsure (1)..(672): unsure at all n locations
cctatttttataattattaatcaaaatcaaatgagcaaaaatggaaggcaacaaatttcttcttctcttcttcaagctcatcaatcaatggcgtcgtctctatctccaccggaagaagcttcgtatcaccaccgtcataccaaaaggtacacctcctccgcttcctccgcttcctccaccaccaacggaaccgtcgaatcatcggtttccgatttcgtcaaacgtcccaaaatctctcatccgaattacatatcaagttccgagatcgaatcagagttttctcatcacgatccagatttcgcaagaatcaacaacggtagttttggttgttgtccgtcatcaatcctagctttacaacgagattggcagctccggttccttcgtcaaccggatcgattctatttcgacgaactcaaaccaaaaatctccgattctagatctgtaatcaaacggttaataaacgccgagcatgacgatgaagtctcgatcgtcgataacgcaacaaccgcagctgcaatcgttttttaacaaaccggttggggtttttccgtgaaggtcggttcgataaagggggcggggtggttatgcttcattacggttttgggcttttaaggatttttttaagggtttttacggccggtggnaggaccggggaaagttcctttccggtta

SEQ ID NO: 93406 - DNA, 870 bp, Arabidopsis thaliana columbia
atttggtacaatgtttgctctcttctgcctctggtttggcatctcagtcccactagtctgcgatgggagcgtatctgggttacaagaagccaccaattgaagatccagtcaaaacaaacaagatccccaggcaagtaccagagcagccgtggtacatgaaaccagttttctctatactaattggaggcatcctcccgtttggagcagtcttcatcgagctcttcttcatctcgacatctatatggctgaaccagttctactacatcttcggggtcccctttatagttctcttgatcttgatcgtcacctgtgcagagatcacagtggtgctctgctacttccagctttgtagcgaagactacaactggtggtggagagcttacttaactgcgggctcatccgctttctaccctctccctctaccccaatcttctccttcttcaccaaagctggagatccacaaagcttagtccccgggaattgctctacttcgggtaccatgatttatcatcctcttacgcattcttcgtccctaactggcacaaatcggtttctatgcttgcttctggttcgtgagaaagatctactcctcagtgaagattgactagaacccaactgatagagatgccaacttttgtcttttaaggttttgtatgtttgggtgattgtatggtacgtagctgtaacaaagtaaaagaaatcaactttaatttgtaccgtttctcttcaacacctgcatatccacagatgttggctgaattaatattacatgcctttttctgatgttcaaaaaaaaaaaaaaagggcggccgctctagaggatccaagcttacgtacgcgtgcatgcgacgtcatagctcgtctatggtg

SEQ ID NO: 93407 - DNA, 414 bp, Arabidopsis thaliana columbia
gaagaagtgactgtgaactccggtgagtcaagagaagagagagaaataaatcgaaaactgcagatgtcggtgtttccgtttggtcaatccatctccggtggaggttttcctcccgctaccgagtcctcgccagctttctccttcaatcaatcctcaaaccctagctcctccgtcgcatttagcttcgaatcgacttctcctacttcctccgcaactccatcatttggattcggaaccgttccttcgtctccatcgaccgctccttctacatccctccttttcggatcctcaccgtccatctttggagccaccggttcgtcaccatccagtcttccatcttctgcttcaaccactactcatgctactagttctgttagtacaacacaaccatctcttggtgtcgcttcgagtagt

SEQ ID NO: 93408 - DNA, 679 bp, Arabidopsis thaliana columbia
  unsure (1)..(679): unsure at all n locations
aacaaaatgggtctctagatttcagatttctgggatctgggtgttagattaatctctttctcttccattattagtagagaaagctcactcctttcactcaaagtttctacctttctgttgtcctgaaaatgggttgcgtttgaaatctcacactttgagatttgggtgtttattttgggatccttcttaccacatttcgaaagtttcagctagggttttcgatttctctacttctcagaggagattttagaggcaaaagatggctccaaggttggatttttcagattggtgggcgaaagacacgaggaaaggaacaccagttgtggtgaaaatggagaatcctaattactctgtagttgaaatcgacggtccagattcggcttttagaccagtggagaagagcagaggcaagaacgctaagcaagtcacttgngttttgcttctcaaagctcatagagctgttggatgtctcacttggctcgccactgtcttttggtctctccttggtgccatcaagaaacggcttagtttcactcacccacttggctctgagaaattaggcagagacagatggcttttcactgccattaagctcttcttagctgtttccttagtgattctcggctttgagattgttgcttattttagaggatggcattactttcaaagccctagtctt

SEQ ID NO: 93409 - DNA, 752 bp, Arabidopsis thaliana columbia
acgcggcaaagagagagaaagatagagagagagagagagagagagagagaaagcggtggagtcgtgataagggagaagctctggatacagtctcttcccgtcgtcggagacggatgtttatgcctattggctcctgaggttagattaagcttcgtatttagtggattttcttcttttgagatatggaacaagattacatctgctcagggtgctaccagtatcgagttttttcattgcaagaagcactcgattggcggtttcttgtgcactcagatttccttatcggctctttcgtgaactgcacctagtggtcagaccttctgcgatctttacggaaggtgtgatgcaaatttctgattcagggctgatgtttgcaagttatcctaccttcacacagtcctagagtgtcatctaaatctgttccctgcactcaaaaactagttggtccttcttccatatcctgttcttatgagagcttgttgaagaaggatgaatcagttttttttcaagttatgacttttcttagctgtgtcttttcctcgagtctctgaaccccttgagtgaaatgttgtgagcataagtttcgtccagctacccagaacattactttttgttagtgcgtcttccaattctcagtatgttttgtctttttctcttagcgtctttcttttgccttgttggtcaacccattgatgttcaaacttcaaagtaaataagggtcagtctacccagcgggagaatcattgatcttg

SEQ ID NO: 93410 - DNA, 409 bp, Arabidopsis thaliana columbia
ataaaaagagcataaagaatcgaaagtatggtagagtaaatgtggatgatgatgatagctttgggattccctctcttgttataaaatataaaactttgataaatatgcatgattatatatgatgatggtacttgctttcgtttcgtctattggggtcttaattaaatgcttaattaggatttaattaaaaatatctggcactatagctagggctcaaccttgaataattacttcttttagtttaataacttaaaccaattcactaatcaattggttttgtactataaattaattattgtagattgcagtctactcccacctaggacggaatcaaatggattgttcatattcataaatgtaaaatgacagaaacacaagtggtcggtctaaattataaatattacttacc

SEQ ID NO: 93411 - DNA, 401 bp, Arabidopsis thaliana columbia
aatttctcattgagaaactgttcaatataaaaataaaatataatcaaaaagtatgagagagagtagaattagtctctcaagtgagaaactttgagaaacccataagaacacttgtatatcaggtcaaatattattttattgttaaaatttaattatataactaatatttattaaaatactaatattttttttttttgagaaaccaagaaggtatctcagtgacggagatgtccttatatcataccaaacttcaacaaaaacaagtattggagtcgactgtgtgataggttcgtcctcatccaaagacatagcttgaaggactttttgatataattatgtgtttggtgtgtataggtgtggtgatgagtgcaaggatgcaagaaagcaaaaagggtatatta

SEQ ID NO: 93412 - DNA, 659 bp, Arabidopsis thaliana columbia
gatgacaaagacagtattttaattcggattttacctaataaatccatagcgaagaacggtagctcatgtccctattttatggggggccccatcaatgatgatataattggctcctcgctctatacataaaatcttagatcctttaacgcctccagaatcgaccttgtcccagttgtccttgctttcgcttttgatactctatggacctgtcaatgaactctttggcaatatcttttctctcaaaagaggccagaaccggtctgatgtctgctggactgttacgtgcaacatattcaaggaagggtatcaggtcaactagggctgtgtcatcagcttctagtttgtaaggcttgattggcacgctattttctggctgaagggttgattcaaaggcatttgcgctaacaaacagaatcttcttcggatctctgttcagctttgacagatccctatagtgctttccattttcatatttagtagcgcctcttgctagcttataacgtatgtagccatttgggtctaatttctcacagaccgggagtacatacatctccatctggtcagaatacacgacaatctcatagaatttcccaagatgctccaagaatgcatcgacacctggtcttttgaatgtcctccaccctctttcccgcttccag

SEQ ID NO: 93413 - DNA, 732 bp, Arabidopsis thaliana columbia
  unsure (1)..(732): unsure at all n locations
gaaaaatctgtaattgatttacctaattgtaaacctgatattgcaccttaagacacgcattgaaacagacagataaatattaagcgtactagaaaaggtaatttactcttttttttagcaatacatacaaattgacgtttcaaccaatagtttctcaaagttcataatcataaatcatttgtcaaaccaagtaaaaataaatcagagaaaaaaaacggtttttgttagtcaacgaaaaatgaaccttccatatgataatttctttttcgttctcatagaaattttctatgtaaagcagagagaaagacgaggaaaattgggtaacataaaaactctttgatgacaaagacagtattttaattcggattttacctaataaatccatagcgaagaacggtagctcatgttcctattttatggtgtgcaccatcaatgatgatataattgtctctcgctctatacataaatcttagatcctttaacgcctccagaatcgaccttgtccctgttgtccttgctttcgcttttgatactctatggacctgtcaatgaactcttttggcaatatcttttcccccaaaagaggccagaaccgggnctgatgcctnctgncctggtncgngnaaatatcaagggaggggaccaggcaacnagggtgngcaccaggtccaagttgaanggtngtgnccgaattnctggtaagggtngccaaggnttcggaaaaaaanccnt

SEQ ID NO: 93414 - DNA, 427 bp, Arabidopsis thaliana columbia
ctcgcattcttggactaactcagattctaccaataacttcgaaagagtggtttcggattttgtcatagtgatatgagccaaagcttttgctcttgcttttgtaaatggaccctctgttatctcagtaatgattgaattgcaaagaagtgctcaagcttaaagaacaaagagatttaaagcaagcttcctcttaacccaagtctctcttagaggctaattgttggaagttgtgttttcattagcataaaaatcctttatataagccatgaaatcttaaaaataaaaaggaaaaacatcaaaacccaattatcatatcacacagattgtactattgtggtattgcttgcacataactctatatataactagattatgaacatcttaaaatgtgagatttttctctatttttatcactttctttacaaaa

SEQ ID NO: 93415 - DNA, 524 bp, Arabidopsis thaliana columbia
  unsure (1)..(524): unsure at all n locations
gattttctaagacttgagtaatcttgttttccgaaattttctcaccaagctcgaacacaaagatcggccatggctacgctcttcaccgtcgctcgtccttcttcactcctctatgtttcctccataaatccaagcaagaccttctctccttctatctccctaaaacttaactctctctctttctcttttggttatcgtcccaagccactccggttttctaaaatccgatcttctctgccctcggaatctgaatcggaatccgacctagatgcgtctgcagttacagatgaatggggtgagaaacctggagatgcaaatgagcccgactctcagccagataatgtgaccgtgaatgtgattacggacgaatggggcgagaaatccggacccgaacttgaggaatccgggacccnntttatggaatcggatcctncaaggaacgnagacgagtggggaggagnaatttgtggagaaactntngccggcgntggaaaatagnaagttncggtgtttnacccnncctt

SEQ ID NO: 93416 - DNA, 412 bp, Arabidopsis thaliana columbia
cgaagaaattgcagtgtgttttcttacagcgaagagccccaaagagaagaacaaaatttcgaaaatagagaaagagaagaagttgacgatggattcaaaggcgaagcagatgattctttcagctctctgcaaacacttctctttggatcctgaaccttttgtgggcggagcgggtgaaagtgatatcaagacactttattctaatgtattgaaggcatctggaaaggaagtatctgcacaaaacaacgatgttttgaagtggctagattttgcggaaggtttctcttcagattcaatggattggttttcagctcttgtaatgttgaattttcagttagcttccaagtcagtgctcttgggtaacggatttgacgccatcggcagctgatgttgctgtgttttcagctctgca

SEQ ID NO: 93417 - DNA, 1245 bp, Arabidopsis thaliana columbia
  unsure (1)..(1245): unsure at all n locations
atgatatnnngccggccctatacgactttcttagggaaagctggtacgcctgcaggtaccggtccggaatttccgggtcgagccacgcgtccgcggacgcgtgggttcagctcttgaaaagttgaatttagagttagctaccaagtcagtgctcttgggaaacggattgacgccatcggcagctgatgttgctgtgttttcagctctgcattcttcagtgcttggcctctcagattcagacaaggagaaagtaccacatgtcataagatgggtgaattacatccagaataaagaagagttgtcgacattatttgcaccaatacctgtgaagctaccagaatttagcttcgaggtaccaaaacctgccattaaggtggaaacaaattctaattcaaaaaaagctgcagaaggtgtaaagcctgttgacaagccagatgtgcagccgcagctgggcacaaagaaaactgagccagaggaaccaaagaaaaatgcagcaaaagagaaggatgccaaaaaggaaaagaagaagcctgctgaaccagaaccagctaagaaagaggcagagcttagtgtcagtttgcttaacattcaggttggtctaattcgtaaagcatggaagcacccatcggcggatagtttgctggtggaagaaatagatgtcggggaggataaagtgagacaagtagttagtggcttagcaaagttctgcagtcctgaggatctaacgaaccgcctcgttgcactcatcacaaatgtcaaacctggaaagctaagagatgtaatgtcacaaggactggttctttgtgcttcaagtgaagatcactcggtggtagagccgttgctaccacctgctggtgctaaaccaggagagcgtgtttcattttcagggattgaaggaaagccagaagatgtactgaacccaaaaaagaagcaactagagaagataaccccgggtctctacactgatgaaaatggcgtagccacatacaaaggcatacaattcatgacctcggctggaccttgcacttccagcatccccaaggcgaccatcaagtagtaaactcagttgatacttctctcctctactctagcgtttttctttgatattcgcaaactcagttggaaaaagaaaagatgttctttttgtcacaattcgaattaatctaaaaactttcttcttaaaaaaaaaaaaaaaaggcggcccgctctaagggatccagccttacgtacgcgtgcatgcgacgt

SEQ ID NO: 93418 - DNA, 806 bp, Arabidopsis thaliana columbia
atcttctttcattttatcacattcatttcctttgtcttcaatccaaagctttcctcttcttggaaccaatctgctctcttttttattctgagtttgacaatggcggttggtgaggtcatgaggatggagattcccgccggtggagatttgactgttactactccggagttgcatgttcttgccgtcgatgatagtattgtggatcgtaaagtcatcgagaggttgcttagaatctcttcttgtaaagtgacgactgtagagagtggaactaaggctttgcagtatcttggcttagatggaggcaaaggggcttctaatcttaaggatttgaaggtgaatttgatagtgacggattactcaatgccaggactttcaggatatgatctccttaaaaagattaaggaatcttcagcattcagagaagtaccagtagtgattatgtcatctgagaacatcttacctcgtatacaagaatgtctcaaagaaggagcagaggaattcttgttgaaaccggtgaagctagcagatgtaaagcgaatcaaacaacttataatgaggaatgaagctgaggaatgcaaaatcttaagccattctaacaagagaaagcttcaagaagacagtgatacatcatcatcaagtcatgatgatacttctatcaaggactcttcatgttcaaaacgaatgaaatcagaatctgaaaaccttttttctctactttgaattatatgtatagaggccaagaccttagcaaaaccattctgttaatattcctcaagaaagacaatgtttgagagagtcatcacact

SEQ ID NO: 93419 - DNA, 744 bp, Arabidopsis thaliana columbia
ccccccctcgaggtcgacggtatcgataagcttgatatcgaaccgaatcgtttttagcctccaagagagagagagagagagagatctgcatatagagaatgatagaaccgtcgatggagagagagaatggtgctttaacggcggcgacaacaacgacgacggcggtgacttctcctcctccgatggcttcttcaccgcgtcaagctttagttgagagattgaaagattatggacaagaagatattttctctctttgggatgaactttcaccagacgagaaagattttctcgttagagatattgagaatttggatcttccaagaatagatcggatcattagatgttcacttcactctcaaggtttaccggttgcggcgattgaaccggtaccggagaattgggtttcgacagtagatggtagaacaatggaagatagagagaaatggtggaaaatgggattaaaaactatctatgaaggcaaattaggtgttgtgcttttatctggtggacagggaacaaggcttggaagctcagatccaaaaggatgtttcaatatcggattaccatcagggaaatcgctctttcagattcaggcagagagaatcttgtgtgttcaaagacttgctgctcaagtagtgagtgaaggtccaattcgtccagttacaatacattggtatattatgactagtccatttactgatgaagcgacacgaaaatatttctcgagtcacaagtactttggtc

SEQ ID NO: 93420 - DNA, 568 bp, Arabidopsis thaliana columbia
  unsure (1)..(568): unsure at all n locations
ctccctccaggtctactatctttctatggtctcacagagccactggacagaagatggcatgtcttgggtttaggttacgatgtgaacatcgataaccgtctgatcgaaacagcagctgtgattcactataatggtaacatgaagccttggctaaagctggctattggtaggtataaacctttctggttaaagtttttgaactcgagccatccttatttacaagattgtgtcacagcttaaagcaaaagacgttgagagttgaggctaatcaatatcagaagattcttgatttcttatacactttgaagattcttttttttttggaatattgtagatcaaattcagatttccttctgaagactgttttttgttttttttgggtcggaagagaaaacttataatcacacacacattagaggttgaatatattacttacagggataatttggtgaaaaaaggttctacgttttttnnnnnnnnnnnnnnnnnnnnnnnnnnnnnnnnnnnnnnnnnnnnnnnnnnnnnnnnnnnnnnnnnnnnnnnnnnnnnnnntagctggcagtatcat

SEQ ID NO: 93421 - DNA, 564 bp, Arabidopsis thaliana columbia
aaaaatacccttggtactttattgacgatctcacaaagatgcaatctcagtgaattttaatttacttattcatcttttacagaatcgattccctacgagaatatctggagttcagtatgtctggaagcacaggagaacgttcttttgctgatattattaccagtattcgatactgggtcattcatagcattactataccttccctattcattgcgggctggttattcgtcagcaccggtttagcttacgatgtgttcgggagccctcgtccaaacgagtattttacagagagccgacaaggcattccattaataacaggccgttttgattctttggaacaactcgatgaatttagtagatctttttaggaggacccaatgactatagataggacctatccaatttttacagtgcgctggttggctgttcatggactagctgtacctaccgtttttttttgggggtcaatatcagcaatgcagttcatccaacgataaacctaattcaattatagagctatgacacaatcaaatccgaacgaacaaagtgttgaattaaatcgta

SEQ ID NO: 93422 - DNA, 442 bp, Arabidopsis thaliana columbia
ctcagaaaaagctagatttaactaaagatggagcggtatcattatcagcaaaccaccttcaaaagctacgcctgtcattccagttaactactccacttggcaatgcgtttaagccacaccaggcatttttacatagctgaaacatgagtcacaggtcgagcatatctttctcgtgaaaacttctggaaagaagtctgatttagttctagattttcttggattggttgagaagctctactacctctctggtaaatatgagatacagctaaccattggagatgcttctatggagaactctttactgagtaatattggtcacattgaactagacctaccagagcgtccagagaaggcgactcgtcctcctctacagtctactgagccttactcaagatatgggccaaaagctgaaatatcacacatattcaggattcctgaaaag

SEQ ID NO: 93423 - DNA, 341 bp, Arabidopsis thaliana columbia
gtaatttgaaaaatgaacaattctttttgtaaggaaaacttttatatagtagacgtttactatatagaaactagttgaactaacttcgtgcaattgcataataatggtgtgaaatagagggtgcaaaactcaataaacatttcgacgtaccaagagttcgaaacaataagcaaaatagatttttttgcttcagactaatttgtacaatgaatggttaataaaccattgaagcttttattaattcaaatcatgggatgggaggaaaaagcaatcgaagtgcagagataaaggataagatgaaagctagtccaatgaaagttggagcaaatggacaaaagaat

SEQ ID NO: 93424 - DNA, 394 bp, Arabidopsis thaliana columbia
gacacgacaacgatgccagtgatgctattccactaaactctactctaatttagtggggttgatcaaattagattcctaaatttcatcttggttgatgttggcatttacgatgaaatatttggaaatacaagtaagagtcggttatgattgagttttggtctagaaaagttagagttgaatgggtgtggtagtagccactatttatggtggataaatacttagtaaaatacaaaatacgggacagctttttgggtgccagaagttataaatacattggtggacagtttttattgtcatataatttcttttcttttttttggcaaaaaataatttctttttactttgactaaaatatgaggagaacattactatgttgaaatgagtggaaaatcaa

SEQ ID NO: 93425 - DNA, 687 bp, Arabidopsis thaliana columbia
  unsure (1)..(687): unsure at all n locations
cacacataccgtgatctaaaaacctgaatttcaacatgtcacacagcaatcaacagaagtttgaatagagcaagaaagcaccttgaggcttgaagtgatcagacaaactctctttccagaaaacacaatagctttcttcattgaattaataatttacacaaaccaagcatcattccaacaattcccattgcatccatcataaacgcaagaacaaatcttttccttttgtgccctaaatttagaatccagattccaatttccaacctcatttcttagccttagagaatctaagacaccgatatttctcaccactcacagtaatttccagagcaccatcttgattatcctgattcgacgcagtccccataagaacactcttctccttctccagattctctctctccatcttcaacctcgcttcctgtctagcgatctccgtctcacggcgacacagctcaactttccaggcagcttctcgctcagcgacttcacgctcacgctcttctatataactctgcatctctctctccttcatgatccgatcttgtatatcagcgtcaagtgcttgcttaagctcctccccttctgtcgtcttctcgagccgtacgcacgcgtggnnnnnnnnnnnnnnnnnnnnnnnnnnnnnnnnnnnnnnnnnnnnnnnnnnnnnnnnnnnnnnnnnnnnnn

SEQ ID NO: 93426 - DNA, 799 bp, Arabidopsis thaliana columbia
catcacgtcgcatgcacgcgtacgtaagcttggatcctctagagcggccgccctttttttttttttttttttccagaaaacacaatactttcgtcattgttttaataatttacacaaaccaagcatcattccaacaattcccattgcatccatcataaacgcaagaacaaatcttttccttttgtgccctaaatttagaatccagattccaatttccaacctcatttcttagccttagagaatctaagacaccgatatttctcaccactcacagtaatttccagagcaccatcttgattatcctgattcgacgcagtccccataagaacactcttctccttctccagattctctctctccatcttcaacctcgcttcctgtctagcgatctccgtctcacggcgagagagctcaactttccaggcagcttctcgctcagcgacttcacgctcacgctcttctatataactctgcatctctctctccttcatgatccgatcttgtatatcagcgtcaagtgcttgcttaagctcctccacaaacttatccaccactaatttaattctcagcgacatcgtcttcgaagcaaattctaactatatacaaaatctcctccttcctcacactaaacgctgctacacataaatacaatctcctccttcttctggttttccgtcttttacttacggcggcgctttaccgacggcgagattccgatcttttctcgttgaagcttgcgtgagaactgaggaagaaagggacagagacattcacgaccttttgttttttttccgctttc

SEQ ID NO: 93427 - DNA, 356 bp, Arabidopsis thaliana columbia
gtggggtcagtttgggataacgtcaaacatatagattctaaagaaaagatagggtgtagaattcttagaaacagaaaaataaaataaaagttctaataggatacattgtatagtagtgaatgtaattagataagtttatctaaaaacttgagaacatacgaaaatgtattgatttttttttttttgggacaaacgcgaaaatgtattgatttgattgtaattataggaacatttacgaaactaaaatatcatgaattttttttgtcatcattcaattgcaagtgacgaaaaataaataaaaatttcaagtatgaaattttcatggatgcgggatagtagattttaattttttattt

SEQ ID NO: 93428 - DNA, 486 bp, Arabidopsis thaliana columbia
tatgacgtcgcatgcacgcgtacgtaagcttggatcctctagagcggccgccctttttttttttttttttttttttttttctggtagccaaaaactttttaatgcatgaactaaaacaagaaggaagtgagaaactacaaccacaaagacatactctattaatagcatgagaaagcaaaagttaatataaacatacaaatcctcaccaaggattagtttttttcacaacatgttgaagacaagttagttgtcttgtaatttaccctctggactctaagctagaaccaactaaagcctacccatactagtacccaaacaaagtaccattccccggtatagccctaaaacgatagatgccgataaccgaaggggtctctcgccaggcgcaaccaagacctcacaagaaggacagacttattatgcttccggagaccaaggaacacaaaagaaacgctattgaacactatacaccacttgtggaaactg

SEQ ID NO: 93429 - DNA, 488 bp, Arabidopsis thaliana columbia
ggcccaccaccactgggagcaaaaggttcaaatgcaccaccaccacctcctcctgcaggaagggggagagcttccttgggacttggaagaggccgaggtgtgagtgttcctactgctgcacctaagaaaaccgcgttaaaacctttgcattggtctaaagttactcgggcagcaaaaggtagtttgtgggctgatactcagaaacaggaaaatcaaccacgggccccagaaatagatatatcagagctcgagagtcttttttctgcagtttcagataccacagctaagaagagcacaggtcgccggggttctagtatcagcaaacctgagaaagttcaattggttgacctgcgaagagcagataactgtgaaataatgctcacgaaaataaagattcctttgccagatatgcttagtgcagtgctagccttggattcattagctctggacattgaccaggttgaaaatctcatcaaattttgtccgac

SEQ ID NO: 93430 - DNA, 405 bp, Arabidopsis thaliana columbia
gttcaaatactattaaaatttgacaatttcggtttttggactacaaggatttaaagctcatatttggagttgtaattacaggtgagtatgagatgggcttatgaacaaggagtgagcatggtagtgaagagctttaccaaagagagattagaagagaatctcaagatatttgattggtctttgacagaggatgagacacagagaatttcaactgagattcctcagttcagaaacgtccacggagaggtttatacctctaagaaaggtcccataaaatctgtcgccgagatgtgggacggggagatctgatcactttgtgtgaaaatagcctagtgaaaacggcacaattatcattcgtcacaatgattttcctgtcattctctctaataatgaataatgaataat

SEQ ID NO: 93431 - DNA, 980 bp, Arabidopsis thaliana columbia
ctctcgtcgaaagcaaaacagtctcctttctctatcttctgctcatatcagccattgacacagttgctttgggtttccctcaaacggcgccgattgtctggattttgaccactgatggccttagatcaatcttttgaagatgctgctttacttggagaactctatggagaaggtgcattttgtttcaagagcaagaaacctgaacccattacagtctcggttccttctgatgatactgatgattcgaattttgactgcaatatttgcttagactcggtgcaagaacctgttgtgactctctgtggtcacctcttttgctggccttgtattcacaaatggcttgatgtacagagcttctcaacaagtgatgaataccaaagacatagacagtgtcctgtttgtaaatctaaagtttctcattctactttggttcctttgtatggtagaggccgttgtactactcaggaggaaggtaaaaacagtgtgcctaaaagacccgtaggaccggtttatcggcttgaaatgccgaattcaccttatgcaagtactgatctgcggttatcacaacgggttcatttcaatagcccacaggaaggttactaccctgtctcaggggtgatgagctcgaacagtttatcatactctgctgttttggatccggtgatggtgatggttggagaaatggtagctacgaggttgtttggaacacgagtgatggatagatttgcgtatccggacacttacaatctcgcagggactagcgggccgaggatgagaaggcggataatgcaggcagataaatcgctgggaagaatcttcttcttctttatgtgttgtgttgttctgtgtcttctcttgttttaggttttcatagctagcttggttctgctactgttcagtttcttcaggtgtaaggaaaacatagtcaaagaaatgtacatttgtgttggaaacaaatcaaagttgcttaatgttgaggg

SEQ ID NO: 93432 - DNA, 396 bp, Arabidopsis thaliana columbia
agactctactccaatcctctttgatgttcctcaaaacgtaactttcacaccattctcatcgcactccatatccactgatgctcctctcccaatcctcctccgagttcaagccaacgctcacaaaggagggtttctcggattcaccaaagaatcaccctctgatcgtctcacaaactccttgggaagattcgaagacagagagtttctcagtcttttccggttcaaaatgtggtggtcgacggcttggatcgggaaatccggttcggatcttcaagccgagactcagtgggtgatgctaaagattcctgagatcgattcctacgtggccatcataccaaccattgaaggagcttttagggcttcacttactcctggtgagaaaggtaatgtcttgat

SEQ ID NO: 93433 - DNA, 404 bp, Arabidopsis thaliana columbia
cggcaagacaggaagcagaaaggtacccaaccaacgacgtaaaaccttaatcaatatgaatttcaatagagttacttcttaaccaataattaatttctcagttctctatatgaatcatgatggtttacgccttacggtttatgtgcagttctcccggttatcgtggatgtcattgtaaaccttccggatgaaacggaggctattttgaaggtctgtgtgtgttttattttctagcatcattttcgaatttatgtaaaattttcatatttcttgcgtgtttacaactgttttttttttggtaccgatattttctctgaattttgttatatcccttttatgcaattaactaatttatataacattagtttcagtattgaacttatagcatattgatgaaagtttat

SEQ ID NO: 93434 - DNA, 440 bp, Arabidopsis thaliana columbia
cgatttctctcctctgctctccaattccatcttcccatggcgatttcggctccagccgctggttcttcctcctctagaatgctctgttcctactcctctccttctccttctctctgtcccgccatttccacctctggtaaactcaaaaccctaactctctcttcctccttcctcccttcttactcattaaccaccacctccgcttctcaatccactcgtcgctccttcaccgtccgcgccgctcgtcgaaagttcgagaggaagaagcctcatgtcaacatcggaaccatcggtcatgttgaccatgggaaaactactttaaccgcagctcgtggtatcacaatcaacactgctactgttgagtacgagactgagaatcgtcactacgctcacgttgattgtcctggtcacgctgattacgttaagaatatgattaccgg

SEQ ID NO: 93435 - DNA, 557 bp, Arabidopsis thaliana columbia
  unsure (1)..(557): unsure at all n locations
atgannnnnnnnnnnnnnnnnnnnnnnnnnnnnnnnnnnnnnnnnnnnnnnnnnnnnnnnnnnnnnnnnnnnnnnnnnnnnccacgcgtccgattccatcttcccatggcgatttcggctccagccgcttgttcttcctcctctagaattctctgttcctactccccaaatcttctccttctctctgtcccgccatttccacctctggtaaactcaaaaccctaactctctcttcctccttcaccgtccgcgccgctcgtggaaagttcgagaggaagaagcctcatgtcaacatcggaaccatcggtcatgttgaccatgggaaaactactttaaccgcagctctaaccatggctctcgcttccattggttccagcgtcgctaaaaagtacgacgagattgacgctgcgccggaggagagagctcgtggtatcacaatcaacactgctactgttgagtacgagactgagaatcgtcactacgctcacgttgattgtcctggtcacgctgattacgctaagaatatgattaccggagctgcacagatggacggagct

SEQ ID NO: 93436 - DNA, 1007 bp, Arabidopsis thaliana columbia
gagcttctctcgtcttatgaatttaacggtgatgatattccgattatctctggttctgctcttttagccgttgagactcttactgagaatcctaaggttaagagaggtgataacaaatgggtagataagatttatgaacttatggatgctgttgatgattacatccctatccctcagagacaaactgaattgccattcttgttagctgttgaggatgtgttctctatcactggacgtggtacggtggctacagggcgtgtcgagagaggtacggttaaggtaggagagactgtagatttagtgggtttgagggagactaggagttacactgtcactggggttgaaatgtttcagaagattcttgatgaggctttagctggtgacaatgtagggttgttgcttaggggtattcaaaaggctgatattcagagaggtatggttttagctaagccgggatcgattactccacataccaagtttgaagcaattatctatgtgttgaagaaagaggaaggtggaaggcattctccattctttgcagggtacaggcctcagttctacatgaggacgactgatgttacgggtaaagtgacgaagatcatgaacgacaaagatgaagagtcgaagatggttatgcccggtgatcgagtgaagattgttgttgagcttattgtgccggtggcttgtgaacaagggatgaggtttgctatcagagaaggaggaaagactgttggtgctggagttattgggacgatcctcgaatgattataaggttttagagagtttcatatagtgagcatctctacttgctttctttttgtttcactcttgattctcaaactctttgagtttttacctttttttatttatttttgtgccattttccataagaacttgaaatcaaaatgtcatatatttcttgattttctgatccttgtttttcatcttacaaaaaagggcggccgctttagaggatcccagcttaaggaagggtgcaagcgacgtca

SEQ ID NO: 93437 - DNA, 1186 bp, Arabidopsis thaliana columbia
  unsure (1)..(1186): unsure at all n locations
cccaagcgtccgccctcctccaaacaaatttcaaaccctagcttctcgatttctctcctctgctctccaattccatcttcccatggcgatttcggctccagccgcttgttcttcctcctctagaattctctgttcctactcctctccttctccttctctctgtcccgccatttccacctctggtaaactcaaaaccctaactctctcttcctccttcctcccttcttactcattaaccaccacctccgcttctcaatccactcgtcgctccttcaccgtccgcgccgctcgtggaaagttcgagaggaagaagcctcatgtcaacatcggaaccatcggtcatgttgaccatgggaaaactactttaaccgcagctctaaccatggctctcgcttccattggttccagcgtcgctaaaaagtacgacgagattgacgctgcgccggaggagagagctcgtggtatcacaatcaacactgctactgttgagtacgagactgagaatcgtcactacgctcacgttgattgtcctggtcacgctgattacgttaagaatatgattaccggagctgcacagatggacggagctatcctcgttgtttccggcgccgatggtcctatgcctcagactaaagagcatatccttttggctaagcaggttggtgttcctgataatggttgtgtttctttaacaaaagaggatcaagtagatgatgccaagagtttgctagagctcgttgagcttgaaggttccgtgagcttctctcgtcttatgaatttaacggtgatgatattccgattatctctggttctgctcttttagccgttgagactcttactgagaatcctaaggttaagagaggtgatggcaaatgggtagataagatttgggaacgtatggatgctgttgatgattacatccctatccctcagaggccaaacctgaattgccattcttgttaagcttgttgagggatgtgttctctatcaactggaccgtggtaccggtggctacagggcgtgtcgagagcaggtccggttaaaggtaggagggcctgtagatttagtggggttgagggggcctaggggtacactgcacctggggtaaatntcaaaaggtcttattgggttncctggncattagggtttcttgggtcnaaggttatccangggntgttccnncnnc

SEQ ID NO: 93438 - DNA, 839 bp, Arabidopsis thaliana columbia
  unsure (1)..(839): unsure at all n locations
agtcacattctataaatatacgacaagagacgacctttggggctcgagaagctctctccaaaaacaaacgaaaagaagcgacttttgcctcttttggtctctccccttctccggagagatctgctctctctatctatctctcaatctgtaagaagaagattcccacttcagtaaaagccctaactttacttgggaaagttcttcatctatcatccttcaatcgtcatcatccatggctgatcaacaaaccctagattcctctactcctcctcctactcaatccgatgatctatctcactcccactctacttcctctactacttcagcttcttcttcctcagatccatcactcttgaggtctctctccttaagtcgactcaacgccggagctcctgagttcgttcctggtcgaactactcctccgctgcctcaacctccgaggatgattatcccgcctcctccgccgcacggtatgcttcatatgtatcaccaccagcctcctttcaatactccagttcttggtcctgttccaatccagccacacttggttcctgttcaaaatcaccaccctcatcatcgctttcatcagcatcatcatcacaatcgtcatcagaatcaggaaatatgtncccggtgaggattaangggggagtntcagcagcgtggtggtgtcggtggtgagcaggaaccgggttttggnttnaaaggaggattntncggggggggtcatagtaaggggggattttagnncggncaaggtgctnaaaatgggggttttnttttnttggttnaaaanagggtttcctnaaggtttttccnaaanggtttnacaagggggg

SEQ ID NO: 93439 - DNA, 395 bp, Arabidopsis thaliana columbia
ctatttctctttctctttctactatttctctcctgtggagaaactcaggagatagagagagagagagagaagagaagagagcatgtatgtttggttttataatctctctactcataccaaagatttgtctcagacccaccacttggacagagagaacccaagctcctttctctctttttctcgatctactccttcttaatctccttttttgaaacttgaagccactttcaacatcatccttaaacttttgttcccttattcacaatctcctgccacctctcatttctctagctacatatatgggttctattagaggaaacattgaagagcctatatctcagtcattaacgaggcagaactctctctatagcttaaagctccatgaggttcaaacc

SEQ ID NO: 93440 - DNA, 517 bp, Arabidopsis thaliana columbia
ggtgatttgacggcaaaagtcattatgattcccaatataaaatagtatttcaagggtgtctggaggggatttattagctgccagttctaaatttaatgttggttcgttcggcccatataaacttatacctgccactcctattaataaaaaaatagaacttcctgccgtgctctacacaaattttgtagccgaagacagacgtttctttccaccccacatggatgaaagtagataaacgggaagtaattctaattcccacatgatgttggaaagtagaagatcccgagaagaaaatgatcctatttgaccgctgtacattgctaacatcaggaaatgaaaaaatcgggaatcccgagtaactggaaaagccgctaaagtggctaaagtagtaataaaatcccgtcagtaaaatagttcctatagaaagtccatctattcccattctccagtaaaaatcaaaaaaatcgatccatttataatcttcggacagttgaattaatggatcgtccattttaaa

SEQ ID NO: 93441 - DNA, 660 bp, Arabidopsis thaliana columbia
  unsure (1)..(660): unsure at all n locations
aagtccaggatccgttatagaactaatacctataattataaaacccatatgagatacagaagaataggctattctcttttttaaattacgttgaccgggagatgttgaagctgcataaattatttggattgtaccgactaccaacaaccaaggagaaaacatagaatgagcgtggggtaataattccatattgattcgaaccaacccataggctcccatttttaataagattccagcgagaagcatacaggtactgtaatgtgcctcaccgtgggtgtcaggtaaccaagtatgtaaaggtataatcggtgatttgacggcaaaagcaataagaaatccaatataaaatagtatttcaagtgtaacaggataggatttattagctaagagttctaaatttaatgttggttcgttcgaaccatataaacttatacctaaaactcctattaactaaaacaaatagaatcttcctgccgctgtacanaaataaattattgtagccgaatacagacgttnntcttttccaccccacactcgccataaaacgtagaataaacggccacattcaattctaattccnncacatgatgaaaaaaaaaagtagaagactcccgagaagnnaaaataatcccctattcggacngcgtgggtcgcacccgg

SEQ ID NO: 93442 - DNA, 402 bp, Arabidopsis thaliana columbia
agttaagagatccagccatggataagagctccctcgtctctgatttcctctcctttctcaatgcttctcccaccgcttttcatgccgtcgacgagtcaaagagaccgcttttgaaggctgggtatgaacagatttcagagagagatgattggaaactcgaagccggcaaaaaatacttcttcaccagagattactccactattgttgcctttgccattggtcacaaatacgtagctggaaacgggttccatattattggagctcatactgatagtccgtgcctcaaattgaaacctgtatccaagataactaaaggtggatgcttggaggttggtgttcaaacatatggaggtggactgtggtacacctggtttgatcgtgacttgacttgtgcaagacgtg

SEQ ID NO: 93443 - DNA, 394 bp, Arabidopsis thaliana columbia
gcaggtggtcgttacccgaccgacttaaattcatttctcgaatttcgtggagcattgcatgcaaatatttctcatcaaaaagaaaaaaaagaaaagaaacagttgacatttattttattaaaattctattcctagagtataattttatcgtcaatgtctttcataaccagcttgaaatttttggcacgccttagacttttagataatgcttccttttataaataaaatctatcaataacataaatacctaataaatattagtaaccttgaatatatacattaatacatatggaaatgtcatcaataaaaatactataaaaatagattcttaaatttattttgtatctaaaataatataaatacattaaactaatatgtattggttgatagtatc

SEQ ID NO: 93444 - DNA, 751 bp, Arabidopsis thaliana columbia
  unsure (1)..(751): unsure at all n locations
ttttgccccccaaaagnaaaaaaaanccaggatnnccctttccngggnnnaaaacccnagaatttnggnnccnncccggatgaacgggggcccggtctttaaaanccggggagcttttganacccttttattgncccaattcaaanaannaacatcctcaanccaaaaatgccttcaccgtaaaagcccttttgataacaaagagcaaccttctttgggaagcctctgcgcttgcccttcatgcaaaaggattcaatcccattaaggaaacccatctgcgcaggagctcctgcttcttcttgcatcatcatcaaggccaagagatatttcttcttcttgatcacctcttttgcgaatcccttgcctgtgcctccaaagagggcagagaataaggcgtccattttctcctgggggtttgctgagtttgaagctagggctgttttgagttgggtaggagatgaaccactgctcagaagctcctttatctcattcacaagcttttcatgagcattttcagggatcttgctattgccattctcatgcacttgttctggtgccttcttcacctcagctactggctttttttcttcaactgtagacagcatcaccatttcagctgttaccgcgctgagctgttctttcatacgtttctcagcagcctccctggaagtatctgtttgccactggacatcgtcatcatcttcttcactgtctgcttggtcattttcatcagacaggcttcgaggtggag

SEQ ID NO: 93445 - DNA, 956 bp, Arabidopsis thaliana columbia
agctctacacgactcactattgggaaagctggcacgcctgcaggtaccggtccggaattcccgggtcgacccacgcgtccgcgacactttcttctccaccaccaccatggatgatctctccaagcttctcttcttcctcctcctcactatctccattaccaccgcattacccgataaacccgggtcgggtcaaataaactcaaactccgtcctcgttgctcttcttgactcacactacacagaactagcagagctcgtcgaaaaagctcttcttctccaaaccttagaagaagctgttggtcaacacaacatcacaatctttgctcctcgtaacgatgccttagaaaaaaatcttgatcctgaattcaaatctttcttactccaaccgaaaaacctcaaatcattacaatctttattaatgtttcacattcttcccaaaagaatcacttctccacaattctcctccgccgtcgttagccaccgtactctctccaacgaccacctccatttcaccaacggaaaagtcaactccgctgaaataaccaaacccgatgatttaactcgtcccgatggagtcatccacggaatcgaacgtcttttaatcccacgttctgttcaagaagatttcaaccgccgtcgtagtctccgttcaatcgctgccgtattaccggaaggagcaccggaggttggatccaagaactcaccgtctcaagaaaaagccagcaccaattcccgccggagctccaccggttcttccggtttacgacgcaatgtcacctggtccgtcactagctccggctccggcaccaggaccgggtgggccacgccaccatttcaacggagaggctcaagttaaagattttatccacacgcttcttcattacggtggctacaatgaaatggcagatattctcgttaatctcacttctttagccaccgagatgggtcggctcgtg

SEQ ID NO: 93446 - DNA, 692 bp, Arabidopsis thaliana columbia
cgggactttgcaatatttgattgatcacaattcggtaaattccgtttactataggagttccaagggaattcattaaaggaatgtttccaataaaaattctttgttcttgcatattcctactggttttccaaattaatcccgcggatacatataattcagaagaatatgtaagtgattcatagacagcatctcgttcttttatcagaggttctaccaattgatatgtttccacaaataattgaaattcaatttcgtgatctatatcttcaatttttggaaacttagcaagttcttctattaaaccctgatcaataaaccgataaaacccttcaaattgtatctgattaaatccgggtattgcagatgttccctctttttcatccccaagcatcttttttgaatttcccatttatccgtttattgaaaaaatcccatcccatttctcattcttcaccgaatcatatccatagaattcgatctagcaataatggaatttctattctgtttactgaatcacatgaaattttatccaactccaagatatatggaatgtattaaatacgtatgaagggagactatattcaattggaattttttataagaaatagatccaaatggaacagaattgagaaataccgctggaacttacggagttttgtaaagactagaaaaaaaagtaatttcattttcac

SEQ ID NO: 93447 - DNA, 694 bp, Arabidopsis thaliana columbia
  unsure (1)..(694): unsure at all n locations
gtaagcctcaaaagattctgcaaacagagaggaacaatcgccacgaaagaagcttaagagactttttggtttcatttgtttagtgggcaaccaaaaagtcaagaccttttgctttccagttcgaagaatctggcgtgttcaggtggattgattcttgcgatctgacccttctcatgattagtttccgatcttcgaatagaccaactgcgagattctcatctataactccgntttcctattcgatttcttatctctttctaccatccaacgtgttcttcatacattacttcaattgctctcgatttcgcctcaaaatctgatcctctagtagcttgaagcaacccaaagtctcgtcctttacgttcaattaggtcattttgaaaccctgttcttagaattaggaagggaagaaatggctgatcgaaactgtttgatttcgttcgaggatcttccttctcatttgatcttggaggtgttgacctctgggaggcttagtgcggttgatctacttagcttggaattgacttctaaggttttcggagggagccatggattctatcctttgaaattcaggtccattagctgattatgcggcggctcagctttgccctatgcaccctgtctacgtgggaatgggtttgactacacagaaagagctctttgccaattgtgagggaaactggaagcggctttt

SEQ ID NO: 93448 - DNA, 1452 bp, Arabidopsis thaliana columbia
tactcctaaggtaaaggttcacaacaaaatagtttatattataagagttactttgaaaacaaaaaaaaggaaagtcatattttctcaattccaaaaaattgtataactggatctaatatatatgagttggcgatcagaatctatatggatagaatttataacggggtctcgaaaaacaagtaatttctgctgggcctttatcctatttttaggttcattaggattcttattggttggaacttccagttatcttggtagaaatgttatatcgttatttccgtcccagcaaatcattttttttccacaagggattgtgatgtctttctatgggatcgcaggtctctttattagttgctatttgtggtgcactattttgtggaatgtgggtagtggttatgatcttttcgaccgaaaagaaggaatagtgcgtatttttcgttggggatttcctggaaaaggtcgtcgcatctttttacgattctttatgaaagatattcagtccatcagaatagaagttaaagagggtgtttctgcccggcgtgtcctttatatggaaattcgaggtcaaggggctattcctttaattcgtactgatgagaattttactacacgagaaattgagcaaaaagctgctgaattggcttacttcttgcgtgtaccaattgaagtattttgaaatgaattaattaaatgctttggcagtaggaagaaaaaacgaaagaatttctttcttttttttttcaattgaatattcatctcttcttttatgctcggttttttgatatatttgatagaaaagaaaaggagtttatttgtctcgaaattagtattgatcgaaaaaggggggaataacatcccggaaaccccattttttcttgattcaagttggaagtgtattctgagtctgtttctgtattctttctagattcaaagcaaagactcagtattgaatcaacagcaaaagataaaatggattcataggctcactatattctattcgaattagaatagaaacacatgctcgatagaaatattagatctaatagaatcaacaaatgaggtaggttcattaacaactcacagattcaaaatggcaaaaaagaaagcattcattccttttttttattttctatctatagtctttttgccctggttgatctctctctgctgtaataaaagtttgaaaacttggattactaattggtggaatactagacaatgcgaaacttttttgaatgatattcaagaaaaaagttttctagaaaaattcatacaattagaggaactattccagctcgatgaaatgataaaggaatacccagaaaccaatttacaacaatttcgtctaggaatccacaaagaaacgatccaattcatcaagatacacaatgagtataatatccatacaatcttgcacttctagacaaatctaatatctttcgttattctaag

SEQ ID NO: 93449 - DNA, 408 bp, Arabidopsis thaliana columbia
  unsure (1)..(408): unsure at all n locations
atctcgcagaaaagattcatcccatctttaacccttgttgctttacagtgaccattaatgagtgtattaaacgttgagcagctcttggatacctttctcgcctgagctagtttgttctgcttgcagagtccatggatcattgagttataggttatagtatcggggactagacctctacggatcatctctgcatataatttttcagccctacctaacgagctgaatctgatcatcatattgtaagtttgaacatcaggttgcaatccactgatgaggagattagtgaatatattccctgcttcgtcaaacttaccagccttgcacagtccatggatgatgatgttataaccagctgtatccatatccatgttactctcccgcatgaccttaaacatnttcaaagccttt

SEQ ID NO: 93450 - DNA, 519 bp, Arabidopsis thaliana columbia
attaccagaaaaactaaagtgccctttctttcaagtacacatgcatacaagctagttcaaggccaagatcttctaatcatagaccttagacatttggtaaagaaaattgatacatacagattgtgaacatcatgtctccctcaagggactctttggtggacgctcttagtatgaaaggaggaacaggagaccatagttatgctactaattcacattatcagagaagtgttttctatgagatacaacctttggtcatagagaacgtaagagaaatgctactgaaaaatgggtttcctggttgcatcaaagtggcagacttgggttgttctactggacaaaacacggtgttggccatgtccgcaatcgcctacacgatcatggagtcataccaacaaacgagtaaaaacccaccagaaatcgattgttatttgaacgattcttccagagaacgatttcaataccaccttcaagttgtttcattctttccaagagaagctgaaaccggatgttaaaggaaag

SEQ ID NO: 93451 - DNA, 548 bp, Arabidopsis thaliana columbia
gtttgattagatatacccgttttactgttttctttgtccgagtgaaagtctgaagctttatatcttatgatgcttatggagagctctttgttctgttgtgtgctctattcctgataaaaccatgtgatgcttgctggttgatagcttcaattgattgggcctttccgttaattcgggatgttagcaactagcacagtaattgcaggtgaaggtggtgtcatggagttgatgttaatgagtgctttgccaagtcacttcttcaagataagagaacttctatcctttgttgaatcaggctctgggtgttattttcttcattttcttggcatggttgatattagtacaagaacacgctgaatctgacagacatattttcatggctagctagcttctcgccgctcatcatgtgtgcccaagttacactttatgaatcattctcaaagaaaaaaccgaacttgctgtcttgtatcttaagaggccgtagaagttagtatcttatgtgttgataagctgaatacttatgagtcatatatctatatattaatgcc

SEQ ID NO: 93452 - DNA, 745 bp, Arabidopsis thaliana columbia
cgccggtatcgatatgctggatatcgaattcgcggccgcctgaccagccttgtttcaagatccggaaccggttcgtcttcttcgctcaagcctccgggtcagacccgccccgtcaaggtcatcccgcttcagcatcctgacacctccaatgaagctcgtcctccttcgattcctttcgacgatatcttctccggatggacggcgaagatcaagcgcatgaggctcgtcgattggattgatactctctttccttgtttccgatggattcgaacttaccgatggagcgagtattttaagctcgatctcatggctggtatcaccgtcggtataatgcttgttccccaggcaatgtcgtatgcgaaactagctggccttccaccaatttacggtctatactcttcatttgtgccggtatttgtctatgccatatttggctcatcccgtcagcttgcaattggacctgtagcattggtttctcttctcgtctctaatgctttgggtggaatcgctgatacgaacgaggaattacatattgaattggccattttgttggcgcttttagttggaatcttggagtgcatcatggggctcttaaggtaatactactatttttggttagaattcacataaggaaaacgtttattatcttgactgctacttatatagcttgcctgtgtagtaactggtatccggtaaagcagaagtctcctaattttggtggggcatgttgcgtctccctttgttg

SEQ ID NO: 93453 - DNA, 2281 bp, Arabidopsis thaliana columbia
  unsure (1)..(2281): unsure at all n locations
aacggattctctaaagtgcgccaagcgtgcgcaagagccatcatgtcctacgcatctctcagcgtcaaggacctgaccagccttgtttcaagatccggaaccggttcgtcttcttcgctcaagcctccgggtcagacccgccccgtcaaggtcatcccgcttcagcatcctgacacctccaatgaagctcgtcctccttcgattcctttcgacgatatcttctccggatggacggcgaagatcaagcgcatgaggctcgtcgattggattgatactctctttccttgtttccgatggattcgaacttaccgatggagcgagtattttaagctcgatctcatggctggtatcaccgtcggtataatgcttgttccccaggcaatgtcgtatgcgaaactagctggccttccaccaatttacggtctatactcttcatttgtgccggtatttgtctatgccatatttggctcatcccgtcagcttgcaattggacctgtagcattggtttctcttctcgtctctaatgctttgggtggaatcgctgatacgaacgaggaattacatattgaattggccattttgttggcgcttttagttggaatcttggagtgcatcatggggctcttaaggcttggatggcttattcgtttcattagtcactcagtcatatctggatttacaagtgcttcggccattgtgattgggttatctcaaataaaatatttcctggggtatagcattgcccggagcagcaagattgtgccaatagtagagagcataatagctggagctgataagtttcagtggccacctttcgtgatgggatctcttattctggtgattcttcaagtgatgaaacatgtgggaaaagccaaaaaggaacttcagttcttacgagcagcagcgccactcaccgggattgtgctcggtacaaccattgcaaaagtgtttcatccgccttccatctctctggtgggagaaatacctcagggccttccaacattttctttcccaagaagttttgatcatgcaaaaacgttgcttccaacatcagctctcattactggtgttcccatcttggaatctgtgggaattgccaaagcgcttgccgcaaaaaacagatatgagttggattcaaattcagatttgtttggtcttggtgttgcaaatatattggggtcattattttctgcatacccagctacaggatccttttctaggtcagctgtgaataatgaaagtgaagctaagactggcctatcagggcttataacaggaatcatcattggatgttctctactgttcttgacaccgatgtttaaatacataccacagtgtgctttggcagcaatagtgatatctgccgttagtggcttggtggactatgacgaagctattttcctctggcgtgtggacaagagggatttttcgctttggaccatcactagcaccataacattgttcttcggaatagagatcggtgtccttgttggtgttggtttttcactagcattcgttatccacgagtctgcaaaccctcacattgctgtcttggggcggcttccaggcaccactgtgtacagaaacataaagcagtatccagaggcttacacatacaacgggattgtgatagttcgaatcgattctcctatttactttgccaacataagttacatcaaggacagactacgagaatatgaagtagctgttgacaaatacacaaaccggggactggaggtggatagaataaattttgtaatcctggaaatgtctcctgttacacacatagattcgagcgcagtggaagccttgaaagaactgtatcaagagtataaaacaagggatattcagctagcgatatcaaacccgaacaaagatgttcacttgacaatagcaagatcaggaatggtggagctagttggcaaggaatggttctttgtgagagtacacgacgccgtacaggtgtgtctacaatacgtacagagctctaacttggaggacaagcatttaagttttacgagacgatatggtgggagcaacaacaattcatcctcctccaacgcgctgttgaaggagccattgttatcagtggagaaataaaggatatgtaatgtaagtaatagctgtgtatagtttgttgcgattttgtaaaaacagtatacaatcttcattgtatcacctatataacaacattcttactcttcttttcccacaataaaaatagaccttgatgacctagaggatccaagcttacggacgcgtgcatgcgaagtcatagnnn

SEQ ID NO: 93454 - DNA, 725 bp, Arabidopsis thaliana columbia
tagataaaaccgccatggccaccggtttaggcttctttaagctctccttcctccttagcctcctctccggtggatcagacctattaggtcccgatgccgaatccggagtcgcccaaattgggaagttcccgccgtcgtgtaacagaatcgaatgcccgagctacgagctggttcactccggaaatggatacgaaattcgccggtacaacaacaccgtctgggtttccactgaaccgattccagatatctctctcgttgatgctaccagaaccgctttcttccaattgtttgcatacattcaggggaagaacgagtatcatcagaagatagaaatgactgctccggttatctctcaagtctcaccaagcgacggtccattctgtgaatcttccttcactgtatcattctacgttcctaaaaagaaccagcctgatccagctccgtcggagaatctccacattcagaaatggaactctaggtacgtggccgtgagacaattcagtggattcgtgtctgatgatagcataggagaacaagcggcggcgctagactcgagcctcaaaggtacggcttgggctaatgcaatagcgaaaagcaaagaagacggtggtgttgggtcggattcagcttacacggtcgctcagtataactcacccttcgagttctccggtcgggtcaatgagatttggttaccgttcgagctcgatgtttaagctctgcttagt

SEQ ID NO: 93455 - DNA, 514 bp, Arabidopsis thaliana columbia
catcagtcatcactacgaatggatcttacgtttgatcatagttttgtgaaggttaatggaatcactatgcacgtcgccgagaaaagcccctccgtcgccgggaacggagctatccgacctccggtgatactattcctccacggatttccagaactttggtacacgtggcggcatcagatggtggcactatcttcgttaggttaccggactatagcgccggaccttcgtggttacggagacaccgacgcgccggagagtgtggacgcgtacacaagtctccacgtggttggagatctgattggattgatcgacgccgtggttggagatcgggaaaaggtgttcgtagtgggacatgattggggcgctattatcgcttggcatctttgtctttttcgaccggattgggtttaagctttggttaacatgagtgtggtgtttgatccttggaattctaaacggaaaccaaccttgacgtttaaaggctttttatggagatgactactacatctgcaga

SEQ ID NO: 93456 - DNA, 1330 bp, Arabidopsis thaliana columbia
ggagtccaaaagaggagaagaaggaagcttgttctttgaggagattcaaaggatcgtgttgctttctgtatttaaaaaccctagagttcatcatcatcttcctctcattattgattgctctaatcaggttccgacgagactaataatcctttctcagatcgataacaatgtctcactctgctgtttctcaggctggtgctgtctcagtttcaattgaaaaccaacgttctcttagaagatccgtcttcaagcagaacaatagcataagcttcaacagcaagtcatggtcatcttctttagcattgaaccagaagacaacaagcataagagatgggaaacggtacccgagcacgacaatatgtatgtcggttcaacaaacaagtagttccaaggttactgtctctcctatagagttggaagaccctaaggatcctcctttgaacttgtacaaacccaaggagtcttacaccgctaagattgtctctgtggagcgagtagttggcccgaaagcccctggagaaacttgtcatatcgtcatcgatcatgatggtaaccttccttactgggaaggacagagttacggtgtgattcctccaggtgagaacccgaagaaaccgggagcgccacacaatgtgcgcctttactcaattgcatcaacaaggtacggagatttctttgacggtaaaacagcgagtttgtgtgtacgtagagctgtttattacgaccctgagactggaaaagaagatccttcaaagaacggagtctgcagcaacttcctatgtgattcaaagcccggtgacaagattcaaatcaccggtccatctgggaaggtaatgctattacccgagagtgatccaaacgcgacacacataatgatagccacgggaacaggagtggctccatacagaggctacttacgtcgaatgttcatggaaaacgtcccaaacaagacatttagcggcttagcttggctcttcttaggcgtggccaacaccgatagccttctctatgacgaagagtttaccaagtacctaaaagaccatccagacaactttaggttcgacaaggcattgagcagagaggagaagaacaagaaaggtggaaagatgtacgtgcaggacaagattgaagattatagtgatgagatcttcaagctttttggacaattggagctcatatttactttctgtgggccttaaagggatgattgcctgggattccagggacccctttgagagttgcagaagagagaggtgagagctgggacttgaagctttctcagctcaggaagaacaagcagtggcacgttgaagtctattgagctctttat

SEQ ID NO: 93457 - DNA, 417 bp, Arabidopsis thaliana columbia
agaggattcaattcctgcagctgagtcacagtttgaggttcggaaagttgtcgaaggggacagtgctgaagaggatgaaaacaagctcccagtcgaagacattgtttcttctcgtgagtttagctttggaggcaaggaagtggaccaggaaccttctggcgaaggtgttaccagggttgatgggtctgaaagtgaagaagaaactgaagagatgatatttgggagttctgaagctgcaaaacagttcttagcagagttggaaaaggcttcttctggtatagaggcacattctgatgaagcaaacatttctaacaatatgtcagataggattgatggccagattgtcaccgattctgacgaggatgtagacacagaagatgaaggtgaggagaaaatgtttgatactgcagctttggc

SEQ ID NO: 93458 - DNA, 1220 bp, Arabidopsis thaliana columbia
  unsure (1)..(1220): unsure at all n locations
aggtctcnnnnnnnnnnnnnnnnnnnnnnnnnnnnnnnnnnnnnnnnnnnnnnnnnnnnnnnnnnnnnnnccacgcgtgcgccagattgtcaccgattctggccatcaatcctatctgacatattgttagaaaggattgatggccagattgtcaccgattctgacgaggatgtagacacagaggatgaaggtgaggagaaaatgtttgatactgcagctttggctgcgcttttgaaggcagccactggtggtggaagttcagaaggtggcaattttaccataacatctcaggatggcacgaagcttttctctatggatcgacctgctggtttgagttcatcgttaaggcccttgaagcctgcagcagctccacgtgcaaaccgttccaacatcttttccaattctaatgtcacaatggcagatgagactgagattaacttgagcgaggaagagaaacagaaattagaaaagttgcaaagcctccgtgtgaagtttttgcggcttttgcaaaggttgggtcattcggcagaagattcaattgcagcgcaggttctttaccgtcttgcactacttgctgggagacaaacagggcagttattcagtcttgatgctgcaaagaagaaggctgtggagtctgaggctgagggcaacgaagaattgatcttctccctaaacatactggtccttggaaaagccggggtgggaaaaagtgctactataaattccattttgggaaaccagattgcgtccattgatgcttttgggctctcaaccacttcggttagagaaatttctggaacggcgaatggtgtcaagattacctttattgatactccgggtttgaagtctgctgcgatggatcaaagtacaaatgcaaaaatgttgtcctctgtaaagaaggtaatgaagaagtgtccccctgatattgtactatatgtagatcgtcttgacacccagaccagggacttgaacaatttgcccttgctaaggacgattactgcttctcttggtacatccatatggaaaaacgctatagtgacattgacccatgcggcttctgcccctcctgatggcccatctggcaccccattgagctatgatgtgtttgtagcgcagtgctcacatattgtgcaacagtctataggacaggctgttggagatctacgcttgatgaatccaaggctgatgaatccagttttacttgttgagaatcacccctt

SEQ ID NO: 93459 - DNA, 780 bp, Arabidopsis thaliana columbia
  unsure (1)..(780): unsure at all n locations
ttggcaatngcgaccgggccttccctcgaggtcgacggtatcgataagcttgatatcgaattcgcggccgcggaaccttctggcgattgtgttaccagggttgatgggtctgaaagtgaagaagaaactgaagagatgatatttgggagttctgaagctgcaaaacagttcttagcagagttggaaaaggcttcttctggtatagaggcacattctgatgaagcaaacatttctaacaatatgtcagataggattgatggccagattgtcaccgattctgacgaggatgtagacacagaggatgaaggtgaggagaaaatgtttgatactgcagctttggctgcgcttttgaaggcagccactggtggtggaagttcagaaggtggcaattttaccataacatctcaggatggcacgaagcttttctctatggatcgacctgctggtttgagttcatcgttaaggcccttgaagcctgcagcagctccacgtgcaaaccgttccaacatcttttccaattctaatgtcacaatggcagatgagactgaaattaacttgggcgaggaagagaaacagaaatttgaaaagttgcaaagcctccgtgttgaagtttttgggggctttttgccaaaggttggggtcatttcgggcagaaagaatttcaattttggcagcggcaagggtttctttttaacccggtctttggcacctaactttgccttggggaagaacaaaagcctgggggccaagtttattttcaagttctttgggatggccttg

SEQ ID NO: 93460 - DNA, 555 bp, Arabidopsis thaliana columbia
ccggacccccccttgagggcgacgggatcgattagcttggtttcgaattcgggggccgcttaactttttttttggaaaccttaccggcggcttttttttaagtcttcattggaaaggcttaattccgccacccaaggtggtggcaaaaattaaggccattaagcctttggaggaagggcagaagaaagcctggagaatgatatttgccaccaaggggagtcttagaaggcaaaataaaggacgtgatggctgctgtccagaaggaaaaagcctgtgaagaaggttcctaggaaggtggaaagctctgatgattcagattctgaatctgaggaagaggagaaggctaagaaggtcccagccaagaaggctgcttcacgcagtgatgagtcatctgatgactcttcttcagatgatgaacctgcacccaagaaggccgttgctgctactaacggaactgttgcaaagaagtctaaggatgactcatcatcatctgatgatgattcttcagacgaggaagttgctgtcaccaagaagcccgcagctgctgctaaaaat

SEQ ID NO: 93461 - DNA, 781 bp, Arabidopsis thaliana columbia
taatacgactttctatagggaaacctggtccgcctgcaggtaccggtccggaatttccgggtcgacccacgcgtccgtccgctagggtttttcgcctctttctcaactctcttctcgaaaacctagcagtcgtctctttctcagttctccatgggaaagtctaaatccgccaccaaagttgttgcagagattaaggccactaagcctttgaagaaaggcaagagagagcctgaagatgatattgacaccaaagtgagtcttaagaagcagaagaaagacgtgattgctgctgtccagaaggaaaaagctgtgaagaaggttcctaagaaggttgagagctctgatgattcagattctgaatctgaggaagaggagaaggctaagaaagtcccagccaagaaggctgcttcaagcagtgatgagtcatctgatgactcttcttcagatgatgaacctgcacccaagaaggccgttgctgctactaacggaactgttgcaaagaagtctaaggatgactcatcatcatctgatgatgattcttcagacgaggaagttgctgtcaccaagaagcccgcagctgctgctaaaaatggctctgtaaaggccaagaaagagagttcgtctgaagatgattcatcttctgaagacgaacctgcgaagaaacctgctgctaagattgccaagccagctgctaaggattcttcatcctctgatgatgactcagatgaggattccgaggatgagaaacctgctaccaacaaggcagctcctgctgctgcca

SEQ ID NO: 93462 - DNA, 440 bp, Arabidopsis thaliana columbia
aaaattggttatctataataatcatacatcaaaaattactgtgtttcataatctaatgtttagtacaattcaataaatttggttagaattgagaaatggtgatgcatatctctagttatttagaaaatttatattcggagcgaaatcgagctagattgtgaacagtataactagacctcataactagaataaatagataatgttgaaatatactttgaaacgaattagatgtgaaatgaaatgttccattgaagactttttattataagctacaaacttcacgtgaataatcttcaacatgtcagtcagacacacatgagacaacacaaaagtaccaccaaattcgtaattactccatggaagatggaacaaattcttcctttcatacatacacacaacatagggtacatagccaaagttactcatcatttattcttttt

SEQ ID NO: 93463 - DNA, 529 bp, Arabidopsis thaliana columbia
gaacaacacgcgccagatcctttagttgtaaatccccatttttattttcttaaacccaaagaaagaaaaaaaaagaagagaaacggccgaatcttcataaattccgccatctgttaagctcaatcgccgcctaaactccggcgactctctcgaagatatttggtgattgaggtgactcggaagagagtgagagagagagatggatgatagaggaggatcgttcgtagcagtgagaaggatttcacaaggtctagaacgaggaagtgtttatcattcttcttctgctgaggttgtagctggatcggcagcgtggttaggccgtggcctttcctgtgtttgtgttcagggtagagacggtgaccctcgtccttcatttgatctaacgcctgctcaggaggaatgcctgcagaggttgcaaagccgcattgatgttgcctatgacagctcaatacctcagcatcaggaagctctaaaggatctttggaaacttgcatttcctgaagaagagctacacggaattgtatctgat

SEQ ID NO: 93464 - DNA, 507 bp, Arabidopsis thaliana columbia
  unsure (1)..(507): unsure at all n locations
cggaaagagtctgttgaatcaaccaagaaagagagaaaacggaagaagcctaaacacgacgaagaagaagtcccgaatgagactgagaaacccgagaagaagaagaaaaagaagagagagggaaagtctaaaaagaaagaaactgagacggaattttcaggagctgagctatatgttacatttggtcctggttcaagtttgcctaaaaaggaagatctgattgaaatatatgaaaaatttggagctttggacaaagagagaactgatacggtcgacaacaacttctctgcccatgtggctttcttggatgtagctgatggagaaaaagcctttgaatcctcactagagaaatgtccgtttacttctaattcgacggtgaaattcagactcaagtatccaaatgagagaacagaggagaagaaaactgaagctgaagttgcagagacgacaatggaggtggaatatctgaagaaaaagctggatgagatgaaattgtactngatggat

SEQ ID NO: 93465 - DNA, 420 bp, Arabidopsis thaliana columbia
atttttcataagcataatcactcaaccaaatactgatattctaatttctaagttaatctgtttccaaagaattttatattcgtctcccaccaagtatagcatttgcttttattttctgtgagagaaaaatacccttaaacacccctaaaccggcacctttattatcagattactttgcacaactttagtttcccgttcgaactataactccaacccagaatggcaaccgtccaaaagttacccaaaaaaggttataaaagatttcatttcctaatatatggtctagggagaaagaaacaattagataccaaagagggctcgtaaggagaaaaacaaaacgtgtgttagcacagcatggaaattgtctgacctttttaatattttgcagtaaactattagttccattgctctgcatcatat

SEQ ID NO: 93466 - DNA, 407 bp, Arabidopsis thaliana columbia
gttagtaccagtttataattgaaaatcagccaataatgtaaaagaaaagcatctcaaacagaggagaagaagacaaggctataaaaaaagagaccaagttgtgggactttggagctaaaatgggtcatcgaaagatagcaacttgtattgattcgtgggtccagtgacagtgtaaattgaaggaaggttcgtagtagcccaccacagcttaaaataatttttttaaaagattgtgcacttaatggttatggtacatccctctcacgtcctactcaactacacacacttgtcacgtgacagtgtcacggtgacactctgtaatctgtacaattaagtagactgacgcgtgtggctttcaagcgtaagtaaaagtatctcttctggggccaacccaaatcctgctacaa

SEQ ID NO: 93467 - DNA, 1259 bp, Arabidopsis thaliana columbia
  unsure (1)..(1259): unsure at all n locations
nnnnnnnnnnnnnnnnnnnnnnnnnnnnnnnnnnnnnnnnnnnnnnnnnnncccacgcgtccgctccttctggctctctctcttcctaagtttcctctctctttagaactgtagagagagaaaagcctccatttttctcaaggcaatctctctctctctgcctcatctcataaacccattacaccaaaacctcatcgtagagagagaaacacaccaaccattgttacactctaagagaagagaagagagaaggaaaaatggacggtgtatcaccaaagtttgtgttgccggagacattcgacggcgtgaggatggagatcacaggccaactaggcatgatctgggagcttgtaaaagcaccagtgattgtccctcttcttcaattagctgtttacatctgtttgcttatgtctgtcatgcttttatgtgagagggtttacatgggaatcgtcatcgtcctcgtcaaactcttctggaaaaaaccagacaaacgttacaagttcgagcccattcacgatgatgaagagcttggtagctccaatttccccgtcgtcctcgtacaaatccccatgttcaacgaacgagaggtttataagctatcaataggagcggcgtgtggactttcctggccgtccgatcgtctcgcgattcaagtgttagatgactctacagatcctactgttaagcaaatggtggaagtggagtgtcaaagatgggcaagtaaaggaatcaatattaggtatcaaataagagagaatagagttggttacaaagccggtgctttaaaggaaggactcaaacgtagttatgtcaagcattgcgagtatgttgtcatcttcgacgccgattttcagcccgaacctgattttcttcgccgtagcattcctttcctcatgcacaatcccaacattgccttggttcaggctcgatggcggttcgtaaattctgatgagtgcttattgacgagaatgcaagaaatgtcattggattaccatttcactgttgagcaagaagtgggttcatcaacacatgcttttttcggcttcaacggaaccgccggaatatggagaatagcggcgataaatgaagctggtgggtggaaagatcggaccaccgtggaagatatggatctcgccgtccgagcaagtcttcgcggctggaaatttctctacctcggtgaccttcaggtgaaaagtgagcttccaagtacttttagagccttccgttttcagcaacatanatggtcttgtggacctggc

SEQ ID NO: 93468 - DNA, 369 bp, Arabidopsis thaliana columbia
atctctacaacttcaagatttttggttccacattgatatcttggtccctgaagctgtcaaagtgggcacctggtccgcttggtcctgagctcagatggatctgcatccaccaggtggttcaaaaaagacatctgtagttgttgtcaccttagacactggtgaagtctatgtcattgcaagtttgttatctaaggctgatactcaagttatctatatcgatcctacgactggtatcctgcggtacaatgggaagcctggtcctgataattttaagtcagagcgtgaagccttagattatattacgaatggatcaagaggaggtgttagaagctctgtttatgccagggcaatactcggttatgctgtctt

SEQ ID NO: 93469 - DNA, 372 bp, Arabidopsis thaliana columbia
ggaagcatcctttctgtcttcagtttatcctcaggtttttcttcatcccatttcaattatcggtggaagcatgcctaggcattaacttattttcttgttccttaaggtttaccttgatttcggcttggcggttccaaagcttagtgtccatggtatggtttcttcagttaaagagctccttgacttagcatcaataaagaaggtaaaatgtattttacttgcattatctttgttattgttcatgagtaaccataagatattattgcaggttatgttcagctctgatggggatgcatctcctgagaccttctattttaggttagctctagtttctacctcttttctataggttgtaacttatcttatttttgt

SEQ ID NO: 93470 - DNA, 471 bp, Arabidopsis thaliana columbia
gccagcactatacgactcttatagggaaagctggtacgcctgcaggtaccggtccggaattcccgggtcgacccacgcgtccgtacggctgcgagaagacgacagaagggtacggctgcgagaagacgacagaagggtacggctgcgagaagacgacagaagggtacggctgcgagaagacgacagaagggtacggctgcgagaagacgacagaaggggtctgaagccgtgtcctagggttttctttgcacactactcgctccaatgggaaagggaacagggagtttcggtaagaggaggaacaagagtcacacactctgtgtgagatgtggtcgtcgtagtttccacatccagaagagtcgttgctcggcttgtgcttacccagctgctcgcaagaggacttacaactggagtgtgaaggccatcaggaggaagactactggtaccggaaggatgaggtatctccgtaat

SEQ ID NO: 93471 - DNA, 669 bp, Arabidopsis thaliana columbia
  unsure (1)..(669): unsure at all n locations
nnnnnnnnnnnnnnnnnnnnnnnnnnnnnnnnnnnnnnnnnnnnnnnnnnnnnnnnnnnnnnnnnnnnnnnccacgcgtccgaaagatttctgtagagcaaactttgatcatcccctgcatctgcggcaatgggtaaaggaacagggagctttggtaagaggaggaacaagtcacacacgctctgtgtgagatgtggtcgccggagctttcacatccagaagagtcgttgctcggcatgtgcttatccagctgccagaaagaggacatataactggagtgtgaaggcaataagaagaaagacaacaggaactggtaggatgaggtatctccgtaatgtccctcgaaggttcaagacttgctttagagaaggtacgcaagccaccccaagaaacaaagctgcagcttcgtcttcctaggcattgttcagtttgcgttttgccatctctttcttgctatgtagcttttttttttaattcgtttgtttatcttttttgctcttgtacttcctttactgtgcaatcctatttctgatagtgtgatcactcatcaatgaaatgcatccgtgctattactgtttaaaaaaaaaaacaaagnnnnnnnnnnnnnnnnnnnnnnnnnnnnnnnnnnnnnnnnnnnnnnnnnnnnnnnnnnnnnnnnnnnnnnnnnnn

SEQ ID NO: 93472 - DNA, 651 bp, Arabidopsis thaliana columbia
  unsure (1)..(651): unsure at all n locations
cccacgcgtccgcccacgcgtccgcccacgcgtccgcccacgcgtccggtatcctagggttttctttgcacactactcgctccaatgggaaagggaacagggagtttcggtaagaggaggaacaagagtcacacactctgtgtgagatgtggtcgtcgtagtttccacatccagaagagtcgttgctcggcttgtgcttacccagctgctcgcaagaggacttacaactggagtgtgaaggccatcaggaggaagactactggtaccggaaggatgaggtatctccgtaatgttcctcgtcggttcaagactggattcagagaaggtactgaagccaagccaaggagcaaggcatcagcttcatcagcttaaagagccagttcgagtagtctctccaggaaggactaaagcttagcattttttgcattcaactagttgaagattacttttcatgtggatctcatacattatgttatgtgggttttgtttcttttgttattcacttataaagttttgaacttggtttaaatatcatcttccctttgtaacctttaaaatnnnnnnnnnnnnnnnnnnnnnnnnnnnnnnnnnnnnnnnnnnnnnnnnnnnnnnnnnnnnnnnnnnnnnnnnnnnnnnnnnnnnnnnnnnnnn

SEQ ID NO: 93473 - DNA, 784 bp, Arabidopsis thaliana columbia
  unsure (1)..(784): unsure at all n locations
nnnnnnnnnnnnnnnnnnnnnnnnnnnnnnnnnnnnnnnnnnnnnnnnnnnnnnnnnnnnnnnnnnnnnnnnnnnnnccacgcgtccggaagacgacagaagggtacggctgcgagaagacgacagaagggtacggctgcgagaagacgacagaagggtacggctgcgagaagacgacagaagggggaagccggaaaccttaaggttttatatctgggaaaaaactcgcatccgcttcaatgactaagggaacgggaagtttcggaaagagaagaaacaagagtcacacactctgtgtcagatgtggccgtcgcagtttccacatccagaagagtcgttgctctgcttgtgcttatcccgccgctcgcaagaggacttacaactggagtgtgaaggcaatccgtagaaagactactggaactggaaggatgaggtatcttcgcaatgtgcctcgcaggttcaagaccggtttcagagagggtaccgaagccaagccaaggaacaagggagttgcttcatcagcttaaacttgtttttgagcatcaagggagagagaattctgagtttgttgttcacaagattactactcttaagtgtctgattatgactatctttttgtgtggtctttgcgtttttaaagttttggacatggatggatttcaatttgcaagtcttttaattctctttattctaaaaaaaaaaaaagggggaccntttngggccnncgtttggncgggnannnnnnnnnnnnnnnnnnnnnnnnnnnnnnnnnnnnnnnnnnnnn

SEQ ID NO: 93474 - DNA, 399 bp, Arabidopsis thaliana columbia
aaacaaacacattcacattcttctttcttctcaaaaaaaaaaaaaaaaacacttgttcatttacatcaaaatgatcactgcagctctacacgaacctcagattcacaaaccaaccgatacatccgtcgtctccgatgatgtgcttcctcattctcctcctacgcctcgcattttccggtcaaagcttccggacattgacatccctaaccacctccctctccacacttactgcttcgaaaaactctcatctgtttccgacaagccttgtctcatcgttggctccaccgggaaaagctacacctacggcgaaacacacctaatctgtcggagagtcgcttccggggtatacaagttaggtatcagaaaaggtgacgtcatcatgatccttctccaaaactc

SEQ ID NO: 93475 - DNA, 453 bp, Arabidopsis thaliana columbia
ctctcatcttcttgctcctttctcttctctctcacgcgttgctgttgttgactcttatttctctctgggtttccttaaaccttccgctacaatcttctcctcttacatgcgagcttctccgattctcaggttttgatagcggcttaatactcgcaattatggatttcgcagccaagaaattcatcaacaaccccaacgatgttgtaactgagttcatagagggtctggtagaaacttatcctggactccagtatttggatggttttcctgaggttaaggtggtgctacgagctgatgtctcggctgcaaaatatgacaaggttgccgttatctcaggtggaggcagtgggcatgagccagcacatgctggatacgttggagaaggaatgctaacagctgctatttgtggagatgtctttgcctccccaccagttgattctatccttgctggaa

SEQ ID NO: 93476 - DNA, 693 bp, Arabidopsis thaliana columbia
cgcctgcacgtaccggtctctccattcccggcccaacccacccaagaagagactctttgtgataaaactaagtaagaaatagcataaaagtaaaagggaatgtcgagtgaggagttgaggctggtttcgccgacgatagacaacgatgggaagttgccgagaaagtatacgatggcaggtcaaggtgttaagaaagacatctctcctcctcttgaatggtacaacgttccagaaggtacaaaaacgctagctttggtggtggaagacatcgatgcgcctgatcctagtggcccgctggtgccatggacggtgtgggttgtcgtcgacataccaccagacatcgaagggcctaccggaaggatattccggcaatgaggatcagactaccggtattcgggaagggaacaacgatcacaagattccgggatggcgtggacctctcttacctagtcacggtcaccgttttcagttcaagctttttgctctcgatgataaacccaagattggtcacacggtgacgaaagagagattgctgatcgcaattgaagggcacgtgctaggagaagccatcttgactgtgtttggcctaaaatatgtcgttcgtcgttatagtcataacaccgttggatatgtatcatagttaataattccatatatcgtattgaggattatcaatgaaataattctagtttc

SEQ ID NO: 93477 - DNA, 562 bp, Arabidopsis thaliana columbia
  unsure (1)..(562): unsure at all n locations
gtccgttcggaataaccccccttttgctggattattaccaatataatcataaaaagctaattgtgcaggaattttcgcccaagcttctgataaactttgattttcagccagtccagcactaactcttcgatatatttcttgttgaaaggatccctgatcccattgataacgagtaggaccaaataattcgatgggagtagttgcagaaccataccacatagttccagcaacaacaaaagctgcaaaaaagacagcagcaatactactggaaaggacggtttcaatattgcccatacgtaatcctttgtatagacgttgaggcggacgaacactaagatggaataggcccgctaatatacccaacgtccctgctgcaatatgattagaggctattcctcccggaanaaaaagggttaaaaccctccaacgccccacgccgggtttacgggttgtacctttccggttagtccatnagggtnggatacccatattccaggaccatataatcctgttacattaaatgcgcaaaaaccgangcaagccactccttaaaggnatnaat

SEQ ID NO: 93478 - DNA, 578 bp, Arabidopsis thaliana columbia
aaaaaaggcgcgaactcaaaaaagaaataaataaaaccataatcatagaaatagagaatcctttttttagttttgtctcgtcaaaacaaatacacaagtaaaagatcttttttattttattttaatagcctggcctggtcagtccccagccgggcctttttttgttaaaattaaaaagactcatccgatggatttttagataaaaaaagatttgaaattaaaaaaaaaagtggaattgaattcgcttttactaattttcttaagtcaactctagttttttctaaattttttcagatttttttattacacccccgattactttgttcgacaaaaggttaatttatatgcaataattgcattgtagcgggtatagtttagtggtaaaagtgtgattcgttcctttaatccctttaatagttaaagggtctctcggtttgattaatcttccgatcaaaaattttatttcttaaaaggatttagtcctttccctttcaatgaaagattcaaggaagattatagattctcgtaatttatatccaaagactctaatcaattgtaaatttggattatgaaattcc

SEQ ID NO: 93479 - DNA, 951 bp, Arabidopsis thaliana columbia
  unsure (1)..(951): unsure at all n locations
aacaatgtactatattcataatattggataaatatgtcctatcaccttctataacactttcattaagcattattaagtattttaacgatacttaaaattaatctaatatcaccttaanctcaaggccaggcaagcnnnaanaattttttttccctttcataannnnnnnnnnnnnnnnnnnnnnnnnnnnnnnnnnnnnnnnnnnnnnnnnnnnnnnnnnnnnnnnnnnnnnnnnnnnnnnnnnnnnnnncggccgccatggctctcagcctttcaaggctttgcggagaagtttggagatattgggagctttgggtggtttcgctttgaaattggggattgaccagaagcagggcaacttagagaagaacatgaagaagagagcaatcgagctccggcggatcttcactcgtctcggacctacttttgttaaattgggtcaagggttgtccacccgacccgacctctgtccacccgattaccttgaagaacttgcagagcttcaggatgctttgccaaccttccctgatgcagaggcatttgcttgcattgagagagagttggatttgtcgctagagaccattttctcgtctgtatctcctgagccaatcgcagcagctagtcttggccaggtttacaaagctcagctgaggtattcaggtcaggttgttgctgtcaaagttcaacgccctgggatcgaagaagccattggccttgatttttaccttattagaggagttgggaaactcattaacaagtatgtagacttcatcactaccgatgtccttacccttatcgatgagttcgcctgcagagtttatcaggagctaaactatgtccaggaggcccaaaatgccagaaggtttaaaaaattgtatgcagattaagcagatgttcttgtgcctgatatattctgggattacacgagccgcaaggtgctaacaatggaat

SEQ ID NO: 93480 - DNA, 486 bp, Arabidopsis thaliana columbia
tgcggttgagtcagaaatggaggtcctctcacggttaagacgtgatgcagaagagaagctggaggatttgatgagtaacaaggcagagataacctttgagaaagagagggttttcaatcttcgaaaagaagctgaagaagagagccagcggatttcaaagttgcagtatgaattggaagttgaacgaaaagccttgtccatggccagatcgtgggccgaggaggaagcaaagaaagctagagaacaagggagggccttagaagaagctagaaagcgatgggaaacaaatggactgagagttgttattgacaaagaccttcaagagacgagcagcagagagacagaacaaagcatagtactaaacgagatggagagatcctcagttgaagaaactgagaggagagccaaaaccctgatggataagctgaaggagatggctggaaccgtgagtggaaagtcccgggaagtgatcttccctgtgatgga

SEQ ID NO: 93481 - DNA, 643 bp, Arabidopsis thaliana columbia
  unsure (1)..(643): unsure at all n locations
nnnnnnnnnnnnnnnnnnnnnnnnnnnnnnnnnnnnnnnnnnnnnnnnnnnnnnnnnnnnnnnnnnnnnnnnnnnncctcgcccacgcgtccgcaggaaagagagactccgttgatggctaccaccaccgtcgtatgcggcggaggaggagatgttgagggttgcgatggcgagagaagcctggatctgttaccggcggctctcttggagactattatgacgaaactcgatgttgcgtctctctgctcgttggcttctacttgcaaaacacttaagagctgtgtcactcgtgttctcaccttcactcccaacttccacatcttcaatgtttcattgtcaatggaaactgttagaccattgttgtttccgaatcaacaactttctagtctcaagcttgattgtggaaggcttggtaattcagctattgatatattggtacgtccttctttgagggagatttctcttcacaattgtcgggatttcagcggagatctcatctccgaaattggtaggaaatgcaaggatttgaggctcctatgtttgggttcagtagcagagaaagttggtcgaagtattagccgttgtgctttggaggatttacttaatggttgctcccatttagaggtcttagcactcatgtttg

SEQ ID NO: 93482 - DNA, 389 bp, Arabidopsis thaliana columbia
cgtccgaaacgatttttatgttgcagtccttgaacagttggctctcttttcaagaatcgtggccggggacctccgtgcctgggcgatcaacttcccattcttttaaatgacgagagattcatcaaggaacagctcattaaagccatggcctcgaaagaattttctttttccttctgttgtgattgtcattgttgggataatcgtggcgtttacttatcagtccaagttgaaaccacctccgccgaagctatgtggctcctccggtggtccaccgatcacagcgccgcggataaagcttcaagatgggaggtatttggcttacaaagagcatggacttccaagagagaaagctaaccgcatattcgtattcatccatggatcccgattgt

SEQ ID NO: 93483 - DNA, 1825 bp, Arabidopsis thaliana columbia
  unsure (1)..(1825): unsure at all n locations
cnnnnnnnnnnnnnnnnnnnnnnnnnnnnnnnnnnnnnnnnnnnnnnnnnnnnnnnnnnnnnnnnnnnnnnccacgcgtccgagaaaagcgacgccgttttaaaggagatggataaacaaccggcgaccagttggagtatccatacccggccggagataatcgccaagtacgagatcttcgagcgagtcggatccggagcttacgccgacgtttacagagctcgccgtctctccgacggtctaatcgtcgcgctcaaggagattttcgattaccaatctgcgttccgggagattgacgcgctcaccatcctcaatggatctcctaatgtagttgttatgcacgaatacttctggcgtgaggaagagaacgctgtgcttgtgcttgagtttcttaggtcggatctcgctgcggtgatccgagatggtaagaggaagaagaaggtagaaggaggggatggattctcggttggggagattaagagatggatgattcagattttaaccggtgttgatgcttgtcatcggaatttgattgtacatagagatttgaagcctgggaatatgttgatttctgatgatggagttcttaagcttgctgattttggtcaggctaggatactcatggagcatgatattgtagcttcagatgaaaaccaacaagcttacaaactggaagacaaagatggagaaaccagcgaaccaccagaagttattcctgattatgagaactcacctaggcaagggtctgatggtcaggaacgggaagcgatgagtaaagacgagtacttccgacaggtggaagagctcaaggctaaacaggttgttagagatgatactgataaggactcgaatgtgcatgatggagacatatcttgccttgcaacgtgcactgttagtgaaatggatgatgatctcggtaggaactcgttttcttacgatgctgacgaagcagtggatgatacacagggtttgatgacatcttgtgtgggaacccgatggtttaggccaccagaactgctctatggatctacgatgtatgggttagaggtcgatctatggtcgcttggttgtgtgtttgcagaactcttgtctcttgagcctttgttcccaggaatttcagatattgatcagatcagcagagtgaccaatgtgctgggaaatttaaatgaagaggtctggcctggttgtgttgatcttccagactacaagtcaatctcatttgctaaagtagaatctcctcttggtattgaaggatgccttcccaaccattcaggggatgtgatatcgctgctcaagaagcttatctgttatgatccagctagtagagctactactatggagatgctgaatgacaaatatttaagtgaagagcctcttccagttccagtttcagagctctatgtgcctccgacaatgagtggaccagatgaggattctccgagaaagtggaatgattacagagaaatggattcagattcagattttgatggctttggacccatgaatgtaaagcctaccagtagtggatttacaatagaattcccctgaccttggcatttaagagtccatggttgagcatcttgatcatcccgacttcccctgaattcgcctactttgtcaaaaatgtgttgtgtgtgtgtgtgtgttgttcctctctctctgcctccctcgtatgaaaatggtaacatttacaattggaaagtcggtgttagcctttagctattagctgaagagctagttttcttgttgcccaggccattctttaccctatttttcatctgaagtaacaatgaaacaaaatctatatatactcgagttttgcttt

SEQ ID NO: 93484 - DNA, 719 bp, Arabidopsis thaliana columbia
  unsure (1)..(719): unsure at all n locations
cagctctcnnnnnnnnnnnnnnnnnnnnnnnnnnnnnnnnnnnnnnnnnnnnnnnnnnnnnnnnnnnnnnnccacgcgtccgcggacgcgtgggcggacgcgtgggcttctgtctttgtcgtataagagcaagagagtggtttgattcaatttttaaaattctaaataaaactccaaccgtgaatccagccatgaaactctttttagaaaatccttttttataacaaataattcctctgcttcggcttcttcttcgtttatttcaccttttttggtttctttagctcagaaaaagcccattctttttttctattcttgtttattttaatcatactgtgcgtttctacaaagtttgttcctttcttcttcaactctctcactcacggtcacagactcacagagatctgtttctttcttttatttttgctttcactcttctcttccagtgagagagagtgagagaaaacaaaatggtgaagcttttgttagtagcgtttgttgtggctggtataatactgggaactcaagcaaatgaatatttagatttcaatgtgacagaaatagatcgcattgaggaattagagtttggattttccaaatatagctccaatttgaaccctttaatggttggtctcacccttatcagaggagctgattctggagctggtactttctctatgcttctgtcactagctagatctctacatgtctctctttct

SEQ ID NO: 93485 - DNA, 561 bp, Arabidopsis thaliana columbia
gggccaggcccacgcgtccgtactgatattccccgtatcaactcataactgtccctcaacagttgcaatagtctttcggaatgctcctctctaatctcacaaaggcctctccgatctctcgctctctcagatctcctccatggatcccgcttcttcttcttcctcaaatcagcgcaaccgaatcgtctcttctggggaaagaccagtgatggctgataatggcgtccaacaggtttctcacgacgatggaaggaacattgtttcttcgtcttatagttcttccgtggttccttctcctgatcccgctccttattataacgttcttcaaacccctaccaatctctatcactacgattgggatatcgcaaattctggctatgcacaaggcatcaatacttgggatggatatccacgatatgctactactacccctgaagccatgcatgtgccaccggttgtctacaatgacaattcatctcttatgtaccaatatcctgggtatggatttaacccttatcctcctgtaatgctggagggacaatttcaggctccccagcttat

SEQ ID NO: 93486 - DNA, 359 bp, Arabidopsis thaliana columbia
cggacgcgtgggtttatagacgtaattaaggaaacagattgggcaaaagatgtcccactaattaccatgtactataagtttattttctctctttttaggtctccatatcaattattaaaaagtgtgagccacacaattattaatttcaatttaattaacctttgtttgttatttcttttgattaagtttgcaacataaacataactaagaaaaaatcattttaaaatttattaattattcaatcaaattatatacatataatataaatattaaattttaatagattgtgaaataaattaaattgatgatggaaaaaagattcatgatcaaaatcaaaataaaattaataagtgtcagta

SEQ ID NO: 93487 - DNA, 374 bp, Arabidopsis thaliana columbia
ggcaaattacatttgtgtcacttaataattagacgaagttgtttttgtaggcataggcttctcttcagcttactcagatgcagggaggagtaacgtcatagacaaaaactaaccacgtgcatgtcatagtaccatgaaatctaacaaacatgcatttttatgaaaaatatgcattcagatctcgcttcatgtagtttgtctatcaacaatcgcattgtaaatgatttccacttaagctaaataattgaccgtcacagtcatacacaaatgttatgacaacagggttttaccaatggaaagaggagatttatatgaaatacgatgatatcagaagtttcaagaaaattattttttttctctattcaaggaaaatc

SEQ ID NO: 93488 - DNA, 948 bp, Arabidopsis thaliana columbia
aaattttaaaatattcaataataataataaaacttattaaaattaagctagaatttgagaccaagttttatgtcaaagttcaaaaaacctaaacctacttttttcgcaacactccttaaaataaagtttctattaaactaaaagaataaggggaaggaagaaagcgaatcgatgtgctaattccccatcctcaaattagtccttcccaaggattgttgtctcaatgaataattgtaggagttaaatcttgatagaattaaaaaaactacaaaaaaaatccagaattttgtgatttctgggcttaaacaaaaggattcgcaaataaaagcgctaatgctacaaccaggccataaattgttaaagcttccataaaagccaaactaagcaataaagtacctcgtatttttccttctgcctcaggttgtctcgcgataccttcgacagcttgacccgcagctgtaccttgaccgactccaggtccaatagaagcaagcccaacagccaacccagcagcaataaccgaagcagcagaaaccagtggattcatgataagttcctcacaccaaaataaagaaatagttaatgatacaatcatccaatgacttaggacgtaattctaattaagtaatcgctaagattaatccagccaaaaaaaccaaaaactttaattgaaatatgaaataatataataaaattattgaatcataagaattactttgatagtagttcctatccgcgggatttttaaaaatccataatatatatacgacttttttatgccattttttttatgaaccattctttgaattcttcgttctttttttatcattttttcagccaattcacagataaaaaggaagcacttctaatcgaatccctatctaaatctaaatagaaattcccaaaaatagtagagcagattcagattatatagatctttaactcatt

SEQ ID NO: 93489 - DNA, 445 bp, Arabidopsis thaliana columbia
  unsure (1)..(445): unsure at all n locations
ctngngtnaggcgtnnattctttttgggtttttcactttattttataaaggggaatttgaaagcgagacccgtttctttatttggtataactacttgagccggatgagaggaaactttcatgtccggttgtgaggggggagatcttatagtggaccctatcccaatttttcttttgctaggcccataactaaaaaacctactttcttacgattacgaggttcatttgaatatgaaattcaatcctggaaatacagcatcccacttttttttactactcaaggtttcgatatatttcgaaatcgagaaatttctactggggcgggtgctatccgagaacaattagccgatttagatttgcgaattattataggtgattcgttggtagaatgtcaacagttaggaaaagaagggcctacggggtatgactgggaagatcgatcaatt

SEQ ID NO: 93490 - DNA, 960 bp, Arabidopsis thaliana columbia
ctggatcctaaaattaaaatagaagattgaggtgaatcataaatccaaaggaggtttcatggccaagggtaaagatgttcgagtaacaattattttggaatgtaccagttgtgttcgaaatgatattaagaaagaagccgcgggaatttccagatatattactcaaaagaatcggcataacacccctagtcgattggaattgagaaaattctgtccctattgttataaacatacaattcacggggaaatcaagaaatagatcaaattgagtgcttgtatgtcaacttttattttaagaacaggaataatgctagtatctatatattattacatatatataaatataaacaaataaatcaatagaaagaaatctaatccgatattcttaattctatatagaaattctatcctatatagaaatagaaatcgtttttattttgatccgatcaaaataggattttagagataaggaataaaaataaaaattatgaataaatctaagcgactttttactaaatccaagcgatcttttcgtaggcgtttgcccccgatccaatcgggggatcgaattgattatagaaacatgagtttaattagtcgatttattagtgaacaaggaaaaatattatctagacgggtgaatagagtgactttaaaacaacaacgattaatcactattgctataaaacaagctcgtattttatctttgttaccttttcttaataatcagaaacaatttgaaagaagtgagtcgactcctagaactactagtcttagaaccagaaaaaaatagacttatttttcaattgaataacaattccaatctgaaggaattaaaaaagagattaatgttttgttcaaaaaatccaatcaagaatgcggccgcgaattcgatatcaagcttatcgataccgtcgacccgggggaggggcagtgcaaatcaatggggggggggggggc

SEQ ID NO: 93491 - DNA, 607 bp, Arabidopsis thaliana columbia
tcgcctgcaggtaccggtccggaattcccgggtcgacccacgcgtccgggagcgtttgtcgtcaatctcggcgaccacggtcattttttgagcaatgggaggttcaagaatgctgatcatcaggccgtggtgaactctaactcgagcagattatccatagccacgttccagaaccccgcgccggatgccacagtgtatccactgaaagtaagagaaggagagaaggcaatattggaggagccaatcacgtttgccgagatgtttaagagaaagatgggaagagatttggagcttgctcgcctcaagaagctggctaaagaggagcgtgaccacaaagaagttgccaagcctgtcgaccaaatcttcgcttagaatctctgtgttcttgcttacttgttgttgcgttggttctgttttgtacgttggtactgaaaattatgctaggctcggtgtgttttgtgtttatttatgttctttcgaatcataaagaaataatgataattgatgcacttgtctatggcaaaatcatcatactcccaaaaaaaaaaaaaaagggcggccgctctataggatccaagcttacggacgcgtgcatgcgacgtcatag

SEQ ID NO: 93492 - DNA, 1211 bp, Arabidopsis thaliana columbia
aatggctccaggaactttgactgagctagccggagagtctaagctcaactctaaattcgtccgggacgaagacgaacgccccaaagtcgcttacaatgtgtttagcgacgaaatcccggtgatctctctcgccggtatcgatgacgtcgatggaaaaagaggagagatctgccgtcagatcgttgaggcttgtgagaattggggcatcttccaagtggtcgatcacggcgtcgatactaacttagtggcggatatgactcgtctcgctcgtgacttctttgctttacctccggaagacaagctccgtttcgacatgtccggtggtaaaaaaggtggattcatcgtctctagtcacctccagggagaggctgtgcaagattggagagagattgtaacgtatttctcgtacccggtgagaaacagagactactcacggtggccaaataagcctgaaggatgggtgaaagtgacggaggagtatagtgagaggcttatgagtttggcttgtaagcttcttgaggttttgtctgaagctatgggtcttgagaaagagtctcttaccaatgcatgcgtcgatatggaccaaaagattgttgttaattattacccaaaatgccctcagcctgatctcaccctcggactcaagcgtcacactgaccctggaaccattaccttgctgctacaagaccaagtcggtggattacaagccacacgtgacaatggcaagacatggattacggttcagcctgttgaaggagcgtttgtcgtcaatctcggcgaccacggtcattttttgagcaatgggaggttcaagaatgctgatcatcaggccgtggtgaactctaactcgagcagattatccatagccacgttccagaaccccgcgccggatgccacagtgtatccactgaaagtaagagaaggagagaaggcaatattggaggagccaatcacgtttgccgagatgtataagagaaagatgggaagagatttggagcttgctcgcctcaagaagctggctaaagaggagcgtgaccacaaagaagttgccaagcctgtcgaccaaatcttcgcttagaatctctgtgttcttgcttacttgttgttgcgttggttctgttttgtacgttggtactgaaaattatgctaggcgcggtgtgttttgtgtttatttatgttctttcgaatcataaagaaataatgataattaa

SEQ ID NO: 93493 - DNA, 1197 bp, Arabidopsis thaliana columbia
ataccttcttctttagttataaaaatgttgaaagaagagagtaatgagagtggtacttgggcacgagcatgtgacacttgtcgttcagccgcctgcactgtctactgtgaagccgactctgcctacttgtgcaccacctgtgatgctcgagttcacgcagccaaccgtgttgcttctcgccatgaacgtgttcgtgtctgtcagtcatgtgagtctgccccagctgcgtttttgtgtaaagcagacgctgcgtctctttgtacagcttgtgatgcagagattcattccgcaaacccactagctagacgtcatcagcgagttccgattcttccattatctgcaaactcttgcagctccatggccccaagtgagactgatgctgataacgatgaggatgatcgagaggttgcttcgtggttactccctaatccagggaaaaacatcggtaatcagaataatgggttcttgtttggtgttgagtaccttgatcttgtggattacagctccagcatggacaaccaattcgaagataatcagtacactcactaccagaggagctttggaggagatggagttgtgccgcttcaagttgaagaatcaacaagtcacctgcaacaaagccaacaaaactttcagttgggtatcaactatggattctcctcaggagctcactacaacaacaactccttaaaggacctaaaccatagcgcatccgtttcatcaatggacatcagtgttgtgccagagtcaactgcaagtgacataacagtccaacacccaagaactactaaagagacgatagaccaactatctggtcctcctactcaggtggtgcaacagcttactccaatggagagggaggctagggtcctgagatacagagagaagaagaagacaaggaaatttgacaagacaataagatatgcttcaagaaaggcatatgcagagataagaccacggatcaagggcagattcgcaaagaggatagaaactgaagctgaggctgaagaaatcttctcaacatcgctaatgtctgagactggatatggaattgttccttccttctaaactcctatggcgaagatggactagattgcatgctgtaaattacttctagtttggatttctacaagttattactgcatatgggtccttagttttgtgacttttgtctaactagtacgagtttaatcagat

SEQ ID NO: 93494 - DNA, 639 bp, Arabidopsis thaliana columbia
  unsure (1)..(639): unsure at all n locations
nnnnnnnnnnnnnnnnnnnnnnnnnnnnnnnnnnnnnnnnnnnnnnnnnnnnnnnnnnnnnnnnnnnnnnnnnnnnnnnnnnnccacgcgtccgggatggtgcttcttctgacatgagccaccattccataagcccaaaagaaccttggtgttccccttctcataggacagtgtggttttctgttttcttaggtactcagtgcaggtttctctgctccaactccaattcaagctcagtcatggcccattgctatgcaaggtagggacatagtagccattgctaaaactggctcgggaaaaactttgggttacttgattcctggatttttgcatcttcaacgtatccgaaatgattcgcgaatgggcccaacaatcttggtattgtctccaacgagagagctggccacacaaatccaagaagaagctgttaaatttgggaggtcatcaagaatttcgtgtacgtgtttgtatggtggtgcaccaaagggccctcagttgaggggtttagaaagaggagcagatatcgtggtttcaactccctgggngttgattntatncctgaantaggngggttangcntcggcaaaattntnatctttccnanatnggngnttgatttttggcccnggttttaacccc

SEQ ID NO: 93495 - DNA, 2526 bp, Arabidopsis thaliana columbia
  unsure (1)..(2526): unsure at all n locations
cagctctctacgactcactattgggaaagctggtcacgcctgcaggtaccggtccggaattcccgggtcgacccacgcgtgcaactttctctctcttgcttctacgcttcttcttgtggcgtagattgttatagagagggaaaccaaaaaagggaatctcaaaagctcgagttcacagatttgacccgagtctttaatccaatctgctggttcgttttccacattcaaactcgactcttgaatatcaaatcagaagtctttgctatggctgctaccgctgctgcttctgttgtccgttacgcacctgaggatcatactcttcccaagccctggaaaggccttatcgatgatagaactggttacttgtacttttggaatcctgagaccaatgttactcagtacgagaaaccaaccccctctctacctcctaagttttctcccgccgtttctgttagctcttccgttcaggttcaacaaactgatgcctatgctcctcccaaggatgacgataagtactccagaggctctgaacgtgtgtccaggttttctgagggtggcaggagtggaccgccttattcgaacggtgctgctaatggagttggggattctgcttatggtgcagcatctaccagagttcctcttccttcatcagctccagcaagtgaactatcccctgaggcctattcccgccgtcatgaaattactgtcagtgggggccaagtaccaccacctctaatgtcctttgaagctactggttttccacctgagcttctgcgggaggtactcagtgcaggtttctctgctccaactccaattcaagctcagtcatggcccattgctatgcaaggtagggacatagtagccattgctaaaactggctcgggaaaaactttgggttacttgattcctggatttttgcatcttcaacgtatccgaaatgattcgcgaatgggcccaacaatcttggtattgtctccaacgagagagctggccacacaaatccaagaagaagctgttaaatttgggaggtcatcaagaatttcgtgtacgtgtttgtatggtggtgcaccaaagggccctcagttgagggatttagaaagaggagcagatatcgtggttgcaactcctgggagattgaatgatatccttgaaatgaggaggattagtctgcgtcagatatcttatcttgtgctagatgaggcagatagaatgttggacatgggttttgaacctcagataaggaagattgtgaaagaaattcccactaagcgtcaaacccttatgtacacagctacatggccaaagggagttaggaaaattgcagctgacttgcttgttaaccctgctcaagtcaacattggcaatgttgacgagcttgtggctaacaagtcaatcacacagcatattgaagtggtagcaccaatggagaaacagaggaggttagagcagatcttgcggtctcaggaaccaggctcaaaggtgataatattctgctcaaccaaaaggatgtgtgatcaactaacacgcaatctaacccgccaatttggagctgctgctatacatggagacaagtcccagcctgagagagacaatgttcttaatcaattccgcagtggcagaactccggttcttgtagcaaccgatgttgctgctcgtggtctggacgttaaggacatcagggcggtcgtaaactatgatttccccaatggagtggaagactatgttcatagaatcggaagaacaggaagagctggagcgactggtcaggcattcacattctttggtgatcaagattcgaaacatgcttcggatctgatcaagattttggaaggagcaaaccagcgagttcctcctcagatccgcgaaatggctacacgtggtggtgggggaatgaacaaattcagtcgttggggacctccttccggcggccgtggtcgtggtggcgactctggttatggtggcagaggtagctttgcttcccgtgacagaagcagcaatggatggggaagagagcgagaaaggagccgtagccctgagagattcaacagagctccaccaccgtcttccaccggatctcctcctcgcagcttccacgagacgatgatgatgaaacacagatgaaaagagagatacaaagctctgataaagccaagtgacagaagattgtgttgtgggggatttcccttatcattgtgacattatatattttttggccgatgaagaaacaaaagaaaaaaaaacaagaccaagaagactgttccctcccattggaaatttacgctcaaaactacaattgatatcttacagtttgtatttcatcttatttattattgcagctcagagattggtaagaatgtttcattagatacgaacgactttcttctaatactgtgggattctctagcatttaaattacaaatcaaagtggtaatattatgaaaaaaacagaaaaaaagnnnnnnnnnnnnnnnnnnnnnnnnnnnnnnnnnnnnnnnnnnnnnnnnnnnnnnnnnnnnnnnnntcccc

SEQ ID NO: 93496 - DNA, 959 bp, Arabidopsis thaliana columbia
ccatacgactcaccttagagaaagcacccacgcctgcaggtaccggtccggaattcccgggtcgacccacgcgtccagccacgcgtccgtacggctgcgagaagaaacaaaagggggaggtggtggtggaggtagccgcggaaatggatccggctatggaaaggtggaagggagaaggctccagctgctttctgtaggaaggctcagacttccactgataggtttgagatgtggggagacgggcttcagacccgttcttttacctttatcgatgagtgtgttgaaggtgtactcaggttgacaaaatcagatttccgtgagccggtgaacatcggaagcgatgagatggtgagcatgaatgagatggctgagatggttctcagctttgaggaaaagaagcttccaattcaccacattcctggcccggaaggtgttcgtggtcgtaactcagacaacaatctgatcaaagaaaagcttggttgggctcctaatatgagattgaaggaggggcttagaataacctacttctggataaaggaacagatcgagaaagagaaagcaaagggaagcgatgtgtcgctttacgggtcatcaaaggtggttggaactcaagcaccggttcagctaggctcactccgcgcggctgatggaaaagagtgaagttcaccaaagtataagtcaagctcaaatatggccttttaagttcagcaaaatgtttagatatatttttaggtagcttcctattaaaaaagcaataataagtgttttggattttggttccttctcttctgctaatccttgtttatgtttagttgaaaaagtttgcttgcattgttaagtctgttatcatattattgtggtcctttcattcacagtatgtatgtttatcatcatagtcaagttgatgtcgtggtcctctcacggaccagtacaagtaagtggcttgtgttttttcttgc

SEQ ID NO: 93497 - DNA, 850 bp, Arabidopsis thaliana columbia
  unsure (1)..(850): unsure at all n locations
gatacttcagctctatacgactcattatagggaaaggtgggtccccttgcaggtcccggtccggatttcccgggttccgaccaaccgcgtccgtagcggggagaacaacagaagggcaggttgacaaaatcagatttccgtgagccggtgaacatcggaagcgatgagatggtgagcatgaatgagatggctgagatggttctcagctttgaggaaaagaagcttccaattcaccacattcctggcccggaaggtgttcgtggtcgtaactcagacaacaatctgatcaaagaaaagcttggttgggctcctaatatgagattgaaggaggggcttagaataacctacttctggataaagaaacagatcgagagagagaaagcaaagggaagcgatgtgtcgctttacgggtcatcaaaggtggttggaactcaagcaccggttcagctaggctcactccgcgcggctgatggaaaagagtgaagttcaccaaagtataagtcaagctcaaatatggccttttaagttcagctgctttctgtaggaaggctcagacttccactgataggtttgagatgtggggagatgggcttcagacccgttcttttacctttatcgatgagtgtgttgaaggtgtactcagatgcttggcctgcagagcctcaagatgcttatggtttggagaagcttgctacggaggagttgtgtaagcattacaacaaagattttggttccttctattctgctnnnnnnnnnnnnnnnnnnnnnnnnnnnnnnnnnnnnnnnnnnnnnnnnnnnnnnnnnnnnnnnnnnnnnnnnnnnnnnnnnnnnnnnnnnnnnnnnnnnnnnn

SEQ ID NO: 93498 - DNA, 344 bp, Arabidopsis thaliana columbia
  unsure (1)..(344): unsure at all n locations
aaaactgggaacactgttttaaatgtctacnacctcaggaatcggcttatagcatatagcattgtcgttgataaagtctccaacttgctctgcgaatggggaaacataatacttataaaggctgacaaatccttattgtgcattaccgagaaggatatggaaagcaagttagatatgctgttcaagaaaaacctggacacagtagctattaatcttgtccagagtcaacatgccgatgctgctgctactgccaatgtgatgaggaagtatggggatcatttatatgggcaaccaggcctttgacggggctttgttccagtccattatcacaattggtttttttg

SEQ ID NO: 93499 - DNA, 247 bp, Arabidopsis thaliana columbia
tttcagtagttattgttggtaccatggcctgtggcgtaggcttagcggttttagaaccatcaatgattggtgaacctgcggatccttttgcaactcctttggaaatattacctgaatggtatttctttcctgtatttcaaatacttcgtacagtgcctaacaaattattgggtgttcttttaatggtttcagtaccagcgggactgtttcccggtccccttttggaaaatgttaataaggttcaaaa

SEQ ID NO: 93500 - DNA, 298 bp, Arabidopsis thaliana columbia
cggagctctctatcgtcccgggtcggatcatgggttcgttaccgcatacaatctcacagtcaaagaagcttcgatttctcccaatcagccggaatttcatctccggtgagattccagcgagtctaagcgagcttcggggactcaaaacgcttgatctgagctataatcagctaaccgggtcgatccctccgtcaatcgggtccttaccggagctatccaatctgattctatgtcacaatcacttgaacggatcaattcctcaattcctctcacaatccttaacccgaatcgatctcaa

SEQ ID NO: 93501 - DNA, 378 bp, Arabidopsis thaliana columbia
gaaacaagttgtggctcttgtaggttgctctggaaaagttgaggatggtaattctgttcgtccccagcctcaagttagttgtccggcgtcgatctctgtggttcctggacacgttgttactcctgatgtaagagaaactccaggaactgatcaatacaatactgtgcgggcagatggtaaccataacacaactaagactctggaggatgaaacaaatggtggttctgtttccataaacggttctgttcatgcaccaaacctgaatcaagaaagtcatttccttgatttccctagtcctacacctaagtcgagccctgaagacttggaagctcaagcggcggagactatccagtctctgtcttcatgtgttctggtcaa

SEQ ID NO: 93502 - DNA, 375 bp, Arabidopsis thaliana columbia
gttccattgattcattgtactatatatggtaacttaaagtaataaatttgcagtcttggacttgatgtggttagttaaaatataatatggtaactatttttatatcctatcagaatcaaaataaatttagattctttgactaatctgacgggaaaggttaaaaaaaaacagatagagagttttggcgtaaattacaccggagtcaaactttgttccaatttaaaacgaacttaactaatttaattctatccaaaagatatgtgtatcttgcttaagtatagaagataattcacctaaattttagcatttggtagtttttaactttctgttaatgttaaaaaaaaaaataaaaaaatagtgcttcttttttactgt

SEQ ID NO: 93503 - DNA, 846 bp, Arabidopsis thaliana columbia
ccagctctaatcgactcacttagggaaagctggtccgcctgcaggtaccggtccggaattcccgggtcgacccccgcgtccgcggacgcgtgggctctcatcaaaagcttttctccttgattttcgcattctttagagtcttaacgcaaagatgagacctcctctaactggaagtggtggtgggttcagtggtggaagagggcgtggtggatacagtggtggtagaggtgacggtggattcagtggtggtcgaggtggcggtggtagaggaggaggaagaggtttcagcgaccgtggtggtcgcggcagaggaagaggaccaccacgtggtggtgctcgcggcggcagaggaccagctggccgtggaggcatgaaaggaggaagcaaagtgattgtggaacctcacagacacgcaggagtgttcattgcaaagggtaaagaagatgcccttgttaccaagaatttggttcctggtgaagctgtctacaacgagaagagaatctctttttagaacgaagatggaaccaacgactgtattccagagtttggaatccctttcccgtccgaagttggctgctgctattcttggtggtgttgataacatctggattaaacctggtgctaaagttctataccttggtgctgcttctggaaccacagtctctcatgtgtctgatcttgttggccctgaggggtgtgtgtacgcggttgagttttcttatagaagtgggagagatttggtgaacatggtaaagaagagaaccaatgttattccattattgatgatgcttgtcccccagcttaatacagaatgctttgtagcatggttgatgttatcttttctgt

SEQ ID NO: 93504 - DNA, 406 bp, Arabidopsis thaliana columbia
ctttcctgattttctcgctcattttcccggaaagttatgaagaaaaaaacatcttctttttaacaatttttggagtcttataaacgacaagccaaaaagactggagcttttcgagatatgctcttgagacgtctcaaaggaagatactttgatgggatgtcttcttaattttattataattattcactcatactcataatattattctctgatgaatctctacaaacagacaagatagtgcgagaaaatgatgggtctctgttctccttctccttcttctcacgattgttcttcatcttctccaaggaactcggagaagaagcagaatgtgattgttgcatcaccttcaagattctctacctacactaaaccgagtttatcaattgagaagagattacttacttac

SEQ ID NO: 93505 - DNA, 1015 bp, Arabidopsis thaliana columbia
  unsure (1)..(1015): unsure at all n locations
gccggcacgccggcaggnaccggnccggcttttgaagnncgtccatcccgnccgcggacgcgngggcggacgcgggggcggttnacggnccanggggaagaccacacaaggcnnacnncntctttactaaagacatcctccacggcaaatcaatcgacattaacagatttcaggattctccctattggntgttgggccccaccnacatcgatgacatcgaaaaaggcccnngcggggcgtgagacaccgctcatttaaacaccggaagcggcggaaagaagcgaggacaagctcanctacgtgtttacaatctaggaaacacgcccccggttccgggtgggagattgggctcgatcttggaaggaatggtagggacaaaagctaagaagcatcttatcaaaaagccaagaaacggggacgggccttacacgcctgctaatgggagtttagcgtataaaaggttttcggggacaaaccgacgacgggtctcgcgggcggggctgaggaagttcgccaagtggtccgttggtttttatgggatcccgccgagggtaaaaaagggaacctctcccgccgaagatcccgcttaataattttctctctaccaccatctctctcatcatcacatgcttgtttatttttcttacaaaaaaaaaaaaaatcatttacagggacagatttctgtatttttctttatttaaaaattgctccccaaaaaaaaaaaatcataaatgtttttgtggtggtcctttttttagggggatcaaagtgtgggaattaaattgttacagctgtatgttataatagaaagatatatagaaatgaggagaggaaaaaaaagaagaaaggggtagaagaattgaaaatatatgtgggattgttatgtaataaatgaaataggttatgatcttgctggaaagtgtttagagccgatcttagccgttggatttttataatcaaggaatgaaacctgtgatccattattataaaaaaaaaaaaaaaaaaaaggccgggg

SEQ ID NO: 93506 - DNA, 1506 bp, Arabidopsis thaliana columbia
  unsure (1)..(1506): unsure at all n locations
nnnnnnnnnnnnnnnnnnnnnnnnnnnnnnnnnnnnnnnnnnnnnnnnnnnnnnnnnnnnnnnnnnnnnnnnnnnnnnnnnnnccacgcgtccgccgaccagcaaaatttctctcttcttctttataatcatcagatcgttccttcacttgattttcagggctcgaaatctctctcaaaaccctctcaaaaattccaaaacataatctcatttctcaagtttaacattttcgagcccctttagaacagtggagaaagatccacacagataaaaaaacgggtgagttttatatcaaatagacgaaaatgcccctgtcggcgacggcggatacaagcaagacggtgaagctggagaggtacaatagctacctccggaagattcacagcaccaaagttctcaacgcttcttctaaagttcttttccgagcaacgcttctcgtagctcttgtcctcgtcctcatcttcgccatcaactaccctccactctccgatagccgcgccgccgcagcacaccacctccaccgtcgtagcttcttatccaccggactcttctcctcctcctcttcttcctcctctatcggtggagccgcgtgggaaaagcgcgttagacaatcctcaacagccaaacgaccacacggtctctccgtcctagtcaccggagctgccggattcgtcggatcccactgctcacttgcgctgcgaaaacgtggcgatggagtcttaggattcgacaacttcaacgatttctatgacccatcactcaaaagagcaagacaagagctcttggagaaacaacaagtgttcatcgtcgaaggtgatctcaacgatggaccactcttacgtaaactcttcgacgttgtccctttcactcacatccttcacttagccgctcaagccggagtacgttacgctatgaaaaaccctcaatcttacatcgccttcaacatcgccggattcgttaaccttcttgaagtggctaaagcagctaatccacaacctgcgattgtttgggcttcctctagctctgtttacggtctcaacactgagaatccattctctgaagaacaaccgaacagaccaacctagcgagtcttttacgcagcaaccaagaaaagctggttgaggagatcgcacatacttacaaccacatctacggtctctccttaaccggactccggttctttacggtttacggtccatggggaagaccagacatggcttacttcttcttcactaaagncatcctccacggtaaatcaatcgncatttacaggactcaggncaaatcaagaagtggcgcgtgacttcacctacatcgntgncatcgttaaaggttgtgtcggtgcggttgacacggctgngnaaagcaccgnaagcggggggaagaaggnaggcaagtttagnttcgggtttcaatntngggaacaggttccttttccggttggnggntggttcgcctttgaggggttttnggcaaaantnnggggnttttttaatccagaangnn

SEQ ID NO: 93507 - DNA, 1289 bp, Arabidopsis thaliana columbia
taggaacaactatagaagattatgacgtcgcacgcacgcgtacgtaagctcggaattcggctcgagtctcaagagctctggtcttgccttgtcttgctcttggagaaacaacaagtgttcatcgtcgaaggtgatctcaacgatggaccactcttacgtaaactcttcgacgttgtccctttcactcacatccttcacttagccgctcaagccggagtacgttacgctatgaaaaaccctcaatcttacatcgcctccaacatcgccggattcgttaaccttcttgaagtggctaaagcagctaatccacaacctgcgattgtttgggcttcctctagctctgtttacggtctcaacactgagaatccattctctgaagaacaccgaacagaccaaccagcgagtctttacgcagcaaccaagaaagctggtgaagagatcgcacatacttacaaccacatctacggtctctccttaaccggactccggttctttacggtttacggtccatggggaagaccagacatggcttacttcttcttcactaaagacatcctccacggtaaatcaatcgacatttacagaactcaggacaatcaagaagtggcgcgtgacttcacctacatcgatgacatcgttaaaggttgtgtcggtgcgttagacacggctgagaaaagcaccggaagcggcggaaagaagcgaggacaagctcagctacgtgtttacaatctaggaaacacgtcccctggttccggttgggagattggtctcgatcttggaaggattgttagggacaaaagctaagaagcatcttatcaaaatgccaagaaacggtgacgtgccttacacgcatgctaatgtgagtttagcgtataaagatttcgggtacaaaccgacgacggatctcgcggcggggctgaggaagttcgtcaagtggtacgttggttattatgggattcagccgagggtaaaaaaggaaacttctcacgccgaagattccgcttaataattttctctctaccaccatctctctcatcatcacatgcttgtttatttttcttacaaaaaaaaaaaaaaatcatttacagggacagatttctggatttttctttatttaaaaaatgctccccaaaaaaaaaaaatcattaatggttttgtggtggtcccttttttaaggggatcaaagtgtgggaattaaatggttccaccggaaggtaataaaagccggcccccgattcggatatccagcctatgcgataccgtcgacccccaagggggggcccggtccc

SEQ ID NO: 93508 - DNA, 906 bp, Arabidopsis thaliana columbia
agtagatagaaggttttttttaatgagtccgcttttatgttagttcgtactatacaattcctttgtttgtgagaaaattttctcacaaaagaaaaggtggaggaaataaaaagagttagagaatggattactacctatgccaagatcgcgtataaatggaaattttattgataaaacctttacaattgtagccgatatcttattacgagtcattccgacaacttccggagaaaaagaggcatttacttattacagagatggtgcgatttgattatcattattttttttctcgccgattttgattggaatagaaagaaaaacgagtattgaaaaaaaatctacgcttttgaaggtgaagtttataatataaaaaaaacaatcccttctgtcatgtatccacgattaatgcagccttagatgcttcaattgtgaattatagtattgagcagagggtttttacctatggttcccgtattacagatcaatcctactacactaatacaatatacgaataggaggcataggggaagaagcactacgccgagaaatcaacaacacgaaaactttcttaaaaatgattccctttctttcttcttcttcgttgggattgggactaattaaaatggttggaacaataaacatccatctcgttcgtattttggatacccgtataaccattgaagactgttgaagtgactaattcctggaaacttaggggcgttgagaacaaagaaatttttagagtttccttttttatttttatctagcatgaacccacttggtagtaagaaaagatcttttgcaagaaggttggctagggatttcttgtaaacacattagcaccgcttagctcataccgacatcacatttttacatatattattttcattatgcacctaaaggagg

SEQ ID NO: 93509 - DNA, 1346 bp, Arabidopsis thaliana columbia
  unsure (1)..(1346): unsure at all n locations
ggtgcggtctctctctccttttcatcttctttaacgcttctcttttccagaacttgctctctctctctctttctgtcatctcctcaccgcttcctagatctctatagcggtcttccttccctcctttgtttccgggctgttccttaatcactatctctttctctttcttctgccatcgccaaaccttatctgggttttgcttcttatttgaagatttatatgggctgtactaggaatttcatgggagttgtggaggatactgaacctcctttgaaacgtgctaagaggcttgctgacgaaccgaacggcttctccgcgaactcgtctgttagaggtagtagtgtgaacagcaactctttgggagacctgatggcaaggcctctgccctcccaaggggatgacgaaactatcggctccaaaggggtcattagaaaatctgaattcgttaggattatcactagggctctttattctcttggatatgataaaaccggggctatgttggaggaagaatccggtatctctctgcacaattccaccattaagctgtttctgcagcaggttaaggacggcaaatgggatcaaagtgttaaaacattgcacagaatcggtttccctgatgagaaggctgtcaaggctgcgtctttcttgctcctagagcaaaagttcttggagtttctcaaagttgaaaagatagctgatgcgctacgcaccttaaggaatgagatggcgcctcttcgtattaatacaaagcgtgttcatgagctcgcttcctcccttatatcaccttcaagctttatatcacataccacttcgactccaggtaaagaaagtgtgaattcaaggtctaaggttttggaggaactgcaaaccttgcttcctgcttctgtnataatcccagaaaagaggttggagtgtttagttgagaattcacttcattattcaagcggggttcttgtgttttcccataatacttttggatagtgattttgtctttggaattctgatccatcaatgcgggaagcaccaaattccttctcagactgctcagatcttggagtcacataccgatgaagtttggttcttgcaattttnacataatggcaaatatttggcttcatcttccaaggatcaaaccgcaattatatgggggatcagccgcagatgggcacatttcattgaagcatacactttgttggccaccacaaaacccgtggtttgcnatcttatggggtcccgatgatccgcaagttcttncatgtggggcagaagggggtttnagccgctgggnttttgttnaggggcctttttcnaatgntnnaaaagggggnttnagcccntttttt

SEQ ID NO: 93510 - DNA, 498 bp, Arabidopsis thaliana columbia
aggcgccacagactcaagaaaaaaaacccaaaaaaaaaagagagaggtgaaattgattttctgctcgcgatcgtcatttcaatttctaattagctttcctggtgtttcttctccggcgtaatcatgacaacctcaaaaagactagcagacaggaagattgagaaattcgacaaaaacattttaaagagaggatttgttcctgagaccaccaccaagaagggcaaggattatcccgttggtcccatccttcttggcttctttgtctttgttgtcattggatcatctctctttcagatcattaggactgcaactagcggaggcatggcataaaccaaaacacagtcaagctagaagaagcagttttcaaaatgtagaatcttcttctgtctcctttctttttctctccttatactgtagaatgtgtcaactttctgtttactatatcatgtaatgaagattatttgagttttttataatccaagtatccaacgcttaagt

SEQ ID NO: 93511 - DNA, 585 bp, Arabidopsis thaliana columbia
  unsure (1)..(585): unsure at all n locations
aatacgactcactttagggaaagctcgtacgcctgcaggtaccggtccggaattcccgggtcgacccacgcgtccgtacggctgcgagaagacgacagaagggaaccaaaaaaaaaaaaaaacgaaagcgcaaagactaaggagaaaagaaattcttcgcttcttctccggtgtaatcatgacaacctcaaaaagactagcagacaggaagattgagaaattcgacaagaacgtattgaaaagaggatttgttcctgagaccaccaccaagaagggtaaggattaccctgttggtcccatcctcctcggcttctttgtctttgttgtcattggatcatctctcttccagatcatcaggaccgcaactagtggaggaatggcttaaacccaatcacattcaagctggaagattgcaattctcaaattgatgaatcatcactttcttctcttctgacttggctctttttttcccttatactggagaatgtgactactttctgttgacctacatgtaatggnaagaattttggagncttttcccaaaaaanggnnaaaaaaagggggggccgccctagagggnccaag

SEQ ID NO: 93512 - DNA, 430 bp, Arabidopsis thaliana columbia
ctcacttccttttttctttgtgagtttcgagaatatccctattcataggtctgagatccacatctatgaattgaaaggtccgaacgatcaactctgcagtcagttgttagaatcaataggtcttcaaatcgttcatttgaaaaagttgaaaccctttttattggatgatcataatacttctcaaaaatcgaaattcttgatcaatggaggaacaatatcaccatttttgttcaataaaataccaaagtggatgattgactcattccatactagaaagaatcgcaggaaatcttttgataacacggattcagcctatttctcaatcgtatcccacgatcaagacaattggctgaatcccgtgaaaccatttcagagaagttcattgatatcttctttttctaaagcaaatcgacttcgattcttgaataat

SEQ ID NO: 93513 - DNA, 449 bp, Arabidopsis thaliana columbia
ctttcctctcaaacatttcctaattccatcctaataattttcaaagctttaattctaagaaataatatctacaagaaaatattatctcatgtatttcttcttcctccttgatttttaatctgatttttaacctttggatttggaaaattatatcttcttctgtcccaaatctatttttaggtttgtcaaaacgattattttgtttaataatcgtaataggtatggagactaccggagaagttgttaaaacaaccaccgggagcgacggaggcgttacggtggtgagatccaacgcgccgtcagacttccacatggctccgaggtcagaaacttcaaacacacctcccaactccgtcgctcctcctcctcctccaccgccgcaaaactcctttactccgtcggcggctatggatggtttctcaagcggaccgataaagaagagacgtggg

SEQ ID NO: 93514 - DNA, 458 bp, Arabidopsis thaliana columbia
ggaggaatagcggctgatttaccttatggttggatagataaatgcttggatttttgtgattattgtgtgtgacagaggttgttgaatatcaaaaactcattacacgaaatcctatttttttagaacgggttgaaggagttgggattattggtggggaagaagcaataaattggggtttatccggaccaatgctacgcgcatccggaataccatgggatcttcgtaaaattgatcgttatgagtcttacgatgaatttgaatgggaaattcaatggcaaaaacaaggagattcattagctcgttatttagtacgacttagcgaaatgacagaatccataaaaattattcaacaggctctggaaggacttccagggggtccctatgagaatttagaaagcaggggctttgatagaaaaaggaatccagaatggaatgattttgaatatcgattcattagt

SEQ ID NO: 93515 - DNA, 419 bp, Arabidopsis thaliana columbia
aaacaaaatgcaaaatattaagaaatctttatatgtttttttatctgtttatacattttatgccttttgaatttaatttgtaaattctactacgtctttttacaaaaaaaaaaatcacaaagattttttacatttaattatgttttactgtttaaattttttttatacgaaaacaatttcagaaaatttattcgtgcaattgtataattttgattactattttattggggtattataaagtttacgttgtcatttctggtatgtctgtaatcaatttacattcattttgtacgcatcaatttactatgtgtaaatacatttttaccattttattttcattgtatgttgaataacatgtaaatattaataatcagactattctcaacataaatgtattaatgtgcatgggtcataatctt

SEQ ID NO: 93516 - DNA, 793 bp, Arabidopsis thaliana columbia
tctaactccagagctggagttgatggctcggctggaaactcggaagctagcaaagaacctggcatccaaaaagagggggagatgtgaatcatcctctgccactagctcgaaagcatgtagggagaagcagcgacgggacaggttgaatgacaagtttatggaattgggtgcaattttggagcctggaaatcctcccaaaacagacaaggctgctatcttggttgatgctgtccgcatggtgacacagctacggggcgaggcccagaagctgaaggactccaattcaagtcttcaggacaaaatcaaagagttaaagactgagaaaaacgagctgcgagatgagaaacagaggctgaagacagagaaagaaaagctggagcagcagctgaaagccatgaatgctcctcaaccaagttttttcccagccccacctatgatgcctactgcttttgcttcagcgcaaggccaagctcctgggaaacaagatggtgccaatcatcagttacccaggggttgccatgtggcagttcatgcctcctgcttcagtcgatacttctcaggttcaatgtccttcggtcctcctgtttgcttaatcaaggaaaatcatcaaccggtttgcttcttgcttccgcttaaaagaaaagtctccatttgttttgctctcctctctttctcggctttcttagtcttatccttttgctttgtcgtgttatcatcgtaactgttatctgttgaacaatgatatgacattgtaaactccaattgcttcgcgcaatgttatctattcacatgt

SEQ ID NO: 93517 - DNA, 611 bp, Arabidopsis thaliana columbia
  unsure (1)..(611): unsure at all n locations
tcttctttgggtgttccttccaccaacggcagaaatcgatttggcttaaatctccccctcctttcgatctctctgatcgccgccgggaacattcaatttcccgggagttcaacaaaaaaaaaactctccgtttttatttttccccctttttcaccggtggaagtttccggagatggtgtcacccgaaaacgctaattggatttgtgacttgatcgatgctgattacggaagtttcacaatccaaggtcctggtttctcttggcctgttcagcaacctattggtgtttcttctaactccagtgctggagttgatggctcggctggaaactcagaagctagcaaagaacctggatccaaaaagagggggagatgtgaatcatcctctgccactagctcgaaagcatgtagagagaagcagcgacgggacaggttgaatgacaagtttatggaattgggtgcaattttggagcctggaaatcctcccaaaacagacaaggctgctatcttggttgatgctgtccgcatggtgacacagctaccggggcgggcccaaagttaaggctcaatnaagnttaggcaaataaaggtaagcttgaaacggctcgggttgc

SEQ ID NO: 93518 - DNA, 963 bp, Arabidopsis thaliana columbia
  unsure (1)..(963): unsure at all n locations
aaaaaaaaaaaggggnaattctatgggggctcccccccgactcnatagggggacagctggtacgcctgcaggtaccggtccggttttcccgggtcgacccacgcgtccggttttcttcttctcttcttctttgggtgttccttccaccaacggcagaaatcgatttggcttaaatctccccctcctttcgatctctctgatcgccgccgggaacattcaatttcccgggagttcaacaaaaaaaaaactctccgtttttatttttccccctttttcaccggtggaagtttccggagatggtgtcacccgaaaacgctaattggatttgtgacttgatcgatgctgattacggaagtttcacaatccaaggtcctggtttctcttggcctgttcagcaacctattggtgtttcttctaactccagtgctggagttgatggctcggctggaaactcagaagctagcaaagaacctggatccaaaaagagggggagatgtgaatcatcctctgccacctatcttaaaaagcttgtaaagaaaaaccccggccggcccaggttgaaataacaagtttatggaatgggggcgcattttggacgccgggaaatcctcccaaaaaaaacaagggtttttatttggtttatgtcttcccccagtggggaccacattatggggggaggcgccaaaagcctgaggcgccccttccaggttctcgggccaattctaatgaggttagacccggaaaaaccacccgcgaatgagaaaccggggcgagaacagaaaaaaaaatcggggctcacttgaacacttaagcccctcaaacatttttttccccccccacatgatccctcctgtttttttctcccgcgggccactcttgaaaaaataggcgcagatacttcccacgggtgcggtggggggatctctccttctaggaaatttggagaaagcgccgcccccgctt

SEQ ID NO: 93519 - DNA, 720 bp, Arabidopsis thaliana columbia
atttctcataacatacgtaaacgatattataaacatgggttgtgattcaaaagtcacctaagagataacgccaagaacgccaaaagaaaccttacctgcgttacactcgttaggagtagtagtctcgcttaaaactctaatctttgcaaaacccgtcgttgaccgaaccaggactaaccatcctgatctcggtcacgtaatcatggaccgcacttcctttaccccacaatgagctaccgtgagcaccggtccccatcataccacccacggttactccccaccaatacggtgcataaggcaacgccaatccaactttagctgcttcagcgattaattgcctaagcgtcacgccactctcaaccgtcaaagtcatggccttcgcatcggcttgcaccgtgtggtttagaaactttgtgctaatgaacaatccgtcgtttccatcagtgcacgtgagcttagggatgctatgggaatatcgagtggttacacgcattttccgtccggctttagtagctgcagcgacgatagatacaagctcggcttcagttgttgggtaagccacgttggcggctctacacgtggagcggtctgggaaggctcctaatgaattggtgactatacagttcgtgtttcctgacacacatttaacaggatcttcgggtggtgttgagattaccgtgtgcacaagtgttaataaacaatataacccggaagggtgcg

SEQ ID NO: 93520 - DNA, 1065 bp, Arabidopsis thaliana columbia
  unsure (1)..(1065): unsure at all n locations
nnnnnnnnnnnnnnnnnnnnnnnnnnnnnnnnnnnnnnnnnnnnnnnnnnnnnnnnnnnnnnnnnnnnnnnnnctttgggttttttttttagtattactgcaaaatgcaaactaatccatttcttcttattttctcaaaggttcatatctacattgattgttattgactgaatcagctgagcagattaaacaaaaagctgaactatgagaatatttaattgtttcttcaggaatataaaggaaccccaaaagctctctttaatgtgcaatcaaatctatgagcttctgcaccagatactgctaattccaagatattggatatatcttcactttgcggatggaaccgatcaccagatacaaacgctgaaacgcaatccttgatcttaattgatgaccatccgggctctttgatcacgccttttgctttcatattctttcttacatttgcagcttcttccaagttccctgtgcttgaatatatattggctagtgttacaagtgcagttgcacaagtaggatccagctctagaatcctctcagccgcccttcttccacgttcagtgtctcctttcgccttacacgcattgagaagtgtggtccagactacatcgtccttcttccatggcatctcattgatcatctgctctgcaacacttggccggcctgctctacacagcagatcaaccatacatccatagtgttccttggttggtctgataatatacttctcttgcatcaagttgagatagtgaaaaccaaggtcatgatgtcctgaatgagtaaagggcgagagaatgctgatgaaagttacagagtcgggtctgagaccaaccttcagactcttctcaaacagatctatagctttttaggtctttccatgttctgcatatccattgatcaaagaagcaatatcatctctgtctatttctgcgaatactttgaagcttcttcgatacttccacattttgagtacaaaaaaaaaaaaaaaaagnnnnnnnnnnnnnnnnnnnnnnnnnnnnnnnnnnnnnnnnnnnnnnnnnnnnnnnnnnnnnnnnnnnnnnnnnt

SEQ ID NO: 93521 - DNA, 841 bp, Arabidopsis thaliana columbia
  unsure (1)..(841): unsure at all n locations
nnnnnnnnnnnnnnnnnnnnnnnnnnnnnnnnnnnnnnnnnnnnnnnnnnnnnnnnnnnnnnnnnnnncaaaactctcccacgcgggctcccgatttctccaagcagccatggctccgaaatcgaaagaaaaatccaaaacatcgaattcacaaccacctccagcaatcgaagatctcttcacttccctccaccaacatatcaaggatactaaatatgaagaagccgtcaaggtcgctgatcaagttttgtcgattgtacctaccgatgaggatgcgatccgatgcaaagttgtggctctgataaaagacgataagttcgatgattatctaatcaaagacgttaagatcaatggtgctctctccgtcattaactcgttccagaagcttccaatcgatctaggttttcacaaggcgtattgcttataccgtgtaaacaagctagatgaggctttggtgtgtttaaaaggtctcgagagagatacagatactttggttttggaggctcagattttgtaccgtttggggaaagcagatgcgtgtgtggatgtgtatcagaaactgaccaagtcccagattgagacgttagaggtgaatttagtcgccgggttgatttcagctggaaaagcttctcaagtgcagaaaacattggagagtttgtagatcaaaccaactagtagttttgagttggcttataatactgcttgctctttgattgaaaacaataactatgctgatgctgaacaacttttgctcactgccaggagaattgggcaggaaaaccctcaatgatgacgacatctctttaaccgatgaagaaattgagatttgtgctggccccca

SEQ ID NO: 93522 - DNA, 512 bp, Arabidopsis thaliana columbia
  unsure (1)..(512): unsure at all n locations
atttacatcatcacttgatttaaaacaagtaagtagataagtggagcataagaaaaccacctactactatgagacacaaaaagggagaaaaagaagaccacccaactacaaagtctacaatatctgaaatttccaagaaaaaatctaatattaccgaaaaacaaaagaaagatttacaaaacctaaatctattgactaatcaagaagaaaaagtcaataagaatattgaactctgtgatctcggtctctaagaatcccattgtacagagccatccggttcgctggcatggtagagattctacaccatagaaccggtctttccccggtttagtcactggcttcggtacgcttttccgggtcaattcccccctccgggacttcttccccggtacctttcggatctttcacattatccgcgaaccgcactttccttatcttcttccccggtttcctcgtcccctgagccagaaaccttaaattccngggaattttcaaaatccggcngggnattt

SEQ ID NO: 93523 - DNA, 302 bp, Arabidopsis thaliana columbia
tatgaatccaataaccccaaatttatgaagattttagattaccttttataaatcttaaatgaataacacaaaactttaacatactttaaaaaaatcttgattgcataacaagagatttacatgacactttaagtaactaaaactcttttcaaatcataaacaaataacaccacctaaatcttttacaaggattctattatctcggcaattatttgatatattttacccaaataatcaaccctgactaaaaataaatacaagccaaattctcttcgttgtttttttatcacacgcctctaaaa

SEQ ID NO: 93524 - DNA, 662 bp, Arabidopsis thaliana columbia
acctactaaaacatatggcaaggctctaatctcccactagagcatactatctaacagaattattatcactataagctaacaatcacttaccggcgatcacagagaacaaggtctccaccgtcgaagcaaataaagcaaacatcttcttccttgtcttccttccgcggcggcggtgggggtggacgaatatgcaacggcgtattagcctgtgcccttggaggcctcccccgatttccgtttattggggcagcttcatcaaaaactttaacctcgtgctcattggacataggcacagcaaccgccccagcaaccgtggaggcaggtacagagagagcaggaacttggttaacaccgatctcttcacattgatcaactctcataagatcgattcctctgacggaactctcttcgcgaccagccaaagaagccaactccggcacgccttgctggagttgcttctgttgattctccatgattagtgaagaatttgaaaaaattgtgagcagtacttgcagatcaactagtgaaatagaaaccctaatctgaggttctttggggattttggcgatgatgaatgatgatgatgatggagagaagtcatgggtgatgtgtttagaacgcgaagaaaagtgggaagaaaaaatcatatggacttttttttt

SEQ ID NO: 93525 - DNA, 697 bp, Arabidopsis thaliana columbia
  unsure (1)..(697): unsure at all n locations
gccnnaccccaacngctgccagttgccaatgntccaagnacccacttctcgtgaggtgtccaatgctggaggccaagggctacccaacggcatccttgtggaagctgcttcggtcaaccagtatgttcacaaggcacaaggagaggatggacaagaaggttgtggatctcgctcgggatgttgcgaaagtcgagttaccgccttatcgcaaccatcttgatgtagtggtggcttgtgaggatgaagatgacaatgacgtcgatattcctctcgtctctatctacttcaggtgaaaagtttcgagagaatgaagaaagatgaaactcttgagagcaaatttgtgtgttttgtctctgcatctgccctacgttattatcttttggatgcttgtgggtgagatgactgatttttacttgagggggatagagacccattttatctctctcgttctattttagtctttctttctatgtacaattgctgaatgtgtggtttacacacccgttaccttctaaacatgttctatcaaacaaatcttcgagtttttcggtttcttccatgtcttcttgcaggtggtgtttcgcgataagaatccgaaagatataatctaccttaaataatatccactctgtgaatctatttacagagaacaaattgaagcaaagaactaaagatataatctagggtcaagtctcga

SEQ ID NO: 93526 - DNA, 619 bp, Arabidopsis thaliana columbia
  unsure (1)..(619): unsure at all n locations
aacccacnnncccccaaaagggtggnaaccccccggnaccangncttggcccaagttttgggaccanaatgggnccncaaggggaacccccaacctcctccgngagggtgtnccaagtggcntggagnccaaaagggccttaancccataccagcaccncttggtgaaaactggcctccggtncaacagtttgtccacaaggcaccaaggagaggatgggacaagaaggttgtggatcccgctcgggatgttgcgaaagtcgagttaccgccttatcgcaaccatcttgatgtagtggtggcttgtgaggatgaagatgacaatgacgtcgatattcctctcgtctctatctacttcaggtgaaaagtttcgagagaatgaagaaagatgaaactcttgagagcaaatttgtgtgttttgtctctgcatctgccctacgttattatcttttggatgcttgtgggtgagataactgatttttacttgagggggatagagactcattttatctctctcgttctattttagtctttctttctatgtacaattgctgaatgtgtggtttacacacccggcggccgcgattcgatatccatattttcganacctagtacttgtg

SEQ ID NO: 93527 - DNA, 856 bp, Arabidopsis thaliana columbia
  unsure (1)..(856): unsure at all n locations
tctaaagacttcacgaagatacgatctcttcggttcgaaatgtgaataattgggccggtgcggcttggatcactcccatagccggagcttacatcgctgactcatacatcgctcgctcctggactttgactgcctcctctctcatctacgccctggcgatgattctcttgacattggcggtaacaggaaaatccctaggaccgccatgcgaactcggggtatgcaacaaggcctcctcgttacaagtaacatttttctacatatccctctataccatagctattggagccggtggaacaaaacctaacatttccacatttggagcggaccaattcgacagttatagcattgaagaaaaaaagcaaaaggtttcattcttcaattggtggatgtttagctctttcttaggcgcgttgtttgcgacattggggctcgtctacatccaagagaatctcggatggggtttaggttatggcatccctaccgtaggactcttggtttctctcgttgtgttctatattggaacaccattttacaggcataaggttatcaaaacagacaatttggcgaaagatttggttcaagttcctatcgcggcattcaaaaaccgaaagcttcagtgtcctgatgaccacttggagctttatgagcttgactctcattattacaaaagcaatggtaagcatcaagttcatcacacgcccgtcttcaggttcttggataaagcggccattaagacaagttcaagagtgccatgtacggtgacaaangtggaagtggcaaagcgtgtgctaggacttatctttatatggcttggcactttgatcccaagcaccttgtgggcacaagtcaacac

SEQ ID NO: 93528 - DNA, 695 bp, Arabidopsis thaliana columbia
  unsure (1)..(695): unsure at all n locations
agcaaatctctaagacttgttctcattttgtttgttcaaaatccctttaaaaaaaaacacaatgcaggcttaaattatgtccgtttagtcgctctcttcacagtcctgacctctctcaactctcacaacattaccaaatacatcccataaaaaaacaattctttaaaaaaaaaaattttgatataaacagaaaaaacatttaatggaggctgcaaaagtttacacacaagatggcaccgtcgacctccaaggccgtcccgtcctcgcctccaagaccggtcgttggagagcttgctctttcctcctcggtatatgttttcgcaaacctcagataactattttcatctatagataacttgaaaaatataaaaacataaatctttatgtagtcttttgtgtctttatgtgtgtgtgtgcgagaagggtatgaagcgtttgagaggatggcgttttatggaatagcgtcgaacttagtgaattatttgactaaaagacttcacgaagatacgatctcttcggttagatatgtgaataattgggccggtgcggtttggatcactcccatagccggagcgtacatcgctgactcatacataggtcgcttctggacttttactgcctnctctctgatctacgtcctagtattaattctacagtctcttttatttcttatggttaaaatacgaattaaactc

SEQ ID NO: 93529 - DNA, 652 bp, Arabidopsis thaliana columbia
  unsure (1)..(652): unsure at all n locations
aactgcgacgacagaaggggaaacacagagagtgacgagagagagagtgaaaatggagaagtactttggaaatgcgtacaggggagatccaggagtgccacatgcagatgcagatcgtttcgtgaatatatggattggttctgctgctttctccgttcttacctgggttaatccttacatgtggcagctctctaaccagttcaattaccatgacaagtggatgctgtttgagcagtaccactggaaaaaagcaagggcaaagaagcaaccttatgaattcaagtggaataagatacccaaagaagtcagggactcgtactattacaactggccagtctacttcccatagaagtgtctctgtgttgctgtgaatcagaagagaaaccaaacacttgtggaacttctatggaatctatctctatctcttcttgatctgttattcgtagcacttttggattttaagttttttcttttgtaatgatcaatctctcaactcttcactgtttcatctcctctagttgactctcttatggaaatattgaatctctttgcaggggaaaaaaaaaaaaaaaaaaaaaaacccaaannnnnnnnnnnnnnnnnnnnnnnnnnnnnnnnnnnnnnnnnnnnnnnnnnnnnnnnnnnnnnnnnc

SEQ ID NO: 93530 - DNA, 574 bp, Arabidopsis thaliana columbia
gtcgtccggattcgcgtcgcccacgcgtccgcggacgcgtgggtggatttgtagttggccatgagatattcgtttccactccgcattaaccacataagtaatgaattattcttcttctcgtcatatgggctaatatcattcaaattcttgcgaatgtaagatgtatagaaaaaaccgcccactatagaaatcatcaaaatctatgaaaatgattttgtcgcggaagttgaactgagtcattacaatttggacccagcgtcattgagcaaaaacctatttaatcgagggtacagaaagttagcgtagggactattgatagattgatagaacagaacagtacctaacaagatttacataaatgatcgatgtcccctctcttatacaacaatgaagtattgaacaatcacttccaacatgattgtggtccgtggtttaactatccaaaacttatataagagtcacttgaaataatatttgttaatcacaaaaataagaatcataaaaataaataaacggtgcaaagcaataaagccaatgcagggtttaatgcaggctttctgcatcattttttttt

SEQ ID NO: 93531 - DNA, 373 bp, Arabidopsis thaliana columbia
  unsure (1)..(373): unsure at all n locations
atcttactgtctctctctctctctctctatctctctctctctctctctcttctctagtctaatctgggcaaaaatctctactctaggaagagaagtttcctccttcgactttcttctttctcaatatgaatcccggaaaatcgggaacctctagcgatttcagctaatctttacttacctttcctttagttctgacaagaagtagcaatacccttttggagattcgatcgtattcgctgttttttttttgtgttttagctgtcttcgtgtctctnctactttgtgtttgancatggngagatctgattctagngatttntacaactttcnntaagncttctncctgntaacaaaaagngcactcctttgacgg

SEQ ID NO: 93532 - DNA, 1115 bp, Arabidopsis thaliana columbia
ggatcccagactctttatttctcttcctcacctaagcttcagcatcgtaaatttaaaactaaaatcgcatcaaatcccggagataggaaagaaaataattgattgtttctagtgaagaacaaaaaaaaaaagtcgaagactttacatctgggttcatcgatttgagataagatcttctttatttgttatcttcaagtttctgcaatgggtatggcagcagaatcgcagtttcatgttttagctgttgatgatagtttatttgatcggaaacttattgagagattgcttcaaaagtcttcgtgtcaagtaacaactgttgattctggctcaaaggctttggagtttctgggtttaagacaaagtactgatagtaacgacccaaatgcgttttctaaggctcctgttaatcaccaggtagttgaagtgaatcttataattacagattattgtatgcctggcatgactggttatgatttgctcaagaaagtcaaggaatcatcagcttttagagatataccagtagttatcatgtcctcagagaacgttcctgcaagaatcagcagatgtttagaagaaggagctgaagagtttttcttgaaaccagtaagattggctgatcttaacaagttgaaacctcatatgatgaaaacaaagttgaagaaccagaagctggaggagattgagacaacttcaaaagtcgaaaatggagtccccactgcagtagctgatccagagattaaagattcaacaaacattgaaattgaaatcttgcctctgcaacaagatctgctattagttcaacaagaggagcaaacattgagtatcaacaacaagaggaagtcagtggaagaagggatttcaactgatagagcacgtcctagattcgacggtatcgcaaccgctgtctgatctaccagctatgatacttcttttttcggtttctgatttagatttttgtagattttcttaggaatgcttctactggtacagtacatggtttcagtagggaatgcagagaggggaatatgatgatgatgttgtatgtggggataatgtttataagtacatcagtaaatcttacatggttaatcccccagttcccagttttgtttcct

SEQ ID NO: 93533 - DNA, 1346 bp, Arabidopsis thaliana columbia
tgaaaaatacaaacccccttttatttctcctcttctctcctacaagctcattcagaactctcaacatttccggtagagaaaaaaaaaccgttttttttttaatctctttctaaagaaggatatcaaaacaaaacacaaagttgaaaactttgcatctgggtttgtctattttagattcagatcttagtttttttcgattgaatatctacaatggtaatggaaacagagtcaaagttccatgttttagctgttgatgatagtctttttgatcggaaaatgattgagagattgcttcaaaagtcttcatgtcaagtaactacagttgattcaggctctaaagctctggaatttctgggtttaagagtagatgacaacgacccaaatgcactctctacatcgccacaaattcatcaggaagttgaaataaatctaataattacagattactgtatgcctggcatgactggttatgatttgctcaagaaagttaaggaatcagcggcgtttagaagtatacctgtagttataatgtcatctgagaacgttcctgcaagaatctccagatgtttggaagaaggagctgaagagtttttcttgaaaccagtgaagttagctgatcttaccaagttgaaacctcatatgatgaaaacgaagttgaagaaagaaagtgagaaaccagttgccatagaagagattgtggtgtctaaaccggagatagaagaagaagaagaagagtcatcagtgattgaaatcttgcctctccaccaagaaattgaatccgaacaacttgaaccaatgttgagtagtaataagagaaaagcaatggaagaagtggtttctactgatcgatcacgtcctaaatacaatgatatcacaacctcggtctgaaggaggactaacgcaacccgagaagccactacaagacctatatggagaatgccaacagaatctctcagtagaagatctgctaactcttgaatatgaagcaaacaacaacggactgctaggagtaataccgcagcaacatcgttatcatcaggaaaaagagacaatgcagacacaaggagatccactaaatcgaatacctattcaatcagaagcttcaaaccattcagatagtggtgatagcacactaacaatggctcaaaaccaggatggtctcggacacagtagttgttttattctctgtcaatttacttctctcccctagattagctttcttcgtttttttcttttatttttcatgctgttaaacccacaagatttttgggaagtttcttgctactagcttaagaatccaaaactattgcaaagattgaagctttcgagaattagtaatgaatctt

SEQ ID NO: 93534 - DNA, 407 bp, Arabidopsis thaliana columbia
gcagcgagctagctgcacaacgcagaattcgtcgccctttctcagttactgaagtagaggcactggttcgttgccgttgagaaactcccaaccggaagggggagagatgtgaaggttcgtgctttcgaggacgcagaccatcgtacctatgttgatctcaaggataagtggaagacgctggtccacacggcaaggatatctccacaacagcggagaggagagccggtgccacaggaacttctggaccgtgttttgaaggcacacgcttactggtcacaacacctaatgcatcaactgcagactgagccaccatccactcaggtagaggctctctaatctgaacaggttcttggtctaaagaacctttgtggattattatgatgatccatattggaagattctgacat

SEQ ID NO: 93535 - DNA, 431 bp, Arabidopsis thaliana columbia
  unsure (1)..(431): unsure at all n locations
aaaacagggccgcccaacgcgnccggggaaggacagggacaacagggacaacaagggggtagaagttcaaccacgggaaggaccggggcggcagggacaacaaggacgacagggacaacaaggccaaccatgggaaggacagggacagcagggacaacaagggggccgcgacacgcaccagaagggggaacacgcgagacgcggagacgncnnngccaacacgccaggcaccgcccaccggancaacaacacaggagaacagccacncgccaccagcgcgcaacgcgacagcgccaacnaccaaaaccaacncgaccgcaacccaagagggggccaaaaggccggaaacaaccagcagggaggcnnnggcggnncacagcaacaacaagaacagaaaaacccggggagcgggngcgacgcacaggncacag

SEQ ID NO: 93536 - DNA, 503 bp, Arabidopsis thaliana columbia
gaaatagagtgtagtgaccttcttttttatttgaatttagatatatatcgattatatcgatcgctttgggaattttacatatagtatttttaaacggccgaatcagcatattttttgaagccccgtaactcttcctcagccaggcttgggcagaatagcggagcaagtattagtagcatagcaaaaatgcgttcctcatcattaagtcattaaattcatatgtttgctcgcggtaattgtgaactctcgggagaatcgatgactgcatcaaagatgcacttgttagtacatctgaaaattctgaattggctagttgtaaatagccccaggactatagaataaaggattatcccgaacctacaccgaggtattgacggtgattctcaaatatcacagaacagaatgtgatacgatgagatagaatgcaatagaaacaaagacacagggaacgggttaccgactcttaacggtcaaagcgaacccgttcattcttacattctgaa

SEQ ID NO: 93537 - DNA, 494 bp, Arabidopsis thaliana columbia
ctcgctctctgtcgtttggtatctctcgctccgtccttcctcagatctgatcgtccgccggttttcacgatgccgtcttcctcctccgccgccgtcctcgtgttccttcttctcgtttcccttctcactcctacgttcgcatccgattcagatcacaaggtaagactcggatctccagtcgttttttcttttcttttaatgcagctcgaaatcgagcactgtgtccgtagatccgtgatttgcatggtgtttgcgattgaattttttttcatggatctgttcgtttacggattgctaggatcctcgagcttctattcattgtgatttaggcgtatcttttcgttgcaagtctaggcgtattttgtctattcattgtgatttaggcttttcacaatctcgattttaataagaaattttgatgttggtttgagattctcgttgatttctgcacgtggtagcctgtttgatgttcaaatacttggatcaacactgag

SEQ ID NO: 93538 - DNA, 1231 bp, Arabidopsis thaliana columbia
gccccccctcggtttcgacggtatacataagcttgatatcgaattcgcctctctctcgattggtatctctcgctccgtccttcctcagatctgatcgtccgccggttttcacgatgccgtcttcctcctccgccgccgtcctcgtgttccttcttctcgtttcccttctcactcctacgttcgcatccgattcagatcacaagtatcaagccgaggagcaggtcaccctatgggtaaacaaagttggcccatataacaatccacaagaaacatacaactattacagtcttccattttgccgcccatctggaaacaatgttcacaaatggggtggtcttggtgaagttctaggtggaaatgagctgattgacagtgagattgcgataaaattcatgaagaatgtcgagagaagtgtcatctgtccgcttgaactcgatgaagctaaggtcaagcattttaaagatgccattgaatctagctactggttcgaattttttatggatgatctacctttgtggggctttgtgggggggctgcatcctgccaaaaatagtgaaaacggcaagcatgttctttacacacataagaacattgttgtcaaatacaacaaagaccagatcattcatgttaatctcactcaagacaacccaaggccattggaagcagggaaaaaaatggacctgacgtattctgtgcaatggattccaacaaatgtcacatttgctcgccgctttgacgtatatctggattatccgttctttgaacaccagatccactggttctccatctttaactcgttcatgatggttattttcctcaccggtttggtctcaatgatattgatgaggactctcagaaatgattatgcgaagtatgctagagaagatgatgatcttgagagcttggaacgggatgtaagtgaagaatctggttggaaacttgtgcatggagatgtgttcaggccagcaagtagtctagttctgctctcagcggtagttggtacaggtgcacagttggcgttgctggttcttcttgtcatattaatggccatcgtgggaactctctacgttgggagaggagcaatcgtcacaactttcatagtgtgctatgctctgacttcttttgtctctggttatgtgagcggtggaatgtactcaagaagcgggggtaaacattggatcaagtgcatggtcctcacggcttctctcttcccctttttgtgcttcggaat

SEQ ID NO: 93539 - DNA, 379 bp, Arabidopsis thaliana columbia
atctatatctcgatacttgtattacagtttacagcagttattaaacggactccacatcatacgtcactgtgcaagtatcatttagaggctttctctgtttattgacaggaaagaactcaaaaacaactaaatcagcccagatatcggggtcatttccttcatcggtatctggacgcacgttgacatcaaagaagacaaacgtatgatccctttcaatagctttccctaaagcccaacaatgcaaatttatttctctcctatgagagcggccttcctcgtttttccatttgcaaacacaactaatgccaaaatcagtatcatcacagtaaccctcggaaaatgcgacttgcaccagcatagcaaagcccacaagtgtgtt

SEQ ID NO: 93540 - DNA, 358 bp, Arabidopsis thaliana columbia
  unsure (1)..(358): unsure at all n locations
aagatacaaaatggctcgaggcncncaaactgggttggctttctccnnaacacnnnnganccggggccatggctacgcggctcaacaggcccacgcacggccagcaggnnccgaacgagggccagcncgaccagcncaacgcgcncgagccgncacacgnaccgaagagcgaggcaggncgcaacgaggggggggaccaccacgcaccacagcnccgangcncaggagacncccaagcacgnnacaacaacgagacaaaggggcacaacccgcccaccaacgagaacaccgcgaagcncnccnncgnggcnaaaggacgaggncnnangggaaaagggancccnggangcgccgaaac

SEQ ID NO: 93541 - DNA, 291 bp, Arabidopsis thaliana columbia
  unsure (1)..(291): unsure at all n locations
ggagtatgttatgctcagngccacacgnggtangnnttttggcaangcganggngcnggcggggnacaacaggaacgcnaacgagcacctccacngcacnggaggacaaggaagganccaagnggncaacgacaacggacagaacgngnnggaccaacaggngcagaagggacagcncgnggncancccacaagggancgcaaacgccgnccagncccacggaaacaagnncgagnggancgcnnncaaaacgaacgaaaacgcaaggancagcacnnncggcgggagaac

SEQ ID NO: 93542 - DNA, 462 bp, Arabidopsis thaliana columbia
atctgattcgatctaccagaaaaatttctctctcgctacgtttttctcatggcatcggatcaacgtgacactgatttctccgctgaatcaccagatctagaagaagacggcggcggtggcggtggcgggaagaggaggaggagaaactgaatccgacgaagatgttgttatacccgaaccaaacgaagccgaagacgacgatcacgatcccgatcccgatccagaatacgaagatctgaattctccgtcaatgatttccagagctccggcgacgaaatcatcctcaggaaccgtaaccgtcgctcttcccgctggatccgccgtacctgtagcttcaattccatcagattccgatcagaaatggcaccgtatgactgaaatcgttcatcagagaccaccgattgatgattcgcgacgtttattccagagactatggactgacgaagacgagatcgaacttct

SEQ ID NO: 93543 - DNA, 576 bp, Arabidopsis thaliana columbia
  unsure (1)..(576): unsure at all n locations
gcaaagaaaaaaaaagaaagatgaagaatgtgaatcgagtcttcttctgcaaatnactatctctngtcttcctcgttccttctttcactcgtnctcatctccgattcacttactccgccgccggtgcttcttctcctaatcgagctattcactgcatggcttccgattcccctcaatccggagatggttccgtctcttctcctcctaatgtcgcggctgttccctcttcttcttcttcttcttcgtccgcttcttccgccattgatttcctctctctctgtactcgtctcaagacaactccaagagctggatggattaagagagatgtgaaagatccagaatctatagcggatcacatgtatcggatgggtcttatggctctaatttcttcagatatccccggtgttaacagagacaaatgcatgaaaatggcgattgttcatgatattgcagaagccattgtaggagacattacacctttctggtgggatatctaaagaagagaaaaaccgaagagaaagcgaagcacttgagcacatgtgcaaactcttgggtggaggcgaaagagcaaaagaa

SEQ ID NO: 93544 - DNA, 601 bp, Arabidopsis thaliana columbia
ctcgggccgacccatgcgtccactctctgctctgctcccaaatgttatcgtcctccggaagctccctcttatggcggagccgtacacatgtgcctgcaccgccgcctcggtcttcgccaccgcttaaagctctctcctttcccttctcttccagtttatggtttattcacagaaccacaatttctcctctttcgtgttcagctgaaagttcctcggagattgccctggcgcagagccagcctgcccctgatttcaatccctggtcggagttcgctcaaaatgtgtctggcgaatgggacggtttcggagcagattttacatgcgaagggcaaccgctagaactacctgaatcagtggttccagaagcctttagagaatgggaagtgaaggtgttcgattggcagacgcagtgtcccactcgtgcccagcccagctcactatcctttctttacaagtccatcaaactcctccccaccgttggatgtgaagctgatgcagccacccgttacagcatcgaccagaggatcatcgggggaggcaaatcctctgcatcagccttttcgtattctgtcactggctcctatgtcgctgtgtggccttt

SEQ ID NO: 93545 - DNA, 434 bp, Arabidopsis thaliana columbia
ccaacttatagccctccagtaaagccaccaccagtacaattgcctccaaccccaacttatagccctcccgtaggaccaccaccagtacaagtgcctccaaccccaacttatagccctcccgtaaaaccaccaccagtacaagtacctccaacaccaacttatagccctcccataaaaccaccaccggtacaagtgcctccaacaccaaacttactccatcacctccccaaggtggatacggtactcctcctccatatgcatatctatcgcatcctatagacataaggaactaggtaaacaagatacagtacatatatttcctcaaggatcgccaaataggctttctagcacaagagagatgtatgttaaagctacatatggtactgcatattatgtggtaaaataaataaagttctataaatggttgttcacat

SEQ ID NO: 93546 - DNA, 431 bp, Arabidopsis thaliana columbia
  unsure (1)..(431): unsure at all n locations
cgctcttctcgacatcgccaacnaccaatacctactctaccgcaaccctagagnngggcatgtggccggaaacaaccagcaggcaggctaaggcggnncacagcaacaacaagaacagaaaaacnngnggagcgggnncgacgcacaggncanagcncaagcanngaaaattgacgttcagnnggcncagcagcttcagatccaacaagacagcagaggaaacaggcgggcgtgttaaggggacccccccaggccgcgaggccaccnccaagacagcccnacgagagcgaggagnggagacacccacgnagcccacagggcaacggccnngaggagaccancngcagcangaggncccacgagaacanngacgacccngcncgngccgacgngnacaagcccagccaaggncgcgngaccagcgncaacag

SEQ ID NO: 93547 - DNA, 384 bp, Arabidopsis thaliana columbia
  unsure (1)..(384): unsure at all n locations
gacccacgcgnccgggaagaaaaaggggtcgagncncaaccaccnattttcaatttctctttgacacncaanganccacggcaggggctacactgcccaacaggggcgccaaccagagccagctcgaccaacncaangcgctcgaaccancccaaancancaagagcgagggnggncgcancgaggncngggaccaccangcaccccagcnccggggcnccggcanggcccccgagcganncgacanagagccccagggncnanacnggcccacanncnngaacgccggcaaacacacganggaggggcacggaaggggaccaacgggaagagggaanccgggaagcgccgagacgcncanggagncaccggnaannggagaag

SEQ ID NO: 93548 - DNA, 488 bp, Arabidopsis thaliana columbia
gaagaaacttcacatcagcatcagaatctctctttctctctctctccttcttcacaggcaaaaaaacaccaaaccatttttctttcttcattgtgccgacacttctttcccctctctctctctctctccaccgccatggattcctcctatggcgccacaaagttccttctcctcctcttcctcaccacctccattgcgaccgcattacccgataacaaaccagtaccgggtcaaataaactcaaactcagtcctcgtagctctcctggactctcactacacagagctagcagaactagtcgaaaaagctctccttctccagaccctcgaagaagcagttggtaaacacaacatcacaatcttcgcaccacgcaacgatgccttggaacgaaacttagacccactcttcaaatctttcttgctcgaaccaagaaacctcaaatctttacaatctttattaatgttccacattcttcctaaacgaatcac

SEQ ID NO: 93549 - DNA, 509 bp, Arabidopsis thaliana columbia
  unsure (1)..(509): unsure at all n locations
ctgggcaaaccgtccaaagagctacatttctagaaccaagggctgggaagacttcccacaaggccggtggggtgattcacgcagnctntcatatggtgcactctcggatcatcagttctcacgtccgcgagcacgtgacaagaagcttcaacaagaatgggttgtcccactgaaaagtgttgaagatattcaggagaaattcaaggagctctgccttggaaaccttaaaagcagtccctggtctgaattagatggactccagccagagacaaggataataaacgagcaactggtaaaagtcaaactccaaaggcttcttgaccatcaatagccaaccatccagtcaacgccggaggggtctggattcccccactgttgggtgggggaggtcctcgttgggtattgttttcccaaaagggttatctaggggtcttttggccctaaagggggaatttgattcccttggggggggattgcaaacttttgccaccgttattaaagggtgtgaa

SEQ ID NO: 93550 - DNA, 1457 bp, Arabidopsis thaliana columbia
  unsure (1)..(1457): unsure at all n locations
nnnnnnnnnnnnnnnnnnnnnnnnnnnnnnnnnnnnnnnnnnnnnnnnnnnnnnnnnnnnnnnnnnnnnnnccacgcgtccgaacattttggaatctctctgtttactataaagcagtgagtagaagaacctgaaagaactcgcctttgtctctcattcttcttctccatttcgaaaagaagatgaaggtgatagataagatccagtcattagccgacgaaggcaaaacagcgttttccttcgaattcttcccaccaaagacagaagatggagtcgacaatctctttgagagaatggatcgaatggttgcttatggtccaacgttttgcgatatcacttggggagctggtggatctaccgcagatctaacgcttgatatagcttcgaggatgcaaaacgttgtttgtgttgagagtatgatgcatcttacgtgtactaacatgcctgttgagaagattgatcatgctcttgagactattagatctaatgggattcagaatgtgcttgctcttagaggtgatcctcctcatggtcaagataagtttgttcaggttgaaggtggttttgattgtgctttggatcttgttaatcacattcgtagcaagtatggtgattactttggtaatcactgttgctggttatcctgaggctcatccggatgttattgaagctgatggacttgctactcctgaatcttatcagagtgatcttgcttacttgaagaaaaaggttgatgctggagcagatttgattgtgactcagcttttctatgatactgatatattcctcaagtttgtgaatgattgtcggcaaatcgggattaattgtcccattgttcctggaattatgcctatttccaactacaaggggttcttgcgtatggctggtttctgtaagaccaagatacccgctgagctcactgctgccttagagcctattaaggataatgacgaggctgttaaagcctatggaattcactttgcaacagaaatgtgcaaaaagattttggcccatggaatcacttcccttcatctctacacattgaacgtggacaaatcagctattgggatattaatgaaccttggtctgattgatgagtcaaaaatttctcgttctctaccttggagacgccctgcaaatgttttccgtactaaggaagatgttcgcccaattttctgggcaaaccgtccaaagagctacatatctagaacaaagggctggaatgacttcccacatggacgttggggtgattcacacagtgcagcatacagtacactttcggattatcagtttgcgcgcccaaaaggacgtgacaagaagcttcagcaaggatgggcgtcccctgaaagcattnaggtntcaagggnattcaaagggtttcattggactttaaagngccntggcttaatnggtggcncngcnggcaaggcctantgnactggaatcacncangtcct

SEQ ID NO: 93551 - DNA, 584 bp, Arabidopsis thaliana columbia
  unsure (1)..(584): unsure at all n locations
ccaaacttgcctctccaccaccacttcctctacctatctaattccgaatctggatttggatttggatctcatttcgattcaacgatgaaggtggttgataagatcaaatccgtgacggagcaaggccaaacagctttctccttcgagtttttcccaccgaagacagaagatggcgtcgagaatctctttgaacgaatggatcgattggtctcttatggacctaccttctgcgatatcacttggggtgctggtggatccacagctgatctcactctcgagattgcttctaggatgcagaatgttatctgcgtcgagactatgatgcatctcacttgtaccaacatgccgattgagaagattgatcacgcgcttgagacgattagatctaatggaattcagaatgtgcttgctcttagaggagatcctcctcatgggcaagataagtttgttcagggtgaaggtggttttgcttgtgctttggacctggggaatcacattcggagcaagtatggcggattaccttggtacactgtgctggtaactgagncancggtgtatgacngntgnctgcaacccgaactaca

SEQ ID NO: 93552 - DNA, 1211 bp, Arabidopsis thaliana columbia
  unsure (1)..(1211): unsure at all n locations
agctctctacgactcactatttggaaagctggcacgcctgcaggtaccggtccggaattcccgggtcgtcccacgcgtccgcgaggctgttaaagcctatggaattcactttgcaacagaaatgtgcaaaaagattttggcccatggaatcacttcccttcatctctacacattgaacgtggacaaatcagctattgggatattaatgaaccttggtctgattgatgagtcaaaaatttctcgttctctaccttggagacgccctgcaaatgttttccgtactaaggaagatgttcgcccaattttctgggcaaaccgtccaaagagctacatatctagaacaaagggctggaatgacttcccacatggacgttggggtgattcacacagtgcagcatacagtacactttcggattatcagtttgcgcgcccaaaaggacgtgacaagaagcttcagcaagaatgggtcgtcccactgaaaagcattgaagatgttcaagagaaattcaaagagctctgcattggaaacttaaaaagcagcccatggtctgaattagatggactccagccagagacaaagatcataaatgagcaactcggaaaaatcaactccaacggtttcctgaccattaatagccaaccatcagtcaatgcagccaaatccgattctccagctattggatggggtggtcctggtggttacgtctaccagaaagcttatctggagttcttctgttcaaaggataagttagacacacttgtggagaaatccaaagcttttccttctatcacctacatggccgtgaacaaatcagagaattgggtatcaaacaccggtgagtccgatgtgaatgcagttacttggggagtgttcccagctaaggaggttattcaaccgacggatcgtggatccagccagtttcaaagtctggaaagtcgaggcgtttgagattttggtcaagaaagctgggctaacttcgtacccagaaggttgacccttctagcaaagtttntcgaggagggtnaagnaccagctactattttggaaagcttaggtgggcaacaattnccatcaattgggtgntaancntncnctggcctttgctttatttccgngaaaanccacccgccgaggggggaacaattcggtttcgngggnttgttttgaccctttaaaagnattttttgttncgaananccaccttngtngc

SEQ ID NO: 93553 - DNA, 640 bp, Arabidopsis thaliana columbia
  unsure (1)..(640): unsure at all n locations
nnnnnnnnnnnnnnnnnnntatacgactcatatagggaaagctggtacgcctgcaggtaccggtccggaattcccgtgtcgacccacgcgtccgaaacaccggtgagtccgatgtgaatgcagttacttggggagtgttcccagctaaggaggttattcaaccgacgatcgtggatccagccagtttcaaagtctggaaagacgaagcgtttgagatttggtcaagaagctgggctaacttgtacccagaagatgacccttctagaaagttgctcgaggaggtgaagaacagctactatttggtaagcttagtggacaacaattacatcaatggtgatatcttctctgtctttgcttgatctccgagaaaaccaccggcgaagaggaaacattcgatttcgagatttgttttgtaccttttaaagttatttttgattcgtaataaccttactttgatgaatcaacaaaaacatcagtttgattgcaatgaaaaaaatcgccttagcggtttgttctttccaaaaaaaaaaaaaaaaaaaaaaaaaaaaaaaaaaaaaaaaaaaaaaaaaaaaaaaaagggcggccgctctagaggatccaagcttacgtacgcgtgcatgcgacgtcaaagctcttctat

SEQ ID NO: 93554 - DNA, 713 bp, Arabidopsis thaliana columbia
ttgattttcccccccaaacttggttggaaatgggggaaaggttcccttgtttgggattattggtattacccaaaaagggctttattctaaaagtttctttcttgctccaaagggaaaaaattaaaatccagtgggtggagaaaatgcaaagctttgccatcgatttacttacatgcctgtgacaaaaggaaaccagtgggtatcgaacactgcccaagctgatgtgaatgctgtaacttggggagttttcccggctaaggaaatcattcaaccaaccattgtcgatcccgctagcttcaacgtctggaaggatgaagcatttgagacttggtcaagaagctgggctaacttgtacccagaagccgacccttccagaaacttgctcgaggaggtgaagaacagctactatttggtaagcttggtggagaacgattacatcaatggtgacatattcgcggtgtttgctgatctttgagaaaatcaagagacaactacagtatatcggtttcctactgctttcaagatttgcttttgtactttctctaaaatattgggattttgttttttacatctgtctaccataacagtattgatgtgcaagtaatgttattgataaaaaggcatcagtttcactaaaaaaaaaaaaaaaagggcggccgctctagaggatccaagcttacgtacgcgtgcatgcgacgtcaaagctcttctat

SEQ ID NO: 93555 - DNA, 885 bp, Arabidopsis thaliana columbia
  unsure (1)..(885): unsure at all n locations
nnnnnnnnnnnnnnnnnnnnnnnnnnnnnnnnnnnnnnnnnnnnnnnnnnnnnnnnnnnnnnnnnnnnnnnnnnnnnnnnnnnnnnnnnnnnnngggatgggaatatggaagttattatctatagaaaatataaatgctcatatcataagagtaaaattcagagttttcatttcacaagcattttccatcgaagacaaacagtaacaaaaagtaaaaaagggtaaaacacaatcaccgtaaaaaaagcaattactggcaaagttgttcgacggcagtgacgatctgagctggctgaacaaccgtccattcttccaatgtaccggcgtaaggagttgggacatcctgagaagacaaacacatcaccggagcatctaagtaatcatgaaagttctcgtttattgcagccgtcaaactggctccgattcctcccgttctcatacattcctccacaatcaaaacccggtgtgtcttcttcaccgagtttccaattgtgtagagatcaaacgggcttcaccgaccttatgtcgataacctctggatcataccctttgttcaccagcgtctttgcagcctgcattacatggtacctcatccttgaatacgtcagtatcgtgatgtgttcaccgggtctgaccatttctgcttcttccagattacatatgtattcttcatccggaatactctccttgaggttatagagcagaacgtgttcaaacagaatcacaggattctcacttcttatcgccgctttcatcaatcctttagcgttgtaaggtgttgagcaagccaccatctcgatcccagggattgactggaagtaagactcaagaggctgggaatgttcggcttcgagctggcgtggggcgtgcgggaatccgaattcc

SEQ ID NO: 93556 - DNA, 695 bp, Arabidopsis thaliana columbia
  unsure (1)..(695): unsure at all n locations
cagagttttcatttcacaagcattttccatcgaagacaaacagtaacaaaaagtaaaaaagggtaaaacacaatcaccgtaaaaaaagcaattactggcaaagttgttcgacggcagtgacgatctgagctggctgaacaaccgtccattcttccaatgtaccggcgtaaggagttgggacatcctgagaagacaaacacatcaccggagcatctaaggcggccgcgaattcgcggccgcgccaaccatcagtcaacgccgagagatctgattccccaactgttggatggggaggtcctgttggatatgtataccaaaaggcttatctagagttcttctgctcaaaggagaaattagatgcagtggtggagaaatgcaaagctttgccatcgattacttacatggctgtgaaccaaaggagaacagtgggtatcgaacactgcccaagctgatgtgaatgctgtactcttggggggtttccccggctaagggaatcatttcacccaaccattgccggtcccgctagcttcaacgcctggaagggtgaaccatttgagacttggtcaagaacctgggctacctttgtacccagaagccggcccttccagaaacttcccccaggggggaaaaancccaccattttggaaacntttgggggaaacggtttcccnnngggngaaattcccgggggtttc

SEQ ID NO: 93557 - DNA, 926 bp, Arabidopsis thaliana columbia
  unsure (1)..(926): unsure at all n locations
gcacgacgctctgtacgtccccccccccgccttatcctcaaaggcggtcactgccatcggtgggnagttgaagcgatgtgagaccttcgtatacccacgtggaaggggatgcgggaagcaattattgcgtacgcagggtttcccagtttaacgtagtaacagacgagcagttaattaatttaggcgncacaatatgaaaactatgacgtcgcatgcacgcgtacgtaagctggatcctttacaccgcccgcccattttttttctttttattttatagacgagataaatgttcatatcataagagtaatattcagacgtcttcagttcatcaagcaatttcccagtgatagactaaccagtcacagaagaagttaaaaaagaggggtaaaactactcatcacctgtaaaaaacacgatatgtactgtccacacgttgtatcgacggcaagtgacgattctgagcttggctgaacaacctgtccattcttccaaatgtaccggcgtaaggagttgggacatcctgagaagacaaacacatcaccggagcatctaagtaatcatgaaagttctccgtttattgcagcccgtcaaactggctccgattaccatcccgttctctatacattccatccacagatcaaaacgctggtgtgtctcctatcacctgagtttccacattgtgtagagatcaaacggcttcaacgaccttatgtcgataacctctggatcataccctttgttcaccagcgtctttgcagcctgcattacatggtacctcatccttgaatacgtcatgtatcgtgatgtgttcacctgggtctgaccatttctgccggacgcgtgggtcgacccgggaattccggaccggtacctgcaggcgtaccagctttccctatagtgagtcagatagatgctggcagtatcat

SEQ ID NO: 93558 - DNA, 802 bp, Arabidopsis thaliana columbia
  unsure (1)..(802): unsure at all n locations
nnnnnnnnnnnnnnnnnnnnnnnnnnnnnnnnnnnnnnnnnnnnnnnnnnnnnnnnnnnnnnnnnnnnnnnnnnnnnnnnnnnccacgcgtccgcggacgcgtccgcccacgcgtccggggtcacagtttcacagacacgcggctcctcgatggttgtcttccgccgacagccgccgcgtgtatgtccttcccatacggaatctgccacgttgcgtttgtataatctgcctgactagggctttagcagtgtataagagacgagacgagacgcgattcaccggagagtcaaagaggcaaggaggagaaagccaatggcacatgccacgtttacatcggaagggcagaatatggagtcgtttcgactcttgagtggccacaaaatcccagccgttggactcggcacgtggcgatctgggtctcaagccgcccacgccgttgtcactgcaatcgtcgagggtggctataggcacatagatacagcttgggagtatggtgatcagagagaggtcggtcaaggaataaagagggcgatgcacgctggccttgaaaggagggacctctttgtgacctcgaagctttggtgcactgagttatctcctgagagagtgcgtcctgctctgcaaaacacccttaaagagcttcaattagagtaccttgatctctacttgattcactggcctttccggctaagagaaggagccagtaagccaccaaaggcaggggacgttcttgactttgacatggaaggagtttggagagaaatggagaatctttccaaggacagtctcgtcaggaatatcg

SEQ ID NO: 93559 - DNA, 502 bp, Arabidopsis thaliana columbia
  unsure (1)..(502): unsure at all n locations
aaagaacgtaaaagccccnaaacggataagtacatatttcttacgccnnaccanggcgggacgctactactgagttaaaagggccccctcggtttaattcctgactgagccggtagtaaataaaatctatatatatatatatattaaatatatatacaatagacgcatagtggttagtagctcatttgggaactagaaatgagaatttgaattgacttcaaatttacttaacggggtattttttgcttttttaatattggatttgataaatatccatgcaatgaatttttttttaatagcctaccgcatcgaacgaaattaatttgatttatacatgtactcagcaagttgacatacacccaagatattttatcttgacatgtgatgaagagatacggattatcctctgaacaataattttctaaaaaaaaaaaaagcaaatttttgataacttaacttataaatccacctttttccctaattagaagatggattctggctg

SEQ ID NO: 93560 - DNA, 590 bp, Arabidopsis thaliana columbia
  unsure (1)..(590): unsure at all n locations
cgaaatccccggtccgccccacccttccgtttttatcctcacaacattgtttaactcatctttctaagttggtttcgattcaagaatatcacaatgactaatgttcgccttcctattctcgtctcctcggtcttgttccttgtctttatttcatcgtccctcttgttccctacacctagttttgctgctagagtaagtcattctctggtgcaagaagaggtcaaaaaggttccagaatacacagaacctgaggagccggaagttccagaagagccggagctgccctcaccggaggagcctgagattccagaagagcctgagattccagaagagcctgaggttcctggagaacccgaagttcctgaagagcccgaagaaccagaagagccagaagggtcaacatttgaatttccatcatgggtttccgagctttcctattcccggtgttaatggcggtttgccaagactgaaaagccaaaacctcattaacagttaaggggtaacgttttacaagagcntggtnattggnagacgcaaatgtnttaactttttgaataaggttggtttgttggtaagtngggtaatttttc

SEQ ID NO: 93561 - DNA, 862 bp, Arabidopsis thaliana columbia
  unsure (1)..(862): unsure at all n locations
nnnnnnnnnnnnnnnnnnnnnnnnnnnnnnnnnnnnnnnnnnnnnnnnnnnnnnnnnnnnnnnnnnnnnnnnnnnnnnnnnnnnnccacgcgtccgcccacgcgtccgggagactaactgtctcttttctatgtactgttgccaactacgagtatgggttttactggcacttctaccaggatgggaaaatcgaagctgaagtaaaacttactggtatcctcagtttaggagctctgcagcctggtgaaactcgaaagtacggtactactattgctcctgggttgtatgcaccagtccatcaacatttctttatcgctcgcatggatatgtctgttgactgtaaacctgctgaagcttttaatcaggtagttgaggtaaatgttagagttgacgagcgaggtgagaacaatgtccacaacaatgcgttttatgcggaagagaagttacttaaatctgaggcagtggcgatgcgtgactgtgaccctctctctgctcgccattggattgtaaggaacacaaggactgtaaacaggacgggccaattaacgggatacaaacttgttcctggttcaaattgtttgccattagctcgacccgaggcgaagtttctaagaagagccgctttcctgaaagcataatctctgggttacccgttacgccccagacgaaaaagtttcctggaaggaaaaattcccaaaccaaaacccacgggctggtgaaagtcttgccacatgggttgaaacaanaatcgctccctttggaanaatcctgaagttcgttccttttggttccttnttttgggattccccccatnttccctaaaactttgaaaaattgggcnggtttttgcccccttccnaan

SEQ ID NO: 93562 - DNA, 1118 bp, Arabidopsis thaliana columbia
  unsure (1)..(1118): unsure at all n locations
atcttcagacggccgccggcgagaggccgctagatattcgccggcatctatacgactcatatagggaaagctggtacgcctgcaggtaccggtccggaattcccgggtcgacccacgcgtccgcccaggcgtccgcggacgcgtggggaacgtttagcaatgcaatctgttagatctcttttctcgaaagagatactagatgttatagcaaccagcacagctgatttgggtcctcttagccttgattcttttaagaaaaacaatttgtctgcatcatggcggggaaccggagtagacccctcctttagacattctgagaatccagcaactcctgatgtcaaatctaataacctgaatgaaaaacgtgacagcatttcaaaagatagtatccatcagaaagttgagacacctacaaagattcacagaaggcaactaagagagaaaaggcgtgagatgcgggcaaatgagttagttcagcacaatgatgacacgatctttgaaactcgaaaatgctgccattggaacgctctaagtctgttgattctgcagtccttggtaaatacagtatttggagaagagaaaatgagaatgacaactctgattcaaatatacgcttgatgcgggatcaagtaataatggctagagtctatagtgggattgcaaaattgaaaaacaagaacgatttgttacaagaactccaggcccgacttaaggacagccaacgggttttgggggaagcaacatctgatgctgatcttcctcggagtgcgcatgagaaactcagagccatgggtcaagtcttggctaaagctaagatgcagttatatgactgcaagctggttactggaaagctgagagcaatgcttcagactgccgacggacaagtgaggagcttaaagaagcagagtactttttctggctcagttagcagcaaaaaccctttccaaatcctttccatttgcctatcaattgcgcttgcctttcggttactattttcttttcccggggaaaagaaaattcccccggggtgaaaccntggnaaccctaattttnttcatnatnccncttttccgcaatgtatttntnatccgagtnttacnaaccctantgattccaag

SEQ ID NO: 93563 - DNA, 398 bp, Arabidopsis thaliana columbia
  unsure (1)..(398): unsure at all n locations
gaaaaaccggggcgggccacgcgtccgcaaacgagcaagaanacaaanacaaataaattanaanttttgcaaacaagcncnnccacggccgcgcaacttggggccncggcgcgccccccaccaacgcnnccancnaccgcaccggggncgagnncgacgaagangacgccagcaaccccangggcccaagacagaaangncagaaggaggggcagcaancacagcaccnaagagcnggccagaaanggacgcgcangcaaaagaggcaaggccgnggaggnnggcccacccacgacgaagagnncgacccggaagacgacancgagaacccacaaggcccccagcagggacacccagaccccccagcagggcngcagcgagcnncgccaggaagagcc

SEQ ID NO: 93564 - DNA, 1324 bp, Arabidopsis thaliana columbia
  unsure (1)..(1324): unsure at all n locations
ggaaagtgaagatgagaaacctgcctagataagtctgacactaaggcctctaaaaaatcgagtagtgatgagtcaagcgagtctgaggaagatgagagtgaagacgaggaggaaacccctaagaaaaagagctctgatgtagaaatggttgatgctgagaaatcaagtgctaaacagccaaagacaccatccactcctgctgctggaggatcaaagacactctttgctgccaatctctcttttaacattgaaagagcagatgttgagaatttcttcaaagaagctggtgaagttgttgatgttagattctctaccaacagagacgatggttctttcaggggatttggccatgttgagttcgcatcttctgaagaagcacagaaggcgcttgaattccatggtaggcccttgctcggtcgtgagattcgtcttgatattgctcaggagagaggtgagagaggcgagagacccgcattcactccacatagcggcaacttcagaagtggtggtgatggtggtgatgaaaagaagattttcgttaagggatttgacgcttcactttctgaggatgatatcaagaacactttgagggaacatttcagttcatgtggagagatcaaaaatgtatctgttccaattgaccgtgacactggtaactccaaaggaattgcttaccttgagttttcagaaggcaaagagaaggcgttggaactaaatggaagtgatatgggaggaggattctatcttgtagtcgatgagcctagaccgagaggagatagcagtggtggtggtggatttggaaggggcaatggtcgtttcggtagtggtggtggcagaggaagagatggaggtcgtggtcgttttggtagtggtggtggcagaggaagagatggaggtcgtggtcgttttggtagtggtggtggcaggggaagtgatcgtggtcgtggaagacctagttttactccccaaggtaagaagactaccttcggtgacgagtagaagcgtctgtagaagaaaagtctcttcttatgttgttaacttatgatacttcgcatccttttattgtttcgtttcttttttgttctagttaagtttctgtcagaaccttaaatttttgtctgaatgttaagttaagctcaattttgagtgctttgggtgttcaatcattgttatcttcgtctatcattacttcccccccctaggtttgggccatatgaataggtagacannnnnnnnnnnnnnnnnnnnnnnnnnnnnnnnnnnnnnnnnnnnnnnnnnnnnnnnnnnnnnnnnnnnnnnnnnnnnnnnnnnnnnnnnnnnnnnn

SEQ ID NO: 93565 - DNA, 841 bp, Arabidopsis thaliana columbia
cggggcgaccggcgcgtccgcttgtttcttggttttgtgttttagttttgagagtatatgggacagattccgaggttgcggtggtggatgaatatgttgggccgctcgttggccatcaacttcagcttgattctaaagattttgaagggtgatagagaacgaggagattcatgggacagaacagcgtatgttagcatatggcccgtggtatccaccacggcttcagaatcttcttcgttgtcttcagcatcttgcaactatagcaagattgaagaagacgatgatagaattatcaatctcaaatttggtgatccaacggtgtatgagagatattggcaggaaaatggagaggtgacaacaatggtgatacctggatggcaatctcttagctatttttcagatgaaaacaacctctgttggtttcttgagccagagcttgccaaagagattgtgagggtgcataaggttgttgggaatgctgtaacgcaagaccgcttcattgttgttggcactggctcaacacaattgtatcaggctgctctctatgctctctccccacatgatgactccggtcccattaatgtcgtgtcagccacaccctattatagtacatacccgttgattacagactgcctcaaatcaggtttatatcgatggggtggagatgcaaagacgtacaaagaagatggtccatacattgaacttgttacatctccaaacaaccctgatgggttcttgagagaatcagtagtgaacagtactgaaggtatattgatccatgatttggcttactattggccacagtatacaccgataacattaccagctgatcacgatgtta

SEQ ID NO: 93566 - DNA, 427 bp, Arabidopsis thaliana columbia
  unsure (1)..(427): unsure at all n locations
aagtagagctcaaagacaagcttcatgttgttttgttcaatgaagaactaggaacaagagattctctatgttgcgtctgtttggnagaattcgagttaaaggaagagttggtggaaatgcctttatgtaaacacatatttcatctcgattgtattcacctttggctttattctcacaacacttgtcctctttgtcgatcctctgtctccatctcctccaccaaaacctctgttgatgacgacaacgaccatccagattctcctcaaacgtcaccggtttgattcaaacccccgaaggaaataagcaaatacacaagttttgttagtgaatagatcgatacaagatgtaaatcttaattttgctgatacaagatatcaaaatgtaatccatcacattatatatattggttacacagattcattcatat

SEQ ID NO: 93567 - DNA, 547 bp, Arabidopsis thaliana columbia
agctacttgaagatatagctaatttttctaagctgtaagggtgatgacaagtggtcaaatgcttaaccgaatgaagaaatcgattagagtaccaattgttcctttgtttcatgtgcttcctgaaaaatatgcatttgtttcctatataaatgaaaaagccaaaaaaaaaaggcagagaaatttgcctgaaccatttttggtcctgggtttcttaattcagcctttgaggggccccttatcattggggctttagaatgggagaaagaggcttctacgcaaatggattggtctctcccatgaccaggttggaaataaagcccctccagaccaaggtctctttatctctctcctgcttgctttgctcccactttgtgtaactgcactgcatcctctcagttcttaatttggttttttatgtatatgcactgcttttgtttcaatgacctcttgttatccaaaaaaaaaaaaaaaggccggccgctatagaggatccaagcttacgtacgcgtgcatgggacgtcatagtaattctatagttcgcctaaat

SEQ ID NO: 93568 - DNA, 460 bp, Arabidopsis thaliana columbia
gagaaaaatgaatcatcttctaatcttagcgagaaactcgctgcggcggcggaattttaatctccgaccaccgtctcgttccttcagtagcaccatctcaccggaatcgaatcgctcgtcttttggcatagcattcgatatcgatggagttattcttcttggttcctctcccgttggtggctctcctagcgctctccgacgtctctacgatgattccggtgctttgaagatacctttcttattcttgactaatggaggtggcttgcctgaatctaaacgggcttctgagatgagtcatttattaggtgttcaagtttctccattgcaggtgatacaagcacattcaccctttcggaagctagtaaataggtttgaaaatgagcttgttgttgcagctggaaaaggggaacctgccgcggtgatgtctaattatggtttcaaaaacgtcatttcaatggac

SEQ ID NO: 93569 - DNA, 727 bp, Arabidopsis thaliana columbia
ttgggaaaccgccccggaaattccggggaagacccagcgtccgagctcgatgttgcagcgggaaaaggggaacctgccgcggtgatgtctaatgatggtttcaaaaacgtcatttcaatggacgaatatgcctcttactttgacaacattgatcccttggcgccatataagaaattgatgttcaggcaggatggtcacaaggagcttagatcaagagaagatgttctatcccaaagagttcaggcagcattaatagttagtgatccagttgattggagccgagacatccaggttctttgtgacattttacggactggaggacttcccttgggaaagaaattgggcctcaaccctcatttgtacaatttgccattgacggttttaagcctaccagaccttgagtttcctactgaacgtcttggcatgggagcttttagaatcgcgttagaatcaatcttcaacagaattcatgaaaaacctctagagtacacatcatttggcaaaccaaatccatttgtgttcaaaaacgcagaagatgttctgaaagaattcgctacatccccttattcttcaaaccaaggaagtcaccacttcaagacactatatatgaccggggacaaccctaaaatcgacatcagaggcgcacgacaggggtttggactcctttctctcaaactagaggtgggcatcttgccataaaacattcctctaatcttaacttaaacca

SEQ ID NO: 93570 - DNA, 239 bp, Arabidopsis thaliana columbia
ctccagcattgaccggttaggatcgtaatattcctacagtttatcatagaaagaaaacgctttggtgagatcagattcggaatcaagataagccatcaaaaattatgagaagatccacagagcaccaatttatgatagataaacaagtggaggaacacgtttagaaaaacaagccgcgttcttaccttacaagttaaggacatgtcggcatacacgctcagaaggttacttctgcaaaa

SEQ ID NO: 93571 - DNA, 800 bp, Arabidopsis thaliana columbia
gaatgtttgcgctccatttttgggttaccattactcagcttccgttttaaatatcacattagatggacgaaagcggaggtgatagtggttcagtggccacacctgttcaacagcgagcacatgaggcatggaggatttaccaacactatcttgacaagactacacctcatgcaaattacagatggattggaactcttgtcgtcgctcttatctactgtttgagggtttactatattcagggtttctacatcatcgcctatggtcttggaatctaccttctcaatctgcttatcgggttcttgtcccctcttgttgatcctgaagctggtggggtctctgatgggccttctctgcctactagaggttctgatgagttcaagcctttcattcgccgtctccccgagttcaaattctggtactccatgacaaaggctttctgcatagctttcctcatgacattcttctcggtgtttgacgttcctgtgttttggccaattctgctgtgctattggatcgttctctttgttctcaccatgagacgccagatcgcccacatgatcaagtacaaatacatccctttcagcttcggcaaacagaaatatggtggacggagcagcagcggctcacgtgcggattgatctgaccaatttgctgaccattagctactttttttgtctttgcaaaagagaaagaaaaaattgttaagaatatcattttggaccatttttacattgacaaaactatgcagagctataaggaagaattataggcaggataaaaaaggatggaaactaaacttg

SEQ ID NO: 93572 - DNA, 597 bp, Arabidopsis thaliana columbia
gctttgtcggtccggcggtggaccagcctgtccgaggcctcgcccgacgatgcgctcggcgcggtcacccaatcctatctggctggcgacgcccatggcgagggacagatgagcggctgcatgatggcagcattggcgccggatatcgcgcggcgcggcggtcccgtccgttcgcgtttcaccgagggcaccaaggcgcttctcgatattctcgtcaacgccgtgaccggccgcagcaaagcccggcagcgtgaaaaggccattgccatcatggcggggctggtgggcaccgtggtcctggcgcgcgccgtggatgatcctgatttcgcccgggagatcaaacgggtcggtgcggctgtgttcggcaaagacgcggagtagggaggggatttacacccccctctgccctgccgggcatctcccccttgtgggggagatcagctttcagaacctttcagccaatcttcggcatctgaaataacgcgcaaccatagatgccgacgttggtactaccggtttagacccaagataccggctggtatggatatccgcttatcacaagctgaaaccgtcgatcctgatgagctagatgaagaa

SEQ ID NO: 93573 - DNA, 920 bp, Arabidopsis thaliana columbia
  unsure (1)..(920): unsure at all n locations
cgggcgcccagctccggagaaagggtcggtttcgaccattcatttagttttgacccgaggtggcacgagggggattcgtggcaggtttatgatccttgcaccgtgctaactgttggagtcttcgacaattggaggatgttctctgacgcctccgatgatagacctgacacacggattgggaagatacggatccgggtgtcgacgttagagagcaacaaagtgtacaccaattcatatcctctgttggttttgttacctagcggtatgaaaaaaatgggtgaaattgaagtggcagtccggtttgcatgcccgtctctgctgcctgatgtttgtgcagcttatggacagccgcttctgcctcggatgcactacataaggcctctaggtgtagcacaacaagatgcattaagaggggccgccacgaaaatggtagcagcttggctggctcgagcagaaccaccattgggaccagaggtagttcgatatatgttagatgcagattcgcatgcatggagcatgaggaaaagcaaagcgaattggtacagaattgttggtgttttagcttgggcagtgggtttagctaagtggttggataatatcaggcggtggaggaatccagtgacgacggtgctagtccatattctatatctggttcttgtttggtaccctgatttggtagtcccgactgcattcttgtacgtggtgatgatcggagtttggtactaccggtttagacccaagataccggctggtatggatatccgcttatcacaagctgaaaccgtcgatcctgatgagctagatgaagaattcgacaccataccaagttaaggcggccagaaggnaatccgagnntaggtacgncccgttaaggttttnagcaattaggntttannccctttaggggttttnnaccaagg

SEQ ID NO: 93574 - DNA, 980 bp, Arabidopsis thaliana columbia
  unsure (1)..(980): unsure at all n locations
gcctatttcattcatattttgcttttaaaacgagaattataattctccgactccgtgggataagttttctaaaaaatcgaagaaagatcgatggctctagatatctgcgtgaaggttgccgtcggtgctcctgatgttctcggcgactgtccgtttagccaacgtgttcttctgacacttgaggagaagaagcttccctacaagacccatctgattaacgtctccgacaaaccccaatggttcttagacattagtccagaggggaaagttccggtggtgaagcttgatggcaaatgggtggctgattctnacgtaattgttggacttcttgaagaggaatatccagagccttctctcaagactcctcctgaattttgcttctgtagggtcccaaaatcttttgggtgcttttgtgactttctttgaagggcaaagacgctaataacggatccgggaaggcttttggtttatgagttagaagcggttggaggatcacttgaagacacattctggccctttttggctggaggaagttcactgcagtggatttgagtttagcaccaaagctttaccatcttgaggttgctcttggtcattacaagaactggtctgtccctgagagcttgaccagtgttcgtaactacgccaaggctttgttctctagggagtcgtttgagaacaccaaggctaagaaagagattgtggttgcgggttgggaatcgaaggtgaatgcgttaagtggatcccagcctctttaagtaaaggtgccttaaaaccaattttcccttaaatattaaaaagccccgaggaaggggggggttctggttttggtaaaagtgggtaaccaataataatccaataaaccagccaattctttttttgataaaaaaaaaaaaaaagnnnnnnnnnnnnnnnnnnnnnnnnnnnnnnnnnnnnnnnnnnnnnnnnnnnnnnnnnnnnnnnnnnnnnnaaaaatcaat

SEQ ID NO: 93575 - DNA, 1081 bp, Arabidopsis thaliana columbia
  unsure (1)..(1081): unsure at all n locations
nnnnnnnnnnnnnnnnnnnnnnnnnnnnnnnnnnnnnnnnnnnnnnnnnnnnnnnnnnnnnnnnnnnnnnggtccacccacgcgtccggctgcgaaaacgacagaagggggggataagttttctaaaaaatcgaagaaagatcgatggctctagatatctgcgtgaaggttgccgtcggtgctcctgatgttctcggcgactgtccgtttagccaacgtgttcttctgacacttgaggagaagaagcttccctacaagacccatctgattaacgtctccgacaaaccccaatggttcttagacattagtccagaggggaaagttccggtggtgaagcttgatggcaaatgggtggctgattctgacgtaattgttggacttcttgaagagaaatatccagagccttctctcaagactcctcctgaatttgcttctgtaggatccaaaatctttggtgcttttgtgactttcttgaagagcaaagacgctaatgacggatccgagaaggctttggttgatgagttagaacgtttggagaatcacttgaagacacattctggtccttttgtagctggagagaagattactgcagtggatttgagtttagcaccaaagctttaccatcttgaggttgctcttggtcattacaagaactggtctgtccctgagagcttgaccagtgttcgtaactacgccaaggctttgttctctagggagtcgtttgagaacaccaaggctaagaaagagattgtggttgcgggttgggaatcgaaggtgaatgcgtgatgtggatccatgcttctctagttaatgttgctttagaactattcttccctgaataataagaatgcacgagtatgtgtgtgttcttgtttttgttagagttggttatcaataatgatgcgataaagcagcatatctttttttgataatatacccctcttattcaatttggtattacagtcccatggtcctnnnnnnnnnnnnnnnnnnnnnnnnnnnnnnnnnnnnnnnnnnnnnnnnnnnnnnnnnnnnnnnnnnnnnnnnnnnnnnnnnnnnnnnnnnnnnnnnnnnnnnnnnn

SEQ ID NO: 93576 - DNA, 1255 bp, Arabidopsis thaliana columbia
  unsure (1)..(1255): unsure at all n locations
ttccgttgannnnnnnnnnnnnnnnnnnnnnnnnnnnnnnnnnnnnnnnnnnnnnnnnnnnnnnnnnnnnnnnnctttttttttttttttttttttatattagaggaataattcggatttgatgtcatttgacccaaaagtcgtacgccaatagtacagttggctttgtacgatgcgtatgtatatacattaaaaagggccaaacaaacggaagcccaaaaaaagcccactaggccttagaaagaattcatctctaacacatttctcctacgcttaagcaacgccgtaacagcttctccgtacatacaatcgtcgccatctccggcgaacgcctccgtcaccagctcaacatcgttatcatcggaagccacaccagtcggccttacgaccaccagcgtcgctgcttcgagacaaatcccgctcttcagcatcagcgacggcgcgtgtctcatactcatcctcacgctaggtaccacagttcgttcccccacgcgctctgattctttattatccccacgcacctccgtctctctgtattctttcatccccgccgcgtccatcaccaccgtaccttcaccatcactgtcacgcacaatcaatttctccatctccttgtgatctttcaccaaatctctcatcaagtaatgacgcgtggaagccgccatcaacgcgctgatcgtccacaccacgcgcgtcttcaatccacaaacaaactccgaatctgactcaacaacaccgtcgacgacggcggcagcttccgtagctgctgaagtattaaccgtcgcggaacggaaagcgacgatgacgcagctcttgagagttttcccgaactcagccttccacttaacggcggcgcctttctcaagcttgacatcaccaccgtataactccacctccagattccggatccgttcaaatccggagagaatctgagccggagttttcggagatcgggtcaggatttcgtcagagttagctggtttggagaagataggaggaaggagaccgtgaatggatttgaagagagatcggaagaagctagcgataggagaatcgatctcggagtcagattcggtggctccgaggatctgatcgagttggagaaggagcgactcagactgagtggctaacgagttgaatcgtttagaaacggaacgacatcgtattaacgttttgacgtcaccgactccggacgcgtgggtcgacccgggaattccggaccggtacctgcaggcgtaccagccaaccctatagt

SEQ ID NO: 93577 - DNA, 604 bp, Arabidopsis thaliana columbia
  unsure (1)..(604): unsure at all n locations
aaaacccnnantncaaaaaaaccntaaantggggaacttcccaactnntaaatntttaccgcccggaccgaaacaccattcccaagccctttaaagttttcccgaactcagccttccactttaacggcggcccctttctaaagctttacatcaccaccgtataactccacctccaaattccgggacccggttcaaatcccggaaagaatctgagccggagttttcggaagatcgggttaggatttcgtcagagttagctggtttggagaagataggaggaaggagaccgtgaatggatttgaagagagatcggaagaagctagcgataggagaatcgatctcggagtcagattcggtggctccgaggatctgatcgagttggagaaggagcgactcagactgagtggctaacgagttgaatcgtttagaaacggaacgacatcgtattaacgttttgacgtcaccgactctgttcaaaatgtcgatgaccacaggatctggaatcgcatcaaaagcgtccatgattctctttcgattttaccaaaatacccttttgaaaccttcgggactaattagagagttctgtctcactttgtgtttccgc

SEQ ID NO: 93578 - DNA, 556 bp, Arabidopsis thaliana columbia
  unsure (1)..(556): unsure at all n locations
ctagaaaaccacatttctgagcactcttgagtctgtatcctttgctggcctaatcaggctagaattgtgaagtgtgaaagtaagcatattgacaatggctactcccacagacctaggttcctcttcacctgtatggtggtggtgacgactctgaccattaccctgcacagaagcgtacttcaaaacgtactgcttccgaaacagcaacagacgaagaaacgaagatgaagaaaaagaagaatacgaagcacaacacaaatatggcttttcctaccagcatccggatctggaacgaagaagacgagctctctatcttaaagggatatggtggattttcgagctaaaacaggactcgaatccaatattgtttgggatgcgttttattgttacgtcaaaggttccattcatgtgaaagtttccaagtgccagcttatgagtaagaccaggaagttgaagaagaagttcctttgatcaaatggagnaaatcgntcaagggaatgatnccncattttanttagggcttngtggaacntgaaggtttttnggtattnccntg

SEQ ID NO: 93579 - DNA, 1135 bp, Arabidopsis thaliana columbia
  unsure (1)..(1135): unsure at all n locations
ctaaatctctctctgattactgatactctgtctcaatctcttctttcttctaatcctttatttcttgtaagctacttctcctgaatttcgtatttgatccgtttaatccaagtttcgattttatataacaaccacatagatcctgaggttttgtgataagaaacagagagagagagaaacagagtaatggcgaacagagatgtggagagagtagggaagaaaaacagaggagctaataacaattatttctacgatgagtcttctggtgaaactcattggacttcatggctgattccggcgattgtagtggcgaatctcgctgtctttatcgctgttatgttcgttaatgattgtcctaagaaaatcaccggacctaacaaagagtgtgttgctagattcctcggaagattctcggttcaaccacttaaagagaatcctctctttggtccttcttcttcaacattggagaaaatgggagcattggaatggaggaaagtagtacatgaacatcatggatggagacttctctcttgtatgtggcttcacgctggtatcattcatcttcttacaaacatgttgagtttgatcttcattggtatccgccttgagcagcaatttggcttcataagagtcgggttgatatacttaatatcgggtctcggtggaagcatactttcgtcgcttttccttcaagaaagtatctctgttggtgcttcgggtgctctctttggacttcttggagcaatgttatctgaacttcttaccaattggactatctatgccaacaaggcggctgctctgatcacacttctgttcatcatcgcaatcaacttagcattaggcatgcttcctcgggttgacaactttgcacacattggaggggtttttaaccgggattctgcctcgggtttgtcctccttgtccgacctcagtacggttgggaagcttcccggaccaacacttcgcgaacaaacgaaagnatagcatgaccagacgtntggttgagcccagtggggaacttgtggtgggaacggtcatnagaangttcaaagggaatggncaaatnnaatgggaaactacngccactcaatgctgacacacacacacnaacaangaacgtaatggcntganatac

SEQ ID NO: 93580 - DNA, 549 bp, Arabidopsis thaliana columbia
  unsure (1)..(549): unsure at all n locations
cggntccacttncccatgggggntttacccggtccccccgggtggcccccttgcccgcccccagtccggttgggaagcttcccccgccagcccttcgcgacccaaccgaaggtatggcatgtcccagtacgtgctgttcgtagttccaggggtgctacttggggttgggctaccggttgcattcgtgatgctttccaagggagagaatgggaccaaccctggcaaatggtgtcattcccttagctggtttccccaactttctaaatggacctgctaatcatcatcatcatcatcatactcatatagtaaaagcttttatatgtgttcttgttagcatttaatctctttgatctctctagcctttgattacttatatatgtgtacatcacccaattcgtcttgtgtaaaaggccatagaaataaaagagtgtattatttggtcatttgaacgccatatttctcaaactgtctttaagtacataaatagtaaacaattttattaatgtaaaacataagctgtaattggaaataaattcctttaatttggtt

SEQ ID NO: 93581 - DNA, 796 bp, Arabidopsis thaliana columbia
  unsure (1)..(796): unsure at all n locations
gaaaactctgnagatcggaatcaatggagtctacaatatcgttgaaggtcaacaaaggaaaaggcaaaggatcaaagggagcttcctcttccgatgacaagtccaagtttgatgtcgttaaggaatggaccaattggtcattgaagaaggctaaagtcgtcactcactatggcttcatccctctggtcatcttcgtcggcatgaactccgatcccaaacctcatctcttccagctccttagccctgtctgatccatccaatttcatcatcaacctaaatcaatcgaatcggtcttcctctggtttggcttcttcatatctttacgcgtgttcttagattcgccgaatcttcttttatgcttttttcattagctagtttttgaatactttctctatggtactgtattgaataactttagcttatgatataatgtgaaatcgaattttatgttttgaaaatctgggaattgctttaaagattgaagtttgttggaatgtcttgtatcaattttacaatgtgtgttatatgaggtcgatcttgaggttttaaggcaacacaagccaaacctatttgcaacatctcaaccaactcttcttctatacccatttgcatcattagctcattatcgaatacttctcctgtccactctttcgacaccactgaccttatccagctcgccaagtccatgttttcgtctagtgatagcggactcgcgggtgatttccctgttagaagctcgagtaacaccaccccgaagctgtatacatcagagaactgtgtggactttcttgtatct

SEQ ID NO: 93582 - DNA, 519 bp, Arabidopsis thaliana columbia
aagacgcgtgggcgcgatttctaccatctctaaatctcaaccgtccgatcaaacaacttacacaacttccgtgctggagaaataaaaaaattaggtatttaataattcatcattgccattggattgtgtgtggctgcgtcagtaaaacgtattcttaaaagcaaccattggtgtgattgactctataagagaattcgtcagcgtgaagcaatctccaatctaatcgcagcatatcttctccgattcctattcgtctctgcaattgaatcttccggtaggcgaagatggcgacgtctgcgaggatttgttgcggaggaggaagtgcatgcgccgttcgttgtgatcgtcgcacgttaaatttgaattctcgatcgtcatgtgttgttccagtgacgaatcgacggaatatgtgtgcgatcgggaagatttcgatgtcgatggaggatttgtcaccaccgtctgcggcggtgaagattgaaaggatcggtggaaggaaacgcggtggatctgttgtgtcga

SEQ ID NO: 93583 - DNA, 780 bp, Arabidopsis thaliana columbia
  unsure (1)..(780): unsure at all n locations
gcgggtcgacgcaagcgtctatacatgacgtcctgttaggctgccaaagacgacagaagggggtggctgcgtcagtaaaacgtattcttaaaagcaaccattggtgtgattgactctataagagaattcgtcagcgtgaagcaatctccaatctaatcgcagcatatcttctccgattcctattcgtctctgcaattgaatcttccggtaggcgaagatggcgacgtctgcgaggatttgttgcggaggaggaagtgcatgcgccgttcgttgtgatcgtcgcacgttaaatttgaattctcgatcgtcatgtgttgttccagtgacgaatcgacggaatatgtgtgcgatcgggaagatttcgatgtcgatggaggatttgtcaccaccgtctgcggcggtgaagattgaaaggatcggtggaaggaaacgcggtggatctgttgtgtcgagggagaagctagatgtgtggttgaaagattcggtggttgagatcgtgaagaatcttagagagtcgccgttattgatgcatttatacgccggggggctaattggtggtttaccgccgccggcaacgaatccaaaggcggaggattggccagagatggaaggaaagtggggtagaggagaagagaggacgccggaaggagttatattggtggagaagctcgcagacggtgacatagcagatnatgatgatcacnatggtggcgcgtttngggaagntacaagcccgtnggggnttgtgcgcccangnaagaggatcggatacttgggccc

SEQ ID NO: 93584 - DNA, 451 bp, Arabidopsis thaliana columbia
aaaccacactcatggcgacacttctctcaccttcttcaagctaagttttcattttgttcactgccacagatctatggccatggatatatctctgttcttcattttcctggtcatttacgcgccgttagtctcatacgccgatgaatctcaagccgagattgatgctctcacggcgtttaaactcaacctccatgaccctctcggtgctttaacttcatgggatccttcaacaccagcagctccatgtgactggcgtggcgttggctgtactaaccaccgtgtcactgagatccgtcttcctcgtctccaactctccggacgaatctccgatcgtatctccggtctacgcatgctacggaagctcagtctccggtctaactctttcaacggtactatccctacttcactcgcttactgcacgcgcctactcttcgtctttcttcagtacaac

SEQ ID NO: 93585 - DNA, 666 bp, Arabidopsis thaliana columbia
ccgcgcccccctttgattgcatggccgtctgcggtaccggtccggaattcccgggtcgacccacgcgtccgctctcattcaaacccaaataggaaacaaatacacaaaagtataataaaaagtctttctctcatctttcgccacgtagacatggacgtcgaacatcacaaatccggccacatcagtagaccaacggtggatattccaccgaggaagcttctttcctccgccaagtctccgtcgtcagtttcaagtccccttcgcgactataaagaacagaaagactattgttacgactctgactctgaggatccttacgccggagaccatttccggatgtacgaattcaagatccgacggtgcacgcgtagccgtagccatgactggaccgactgtcctttctctcatcccggtgaaaaggctcgtcgccgtgaccctcgccggtttcactacaccggagaagtatgccctgagtttagccgtcacggtgatggtagccgtggtgatgaatgcggtttcgctcacggtgttttcgagtgttggcttcatccgagtcgttaccgtacggaagcttgtaaagacggtaagcattgtaagaggaaagtttgtttctttgctcattctccacgtcagctgagagttcttccaccgtccccggagaatcat

SEQ ID NO: 93586 - DNA, 466 bp, Arabidopsis thaliana columbia
gtaccgattcgcaggtccaccctagccgtccggttaccaactttttcaaccactgcctcctctgtgatggattccattcccggctaagggatcgcagatctcagatttcagatctctcagttcaactttctcattcatcacagatcatagtgtacgaaagatggcggctatggcggcgaagcttcatatatcgacgaaatcggatcagagcaatgtgcgattgcctagactgatcaacctgtcgcgtgatccaaccgctagagtcttgtttccacgaaacggatcagtttcttcgctccacaccaacttctcttctccaaatataatggttccatgcgccggaggtggtggtggtggaagcatcggtaatcacggcggtggaagtggaagcggaggaagtggtggtggttatggaggttcagaagaagaagaatcgtctccatggggaccattagggttatttatc

SEQ ID NO: 93587 - DNA, 425 bp, Arabidopsis thaliana columbia
  unsure (1)..(425): unsure at all n locations
ctcaatctctctctctctctctccatcgagaaacactaaacgtgctataatcattacctctcttcgatttctcaaaccctatctggctctctacccatatgcttcagatccgcattaaaaaagctaagttttttgttatgtccttctttcttatttgatcagtttgttcttgtttcacgattttaacctgagattttttatatattttctccagatctgctatccgcagtcatctgttcataggaaaagatcgggctttacttttagagattatctcagatccagccttttacccaattgaaggtaggtccatatggctgaagatttatcgcaggagcgaccacatacgggagccgccattgggagattccctgtgagagagagagagagaaatagtttgagaacaatcncctgaatttaantgg

SEQ ID NO: 93588 - DNA, 588 bp, Arabidopsis thaliana columbia
  unsure (1)..(588): unsure at all n locations
ggatagtatagtgaagtaaataatgtagctatgactttacctttagcatttacctgtagcatcttaaaaatatgaattaaaaatgatttagctaatttgggcttatgtttataagcatagaagtttatactacaagtncgtttagattttnccagtatcaactcaaacatagttttnactcaagcatagtttttactcaagcatagtttttacccacactaaaacccacatgtagtgtgcaaaagtaagtacccccccacctctgttcctcacggtttttctgcaaaggacccaccctccttgaacttcagcgtccatcacaatgtccccatcatcatcaaacctgtacaagccagtggcgttcctaacattgtaggaggttgatagcatttttgcaagtggggggagcacttgtgtttctccacggattgctgccttgattaaagcggttgtcaacnctgtaaagtccctctacttcaataggnatggtaaatgagtttgattctgggaataggttgtgggttgtnataaaagantgntccncctnagcaagcgttnnggcaaccccttntgttngntgttttaagg

SEQ ID NO: 93589 - DNA, 730 bp, Arabidopsis thaliana columbia
  unsure (1)..(730): unsure at all n locations
aaaaatagcaaccaaacatatgagatttatatatatattataagcaactgttttattctgaaatttttaaatcttgccttaattgtacaaattccatagatctaggagactattctaagattccatagatctgtaacactgtgctacgatttctacactgttctaagattccatagatctgtaacactgtactacgatttctacactgttctaagattccatagatcataactttcctaagtttcctacactgttcccaattccataggttgtagcctccgatttcccaaattcacagatctactctaattttaaatacattcctccaattcccaaactccaccaatgttccttgatactttcaattccaatttctttattaccccaaattcgctacccctatatcttgcttctgagaatataatcgttttttattaccttcatttccttcaggtaggtccatatgctgaagatttatcgcaggagcgaccactacgggagccgccattggagattctctgtgagagagagagagagaaatagtttgagaatcaatcttctgtattttattgtgtagatcaagttatttagtatatgctagtacttatggttaaaatagactattattaaaattcaaaagtaataaagccaacgcggccgcnnnnnnnnnnnnnnnnnnnnnnnnnnnnnnnnnnnnnnnnnnnnnnnnnnnnnnnnnnnnnnnnnnnnn

SEQ ID NO: 93590 - DNA, 808 bp, Arabidopsis thaliana columbia
  unsure (1)..(808): unsure at all n locations
caaaaacgtccgcccacgcgtccgcccacgcgtccgctctgtctctcaccaaaataaaaaactcaatctctctctctctctctctccatcgagaaacactaaactgctataatcattacctctcttcgatttctcaaaccctatctggctctctacccatatgcttcagatccgcattaagaaagatctgctatccgcagtcatctgttcataggaaaagatctggctttacttttagagattatctcagatccagccttttacccaattgaagtgtgcaaaagtaagtacccccccacctctgttcctcacggtttttctgcaaaggacccaccctccttgaacttcagcgtccatcacaatgtccccatcatcatcaaacctgtacaagccagtggcgatcctaacattgtagaagttgatagcatttttgcaagtggagggagcacttgtgtttctccacgtattgctgtcttgattaaagcggttgtcaactctgtaaagtccctctacttcaataggtaggtccatatgctgaagatttatcgcaggagcgaccactacgggagccgccattggagattctctgtgagagagagagagagaaatagtttgagaatcaatcttctgtattttattgtgtagatcaagttatttagtatatgctagtacttatggttaaaatagactattattaaaattcaaaagtaataaagccaacgagtaccctaaaaaaaaaaaaaaaaaaaaaaaaanaaagggcggccgctctagaggatccaagcttacgtacgcgtgcatgcgacgt

SEQ ID NO: 93591 - DNA, 365 bp, Arabidopsis thaliana columbia
  unsure (1)..(365): unsure at all n locations
ctttnntttntgncctactnatggncctggccnggactnccngggcancccacagagccgnatctgctatccgcagtcatctgttcataggaaaagatctggctttacttttagagattatctcagatccagccttttacccaattgaaggtaggtccatatgctgaagatttatcgcaggagcgaccactacgggagccgccattggagattctctgtgagagagagagagagaaatagtttgagaatcaatcttctgtattttattgtgtagatcaagttatttagtatatgctagtacttatggttaaaatagactattattaaaattcaaaagtaataaagccaacgagtacactaaactc

SEQ ID NO: 93592 - DNA, 674 bp, Arabidopsis thaliana columbia
ctcaatctctctctcttctctctctctctctctctctctctccatcgagaaacactaaactgctataatcattacctctcttcgatttctcaaaccctatctggctctctacccatatgcttcagatccgcattaaaaaagctaagttttttgttatgtccttctttcttatttgatcagtttgttcttgtttcacgattttaacctgagattttttatatattttctccagatctgctatccgcagtcatctgttcataggaaaagatctggctttacttttagagattatctcagatccagccttttacccaattgaaggcaagttcacatactctgttttttttgtcttggttttaatttctcggttttttacatgtaacagatgttttaagcatgattttttgtttaaacagtttgtttttcctacccttaaaacttctctgaattaatatcccatttatatgaccactctaatgtcttcttatacgactacgcaagtgttgcatattcttgaccttttcacacttcatttgcattttagtctaacaatataaatccgcaaatatcttgtgtttatacttattgaaattagtcttccgacatatataatctaggatctatttggattatttgggccatcagtctcattcgtttcattaacatctgagtct

SEQ ID NO: 93593 - DNA, 908 bp, Arabidopsis thaliana columbia
  unsure (1)..(908): unsure at all n locations
atgatactgccnnnnnnnnnnnnnnnnnnnnnnnnnnnnnnnnnnnnnnnnnnnnnnnnnnnnnnnnnntgtctctcaccaaccacgaaaactctcaatctctctctctctctctccatcgagaaacactaaactgctataatcattacctctcttcgatttctcaaaccctatctggctctctacccatatgcttcagatccgcattaaaaaagctaagttttttgttatgtccttctttcttatttgatcagtttgttcttgtttcacgattttaacctgagattttttatatattttctccagatctgctatccgcagtcatctgttcataggaaaagatctggctttacttttagagattatctcagatccagccttttacccaattgaagtgtgcaaaagtaagtacccccccacctctgttcctcacggtttttctgcaaaggacccaccctccttgaacttcagcgtccatcacaatgtccccatcatcatcaaacctgtacaagccagtggcgatcctaacattgtagaagttgatagcatttttgcaagtggagggagcacttgtgtttctccacgtattgctgtcttgattaaagcggttgtcaactctgtaaagtccctctacttcaataggtatggtaaatgagtttgattctgggaataggttgtggttgttataaagaatgctccactcagcagcgttgagccagcgctgtgttgatgtttgaagcacagctgctacatctgtcaaaaatagcaaccaaacatatgagatttatatatatattataagcaactgttttattctgaaaaaaaaaaaaaaagcnnnnnnnnnnnnnnnnnnnnnnnnnnnnnnnnnnnnnnnnnnnnnnnnnnnnnnnnnnnnnnnnnnnnnnnnn

SEQ ID NO: 93594 - DNA, 655 bp, Arabidopsis thaliana columbia
  unsure (1)..(655): unsure at all n locations
tatacaagagccttgacggcgcatacacgcgtacgtaagctcggatcccggcgcctgcttttccaaaggatatcgcatcatcaagaaccttcttgtgtctatgaagaggtggagcgtatgcgtgaagcagggctcattaaaggaggttctctggatactgccatcgtttgtagcgccgagcatggatggatgaatcctcctctgcggtttgatgatgaagcatgtcgacataagatccttgacctaatcggtgacctctccctcgtttcacggggcggaaatggaggactccccgtggctcacatagtcgcatttaagggcgggtcatgcactgcacactgacttagcacgtcaccttaccatcgactgaagagtatgtgctcgttgtcaaccatatcccgcagaagccttgatcgtttctgtttctttttggatttcgttatcccaagatggtaccaatgtgggatttttgtttgttcgttggaagatcattactcttgtgaattcagtaataattgtaacattaaactattttaggtactaatcatagggacattttaaccgatcaaactgttcccaaaccnnnnnnnnnnnnnnnnnnnnnnnnnnnnnnnnnnnnnnnnnnnnnnnnnnnnnnnnnnnnnnnnnnnnnnnn

SEQ ID NO: 93595 - DNA, 1472 bp, Arabidopsis thaliana columbia
  unsure (1)..(1472): unsure at all n locations
tnnnnnnnnnnnnnnnnnnnnnnnnnnnnnnnnnnnnnnnnnnnnnnnnnnnnnnnnnnnnnnnnnnnnnnnnnnnnnnnnnnnnnnnnnnnnnnnncggccgcaaaaaagctaagttttttgttatgtccttctttcttatttgatcagtttgttcttgtttcacgattttaacctgagattttttatatattttctccagatctgctatccgcagtcatctgttcataggaaaagatctggctttacttttagagattatctcagatccagccttttacccaattgaagacgttgaatcaatgagactccccgtcaccgtcaaagccactaagccgtcgtttctcgtcatttggatccgatactcctccgccgcgtcgtcgccgacagtctccttgaatccaagtggacgattacagcaaactctcgcaggatctgtggaagtgaaaggaaaatctctgcactccggtaagttctcgacggtgaagctaaatccggagatcgccggagctggtaggttcttcgagtttcgatccagattcatccctgcgtcgattgaatttgctcaggaatcgcctctttgcacgacgctgttgaaagatgagctcaaaatccgaaccgttgagcatttgttatcagctcttgaggcgaagggagttgataattgcaggattcaaatcgagagcgaaagttccgatgatcgagaagtcgagctaaagaatgggtcgatgcgatacaaggagttggcataaacgcggctcaaaaccatgatggtgaaagtgtagagaagatggtcgcacatgtgaacaagcctgtgtatgtttgcaagaacgatacttttgttgctgcatttccggctctagagactcggatcacttgtggtatcgacttcccacaggtgcctgctataggctgccaatggttttcttggagacctatccatgagtcttcttttgcaaaggatatcgcatcatcaagaaccttctgtgtctatgaagaggtggagcgtatgcgtgaagcagggctcattaaaggaggttctctggataacgccatagtttgtagcgctgagcatggatggatgaatcctcctctgcggtttgatgatgaagcatgtcgacataagattcttgacctaatcggtgacctctcccttgtttcacggggcggaaatggaggactccccgtggctcacatagtcgcatataaggcgggtcatgcactgcacactgacttagcacgtcaccttaccatggactgaagagtatgtgctcgttgtcaaccatatcccgcaaaagccttgatcgtttctgtttctttttggattcgttatccaaagatggtaccaatgtgggatttttgtttgttcaatggaagatcattactcttgtgcggccgcgaattcgatatcaagcttatcgataccgtcgacctcgaggggagggccagtgcatttcaatgggggggcgggg

SEQ ID NO: 93596 - DNA, 706 bp, Arabidopsis thaliana columbia
  unsure (1)..(706): unsure at all n locations
atgannnngcgagacctaatacgacttatatagggaacgctggtacgcctgcaggtaccggtccggaattcccgggtcgacgccacgcgtccggtttgttattcggagaagaagaagaagaagaactgaagaagcatattcgacggtcaccaccaaacctcttccgtcggattttcactctccgtttatcgaacatctgagatctctctccacttccgtcaccgaagatgcattccagtcatcttcttctcgaggagccgatcaggatggcttcaatcctcgagccttccaaatctagtttcttcccggcattgactaagatcgtcggaactctaggtcctaaatcccgatccgtcgaggctctctccggctgtctcaaagccggcatgtctgtggctcgatttgatttctcgtggggagatgctgattatcaccaggagacacttgataatttgaaagttgctgtgaggagcactaagaagctttgtgctgttatgcttgatactgttggacctgagctacaagttattaacaaatctgagaaagctattactttgaaagctgatggccttgtaactttgacaccgagtcaagatcaagaagcttcttctgaagttcttcccattaatttcaatggacttgccaaggcagtgaagaaaggagacaccatcttcgttgggcatacctattcactggtagtgaacaa

SEQ ID NO: 93597 - DNA, 1029 bp, Arabidopsis thaliana columbia
  unsure (1)..(1029): unsure at all n locations
gagcgtcgtcttctcttccttagccaaagccagatctgcttctttttcgctgcgtcgtcgagaggtctctctttgaggaagctaattccttcttcttcttcaccatccgtttcaagaataacaatggaaggaagcggtggtgacagtggttcgatggctacgcctgtacaaaagaaagtacatgaggcatggagggtttaccaatattatctggacaagactacacctcattcaactaacaggtggatcggaacacttgttgtctttcttatctactgtttgagggtttactctattcacggattctacatcatctcctatggtcttggaatctacctcctgaatctgcttatcgggtttttgtctcctcttgttgatcctgagctcgaggtatctgatggagctactctgcctactcgaggttctgatgagttcaagccatttatccgccgtctcccggagtttaaattctggtactccatgactaaggcattctgcatagcctttcttatgacattcttctcggtgtttgatgttcccgtcttctggcccatactgctttgctactgggtcgttctctttgtcctcaccatgagacgccaaatagcccacatgatcaagcacaagtacattcctttcagcatcggaaaacagaaatatagcggccggaaatcttctgcgaacagcggcggcggctctcgtgctgattgatttcaacttgcagccacattttctgcagaaaaagaatgaaaaaaatttgggttttcacgttggaacgttttgtagtgatgaattactagtattgttatgcttctacaatgaagaagaaggaaacagaaaagggtcattagtttttatgttgcaggaatattgttctttgttagttccctttaatccaagtacctcgtgctgtaaatataattcaattttatttcgaaacaaattcattccaaaaaaaaaaaaaagnnnnnnnnnnnnnnnnnnnnnnnnnnnnnnnnnnnnnnnnnnnnnnnnnnnnnnnnnnnnnnn

SEQ ID NO: 93598 - DNA, 381 bp, Arabidopsis thaliana columbia
gtaaaaccttaacataaatgagggattttgccattttagcaattccatgtatttttatcagtgaaagcgataagagtttgtgatgaatgggggattttgctaaaggagtaaaagaatagttagttagtagttgaggaaatgtcaagaaaggacgacaaaaatgaagaaacacatgctttggtctctttgatattaaatgagaagagagaacataaattgaagtgtgagtgagagaggtggtcatctttgggagtttaagggtttttttagccttgaagtgatttacttaagagttcctctactcacatgcttttgtctttcattcttgaataagtacacttcacctttttcttactttagagcgtccatttacatttaatt

SEQ ID NO: 93599 - DNA, 562 bp, Arabidopsis thaliana columbia
  unsure (1)..(562): unsure at all n locations
cctaaacctaagagcaaagcaaatcgacggcgacgggaaaatagaaccgcagatctctgtctcctctctctctcgtaactgtttgttcgatggcaccgaagaaggcggaggaagtggtcgaaagccctcctgtttccagtgaagaagaagaatctggctcatctggagaagaatctgaatcttctgctgaagttccgaagaaagtcgagtcttcgcaaaagcctgaatctgactctgaaggcgaatctgaatcggagtccagttctgggcccgagcccgagtccgagcctgctaagacgatcaagctgaagcctgttgggactaaaccaattccagagacgtctggatctgccgcgactgtacctgagagttcaacggctaagcgtcctttgaaggaagctgctcctgaagctattaaggagcagaagacatcggacactgagcatnttaaggagcccntaactaattattgggtaaagaagnttnttnaagggggtctaagaagntnttnaanagtttttnaagttaacgggttnaatcngtttcttaaggnttntttntc

SEQ ID NO: 93600 - DNA, 645 bp, Arabidopsis thaliana columbia
tctctccttgttttctttccacttcctctcatatcgtcctcctcatcgtcgtcgtcatcatcatcttcatcatcgtactcatacaactctctactcctgacgcccctcttacccgacccagaacctggacccgactgataattatggtatggaacaacacttgtttgcccagagacgtggtgcctaggtcccaacggcccgcctaagatgctccgaaccggtaggagaaagtagaactctttgtctccgatctgcaaaaggtcttgtgaatcgagcttgacgttaggattcccagggagatgaagaacaccttcaacgaggcagccatttttgccaaggacctcgagagagaagcgtcgtctagtgaagtcatagaagatccgagcgtggttgcgcgagatgttcatcccaccgccgagggatgagagatcaacgtcgacggtggctttcttagaattccggccgagtataatggagtaagactgcatatagtactcgaaatcctcaccttgaagcttcgcaaatccaacctccacatcgcttccgccaccaacagccgtagccatgccgtgaaattcccccatttgatcgaaagaggacccgggacttccaaattagggattgcaatcgtaacccacgcgtccg

SEQ ID NO: 93601 - DNA, 435 bp, Arabidopsis thaliana columbia
caattttctcccatgaacgatttgtgtcaatggatttgttcgatccaaaacttgagataatgggtgtaatccgaaaaaggattcataagtagttgttaacggagttgaagttaccaaattctgaggagtaggtatcaatttatgcctaattgctccggagatagttcccttaactacattttctaaacgagccagagccaacccgagctggtcttgtaaaagatccgctacagagcgaatacgtttatttttcaaatgattcatatcatcaagtgtacccattccaaatttcatcccaatcaaatgatcggcagctgctaacacatctcgtggtaacaaaaatatattgttctgaggtatattaagattcagtctccaattaatattttggcgaccaatccttcctaattcacacctttggtgaaagaatttttt

SEQ ID NO: 93602 - DNA, 395 bp, Arabidopsis thaliana columbia
gggccggcccacgcgtccgatttaagtggatcacctggtgaaacagtgccttcggtttcagaggaacgattgtcgggagacgcaaaagactgggctactttgaggatccaaaagttagagatttccgatgatgcaatgaaatctccgtgccttagtgataaggaaagtgtctctcctttgaatggtaagcatcattcttttaatcagatgagaaatggagaagttttaaatggaaacggggtggggaaacaacaagagaattcctggcatactggttccagaagagttaaagatatacatattaatgagaatgagaatgagcatgttggttatgaagacctgccattcgcaggagcagtaccttggccaccggaggacatgcatctccactactc

SEQ ID NO: 93603 - DNA, 516 bp, Arabidopsis thaliana columbia
cagaagagaaaaccctagctagaaacgacgttccaaagatgacgcagaagagcaatcagttcaagggccaacagaagaggaagactattgctcctaatcgccatggcaaatccattcaaactcgcaaagggaagagaaatgtgaaaccaacaaagatgacgaaagagatggacactgatcgggagcttacgaaattcataaaccattgcaatgaagtgaaagcaactaatgcagcttgtaaagaaggtggtcaactcaatatcatcaaagctgaatctcaacctgagccatccaagaaatccgccaaatagacaacaaacccttctttttttgtttccagtgtttcaacttttgtagctcttacacaatccaatcggttttgtctttaaatcaatcatttataatgctattgttaccaatttcgtcacttacaaacacgtttattgttactttacgagagattgaacttccatacacttatgcatttaccattgtgagccgttaccaaaaaaaaaa

SEQ ID NO: 93604 - DNA, 430 bp, Arabidopsis thaliana columbia
tctcacttcccagctacttctctctctcgcgctctctctttctttttgggcaatggctactggatcaacaaccgattccgccaggtctccttcctcaggtgttctccaaaagctgttattactattctctgtctgtatagctgcttcaacttataaagcaatccagcctcctccatcaaagctatgtggctctcctgatggtccatccatcacaggaccaaggattaagctaagagacggaaggcgtttagcttacaaagagcatggagttccaagagatgaagctaaccataagatcatcgttgtccatggatctgatagttgcagacacgataatgctttcgcagctctactatcaccggatattaaggatggactaggtgtatatatggtttcatttgatagaccttgttatgcagagagtgatcct

SEQ ID NO: 93605 - DNA, 494 bp, Arabidopsis thaliana columbia
cttattcacacatctaattaactttaagtaccaaaaatggcgggctacaacctcgaagctatcgaagcggcacctttgaaagacgatctggatattgtgatcccaaccatcagaagcctcgactttctagagcaatggagaccatttttgcaccattaccacctgatcattgtccaagatggagacccttccatcaagatccgagttcccgagggttatgactacgagctctacaaccgtaatgatatcaacaggatccttggtccaagagctaattgtatctcctacaaagatggtggttgtcgctgctttggcttcatggtttctaaaaagaagtatatctacaccattgatgatgattgctttgtggcaaaggatccaagtgggaaagacatcaatgtgatagctcagcacataaagaaccttgaaacaccttcaacaccacactacttcaacactctctatgaccctcttagagatggaactgatttcgt

SEQ ID NO: 93606 - DNA, 775 bp, Arabidopsis thaliana columbia
gttgatatcagtaaagaagatttggaactcggagatgaagatgaagtaaaggacagggaagcgaaacaagagtttaaccttctctgtgactggataaaacagcagctcggtgacaaagttgcaaaagtccaagtctcaaaccgtttgagctcttctccttgtgtgcttgtctctggcaaattcgggtggtcagctaatatggaaaggctaatgaaggcacaggctcttggagacacttcaagcctggagttcatgagaggtaggagaatactagagatcaatccagatcatcccatcatcaaagacttgaacgctgcttgtaagaatgcaccagagagcactgaagcaacaagagtggtcgatctcttgtatgacactgctataatatcaagtggattcactcctgatagcccggccgagctcgggaacaagatatatgagatgatggcaatggcggttggaggaagatggggcagagttgaagaagaagaagaaagctcgactgtgaatgaaggagatgacaaaagcggagaaacagaggtagttgaaccatctgaagtgagggcagagagtgatccttggcaagattgatccttttttaccttcttttgtttgcagtgatttttttttttgacagaacgctttatctttccattagcagtatcatgggcctaatgaaagcccataattaaatcacgcgtgaacgagatttatccaatacagtatttgtagtttttttttgataattaaaataattttagagaatttacacaaa

SEQ ID NO: 93607 - DNA, 481 bp, Arabidopsis thaliana columbia
cggacgcgtgggcgcatatctcctgtatcatcactcttttacttccggcgatctctctccgacggccaatggacgccgtcctttactctgttccactctccttcactcccctacgcgaatcatcctctccttcctcgccgtatcttcttctgccgaggtttctctccgttcagccatgtcacaaattcaccttctctcgaagcttcccttccaaatcccggattccctcagcttcttccgccgccggttccacgttgatgacgaattcctcttcgccaagaagtggagtgtacactgttggtgagttcatgacaaagaaagaggacttgcacgtggtgaaacctacgactactgtggatgaagctctggaactccttgtggagaatagaatcactggatttcctgtaattgacgaagactggaaatcggttgggcttgtttcagattatgacttgttggctttgactccatatctggtagt

SEQ ID NO: 93608 - DNA, 538 bp, Arabidopsis thaliana columbia
agagtacaggaccaacaaaattacattctctttgcctttgcctatcgcttaattctgcttttattaccagagaaagcaagaatatataagaatcagaaattgggtgaagaagaatggtcttgattactaagatgtctctctctttctacatcattcatcttctcattttctccttgatttccacttgtgttgtctccaaccaggccgaggataatcttcttcaaggcctaaacagctaccgaactgctcaaagagttcctccatttgccaagaatgagaaggctgattgtgtggctgatgagatcgccgacaagctcgaagatcagccatgcacaaaccacaccacagcgagcacggttactcctggctcggtacctccacggctgacgaactaccaggacattctctctgaatgcaaaatcgacccaaacactacccgtgacggattgatcctacctgtctggatccctaaccggatcccgactttggctttaactaattacacccaaactggttatgcctcggatttaatgattca

SEQ ID NO: 93609 - DNA, 566 bp, Arabidopsis thaliana columbia
acccacgcatgcgcttctctctgtctatctctttctcttgcacgaagaaagagagagagataacaaaaccccccaaaaaaaaacaccaaaaaaaaaaaaaaaaaaaggatgaagaagaagaagaagacaaccttgtctgtttttttttcgaaaggcaaaatgtttgatgggctgttcaaacccaagttttatacgaaatgcaagtcgttggtcaagataacgaagacaagagtagacacggtgaagaggaagaaaaactcggtttgcaaatatctcaagaacgacattgtcgatcttctcaagaacagcctcgattacaatgcatatggcagggcagaagggcttatagaggagaaaaggaggctggcttgttatgagtttttggagcaattctgcaactgcgttgcatccaatgtctctctattacagaaatccatccggtgccctgatgagtgccgcgaggccatttcctcccttgtatatgcagccgctagagtctctgaagtccctgagctacgcgacctcagatctttaatttgctgggagatacggaaacacacttggat

SEQ ID NO: 93610 - DNA, 1181 bp, Arabidopsis thaliana columbia
  unsure (1)..(1181): unsure at all n locations
cgagctcactagtgagctctcacgancgacgtccgagtaaagaacagcgttcgccgagagatatacatactcggatcagtcgtcaaaagctttggaatttgatacttttgatttttcgagaatcttgaaaatcagtcatgggttctggaaaagagcgtgacactttcgtctacctcgctaagctctctgagcaagctgagcgttatgaagaaatggtggaatcaatgaaaagtgttgcgaaattgaatgttgatctgacggtggaagagaggaacttactctctgtgggttacaagaacgtgattggttcaaggagagcttcgtggaggatcttctcgtcgattgaacaaaaggaagcagtgaaagggaatgatgttaatgtaaagaggatcaaagagtatatggagaaggttgagttagagctttctaacatatgcattgatattatgtctgtcttagatgagcatctcattccttcggcttccgagggtgaatctactgtcttcttcaacaagatgaaaggtgactattaccgctatcttgctgagttcaaatcagggaacgagaggaaagaggctgctgatcagtctttgaaagcctatgagattgctactactgctgctgaggctaagctccctccaacacaccctatcagattgggtttggctttgaatttctctgtcttctactacgagatcatgaacgcacctgaaagggcatgtcaccttgctaagcaggcgttcgatgaagctatctcagagcttgacactctgaacgaggaatcctacaaagatagcaccttaataatgcaactccttagggacaatctgaccttgtggacttctgacatctcagaagaaggaggagacgatgctcataagacgaatggttctgccaaacctggtgctggtggagacgatgcagagtgatatgatatgtgtgcacctggacaatatgtttcaagaactgaatgtgcggtgaataatagtgaaaagtagagtttctctgttccctatatcatgattgtctatgttacttgtactctggtttagccctaaatgtctctctggtttgaatgtattgcatgcctgtctcaggacactcttatttgtaattcactactgtcgtcttactatctatccttatggatccaatcttgaaactaaaaaaaaaaaaaaaaa

SEQ ID NO: 93611 - DNA, 494 bp, Arabidopsis thaliana columbia
tttcgagagagctgttgttgttcaactctcgccatccatcagacatctctctgcttctcttcttcttcttcttcttcagctttgagatctattctatcttcaaagatggccaccgatgagccttctcaaactcgctggagctttctgtttgggaggaagaagctgcctgaagaagatgtatcaaacaaggaccaaccagaagatggatcatccaacggtaataacggtgatgtcaacaacaactcttccccagtcaccaatcaggatggtaacacagccttggccaatggcaatgtgattcgcgagaagccgaaaaagtccatgtttcccccgtttgagtctgcggaaactcgtactctcgctgagagtttgagtagggatatcatccgtgggaatccaaatatcaagtgggaaagcatcaaaggtttggagaacgctaaaaagttgctcaaagaagctgtggtgatgcctataaatacccacgtacttaatgg

SEQ ID NO: 93612 - DNA, 455 bp, Arabidopsis thaliana columbia
gacatctctctgcttctcttcttcttcttcttcttcagctttgagatctattctatcttcaaagatggccaccgatgagccttctcaaactcgctggagctttctggactttaaaacgttttatgatgccaagtttgggaggaagaagctgcctgaagacgatgtatcaaacaaggaccaaccatgaagatggatcatccaacggtaataacggtgatgtcaacaacaactcttccccagtcaccaatcaggatggtaacacagccttggccaatggcaacgtgattcgcgagaagccgaaaaagtccatgtttcccccgtttgagtctgcggaaactcgtactctcgctgagagtttgagtagggatatcatccgtgggaatccaaatatcaagtgggaaagcatcaaaggtttggagaacgctaaaaagttgctcaaagaagctgtggtgatg

SEQ ID NO: 93613 - DNA, 468 bp, Arabidopsis thaliana columbia
  unsure (1)..(468): unsure at all n locations
tgcagatgcaaagacgttgtggacatggtatgaaccatacattaaagatgatgaggagttttcaccaggntcaaatggacggatgacgacaatgggtggtctgtactactttgatactttgtttcctcgtatacctgttcctgtcatgcgccagattgtatcaaaccttgagaagatgaatttaccaactaaaccttctggttcaaccggagacatgacccgtggctcagaagacactgcccgtcgtccaccatcagtaaaagcatccctctctgtttcattttggtcagcgtgcacctcatcgtgcttccacccagaggcttttcttctgttcgccgttctccaccgactggttatgacagatatggaggcgatgaattacaacagcggttctcacgtagaagccagagccgagactatatttcttactgagtctcatattgacaacgggaaagagcgagggtgtat

SEQ ID NO: 93614 - DNA, 743 bp, Arabidopsis thaliana columbia
  unsure (1)..(743): unsure at all n locations
cgagtacctccactgaccacaagcctcacatatctctacattcacctcattttcaagcgtgcagaatttgcaagaccagactttgtgcttcatctccctttcctttggctttgcggcagtgcatagctcacatattggagccaatgacgggttcaataaggtgcattctgcacactcccacattgtggattcttctctgctttggtttgcattgtaactcgtcgatggcaaaggaatcgatgacttcatgacaccagcgttcggtacatctttggcacaagaaggaccctgatcacctgggctgcgatttcttttagtacatcttatttcaaaagattcttcagtcaaatcaatgacatctgatccctgttgatgactggaagatggaggacaagcaatgggcattggaccagccattacatcgttttactgactttccattcacgctcgtacaagtttccctgatggaaacaggttccttatatgtgtcactatcattctcttcatcttctaaagcatctgtggattgggaaccacaccaaatatcatcaagtaaacgcctttctgcagccattgcagcagcctgaattggactaagatctgacataatgctgntatcaccaccaagacgttgaggtcctgaaggtaaaagagttcccgcacgcactcttttttctgctgcttgagctgcagttgctctgagaaatgatagagaaggctgacgagaaagtccacccaaacgc

SEQ ID NO: 93615 - DNA, 351 bp, Arabidopsis thaliana columbia
cgctctggagactggaatcaatcgagtaaagtgttcgtagctgagaaaaaccctaagctctcgtttttcgtcttctccgattctgcaagtatgagtcgatcaggtcagcctccagatctcaagaagtacatggacaagaaactccaaattaagcttaatgccaacagaatggttgttggaactctccgtggctttgatcagttcatgaatcttgttgtggataacactgttgaagtcaatggtgatgacaaaactgacattgggatggtggtgataagaggaaacagcattgttactgttgaagctctcgaaccagttggaagatcttagcttatgacttttcacccccaa

SEQ ID NO: 93616 - DNA, 525 bp, Arabidopsis thaliana columbia
aacccacgcgtccgcccacgcgtccgctttagggtttcagagcaaactctgtcttcttcaagccgagagcgaaaaccctaagctcaattccgattttgcaactatgagtcgttcaggtcagcctccggatcttaagaagtacatggataagaagctccaaatcaagcttaatgctaaccgaatggttactggaactcttcgtgggtttgatcagttcatgaatcttgttgtggataacactgttgaggtgaacggtaacgacaaaaccgacatcgggatggtggtgattagaggaaacagcattgtcactgttgaagctcttgaaccagtgggcagatcttcttagctcgttatattcattggttatgatctttttgtactaagcactagctatgagaaatcttggtggtagattcgcagttaccgatgaattgattctgtaagaagtctacatgaatactcttttcttgtacttaaaagattgcaattgacccccacccgatgaattgtaattggctttgtact

SEQ ID NO: 93617 - DNA, 361 bp, Arabidopsis thaliana columbia
  unsure (1)..(361): unsure at all n locations
gtaaaaaacaagaagacgcttacactagacttccaaaaatcaaaacttgagggtttcagagcaaactctgtcttcttcaagccgagagcgaaaaccctaagctcaattccgattttgcaactatgagtcgttcaggtcagcctccggatcttaagaagtaagcccttgttcttatttctctctttctgtttctatatcttcgtgtttctgatttaatttttgtgcttaatctgttgtttgtttttgtttcgttcgatgcaggtacatggataagaagctccaaagtaagttcaatatcttcatcttcttttatcgatagttagggaacttcagttntgtataacacattagctgagatgtg

SEQ ID NO: 93618 - DNA, 646 bp, Arabidopsis thaliana columbia
  unsure (1)..(646): unsure at all n locations
tctctacgactcactatttggaaagctggtccgcctgcaggtaccggtccggaattcccgggtcgacccacgcgtccgcccacgcgtccggttttctttattttggagttagacacggatctgtgagatctagaagaagaagaagaagaagaagctaagacaatggcatccatggcaggaccagatcatctcttcaatttgagaaaccatttctacttgggtgcttatcaagctgcgatcaacaacagcgagatccctaatctttcgcaggaagatatcgtcgagcgagactgtctcgtccatcgcgcttacatcgctctcggaagttaccagcttgtcatcagtgagatcgatgaagccgctgctactcctctacaggcagtgaaactccttgctatgtatctatcgagtcctgaaaacaaggaatcaaccatttcgagcttgagggaatggttggcagatccaactgtaggaaacaatgctattatcaggttgattgctggtactatattcatgcatgaggaagactataatgaggctctgaagcacactcattctggaggaaccatggatctgcatgctttgaatgtccagatattataaaggtgccagancagattttcggggaanacctggggggtgngtc

SEQ ID NO: 93619 - DNA, 956 bp, Arabidopsis thaliana columbia
  unsure (1)..(956): unsure at all n locations
cgttagcaagtaccgctccggaattcccgggtcgacccacgcgtccgggaatggttggcagatccaactgtaggaaacaatgctattatcaggttgattgctggtactatattcatgcatgaggaagactataatgaggctctgaagcacactcattctggaggaaccatggatctgcatgctttgaatgtccagatattcataaagatgcacagatcagattttgcggagaaacaactgagagtgatgcaacagattgatgaagaccacacactcactcagctcgcgagcgcgtggttgaatctggcagtaggtggttccaagatacaggaagcttatctaatcttccaggatttctctgagaagtacccaatgacaagcttgatcttgaacggcaaagcagtttgctgcatgcatatgggtaattttgaagaagctgagactctactacttgaagcactcaacaaggatgctaaagacccagaaactcttgcaaacctcgttgtatgcagtcttcacgtcgggaaatcatcttctcgctacctaaaccagctgaaactttcacatccagaacacgtccttgtgaagcgagcagcatcagctgaagataacttcgagagagcacttcaatctttcgcctgaagtacctcaaagtccatggaatcaatttgccttatgatctaccagaagaacatcatattattaccgaccctatcttgaaattatcatagataaacagttttttccattggatatgttgcattttactttgatttctcactgaagcttttgttttcattgagtttcgaatccaacagaactacagattttgttccttggccgcgaattcttcatgccccggactgcgtggatctgtactacagcaattccgcgaccggtacctagcaggcgtaccagctttccctaatagtgagtcgtatgagagctgnnnnnnn

SEQ ID NO: 93620 - DNA, 636 bp, Arabidopsis thaliana columbia
  unsure (1)..(636): unsure at all n locations
tgatcttcagctctctacgactcactatttggaaagctggcacgcctgcaggtaccggtccggaattcccgggtcgacccacgcgtcggcaaaaagggtaatttttgtcggttgaattcacaagctagttttctcgatctctctctggatctatagctgatctgcattgcggcttgtagctggtatttgttccatagttgtaagctatggtgacaatcaggagtggttcaatcgtgattttggttctgctggctgtatcatttctggccttggttgccaatggagaggacaaaacgattaaagtgaagaaagtgaggggaaataaggtgtgcacgcaaggatgggaatgcagctggtggtctaaatactgctgtaaccagacgatatcagattactttcaggtttatcagtttgagcaactcttttccaaaaggaacactcccattgctcatgctgttgggttctgggactaccagtctttcattactgctgctgccctctttgagcctcttggtttggtaccactggaggaaagcccatgggccagaaagaaatggttcccttttggccttttgccccaaacggccttggcatggggtcacagggggccttanttnggttttaaaaggatgcctt

SEQ ID NO: 93621 - DNA, 752 bp, Arabidopsis thaliana columbia
  unsure (1)..(752): unsure at all n locations
cccgggcnnngggaaccttgaaatttgtttnttgaccccccttngganatgaccanacccgacatttcatcccacctnccaatngggagggggttgcccccaatcaagagagctcagccntcagctnccngacatctttgtcggaaactggaaacccgcggaagagcgacactttgtccaagcgtggcncgacttttggcagcaccatgaacgtcctctacggagagaacacatgtgnccaaggttccattgatccaatgaacaacataatctcacactacttatacttccttgacctcatgggtattggaagagaagacgcggggcccaacgatgagctcagctgcgcagaacagaaacctttcaacccttccactggaccttcctcttcctcttcgtaagtcttatgatatatcgccggtgctctccagtctctcttgcttaatgttacgtaataagtgaaattgcttgtggtaaaaaaagaagaagtgtgtttttgtccctctaggaacttataatgccaaccacctttcctttttatatttttctggatggaaaaccctattttattattgtattggaagaatgtgtgttaaatagagaaagagccagggaaccataaagtgggttgcgaaagaaaattggttccaatcggttggtaaaaaattggtccccagggtttttaaaaaaaaaaaaaaaaaaaaaagggcggccggctctaaggaatccaggctacggtaggggggcatgcg

SEQ ID NO: 93622 - DNA, 1492 bp, Arabidopsis thaliana columbia
  unsure (1)..(1492): unsure at all n locations
nnnnnnnnnnnnnnnnnnnnctgccgtaccggtccggaattcccgggtcgacccacgcgtccgcttattttctcggcaacgaagcaaaaagggtaatttttgtcggttgaattcacaagctagttttctcgatctctctctggatctatagctgatctgcattgcggcttgtagctggtatttgttccatagttgtaagctatggtgacaatcaggagtggttcaatcgtgattttggttctgctggctgtatcatttctggccttggttgccaatggagaggacaaaacgattaaagtgaagaaagtgaggggaaataaggtgtgcacgcaaggatgggaatgcagctggtggtctaaatactgctgtaaccagacgatatcagattactttcaggtttatcagtttgagcaactcttttccaaaaggaacactcccattgctcatgctgttggtttctgggactaccagtctttcattactgctgctgccctctttgagcctcttggttttggtaccactggaggaaagctcatgggacagaaagaaatggctgcctttctcggtcatgtagccagcaaaacgtcctgtggctatggagttgcaacaggagggcctttagcttggggtctgtgctacaacagggaaatgagcccaatgcaatcctactgtgacgagtcctggaaattcaagtacccctgcagccctggagctgaatactacggacgcggtgccttacccatttactggaacttcaactacggagcagctggggaagccctgaaagctgatctcttgaaccaccctgagtacattgagcaaaacgcgacaacttgcattccaagctgcaatctggagatggatgactccaatcaagagagctcagccctcagctcacgacatctttgtcggaaactggaaacctacaaagaacgacactttgtccaagcgtggcccgacttttggcagcaccatgaacgtcctctacggagagtacacatgtggtcaaggttccattgatccaatgaacaacataatctcacactacttatacttccttgacctcatgggtattggaagagaagacgcgggaccaaacgatgagctcagctgcgcagaacagaaacctttcaacccttcaactgtaccttcctcttcctcttcgtaagtcttatgatatatcgccgttgctctcaagtctctcttgcttaatgttacgtaataagtgaaattgcttgtggtaaaaaaagaagaagtgtgtttttgtccctctagaacttataatgcaaacaacattacattttatatttttctgtatgtaaaaccatatttaattattgtattggaagaatgtgtgtaaaatagagaaagagcaaggaaacataaatgtggtttgcgaatgaaaaaaacaaaaaaaggacaggccgctctagaggatccaagcttacgtacgcgtgcatgcgacgtcaaagtcttnctataggtcacctaa

SEQ ID NO: 93623 - DNA, 436 bp, Arabidopsis thaliana columbia
gaattatctctgttcaaagcttttgttttgttcccaattctgaagttttgaatcaacaaatcttcaataaagttttctcctttcactatctttccatattcttcttcttagtaaaactttgcattaatggcttacccaaatttgtaagctctttgtttcctcccttcttcttattctcttcttcattctccaaatttgtttctaggtttcttcagtttgagcgatgaagaagtctaaactcgataattcttcttcacagattcgattcgggcttgttcagttcttattagctgttctgcttttttacttcctctgcatgagcttcgagatcccattcatcttcagaaccgggtctgggtccgggtctgatgatgtttcatcttcttcttttgctgacgcattaccgagaccaatggttgttggtggtggtagtagg

SEQ ID NO: 93624 - DNA, 514 bp, Arabidopsis thaliana columbia
aaacagaagaacgtaaaccagtcaagtctgtaaatggcgaaaaaagaaggttcaaagatgaacatcgccattatacatccagatcttggaataggcggagcagagagattgattgttgatgcggccgttgagcttgcctcgcacggtcataaagttcatatcttcacctctcaccacgacaaatccagatgcttcgaggaaactctttccggtatctttcaagttacggtgtatggatctttcctgccacggcatattttctaccgactacacgcagtgtgtgcatatttgcggtgcttgtttgttgctctctgtgttcttttgggttggtcttcattcgatgttgtactagcagaccaagtttcagtcgtagtcccattgctgaaactcaaaaggtcatctaaggttgttttctactgccatgtcccggatctcttgctagctaagcatacaacaacacttagacggatgtatcgtaaacccattgatttcattgaagaacaaacaacaggga

SEQ ID NO: 93625 - DNA, 817 bp, Arabidopsis thaliana columbia
gagagacaaaacacaagtttcttcttcttgggattggctatttccagaaatccaagtcaataatcaaagtccaaacaaaaaaatcctctcccaatctccgcttcactcttctcatggacgctctcattgctcagcttcagagacaatttcgtgattacaccatttctctctaccaacaggggtttttggatgatcaatttactgagttgaaaaagctacaagatgatggaagtcctgattttgtgtctgaagtgctttcacttttctttgaagattgtgtgaagcttatcagtaacatggctagagctttggacacgacaggaactgtagattttagtcaggtaggtgctagtgtgcatcaattgaagggtagtagctcaagtgttggtgccaagagggtcaaaactttgtgtgttagcttcaaggaatgttgtgaagctaagaactacgaagggtgtgtgagatgtttgcagcaagtggatattgagtacaaggcgttaaagacaaagcttcaagatatgttcaatcttgagaaacagatcattcaagctggtggtatagttcctcaagtggatattaactaaagagactagtccataagaagaaaaaagatgatgactttctttctttagtttctcttctaaattattttggatttggtgtttgctcaaaaactcaataaaatatgtgcaaaaagaaacaaaaacaagtgatggttgtttataaatcagtagtatgtattgtttgatctcatccgagaaaattgaaaccattggactaatgaatgtgatgataatatatattggtttgcttctcc

SEQ ID NO: 93626 - DNA, 480 bp, Arabidopsis thaliana columbia
  unsure (1)..(480): unsure at all n locations
ttccccgnnctgaaatcccgggcgagacccacgcgtccgtaaaacacaagccacaaaaccttatgttgggaataaattatggttatgaactgggatagtttcattctgttggacggcaaatagttatcattcattttttgtatcattcagtctttaatggttccaggtaagttgcaaaagaagtaaccaatattcgtgtattctctagagatttttgacggcaaaatagtatcattcattttctttaaagactacaatttgattagatattaatagattaaatggagtagtagtttttttttcaaagatgattttaactaaagattattcttttcattttgattgttttatttgtatagctcaaaactttgtatataaaacatccttcttgattagtaaatttcgcatttcaacaaaaatggaataatgttgtgcgacgattaaatggaatagttaaaatgattaaagaaatgacactcg

SEQ ID NO: 93627 - DNA, 501 bp, Arabidopsis thaliana columbia
gaaatttctgatatttacttttcctctgagttattatagatcaattatcttatttaatatatatgcgggtttatttttttcatatattaaaattcaccatatttcaaactctataaataaagacttgttttatttgatttggatacaaaaaaatacatctatttttactaattatccatttaaaacataaaaaaaagaaaaatgaaataaaaatagtgggtagagtgttgaattttattaagcaaaccattgtagagtataaaatttaagtgggtattgaattattatgtggaagagagaagaaatgatgtggaaaaaaagaagatgacgtggagggtgttgaatgaaaaaaccattgttgatagcctgatgactgattagaaatcaacatgtcatctattttaacgaatattaaaaattaaatttagcaaccatccaaagtaatacaagattcacatgatttatacatatttctttgaaaaacttgtttataaacttcac

SEQ ID NO: 93628 - DNA, 1376 bp, Arabidopsis thaliana columbia
  unsure (1)..(1376): unsure at all n locations
cagctctctacgactcactatttggaaagctggcacgcctgcaggtaccggtccggaattcccgggtctacccacgcgtgcgcggacgcgtgggcggacgcgtgggtgagctgatgcttgtaaaagtgaatgcacatccagaatccagggcagagatcatgtggctagttgacacattcagagcaagagttgtagatatagcggaacatgcattgactatcgaggtaactggagatcctggaaaaatgattgctgtagaaagaaatttgaaaaagtttcagatcagagagattgtaaggacaggaaagatagcactgagaagggaaaagatgggtgcaactgctccattttggcgattttcagcagcatcctatccagatctcaaggagcaagcgcctgttagtgttcttcgaagtagcaaaaaaggagccattgtccctcaaaaggaaacatcagcagggggagatgtttatcccgttgagccattttttgaccccaaggtacatcgtattctcgacgctcactggggacttctcactgacgaagatacgagtggactacggtcgcatactctatcattgcttgtaaatgatattccaggagttcttaatattgtgactggtgttttcgctcgaaggggatacaatatccagagcttggccgtaggacatgctgaaaccaagggcatttcacgcattacaacagttatacctgcaacagatgaatcggtcagcaaattggtgcagcaactttacaaactcgtagatgtgcatgaggtccatgatcttactcatttgccattttctgaaagagaactgatgctgattaagattgccgtgaacgctgctgctagaagagatgtcctggacattgctagtattttcagggctaaagctgttgacgtatctgatcacacaattactttgcagcttactggggatctagacaagatggttgcactgcaaaggttattggagccctatggtatatgtgaggttgcaagaaccggtcgtgtggcattggctcgtgaatcgggagtggactccaagtaccttcgtggatactcctttcctttaacaggctaaaccgttgcagagtgcatccatcgaacatcataaacttttgaaggtaaaagtttcattacacagtctatgagccaactcaaagacagacagagagactgcgtagatatatgtttgtgactttgtttatgaaacaattagctgattttggcttcatttcgattcttttctttttgagataagaaaagttgttaggattattactaaaaaaaaaacaaaagaagnnnnnnnnnnnnnnnnnnnnnnnnnnnnnnnnnnnnnnnnnnnnnnnnnnnnnnnnnnnnnnnnnnnnnn

SEQ ID NO: 93629 - DNA, 470 bp, Arabidopsis thaliana columbia
ccacgcgtccgtgcattggctggaacctacaactttgatgacatggcgaaagtggctgcgagtgcctccatgtgcgtccaccaagaggtctcacacagaccattcatgggtgaagttgtgcaggcactaaaacttatatccaacgatgcagatgagacctgtggtgattattgcagccaaaaggactcatcagtaccagactctgctgacttcaaaggcgatctggctccttcggatagcagctggtggaatttgacacctcggttaaggtatggtcaagcttcgtcgttcataacaatggattatagctcaggaccactagaggacatgggaaaccggccttactttgcttctagcattccaagagtaggaggtctaattctaccaaacagatcaggtccgttaagacccatgcgtagtagaagaaactttttagactgagaggagcatgagcgaacacggtggaccgt

SEQ ID NO: 93630 - DNA, 472 bp, Arabidopsis thaliana columbia
aaattatatacccaacatattctttgtatgtatattttttaacataagtagtgagcattaatgttggcgacgaaaatttcattgttaggtaggggccataatgatatggaagtgatcttctgcttaattaattgtagttttaaagtccatgaccagttcttttcattgagaaataaattcctctccaatctaaatctagttttagatttttgtttaccatttttttatttgaatttccatcaaccgaaagagcttttcttttggtttgctttatttcttttttcatgctctttcaaccgtcaaagtaacgtctctagtctctttgtctacttcagttaacagtcttctactctctctctttcttttatcttttctctttttgtttgaacctcttgccttgaggaacaaagtgttgaaacataaattaagagatgcaatttgtaagaattcatacacacaaaagatatagtcg

SEQ ID NO: 93631 - DNA, 423 bp, Arabidopsis thaliana columbia
cttctgcctgctactcttatcatggagaaaaatgttgtcggcattacaattgcacttgtaagagatgatttcagaatcgtttggtatctactattcaattcagcccccgcccctttagtcaacttgccaaatttcttagtcacaaaccacactagcgccctgactttacaggtgctaggaaacgccaaaggagcagtagcagtggtggtctctattctaatcttcaagaatccggtgtcagtgaccggaatgctgggttactccctcaccgtctgtggagttatcctgtacagcgaagcaaagaaacgaaacaaaaattagaacactaaacacacacaaagcttttacttcttcttcatcattcccccctatatatatgttatatattttctcccctatggatatacaagcaaagagtctctt

SEQ ID NO: 93632 - DNA, 437 bp, Arabidopsis thaliana columbia
  unsure (1)..(437): unsure at all n locations
tatagggaaagctggtacgcctgcaggtaccggtccggaattccgggtggcccacgcgtccgaaaactatctttctccttctcattcctttttctctcactctcctccattaaagctctgcactttctcaaagagaatgttcatgggtaagatgggtcttttgggaattgctctgttttgttttgctgcaatggtgtgctctgttcatggctatgacgctggatgggtcaatgctcatgctaccttctatggtggaagtgatgcttcaggaaccatgggtggagcttgtgggctccgggaacctctacagtcaaggttacgggaccaacacggcggcgttgagcactgctctgttcaacaacggtcttagctgcggngcttgttttgagatcaagtgtcaaagcgacggcgcgtggtgtttacctggtgctatcatt

SEQ ID NO: 93633 - DNA, 1484 bp, Arabidopsis thaliana columbia
ggcaggttcttacgcgttacttacccgtccgccactggaaacaccacttgccgtccgacttgcatgtggtaagcatgccgccagcgttcatcctgagccaggatcgaactctccatgagattcatagttgcattacttatagcttccttcttcgtagacaaagctgattcggaattgtctttcattccaagtcataacttgtatccatgcgcttcatattcgcatggagttcgctcccagaaatatagctacccctaccccctcacgtcaatcccacgagcctcttatccattcttattcgatcacagcgagggagcaagtcaaaatagaaaaactcacattcattgggtttagggataatcaggctcgaactgatgacttccaccacgtcaaggtgacactctaccgctgagttatatcccttcccccatcaagaaatagaactgactaatcctaagtcagagggtcgagaaactcaaggccactattcttgaacaacttggattggagccgggctttcctttcgcactttatacgggtatgaaatgaaaataatggaaaaagttggattcaattgtcaactactcctatcggaaataggattgactacggattcgagccatagcacatggtttcataaaaccgtacgattctcccgatctaaatcaagccggttttacatgaagaagatttgactcggcatgttctattcgatacgggtaggagaaacggtattcttttcttaaacttaaaaaaatagagaaataagaaccaagtcaagatgatacggattaatcctttattcttgcgccaaagatcttcctatttccaaaggaactggagttacatctcttttccatttccattcaagagttcttatgtgtttccacgcccctttaagaccccgaaaaatcgacaaattcccttttcttaggaccacatgcgagataacgaaaaaaaaaaagagagaatggtaaccccacgattaactattttatttatgaatttcatagtaatagaaatacatgtcctaccgaaacagaatttgtaacttgctatcctatcatcttgcctagcaggcaaagatttcactccgcgaaaaagatgattcattcggatcaacatgaaagcccaactacattgccagaatttatatattggaaagaggtttacctccgtgcttctatggtacaatcctcttcccgcggagcctcctttcttctcggtccgcagagacaaaatgtaggactggtgccaacagttaatcacggaagaaaggactcactgcgccaagatcactaactaatctaatagaatagaaaatcctaatataatagaaaagaaaagaactgtcttttctgtatacttatgtatactttccccggttccgttgctactgcgggctttacgcaattgatcggatcgtctagagatcccttcggcgcaacataggtcatcgaaacaatctcggagacccgccaaag

SEQ ID NO: 93634 - DNA, 914 bp, Arabidopsis thaliana columbia
gctttgattacagtaaaagaaactggctgtgaagatgctatggaagatccctcaattgaaggtttatgtgatggccttagtgatggcgatgatgtggatggcgatgatagctcatgtgatgaagatgtttgatgtttaaatttgtaagaccggacacatgggcacgaagttacagagacgattttgtgatttcaccattagtctctatcaccaggggtttttggatgatcaattcacagaattgaaaaagctgcaagatgaatgtagtcctgattttgtggctgaggttgttactctcttctttgaagactgtgagaagcttatcagtaatatggctagagctttagatcagacaggaaatgtagatttcaaactggtaggttctagtgttcatcaactcaaaggtagtagctcaagtgttggtgccaagagagtcaaaggtctttgtgttaccctcaaggagtgttgcgactctcagaactatgaagggtgtgtgagatgtttgcagcaagtggatattgagtacaagacattaaaagcaaagcttcaagatctgttcaatcttgagcaacagattgtccaagctggtggtagaatccctcaagtggatatataaacaatagacctatcgacaacagaacagcaagatgatgatcatccagttgcattcttcagacgagtactactcgaatttgttgcttcgaaaaagaaaaaaaactcttgagaatgtgtggaaaagagaggtgattgttgttcatagatcaatactatgtatcttttgtatcatcatctcttgaatcttggtactgatcttatctgaatagtatgaatttgcatctcataagaccatatgaacaagagtgagttatgtattcaaaaacaggaatatttccagacacagaagcatcataaat

SEQ ID NO: 93635 - DNA, 520 bp, Arabidopsis thaliana columbia
cgaatcccggtcgaccacgcgtccggtgtcttctctccctctgtgtctgtgtttagatctctcttctctctgctggctttccaaaaatcgtcttctccttctccacctttcattatctttcttctcttaccaaaaccctttaaatacaaaaaaaaactaaaacacataaaaaaaatattgaattctcctttttcccgacaatctgagtttctcaggcagagaagacagagattttcaccgtaagggcaaaaaacgaaaaactctgtctctctgtttctgtttcgtccttccttggctttgatttcttacactaaaagagacatctttaaagaatctcacattgttccctattgcttgtctcacaagagaatccttgatctagggttcttgcttccctcccctgtttttttctttaaattcctcctctgttttctatttgttctcgtcggagtaagaagagatggagctaggagatacgacgtcggtgattccagactcgttcatgggatacagagacgac

SEQ ID NO: 93636 - DNA, 504 bp, Arabidopsis thaliana columbia
  unsure (1)..(504): unsure at all n locations
tcttcttccatggtcattgaaattcaaacacacgcaagcatcagagaagaggactgattcgcgacttcgattatgaggccgaacattgttaccgaggctggggttcaaactcgagttggacagtggtggaatgccatacctttcctcacgtcatcggtggtggtagtttgtggggtcatttacctgatatgcctcttaactggatatgacactttttatgaagtatgcttcttaccctcggcaatcatatcgaggttccaagtttataggttttatacagccattattttccatggatcactgcttcatgttctgttcaacatgatggcattggttcctatgggctctgagctggagagaatcatgggatctgtccgtttgctttacctaacagttttctggcacggccaatgccgtattgatcncctntagnatccttggngggnntaatccntctncccatntggcantcatgaatgattngcnntggtttnggatntgtta

SEQ ID NO: 93637 - DNA, 368 bp, Arabidopsis thaliana columbia
aaaatattctgacaccttttttcagattgactacaaaaatcccatgcaagtaaaacccttactgtggcagataatattcgaatttgtggtctgacaaagcttcaatatgcacactctattggttttttctatctggatttcttgcaatcatactataaccttagacgaaatcaacagggggagtttcattccattttatttcttcattcgattacgtgttctaccatttcctacctactagaacagtggcgagattgagatttgattagcactaatactaaccattgtggaatcactcaaaaacagagacttgttcattccagctacaagccgcgaccacgttaagtaaaacggggtggtatgacaca

SEQ ID NO: 93638 - DNA, 350 bp, Arabidopsis thaliana columbia
ctcaaataatcctaattaaaattattgctgcgccgaacccaatgcatagcgcactgaaaacaatggctccagcaaagttggaacgactatgtgttctctcattctttcttttttgtgcaacagtttttggaacagaatcattggagtcattgcctgaggataaactgatactgagagggttgaaattttatggtttccatggagtgcttccagaagagagggaattgggtggtctgtttatcgttgacattaatttgtggttgagtctgaaaaaggccattgtatcagacaacttagcagatacagttagctttgctgattcttttaggcttgtgaagaaaattgttgat

SEQ ID NO: 93639 - DNA, 479 bp, Arabidopsis thaliana columbia
tatatcgttatgtttataatacccgcaaccccataaatatcatacccgcaaccctattttttatcatgcatagtttattaattttccgatcatctgagcatagatagtaatataaccctaaacaaaaagacttaaattacaattttatgagggattatttgatcaaggattataatctatatctatgttttaagatttagagactactttttttttctttctaaatttccatgtttaatttgtgtggatttcatatttttttactataattttttttgtttctttagtaatataatcaaatctgtttcaattcatttcattgtaaagaccaacattggattatgttcgaatttatattggcactaatatccatgattcaatagtacctagacagtgaagatatttaatgaatttgagctaaatattggctttttagcgacagtgatagtgaggtattaaattatttaatttattaattt

SEQ ID NO: 93640 - DNA, 457 bp, Arabidopsis thaliana columbia
tggtatccaagagagcccacaatgcttgtagcgatacctgaacgatccagcttctgcataagcatagccctagattgtgcatttaaagccagtccacccccttcatcatcatcaaaatcagcagattttggagcagaatcttgtgtaccaatatgatcagagacggaagaaaccttgattgtcctaccagcaatctccagctttccatttaaggcaatttgtgctgcctttgaatgttcaagttgaacaaactgaataaatccaaatcctttgcactgcccagtttcaggatcaagtggtagctgaacaagctcaacgggaccaaatgcctcaaaaatctgtctaagctgcagttccgacatgccccaatccaggttacccacacagagtttcctatctgcagggcctggaccaccaaccgtagtgctgttagaatgggccagaatctcggaagggt

SEQ ID NO: 93641 - DNA, 372 bp, Arabidopsis thaliana columbia
gccgttagtcatattgagtgttagttgttccatttagccgagctctcttggtagcaagggttcgatgccatgtctcttccaatgtggttaaatgtgtaattgtataaagttaattcatttttgttacttatatttaaaaaatagatatagaattgttattcataactcaccgtagacaaactaaaaatttagaaagccaaattggaatattcaaattttagcattttaatattcatttggttgaggaggaagagccaccaaccaaaccattgagtctgatcatcttgatattattggaatttatgtttgtttaatatgatctttttaatttcatttaaattaatattattgtttattataattaatgaaaat

SEQ ID NO: 93642 - DNA, 387 bp, Arabidopsis thaliana columbia
ttcagagatcacttagaattctctactctcttactttcatgttttcaaactttgcgacttgtattgggaatcttgtatcttgtattttcaatccaatcaattaagtaagtttaatcatctaatttttcttactcttttcaatccaatcaataaagtaagtttaatcatctaagttttcttactactctactacttacagaatttttatgattttatctttgaattattgataagttttcttactactctactactcaaatagtaggtctggtggtgagggtcttggattatatggttttttagattgctgaaagtttcttttaattcgatttatttatattttttttcatcagtttccgtccgaatattttcatcaatattatttat

SEQ ID NO: 93643 - DNA, 2447 bp, Arabidopsis thaliana columbia
gcaaatcaaagatgagatgtcggtaaaaaaaacgctattataagaacacacgccactagttgtggataaagttgtctactttggtctcgttgtgattattatattgcacaattattaacattcatactctcatatgggtattgtttttggtctccgttagatctcaaatctttaactttgcatacccaaaataggaagaaagaagagtcaagtcactaaaataactttcacagtctttgattcgaagatctttgtcgccgagagatatccactctgatttgagttctgaactattctctggaggaggttgaggtctgaaatcatggaacaacttggttagagtgtggaattttagctgatttgatctttgattcatctgtgatcataataactatgaagatggacaaaaagactatagtttggtttagaagagacctaaggattgaggataatcctgcattagcagcagctgctcacgaaggatctgtttttcctgtcttcatttggtgtcctgaagaagaaggacagttttatcctggaagagcttcaagatggtggatgaaacaatcacttgctcacttatctcaatccttgaaggctcttggatctgacctcactttaatcaaaacccacaacacgatttcagcgatcttggattgtatccgcgttaccggtgctacaaaagtcgtctttaaccacctctatgatcctgtttcgttagttcgggaccataccgtaaaggagaagctggtggaacgtgggatctctgtgcaaagctacaatggagatctattgtatgaaccgtgggagatatactgcgaaaagggcaaaccttttacgagtttcaattcttactggaagaaatgcttagatatgtcgattgaatccgttatgcttcctcctccttggcggttgatgccaataactgcagcggctgaagcgatttgggcgtgttcgattgaagaactagggctggagaatgaggccgagaaaccgagcaatgcgttgttaactagagcttggtctccaggatggagcaatgctgataagttactaaatgagttcatcgagaagcagttgatagattatgcaaagaacagcaagaaagttgttgggaattctacttcactactttctccgtatctccatttcggggaaataagcgtcagacacgttttccagtgtgcccggatgaaacaaattatatgggcaagagataagaacagtgaaggagaagaaagtgcagatctttttcttaggggaatcggtttaagagagtattctcggtatatatgtttcaacttcccgtttactcacgagcaatcgttgttgagtcatcttcggtttttcccttgggatgctgatgttgataagttcaaggcctggagacaaggcaggaccggttatccgttggtggatgccggaatgagagagctttgggctaccggatggatgcataacagaataagagtgattgtttcaagctttgctgtgaagtttcttctccttccatggaaatggggaatgaagtatttctgggatacacttttggatgctgatttggaatgtgacatccttggctggcagtatatctctgggagtatccccgatggccacgagcttgatcgcttggacaatcccgcgttacaaggcgccaaatatgacccagaaggtgagtacataaggcaatggcttcccgagcttgcgagattgccaactgaatggatccatcatccatgggacgctcctttaaccgtactcaaagcttctggtgtggaactcggaacaaactatgcgaaacccattgtagacatcgacacagctcgtgagctactagctaaagctatttcaagaacccgtgaagcacagatcatgatcggagcagcacctgatgagattgtagcagatagcttcgaggccttaggggctaataccattaaagaacctggtctttgcccatctgtgtcttctaatgaccaacaagtaccttcggctgttcgttacaacgggtcaaagagagtgaaacctgaggaagaagaagagagagacatgaagaaatctaggggattcgatgaaagggagttgttttcgactgctgaatcttcttcttcttcgagtgtgtttttcgtttcgcagtcttgctcgttggcatcagaagggaagaatctggaaggtattcaagattcatctgatcagattactacaagtttgggaaaaaatggttgcaaatgatcaaaataatgtgctgttataaagcctaacatgtagatgtgtgaatgtgtcttttaactctttgtttccttttggttatactcaaaaggatatgattgcataaacatataatgctgatattatttcaattggctatgaataaaatatacatatttgtttagtctaaaaaaaaatagttaacaaataaataaaagcggccgcccaaaaggttcaaa

SEQ ID NO: 93644 - DNA, 826 bp, Arabidopsis thaliana columbia
gttctcatcttttaagtactgaggattttgttggacattttcttacctccattattggcagagagaaacaaagaaataaagaacaaaagcaaataacagagaatatggatttggttcagaagcagaagagtttgcaagattacaccaaatcactcttcttagaagggattttggacagccagttcttgcagctgcaacaactacaagatgaaagcaatccagattttgtttcacaagttgtcacactcttcttccaagactctgataggattctcaatgatctctcactttccctagatcaacaagttgtagactttaaaaaagttgatccccatgttcatcaactcaaaggtagcagctccagtataggagcacagagagttaagaatgcttgtgttgtcttccgcagcttctgcgagcagcaaaatgtcgaagcatgtcatagatgtttgcaacaagtgaagcaagagtattatcttgtgaaaaacagattagagactctgttcaagctggagcaacagattgtagcttctggtggaatgatcccggccgtcgaactcggattttgagtgaatttcataaacatctctgtccattgttgtttcattttggactctctcttcttcctctctttatgtgactatcaaaaaaaggttcttatgtgaacttctttctttgtgccattggaagagtgagacatgctaaaacgtttcttaatccacatctaaatcccacatatgtaaaataagatctcaagcaaacatatagtcatgagtcatgactacaattatatagagtttgatcaagataatgtacgcatcaaggt

SEQ ID NO: 93645 - DNA, 419 bp, Arabidopsis thaliana columbia
gatcatcagagacgatgaatttggtatttctcttcacaaacccactatcagctaccactgaagtgcaagacttggaagtctttggatcaataggattcaaagtaacaactttttgcccttcaccaagcacagataattcaaaacttctggaaaatttgcaaatagaataagggtgacgaaaatagggaattaaacattcatatgctggtgaagggcaactggcaatatcaaggagattcttactgcaagtatagtaacttggaataaaacaattgtaagccaaatgtcttctatacccacatcagcacaaattctttacacatccgataatggtattgtcttcgaagaacgaagacgccgactcgagaggcagaacaagaaaagtgagaagagaatcaatgaagtcttcactgcacttc

SEQ ID NO: 93646 - DNA, 530 bp, Arabidopsis thaliana columbia
caagaaatagaaagttgacaaaaacaagaaatataaatcttctaaagctggctttatataaactgataaaatcctcctttttgggcattgacaagttcatctgtctctcttgtcgtagtgaaagagaaaaagaaacaagtttttttctgttgggtaattttctactcgtcattggtttcatcgacattgaactagaaccagaatggctactgctacgtctcaccaatcagtcgtttcatttgcttctctccggtcttctccttcttctacaatctctcaatgtggattcaagatcgattcttcactgagctttacatcgaaaaagacaaacttttgcaagattaaagcaatggcatcatcagtttcttttaacaacactctcttgtctccttccaagacaatccctgacaattctcaaaagaaatcaaatgaagcagctttgatattgattaggcatggagaatctttatggaacgagaagaatcttttactggttgtgttgatgtgccattgactgagaaaggtgttga

SEQ ID NO: 93647 - DNA, 806 bp, Arabidopsis thaliana columbia
  unsure (1)..(806): unsure at all n locations
aaacaaaaaaaaaatatatccaagaagctttgaagaaccatggcgatgtctcatgtccagcctgtgcttttcttcctcgcatcactcttcttcttactggctttgtgcagcgccaacgattttgaatattgcaccaaaaatggacatgattatggtgtcgtctcttggatcgaggtctttcgggttgggcctcaggaaaacccaaccctcactataaatgtatttggtactgcgacgaaagaaatatccgcgggaacccttgtatatgtagcctatagatctggggattttacaggccttttaaaaacttacgacctatgtgatgtgagtttggcatgtaacattgattctgagattgaagctggcgacgtgtttgacttcagtcttaaagacgttctttatgttggttttgatgagggaatcaagtattccgtatctttgcgtcaaaaaaccgcagaggaggaggatcccataataaaaatgtgtatccggcttcaaaagtacctgcctcagcttctgcaatttgcctctttttagccacgttggctgatgaaaagatgtttccaactctttcattatatgactctttctcgcttgcatttttccttttttatgtgttgtccaacaaataaatcaaatccttgaaccgatatcgctatagatattgctttgttgtaattttggcctgattaatatgaaccaacatgcctttccttgaaaaaaaaaaaaaaaaaagnnnnnnnnnnnnnnnnnnnnnnnnnnnnnnnnnnnnnnnnnnnnnnnnnnnnnnnnnnnnnnnnnnnnnn

SEQ ID NO: 93648 - DNA, 524 bp, Arabidopsis thaliana columbia
  unsure (1)..(524): unsure at all n locations
gaacagtatccaccgccgattaagaagtatcctccgccaattaagaagtatcctccgccagaagagtatccaccaccgatcaagacttatcctcatccccctgtgaagtttccaccgcctccgtacaagacttaccctcatccgccgatcaaaacttatcctcctccgaaagaatgtcctcctccgcctgaacattacccttggccctcccggaaagaggaaatatcccacccaccggcttgagtatcccgccgcccgcccataataagggaatatcctccgggctgatcccatagtaacctcaaaacccaaacaagggccgtgtttgcctataagtatatgtctagttaaaaaactgttctggtctttctgttatgttctttctttttcttatgactttctgttatgatgcatcaaataaagaataaactgttctgttttgaatttgttaaataggagagtgcaagntcaaggacaaggtgtttcananataanngaaatatattttctaannnngggaaagg

SEQ ID NO: 93649 - DNA, 664 bp, Arabidopsis thaliana columbia
  unsure (1)..(664): unsure at all n locations
caatcctctgctgctcaatctctcatcatcggcatcgctctctctattactctctcagatggatcccgacgctgtatctaaggccttcgtcgaacattactattccaccttcgacaccaaccgtgtcggtctcgctggtctctatcaggaagcttctatgctcaccttcgaaggtcaaaagatccaaggagtccagagcatcgtcgctaagctcacctctcttcctttccagcagtgcaagcatcacatctccaccgttgattgtcagccttctggtcctgcttccggtatgctcgttttcgtctccggtaatctccagctcgccggagaagaacacgctctcaagttcagccagatgtttcatttgatgccgacgccacaaggaagcttttacgtgttcaacgatatattcaggttgaactatgcctgaacagaaatcagattgttgttagcatacatcattgttgcatttctatacctatttgagcaaatccttctatcaatttttcttggccttttcttngtaattcccagatgntttnccctttgggacagagggatattngnttccaanaaggatttgggtttggtttttaggcccgngaaagggttcactttaaanttgganaatttnnaaaaggtnaanttggccaccngaaaannc

SEQ ID NO: 93650 - DNA, 514 bp, Arabidopsis thaliana columbia
cgaatttccgggggggaccaacgcgtccgggcttgataccaacaaaagcaaaggtagtagtcatctcactgatttgggctattctggtgttggaaagtgcaacagtgtcaagtgcagtagaagatttggtggtggaacagtgcaagcacaactgtaaacatgatatccacaacaagaagaaagagtgtgaagataagtgcaatgaactgttgatgatggagatagagaaagagacaagtggacgacaagaagaagaacacaatcccttctgtgaggcattttgcaacccctttgaaggactctttcaacattgcatggccgtttgccctcgcaccaagtccaaaccagagatgatggtcataggaggagaaggtgttgctaatgagggtttgcagacaaaatgcaacagaaaatgcctgtcttacaccgaaccagaggcctataaaaaatgcatatccggatgcttcatgctccaacgaggaagtctgtgagacatcgtgcagtattcttcaag

SEQ ID NO: 93651 - DNA, 564 bp, Arabidopsis thaliana columbia
ccctttctttttttttttttttaataccaaattaatgacttatcaatttagtattgtaatcacaatcgtgaagagaaacacaatatgttgaaagttgaataaaatctcaaatcataaagaaaatagtgtcttctagattcaataatgttcactaatttctgtttacttgttactacaccatttctttggcctcgccgtgaaaataaccaatatgttaaataaaatctcaaatcgtcaagaaatacttggactggtcagaaaaaatgagagtgatataactcatgacagtaagctttgcttggcggactctcttgtcaaaatgaaatcaactgcttcctcgacggtgtcaacgacctgaagaagttaaacagtttcacatgaacataaactcacgggaataataataatcttcttctcaaggctaagtgatgatgttgatgcttaccagatcagcaagaaactcggcatggttatcttttcctttgaatactccggttctcgttaatattgaaaaccaaggagtcccagcctgtcacacagatttacttttaatagactattaat

SEQ ID NO: 93652 - DNA, 3564 bp, Arabidopsis thaliana columbia
ctttcactcttcccttctctctccccaaaataaatcagaaacctatcaacattcttcaacagccacaagtaaaatttatagacatttctgtctgaagaagaaaaagattgaatttttttgcttgttgtgggttctttaatggatccaagaacaagacttgactatgctctgtttcagctcacaccaactagaacaagatgtgatcttgtgatattctctggtggtgagaatgagaaacttgcttctgggatttttcaacctttcgttacgcatctcaagagcgttagtgatcagatttctaaaggtggatactccgttactctccgtccttcctccgttggtgttccttggtttactaaagtgacccttcagagatttgtgcgatttgtgactactccggaggttcttgagaggtctgtaacattagagaaggagattgagcagatcgaggattcgattcaagctaatgcagccgccattgccggtgaagctgaaggaaacgagttgggtggtacatggacttctcaaaagtctacggctttatcaaagacgaaaggggaaactgatggagacactgtggaagaaaattcgaaggttggtcttcagcgtgttctggagaaccgtaaagcggctttgtgcaaagagcaagcgatggcttatgctcgagctttggttgttgggtttgaacttgactacatggatgacctcttttcgtttgctgatgctttcggagcttcgcggttaagggaagcgtgtgttaactttgtggacttgtgcaagagaaagaacgaggatagaatgtgggtggaccaaatcactgctatgcaagcatttcctaggcctgaattaacgttcatgggtgactctgggatcgtactcgctggtgaagagaatgatttgttgaatgctacaaacgtaaagcatggaaactctatggatgcctcgagccagggtagctttgagactggccaagaagggagagctcaaatggcaatgccgtggccaaaccagtttcctcagtacatgcagaactttcaaggacatgggtatccgcctccttatatgtttccggggatgcaaggtcaatcaccatatttccatgggaatatgcaatggcctgtaaacatgggagatgtggagtcaaatgagaagtcttccaagaagaaaaagaagaagaagaagaataagaagaagtcgaagcaagatgaatctgccgagccaagcgataattccagtactgagaccgaatcagaagacggaaatgaaggaaagaaacaatccaggaaagtggttatccgcaacataaattatataacttcaaagaggaatggagcgaaggagagtgattcagatgagtctggagaagaagaagggtttgtggatggagattctattaagcagcaagtagaagaagccattggctcagtggagagacgtcataaatcgacttcacaccgtcagaggaaacacaaaagtcacaacggtgatgatgattcaagtaacaaggaaactaaggggaatgataattgggatgccttccagaatcttcttttgaaagacaatgattcagagccagaagaattactacgtatatcatcaactgcgttaaatatggcgtctgaagttgtgagaaagagagaaccgccttctgatgattcattcttggttgcaattggaaatgaggattggggaagagaaaccagcattgagaaattcaatgcaggtgagaatgttcggataataaggaaagggaacaactatgacgaggagatgttgaatccgggtagaagcgatgaatcaagaagctattcgcaggcagagatgtcggttcatgatgggaagctcagaaccagaaatgaggcggaagaagactggttcatacgtaaccaagctggtccagaaacagatccaagtcttgtcaaaacatttgtaggagaccatttccacttaaataagagcagtgagagagatgtcctgaccgatgactctttcatgatccattctcgtgttgagaaccaagtagaagattctcggttaaggacagaaatcatggacttagacgtttacggaaccacccaacaagaaaacagtgccccggagaacactccgcatgaaccagatgacctatacatggttcttggacgggaacaagatgttaaacctacattgttaccatggacccctgaaattgactttgagactaacactttggctcaaagaacaagcagaatcgatttgataactgccacaaaggcctctgcaggtgaacaaaccttagatggtaaagaaaagaagagtcgtggtatctccaaggggaaggatgcaaagtcaagagcatcaagtagacctgacccggcgtcaaaagccaagagacctgcttggggaagtagagctgctgtctccaagtccaaatccgagatggaggaagagagaaagaagagaatggaggaacttttaattcagaggcaaaagagaattgcggagaagagttccggtggtagtgtatcaagttctttagcgtccaagaaaactcctactgtgaccaagtcagtgaagagctcgataaagaatgagaagactcctgaagccgcgcagtcaaaggctaagccagtactgagaagttccaccattgagcgccttgctgttgctcggaccgctccaaaggagccacagcaaaaaccagtaatcaaaagaacatcaaaaccttcaggatacaagacagagaaagctcaggaaaagaaatcgagtaaaataggtcaatcagatgcgaaaagtgtggaactttctcgtgacccgagtctcgaaatcaaggaaacggtggtggaagattcacattcttacttgtcagagaagcaagttgatgcacttcctgctgttgcttctgttgatgatttcaaagacattaaagaattgcatagcttgccatcagaagaaacggccagagtaaagaacagaccgaatgaaatcatagcagagaaagtacaagatcagacgaagatcgatgatcaggaaacagtgaagaatacatctgtttctgaagataagcaaatcaccacgaagcattactcagaggatgttggagaagtccaggcttcacaggaaaaaccggtgtctccaaagaagtcggtgactttttcagagacaaacatggaggagaagtattatttctcaccagcggtctcagagattgacatctcaacgccacctgctactgaagcagatcattcgaggaagaaatggaacagtgaagagacgtctcccaaggcaacggctaaagtcttcaggaagcttcttatgttcggaaggaaaaagtaaaaccgacgttggaattcttcttctccggcatcatcgaacctttgttttgagacgacgtcatgttgagttcagttaaaaagcctctcttattctttaaatttttccttgtgtgatattaaatactgtttttcattttattgttgttatcagtttgatttgtctgtttatattacatttgttgatgtgttgtttatagcattgaaagtgggcatttgagtgtgtataaaaaattggtttggtgaaaaaaaa

SEQ ID NO: 93653 - DNA, 322 bp, Arabidopsis thaliana columbia
  unsure (1)..(322): unsure at all n locations
caaactcgtttgctcttttcatcattactaaatcataagcggctctcaagttctttagggtttcgagttttctcaatctcctacctgattaaggttaatttcttatcttggatcaataacaagagaattctaactccggattgtaatcaatattcctctacataaaaagcgtgaatgagattatgatggaatcgaaagctggtaataagaagtcaagcagcaatagttccttatgttacgaagcaccccttggttacagcattgaagacgttcgtcctttcggtgggntcaagnaattcaaatcttctgtctacgccaactg

SEQ ID NO: 93654 - DNA, 1263 bp, Arabidopsis thaliana columbia
atttaaatattccgtgtgatgtagaagatgaagcctctcgaagagattaatagggagaaattacagagtctattgcccctaaagagagcgaacctgttgacggaagtaaggacagtatggatggggtaattgcatcagatgaacatacaaaattttcatcaccatctaggcctaatgatgatgcagctgctacaaatgacaaggattgccaatctggttatgactcccagtttgaggatggagagttgagggaaccatacccttggtgagaaaatgaagaggttgaacagttggattacggttctgagccagaggatgagagattctactctacgggttctgagaaaggaatcttgacaaacgagaatttaagacatgttaagtgtgaatctggtgatgcactgagaattgggcaggctaatgaaggaagtgacatagagaagcaagctgttgtaaacatgagcgattcacatcctaagaagggctcttcttctccttcaaggagtttcggttcaaaaccatacaaggaggtgccttcaaatgatgccatacagagaagaaggccttatacttatgaagaggtgagcacgggtccagataggtttgttgggagagacgacaggtcagggatgcgtatgcgtaataggagtcctcggagagggtatattagtggttgggattccaaacgacacttcttcccacctaattacaaagatggttcttatagttctgggcgtccatggcataaaagaatggcagatgatcgaggtatggtgaacggctttgatgagtcagggtcaggacaaggaccaggaccagaaccagagggttatgtacgtaggcaattctcaaatggtggatacagaggtcggtttaagagattcccagatggtggggatcgtaaattcagggccccacacagtgatacaaaccaatttcctggtcggatgcacaaccggatgagtggtaataggagagagagaggtggctctccggttgtcaggagattgcaccacccgcaatcagagtcaagatccagaagccgttctccagtctcgtggaatggccgtaacagatcatctcctcctcctcccaggtggggttagacgcagatgtgaggacgacggaaaaggagtgaggcttgccttttccagaaacgggtttcctgtcagactcagggtgggttgggttaccatgtcaaccctccgggaaccagaatgtcgtcaccgaggttctttgaagggaggaataatgatggtggag

SEQ ID NO: 93655 - DNA, 843 bp, Arabidopsis thaliana columbia
  unsure (1)..(843): unsure at all n locations
aannnnnnnnnnnnnnnnnnnnnnnnnnnnnnnnnnnnnnnnnnncgtctgcggtaccggtccggaattcccgggtcgacccacgcgtcccacaagcaagaacctcaccgacgattccataccaaacaaattcccgatctggaaacaactgacctgtgaaggtgaagtgtatcgctggaaatggcggtggccttccgtggaggccggggaggcgtcggatccggccaatctaccggacttcgtagtttcttctcctaccggatctttatctccgctttgttctcttttctcttcctcgccactttctccgtcgttcttaactcctctcgtcatcagcctcatcaggatcatacattgccgagtatgggcaacgcatatatgcagaggacgtttttggctttgcaatcggatccattgaaaactaggttggatctgatacacaagcaagccattgatcatttgacactggtgaatgcgtatgctgcttacgctaggaagctaaagcttgatgcttctaagcagcttaagctcttcgaagatttggctatcaacttctcggatttgcagtcgaaacctggtttgaaatctgctgtgtctgataatggtaatgctcttgaggaggattcgtttaggcagcttgagaaagaagtgaaggataaggtgatgacagcgaggatgatgatccgtgagtctaaagagagttatgatacacagccttaaaatccaagaagttgaaagataccaatctttgctgtccaagaacagttggccaaagggctaagaaaaaacggggcgggttgcttaccttgatttccgcccaaggtcgggctcctaaaaagtttt

SEQ ID NO: 93656 - DNA, 585 bp, Arabidopsis thaliana columbia
  unsure (1)..(585): unsure at all n locations
ggtggaaatgttaagtggcgtgcgttgaggctcgatactggtaactactcgtggggaagtgaagcaactacccgcaagaccagagtccttgatgtggtctacaatgcctccaacaatgagcttgtacgtactaagacacttgtcaagagtgctattgttcaggttgatgctgctccgttcaagcagtggtacctctcgcactatggtgttgagcttgggcgcaagaagaagagtgcttcttccaccaagaaggacggagaggaaggtgaagaggcagctgttgcagctccctgaggaggtcaagaagagcaacccacctcctgaggaagattgcaagcccgtcaaggagggtcgcaagtcttgattctacacattttggggcccaattttgcaantgggcgtttgttggcttgatcccttcaaaggctggccattccgggcgttntgaanggntacaccttgggaaggnaaanagttgggtctacatgangaagtccaganaagaaggnaanggngtccttaaagcnctctaaccgcctgagctttgctaaanagttggttcgtcatggcggaanaanttnggtt

SEQ ID NO: 93657 - DNA, 641 bp, Arabidopsis thaliana columbia
  unsure (1)..(641): unsure at all n locations
gaactttctgcaacattacactagagcagctaaactttattggagaaaccctaatcggcgacaatgggtatttctcgtgactctatccacaagaggcgtgccactggaggcaagcagaagcaatggaggaagaagcgaaagtatgagatgggaaggcagccagccaacaccaagctctcaagcaacaagacggtcagaagaataagagttcgtggtggaaatgttaagtggcgtgcgttgaggctcgatactggtaactactcgtggggaagtgaagcaactacccgcaagaccagagtccttgatgtggtctacaatgcctccaacaatgagcttgtacgtactaagacacttgtcaagagtgctattgttcaggttgatgctgctccgttcaagcagtggtacctctcgcactatggtgttgagcttgggcgcaagaagaagagtgcttcttccaccaagaaaggccggagaggaaggttaagaggcaactttttcagctccttagggggtcaagaagggcaaccccctccttggaaagttttaacccgtaaaggggtcgaagttttgtttacncttttggccattttaaatggcgtttttgtttanntttnagcctgccatcgggnctttganattgc

SEQ ID NO: 93658 - DNA, 528 bp, Arabidopsis thaliana columbia
  unsure (1)..(528): unsure at all n locations
tcagcatgtccttcccttgtttggctggcncaggagagggntctctccnccagaggccgagggaagtgaagaggcactttgcagccctgaggagtccagaagngcacccncncctgagaaagattgcaagccgtcaagagggtcgcagtcttgattcacacattgaggaccaatttgcaagtggacgtttgttggcttgtatctcttcaaggcctggccagtgcgggcgtgctgatggatacatcttggaaggtaaagagttggagttctacatgaagaagatccagaagaagaagggcaagggtgctgcttagagtctcttcttatctgccttgagcttttgtcttacaacatgttttgagttttcagtttcaattgtctgagaaactatgtttttggattagcttgtggtatttctttgaaactcccattatggtacaatgtttttgtcttggattttctttataattttaatcgataatttcactcaagttttatgcagtcaatattaagattgttctgttggtg

SEQ ID NO: 93659 - DNA, 459 bp, Arabidopsis thaliana columbia
  unsure (1)..(459): unsure at all n locations
gttttctcaacatttcangaaatcagtttgatggttcagtgacaggtgtgttcaaggagactttagaagtggctgatctcagcaaaaaccggtttcaaggtcatatctcatctcaggtagactccaactggtttagtttggtttatcttgacttgtctgagaatgagctcagtggagttatcaagaatctgacactactaaagaagctcaagcacttaaatctagcttggaatagattcaacagaggaatgtttccgaggattgaaatgctttctggtttagagtatcttaacttgtcaaacacaaatctttctggtcacatacctagagagatctcaaagctgagtgatttgagtacactcgatgtttctggaaaccatcttgcaggacatatcccgattttaagtatcaagaaccttntgggctatcggtgtgtcgggggaccaatttnncgggggg

SEQ ID NO: 93660 - DNA, 363 bp, Arabidopsis thaliana columbia
aggcactgatgttgcaatcaaaaggatcaatgatcgatgttttgctggcgaaccatctgagcaagaacgaatgatcgatgacttttggaatgaggcacagaacctagctggcttgcaccatcctaacgtcgttgctttttatggggttgtgctggattcacctggaggttctgtggcaacagttacagagtatatggtcaatggttctttacgaaatgcgttgcagaagaatgttaggaattttgataggtgcaagcgtcaactgatcgcgatggacattgcttttgggatggagtatttgcatggaaagaagatagtacactttgatcttaaaagtgacaacctgctcgtcaatctcaagga

SEQ ID NO: 93661 - DNA, 406 bp, Arabidopsis thaliana columbia
accgaagatagaagctgaatggtttgctcgatatatctaggttgctccagcggaactagaaggtcttctggtatcacatcctgatatactagatgctgtcgttatcccgtgagtcatatattcagataaataccgagttgattccacgtccgaacacattaacatttgtgtatgttgtaggttccctgatgaagaagcaggtgaagttccaattgcgtttgttgttcgatcaccaaatagctcaataacagagcaagatattcaaaagttcatagccaaacaggttaataacttatgacccaagtcgtttgaatcaatcggaccgatatcatcttgttttctaaggctcaaaaccatttcatcaggtcgctccttacaaaagattacgacgagtgagcttcatcag

SEQ ID NO: 93662 - DNA, 532 bp, Arabidopsis thaliana columbia
aatcaaacccagacttacgcaaaaacgactttgattttactgaacttcgggggggggccaaagatgatgatgggcgtccaagtagaagtgatgaagtcaatcacgctccaacaattcctggttctagtaacacctctttgcctactcaaagcaatgcacccagaccgcttgtacctcctggttttgcaagcacaattttggaaaaaaagcaaggggaaaaacctcaaattgaaagttctcaatatgagcggagtcctttaaattccaaaggcattaatgtggtgaatggaacatcagttaataatggggggaaaccgttgggaattaagataggttcaagtgagatgctaatagaaggtgaagatgttcgtgtctcctccactgatgcaaatgaacgggctgttaatatctcttcacttctaggaatatctacagatacagttagtaaggataaaagttttgaaaagctttcctcgatctcgactcctactgaaacttaggggtatcctagaaaatgtgtgcaagctacaat

SEQ ID NO: 93663 - DNA, 498 bp, Arabidopsis thaliana columbia
aggaattatcaggttttatatctaatagcaaaagaaatgcatctgctcctgatgcagatgcagcccatgatggctggttactaccccagcaatgttacctctgatcatatccaacagtacttggacgaaaacaaatcgttgattctgaagattgttgagtctcaaaactctggaaagcttagcgaatgcgccgagaatcaagcaaggcttcaacgcaacctaatgtacctagctgcaatagcagattctcagcctcagccaccaagtgtgcatagccagtatggatctgctggtggtgggatgattcagggagaaggagggtcacactatttgcagcagcaacaagcgactcatcagcaacagatgactcagcagtctctaatggcggctcgatcttcaatgttgtatgctcagcaacagcagcagcagcagcagccttacgcgacgcttcagcatcagcaattgcaccatagccagcttggaatgagctcgagcagc

SEQ ID NO: 93664 - DNA, 1321 bp, Arabidopsis thaliana columbia
ttctggctttggggtaaggaggaaaatcctatccttaaagctcctgatttcggtttgtccgccttcatcgaagaaggaaaagtttaccgggatatagttgggagtgcttactacgttgctccagaagtattaaggcgaagttacggaaaagaaatcgacatttggagtgcaggtgtcattttatacatcctactcagcggtgtacctcctttttgggccgaaaatgagaaaggaatattcgttgtggtcataaaaggcgaaattgattttgggagtgagccatggccttctatatctggaagcgcgaaagatcttgttaggaagatgctaaccaaagacccgaagagacgaatcacggctgcacaggttcttgaacatccttggatcaaagggggagaagcaccagacaagcctattgatagcgctgtgttatcccgcatgaagcaattccgagcaatgaacaagcttaagaagctagctctaaaggttatcgcggagagtctatcagaagaggagattaaaggtcttaaaaccatgtttgcgaatatagataccgacaaaagcgggacaatcacttatgaagaactcaaaactggggctaactagacttgggtctagactctcggaaactgaagttaagcaactcatggaagccgctgacgtcgatggtaatggaacaatcgactactacgagtttatctctgcgacaatgcatagatacaaattagatcgagatgagcatgtatacaaagcattccaacactttgataaagacaacagcgggcacataactagagatgagttggaaagtgccatgaaggaatatggaatgggagatgaagctagcatcaaagaagttatatccgaagttgataccgacaatgatggaagaataaactttgaagaattttgcgcgatgatgagaagtggcagcacgcagccacaggggaaactgcttccattccattgatcaagtcggcataaatcccaacggtttatcaaccgaaagcgattcttgaacccagagtagaagagctaaaccgggggtaaaccgaggtgagcatagttgatatactgtctcaaaatgttgttctatcttctctgtgtttgaacagatttatttatccttctccttagttagtctgaaactgattttgagagactgtcatgtcttagctccttgtaacagtaacatatccacttacgtttttttgaaactttcttgagaacaaaaaaaaaaaaaaagggcggccgctctagaggatccaagcttacgtacgcgtgcatgcgacgtcataagatttttctatagtgtcaccta

SEQ ID NO: 93665 - DNA, 470 bp, Arabidopsis thaliana columbia
tagaaagcatgaagcttgatataacagcgttggagcaagcactctttgacgctatgaaaatccaagaagaaagcatccaagaaaaagatcaattaaaaggaataatcgaagagtcccagtttcagtctcaaagggcaaaagagaatgtcaagtacatcgaaaagcaaaacgaagacctgagggagaaatttactgcctctgaaaagagtatcaaagatttctttcaaagtactaaagaacggttagaaagtgaagatgaacagcctctaaatgcaatgtgcttcttcgctgaactgagccatgtgcttccagtgtctaatgaagttcgcaattgttttgatgctatcatgaagaaactagaactttctcagaatgtgaatttgattgataaagtggagggtatggggaaacagatacatcagcacgaagatgttgtaaagcaactcaaagaagaactgaaacaggagaaa

SEQ ID NO: 93666 - DNA, 1659 bp, Arabidopsis thaliana columbia
  unsure (1)..(1659): unsure at all n locations
cgtccgctttctctttcgtttctagggatctccgacgtattcgtgaatatcaaatnctcgatcgattgaattgctgtcaattcacaccaaaaagccgaaaacctaaaaaaaaacctatggtgtttggagaagggatcaaggtggcanaatcccatctgtcgagatggatggntgatgaaatgacccagggttattntggaagtctatcaaggataagcttattactccttttgtggagttggttcgcaagtacttcgtccttggtcttcctcaccgtgatgctacggatgacaaagttactattgaaagtgctgaagctactaagaagtacaatgtggcgatcaagtgtgccaccatcactccagatgaaggccgtgtcacggaatttggcttgaagcagatgtggagaagtccaaatgggaccatcaggaatatcctgaatggaactgtatttagagagccaattatctgcaaaaatgttcccaagcttgtcccaggctggacaaagcccatctgcattggaaggcatgcttttggtgatcagtaccgtgccactgatgctgtaatcaagggaccaggaaaactgactatgacctttgagggaaaagatgggaaaactgaaaccgaagtctttacatttactggtgaaggtggtgttgctatggcaatgtacaacactgatgagtccatccgtgcttttgctgatgcatcgatgaacactgcttatgagaaaaagtggccactttaccttagcacaaagaataccattcttaagaaatacgatggcagattcaaagacatcttccaagaagtctatgaagccagctggaagtcgaagtatgatgctgctggaatctggtatgaacaccgtctcattgatgatatggtggcctacgctcttaagagtgagggaggctatgtttgggcatgcaaaaactatgatggtgatgtccaaagtgatttcttggcacaaggattcgggtcacttggattgatgacatctgttctggtctgcccagatggaaagacgattgaagctgaagcggcccatggaactgtcacccgtcacttcagggttcatcagaaaggtggtgagaccagcacaaacagcatagcctctatttttgcttggactcgtggacttgcacacagggctaagttagatgacaacgcaaaactcttggatttcactgagaagctggaagccgcttgtgttgggacagtggagtcagggaaaatgaccaaagatcttgcactcatcattcacggctcaaagctttcgagggacacgtacctgaacacagaggagttcatcgatgcagtcgctgctgagctcaaagaaagactcaatgcttaagaaactgaagaaattgggtaaaattcgaacgtctcagttcctaagtgtcttatctggttggtggggttggttgggatcgggaggaataaacttttgtggagaggagtgttgagaacgatttgtttcctctcttataatatttccaaaatattgcgacatttttccatttttattcagatctcgaattttatgtttgattgattggttatcacatcttctttttnttggttgnnnnnnnnnnnnnnnnnnnnnnnnnnnnnnnnnnnnnnnnnnnnnnnnnnnnnnnnnnnnnnnnnnnnnnn

SEQ ID NO: 93667 - DNA, 655 bp, Arabidopsis thaliana columbia
  unsure (1)..(655): unsure at all n locations
nnnnnnnnnnnnnnnnnnnnnnnnnnnnnnnnnnnnnnnnnnnnnnnnnnnnnnnnnnnnnnnnnnnnnnnnnnnnnnnnnnnccacgcgtccgcccacgcgtgcgcccacgcgtccgagcatcttcttctccggcttgatcttctctcggttctagatctccgacgatcggaatatccaatccgatcgattaattctgtcaatcacacaaaaaccgaaaaccaaaaaaaaaccatggcgtttgagaagatcaaggtggcaaatcccatcgtcgagatggatggtgatgaaatgaccagggttatttggaagtctatcaaggataagcttattactccttttgtggagttgggtatcaagtacttcgaccttggtcttcctcaccgtgatgctacggatgacaaagttactattgaaagtgctgaagctacttaagaagtacaatgttggcggtcaagtgtgccaccatcactccagatgaaggccgtgtcacggaactttggcttgaagcagatgtggggaggccaaatgggccctcaggatatcctnattggancttttttngngggccattatttgnaaaanttcccaagtttncccgggtngcaaagccctttnaatngaggnaanttttgggntcattccnggccnctgc

SEQ ID NO: 93668 - DNA, 789 bp, Arabidopsis thaliana columbia
  unsure (1)..(789): unsure at all n locations
tgacctttcgttgnnnnnnnnnnnnnnnnnnnnnnnnnnnnnnnnnnnnnnnnnnnnnnnnnnnnnnnnnnnnnnntcaccacgcgtccggcttttctcttcctcccccggcttgatcttctctcgtttctagatctccgacgatcggaatatcaaatccgatcgattaattctgtcaatcacacaaaaaccgaaaaccaaaaaaaaaccatggcgtttgagaagatcaaggtggcaaatcccatcgtcgagatggatggtgatgaaatgaccagggttatttggaagtctatcaaggataagcttattactccttttgtggagttggatatcaagtacttcgaccttggtcttcctcaccgtgatgctacggatgacaaagttactattgaaagtgctgaagctactaagaagtacaatgtggcgatcaagtgtgccaccatcactccagatgaaggccgtgtcacggaatttggcttgaagcagatgtggagaagtccaaatgggaccatcaggaatatcctgaatggaactgtatttagagagccaattatctgcaaaaatgttcccaagcttgtcccaggctggacaaagcccatctgcattgggaggcatgcttttggtgatcagtaccgtgccactgatgctgtgatccagggaccaggaaaactgactatgaccctttgagggaaaagatggggaaaacggaaaacccgcagtcttttccatttaactgggtgaaaagtgggggttgcttttggccaatgttccacccccttggtggaagtc

SEQ ID NO: 93669 - DNA, 761 bp, Arabidopsis thaliana columbia
  unsure (1)..(761): unsure at all n locations
tggccgtctgcagtaccggtccggaattcccgggtcgacccacgcgtccgcaagaagtctatgaagccagctggaagtcgaagtatgatgctgctggaatctggtatgaacaccgtctcattgatgatatggtggcctacgctcttaagagtgagggaggctatgtttgggcatgcaaaaactatgatggtgatgtccaaagtgatttcttggcacaaggattcgggtcacttggattgatgacatctgttctggtctgcccagatggaaagacgattgaagctgaagcggcccatggaactgtcacccgtcacttcagggttcatcagaaaggtggtgagaccagcacaaacagcatagcctctatttttgcttggactcgtggacttgcacacagggctaagttagatgacaacgcaaaactcttggatttcactgagaagctggaagccgcttgtgttgggacagtggagtcagggaaaatgaccaaagatcttgcactcatcattcacggctcaaagctttcgagggacacgtacctgaacacagaggagttcatcgatgcagtcgctgctgagctcaaagaaagactcaatgcttaagaaactgaagaaattgggtaaaattcgaacgtctcagttcctaagtgtcttatcctggtttgtggggttggttgggttggggggnntaacttttttgggnggggtttnnaccgttgttcccctctaaanttccaanntttgnntttccntttttaaccg

SEQ ID NO: 93670 - DNA, 869 bp, Arabidopsis thaliana columbia
  unsure (1)..(869): unsure at all n locations
nnnnnnnnnnnnnnnnnnnnnnnnnnnnnnnnnnnnnnnnnnncaacaactctcaagacctgtacaccacgcgtccgctacttcatcactcatcaccagcttcgcatcttcttctccggcttgatcttctctcgtttctagatctccgacgatcggaatatcaaatccgatcgattaattctgtcaatcacacaaaaaccgaaaaccaaaaaaaaaccatggcgtttgagaagatcaaggtggcaaatcccatcgtcgagatggatggtgatgaaatgaccagggttatttggaagtctatcaaggataagcttattactccttttgtggagttggatatcaagtacttcgaccttggtcttcctcaccgtgatgctacggatgacaaagttactattgaaagtgctgaagctactaagaagtacaatgtggcgatcaagtgtgccaccatcactccagatgaaggccgtgtcacggaatttggcttgaagcagatgtggagaagtccaaatgggaccatcaggaatatcctgaatggacctggtttaaaaacccattttttggaaaattgtccaagctttgccaaggttggaaaaccctatttggttggaagcttcctttgggatcataccggcccctgttctgtatcagggacaggaatcctgctttcccttggggaaagaagggaaccgaacccgatctttatctttccggggaaggggggtccttgaaatgccaaactgagagccccccccttttttgtcgataagaacctcttataaaaaaggcccttccctttccaaaaacccttcttaaaaaagaaggaagtaaaagactttcaaaaaatatagccctcggagaaaaatagc

SEQ ID NO: 93671 - DNA, 1117 bp, Arabidopsis thaliana columbia
  unsure (1)..(1117): unsure at all n locations
caaatccttcttcctcttcaattctctgtttcctccaaaatggctacaccaaacgaagtatcagctcttttcctcatcaagaagtatctcctcgacgaattgtctccgttgcctactactgccaccaccaatcgatggatgaacgatttcacgtcatttcatcaaaccggtttcgagttttctgaatttgaaaccaaaccggaaataatcgatctcgtcactcccaaaccggagatttctgatttcgaggtgaaatctgaaatttcaattgaatcgaacgattccttcacgttccaatcgaatcctcctcgtgtcactgttcaatccaatcgaaaaccgccgttgaagatcgcaccaccgaaccgaaccaagtggattcaattcgcaaccggaaatcctaaaccggaacttcccgaaccggttgtagcagcagaagagaagaggcattacagaggagtgaggatgaggccgtggggaaaattcgcggcggagatccgagatccgactcgtcgtggaactcgggtttggcttgggacgtttgagacggcgatcgaagcggctagagcttacgacaaagaagcgtttagactacgaggatcaaaggcgattctgaatttcccgcttgaagttgacaagtggaatccacgcgctgaagatggtcgtggcctgtacaaacggaagagagacagcgaggaggaggaagtgaaggtggtgaagaaagtgctaaagaaggaggagagttacgccgttagcgacggagagaatgttgagtcaggtttgacggcgatagatgactgggatttgacggagtttctgagcatgccgcttttatcgccgttatctccacacccaccgtttggttatccacaattgaccgttgtttgaattctatttttctgtttgggtcagcttgttgtatgctgacgtggaattatgctatatcttttgcttattttatgttcacattcgagcaaaatttattcattcgtttatttgttttttaatacaactcttgatatttctaaattctaaccaaaaaaaaaaaaaaagnnnnnnnnnnnnnnnnnnnnnnnnnnnnnnnnnnnnnnnnnnnnnnnnnnnnnnnnnnnnnnnagga

SEQ ID NO: 93672 - DNA, 509 bp, Arabidopsis thaliana columbia
gttcataagcctcgtcccattttctttgagtactttgactatcacccaaatacaaatcttcatgcagtcgtacagccgtctgatgcaggtcaaggtcaaagatctgatgatcgacaagcggcggctggtcgaagttcctgataatgccactctaggggacgccttgaacactatggtaaaccacggctaaataattgttatttttttggttggagtcaaccgttttaagtatcaagaattactaacaagactattcttggtatcaaaccggtggcaaaccgagttagagctgtaccggtggctgccaaaccaggccaatggctgggagccgggggatcaatgatagtagagttggacaaacagagcggaagtgcaagaaaacagtacataggaatggtgaccatgctcgacgttgtggctcacatcgccggcgatgacggcgagagtgggcttgataagaaaatggctgcccctgtctcttctatcattggtcattgccctgagggtct

SEQ ID NO: 93673 - DNA, 589 bp, Arabidopsis thaliana columbia
  unsure (1)..(589): unsure at all n locations
cgcccgcaggaccgnaacnanntnnggaggcgacccacgcgtgctctcaatctttctctcctgcgttttaatttctctcggattgaaatcatccatggctgccaccgcaaccgagaagctccctcagctcaaatccgccgtcgatggacttactgagatgagcgagaatgagaagagtggattcatcaacctcgtttcacgttacctcagtggtgaagcccagcacattgaatggagcaagatccagacacctactgatgaaattgttgttccttatgataaaatggctaacgtctctgaagatgcttccgagaccaaatatctgttggacaagcttgttgtgctgaagcttaatggaggtttgggaaccacaatgggatgcactggtccaaaatcggttattgaagttcgtgatggtttgacatttcttgacctgattgttatccagattgagaatctcaacaacaagtataactgcaaggttcctttggttcttatgaactcattcaatacacatgatgacacacaaaagattgtggaaaaatacaccaagtcaaatgttgatattcacacttttaatcagagcaag

SEQ ID NO: 93674 - DNA, 687 bp, Arabidopsis thaliana columbia
  unsure (1)..(687): unsure at all n locations
tatacgactcacttagggaaagctggtacgcctgcaggtaccggtccggaattcccgggtcgacccacgcgtccgcgagaccaaatatctgttggacaagcttgttgtgctgaagcttaatggaggtttgggaaccacaatgggatgcactggtccaaaatcggttattgaagttcgtgatggtttgacatttcttgacctgattgttatccagattgagaatctcaacaacaagtataactgcaaggttcctttggttcttatgaactcattcaatacacatgatgacacacaaaagattgtggaaaaatacaccaagtcaaatgttgatattcacacttttaatcagagcaagtatcctcgtgttgttgctgatgagtttgtgccgtggccaagcaaaggaaagactgacaaggatggatggtatcctcccggtcacggtgatgtattcccatctctcatgaacagtggcaagcttgatgcgttcttatcacagggtaaggagtatgtgttcatcgcccactcaggcaaacttgggcgcaatcgttgactttaaaatcttgaagcacctgttcccggacaaaaatgggtcctgtttggggggttcacccaaacactttggctgttttaaagggggggccttttttttttttcggggggaaagnccccttttnggggtttnccagg

SEQ ID NO: 93675 - DNA, 523 bp, Arabidopsis thaliana columbia
gtccgagattcacgggtcgaccgacgcgtccggaggaagacgacagaagggggagttgaaggaaaacgagagaagaagaacattggaagagattttgtatgcattggtggttcaaaagttcatggaagctaacgtatcacttgtaccttcagtaagcccatcttcagatccgtctggtcgggttgatacttggccgaccaaagtggagaaactcgagcggcttcactcgcccgagatgtacgagatgattcacaaccatcttgccttgattcttggaagcagaatgggtgatctgaactctgttgcacagataagcaagctcagagttggccaagtttacgctgcttctgtgatgtatggatatttcttgaagagggtggaccaaaggtttcagcttgagaagacgatgaagattcctccgggtgggtcggatgacagtcgaacacgccttgtgcaagccgaggggacggcaacatatcaggcggctgtatcgtctcacccagaggttggtgcatttgcgggc

SEQ ID NO: 93676 - DNA, 762 bp, Arabidopsis thaliana columbia
  unsure (1)..(762): unsure at all n locations
caaattcctcaacagagtctgctgcaaggaaccatctaacatctagacaacaaacttcttctcctggattgagctcttccagtggagcaagtcgaagaccttcatcatctggaggacctggatcaagacctgccacacccactggaagatcatcaacactgacggcaaattcaaaatcctcaaggccttcaacacccacttcgcgagccactgtctcctcagctactcgaccttctttgactaactcgaggtccacagtatctgcaacgactaagcccacgcctatgagtaggtcaacaagtttatcttcatctaggctcacacctactgcagcgaagccgacgacctcttctgcttgatctgctcgttcagtaactagatctacccctagcaccaccacaaaatctgcaggtccttcaaggtccaccacacctctgtcaagatctactgccagatcttcaacaccaacttcaagacccacacttcctccatctaaaaccatatcaaggtcatctacaccaactcgccgtccaattgcttctgcaagtgctgcaactactacagcaaatcccacaatatcccaaatcaagccttcttctccagcgccagcaaagcctatgccaacaccatctaagaaccctgctttatctggtgcagcatctcctacagtgaggtcaaggcccatgggaggcggttaananatgcctnggtttttnnattttggaaaantcctttccaaaattttanggggnaaatttttcc

SEQ ID NO: 93677 - DNA, 431 bp, Arabidopsis thaliana columbia
gaaaaatgaagaagaagttaattaattttagatctccactacacttttaacaattacatacactcaaaatcttagcggcattttttctaaaggtttcccaaagaaggagagctcactttatctttcgtctctcttcttaggtctagggttctggtggagaagattgtggttgtttcttagggttttctgagagaaagcatgttgttaactacgggaagaaaggagaaactctctgtttctaaaggttctgaaattgaaatctcgtctcaagagtatgagtatggtagtggaaatgtctggtattgtgtcattctcgaagaaaatctagctaaatcgaagcggaagaagctctctgtccgtcacttggatcctctgctcaagtatgattattctcctccgttaatcaaaaccaccgtgcatcgtttcatgcg

SEQ ID NO: 93678 - DNA, 1093 bp, Arabidopsis thaliana columbia
gcggtttctcaccgtctcctcaggccggcgacgacgacgataaagaatactttttcttctctctttattaggtctctctcttcttcttcgtctgggtcctcgctagaccccaaaatcgatctggaggaggctgcggctcagctcgggaagtcttcgtctacgtcaacgtctccatacaaaggcagaaatttccactgggtgtttcttggatgtcctggtgttggtaaaggaacctatgcctctcgtctctcttctctcctcggcgttcctcatattgccactggtgatctcgttcgtgaagagctctcctcctctggcctcctctcctctcagctcaaggagcttgttaaccatggaaaactagttcctgatgaatttcataataagtttgttatcaaagcggctccaagctggcaaagacaagggtgaatctggatacattcttgatggttttccacgcaccgtgactcaagcggaaatactggagggagtaactaatatcgatctggtgattaacctgaagctacgagaagaggcattgcttgcgaaatgtttaggaagaagaatttgcagcgagtgtggtggaaactataacgttgcctgcattgatatcaaaggtgatgatgatactcccagaatgtatatgcctcctcttcttcctccgccaaactgtgaatcgaagcttataagccgagctgatgacactgaagaagttgtcaaggaaagactcaggatttacaacaaaatgactcaaccagtggaggaattctacaagaaacgcgggaagctgttggaatttgaattgcccggtggaatcccagagtcatgggcaaggctccttagggcattacaccttgaaggcgataaacagtctgcaattagcctaatcctctctctgcattttatggattgaatcaaccaacttgtcctacattctttgctcgagtaatcctcctcgtgcatatatgcttaaggtggtcaataaaagagatacatgtcccactaaaaaaaaaaaaaaagggcggccgctctagaggatccaagcttacgtacgcgtgcatgcgaagtcatagctgttctataagagacgata

SEQ ID NO: 93679 - DNA, 601 bp, Arabidopsis thaliana columbia
acccacgcgtccgcgaaaaacgagaaagttgactggtattcgtctgcaaaaagcttcaatttaatatggtaagaagaagacaacacgaggtggctactcggggcatggtaagtgtactaatccattggcaatggatgatcttatgtttgtgaaggatccaagaagtctttcggggaagaagaataagaagaaagaggtggctaagtttccccagtcttggccttcacgggcaccaaagagcaagaattcccgtagttttcctggtgagaacaagaaacaccgcaaagaatacattgctttgaagcgccgtgagagaatgctgcagcgtggtgttgatcttgctgatattaattctcagttagagaattttgttctggagaacgtggacatgcactgtttccaacgtatgcataatcgagattgctctcaggtaagacgattagcagatgtctaccgcttatcaagtagctgcaatggttctggaaaggaaagctttgtgacggtgactcgaacatatcagacatgtatgccatctgccagcgataaacttcgcattgagaagctaataagagctggagatgaggattgtgattttgctgtc

SEQ ID NO: 93680 - DNA, 372 bp, Arabidopsis thaliana columbia
ccgggcgaccacgcgtgcgtccatttgaattatcatgtcatgcgtgtctcttgcggttggtccaagagccgacgtggacaaaacggcgtcatccagtgagaagggacggtggtcggggatgacggcgataggaggtggcagtggaggtttgatggggtcgttaagggttatagagctacagctagtcgcgttcatactagttttctcagcaagcggtctcgtaccaatacttgacatgctttttccagcgtttgcgtctatctatataatcgccctctcgcgtttagctttcccttctcacggcgtttccaccgcttcccccgaagtcttccgcggcagcaaactcttcaagttgtacgtgattttcgggac

SEQ ID NO: 93681 - DNA, 154 bp, Arabidopsis thaliana columbia
ataaatacgagttcccatacacataaaatgaaaagaaaccaaggtaagatatgtctcaagagttttattagcatgagatgatgaaaatgttgttaccaaatcttaccttggtttcttttcattttataaatacgagttcccatacacataaaat

SEQ ID NO: 93682 - DNA, 508 bp, Arabidopsis thaliana columbia
  unsure (1)..(508): unsure at all n locations
aacaaaagagtgaacgatactgagatgttatcgttggtgtgtagcaagaagcaacgcatctttcacgcctcgtaacaactcttcttcttttttttttcttttgttgttttaataatttttaaaaactccattttcgttttctttattggcatcggtttctttcttcttgtttaccaaaggttcatgagttgtttttgttgtattgatgaactgtaaattttatttataggataaattttaaaaagggttacttagatatgtctcaagagttttattagcatgagatgatgaaaatgttgttaccaaatcttaccttggtttcttttcattttatgtgtatgggaactcgtatttatatgtatgcattagctactgcttatggtatttgctgctttttgtatatagatttgaggagttatgactaaaaaaaaaaaaaaagnnnnnnnnnnnnnnnnnnnnnnnnnnnnnnnnnnnnnnnnnnnnnnnnnnnnnnnnnnnnnnnnnnnnn

SEQ ID NO: 93683 - DNA, 1351 bp, Arabidopsis thaliana columbia
gtcccacaacacaaacacatttctgttttctccattgtttcaaaccataaaaaaaaacacagattaaatggaatcgagtagcgttgatgagagtactacaagtacaggttccatctgtgaaaccccggcgataactccggcgaaaaagtcgtcggtaggtaacttatacaggatgggaagcggatcaagcgttgtgttagattcagagaacggcgtagaagctgaatctaggaagcttccgtcgtcaaaatacaaaggtgtggtgccacaaccaaacggaagatggggagctcagatttacgagaaacaccagcgcgtgtggctcgggacattcaacgaagaagacgaagccgctcgtgcctacgacgtcgcggttcacaggttccgtcgccgtgacgccgtcacaaatttcaaagacgtgaagatggacgaagacgaggtcgatttcttgaattctcattcgaaatctgagatcgttgatatgttgaggaaacatacttataacgaagagttagagcagagtaaacggcgtcgtaatggtaacggaaacatgactaggacgttgttaacgtcggggttgagtaatgatggtgtttctacgacggggtttagatcggcggaggcactgtttgagaaagcggtaacgccaagcgacgttgggaagctaaaccgtttggttataccgaaacatcacgcagagaaacattttccgttaccgtcaagtaacgtttccgtgaaaggagtgttgttgaactttgaggacgttaacgggaaagtgtggaggttccgttactcgtattggaacagtagtcagagttatgttttgactaaaggttggagcaggttcgttaaggagaagaatctacgtgctggtgacgtggttagtttcagtagatctaacggtcaggatcaacagttgtacattgggtggaagtcgagatccgggtcagatttagatgcgggtcgggttttgagattgttcggagttaacatttcaccggagagttcaagaaacgacgtcgtaggaaacaaaagagtgaacgatactgagatgttatcgttggtgtgtagcaagaagcaacgcatctttcacgcctcgtaacaactcttcttccttttttttttcttttgttgttttaataatttttaaaaactccattttcgttttctttatttgcatcggtttctttcttcttgtttaccaaaggttcatgagttgtttttgttgtattgatgaactgtaaattttatttataggataaattttaaaaagggttacttagataaaacccaaaaccaaaaaggcgcccgctctagagatcccagctacgacgcggcagcgcgtcaagtc

SEQ ID NO: 93684 - DNA, 1215 bp, Arabidopsis thaliana columbia
acgtcctatagacagcctgacgtcgcatgcacgcgtacgtaagcttggatcctctagagcggccgccctttttttttttttttttttttttttttccattaaaaaggcaatatcattcaatagtggattaataatggactgtccatcttagaataaaacctttacttactctaaatgtcatcgactcattgaaacacttggttcttacaaaaaagtaatcttgcccaatttctcgtttggttcgaatcttgaaaaaacacccttgaatattcctctcagtttagcaaagcagatgtcatcaaagtttccttgccgatctggcatgatactcatgtttcaggaggttggctcttaacagcatcgccctgacatctctatcgaattcgtttcccatctgaagtacctttgggaaagttgcattcctctgatccgcgtgtcttgcatagaggattttgttgggtgaatcaatccttgcctgaatctggttgtctgtgatcaaggcttcaagttcttcctctagaccagagacgctagtcttgaatgcatcggccatccggctcaaatcaacagagacaaatggcattgtgtactggatcagtgccttcttccttatctgatcatatagtgtgtcaacgtgatcatgaagatggatgtccagcagcagattcgatttgagacttgcaagatattccaggcaggaagcatagcggcttgaatagaaatcgttgataagttccctcacatcaggcactagctccaagaaattccggaagttgatattgtcaatgactttttgcttcaattctgatcgatcaaagcttgccagggcacagagtccaccataggtggcaatatcttgaggagcaatgacttcattataggaatttccaagttctgggttaacatctaagaacttacgagcagctagcttgtacttcttcaactccaaatgagccaatccagatgcacatcgcagttttgcattaaccataggttcaagggtttcaggattctgctctgccttgttcacatagcttgtaacatgagtaaactgacccatttcgatgctgacaagaatcgcattcatacacatgtgaatgatgtgctttgtcgtagtgcagtagtcgcgtgttcggatatagttcttgaaagcatctccgagcataccacatgcgtaatagaaatctccaaagtcattgtaacccattctgatgc

SEQ ID NO: 93685 - DNA, 536 bp, Arabidopsis thaliana columbia
acccttccgcggacgcgtgggcaaaagtcttacaagctgttcaagagtcttgtggttgtcggagaatacggtgttgggaagacagcattatgccagcagatcttcaatgattatgatgtgaggaatgcttatgccccgaggatttgggtatctatgcatagcaatgaatctaaggagggacttgatgggaagatatgtgtgttgaagacgatcttgaagggtcttggagttgaagagtcaatgttcgaatccatccatagagaagtagtagaagaagtttcaaacaggcaggaagctggagaaattgatggagagacggctaaagagaaggagatctctgctctgctctatgcacttcacttgaatctgaggtggaagaagtatctgattgtgtttgatgatgtccaggagatcgataactgtgacgagaaactcgatgcgaaactcaacgagggtgaaaaatggggaaagtatctttcagatggattccctaaagggtctggtgggagggtcatatacacgaccagagatgagaa

SEQ ID NO: 93686 - DNA, 683 bp, Arabidopsis thaliana columbia
gagatccagtgccagtatctttgctcatgtccccaaacaatattcaaggccctcgctgccatcatgtagcacttgttgccactctttctctccagcgaaaagctcaaaagagtgccgttgataagaagagggttatcgacgagggagaagaagagttgcttcctggtgggaagaccagcaggtgccgcaaagccggcggggaaatcagccggtaagaaatgattccagacatcgtcggagccggcggcggatctgaagatactggagaccgccgataaacggcaaacgtcgagaggagttgtcaaggaaaggatcttggcgatgcaatcttctgggagattattcattgcttcctccgattgattgcttatttgcttgattgattattttggggtttaaaagatcttttcctctttctcgattatatagatacgacttgttcgatcgagcaaagtatcgctcacatttaatgagttttatactagtagtcaaaaaaagagagacgtggaagtcgtgcattgattagttaagtaaaaacggatacttagggatgaagccacacgtgtctattccttactcgtttttttcagattactttcctcatgactgactactagagtaagcaacacccacctgtcccctgttttttactaattttatccagaaaatcatttttttttttt

SEQ ID NO: 93687 - DNA, 617 bp, Arabidopsis thaliana columbia
gataataatcaatacaaaataatggcttggttcatgcataaatggccatccccggtacaagagaaggttccatcggaacaaaattttattttagtttggggtgcccccctttttaagtgtgaaaagaaatgacaaaaagatattggaacatcgatttggaagagatgatgagagcaggagttcattttggacatggtacgaggaaatggaatcctagaatggcaccttatatttctgcaaagcgtaaaggtattcatattataaatctgactagaactgctcgttttttatcagaagcttgtgatttagtttttgatgcggcaagtaggggaaaacaattcttaattgttgggacaaaaaataaagcagctgatttagtgtcgcgggctgcaatacgggctcggtgtcattatgttaataaaaaatggctcggcggcatgttaacaaattggtccactaccgaaaaaagacttcataagtttagggacttgagaactgaaccaaaaggcagagggattcaaccgtcttccgaaaagggatgcagctgtgttgaagagacaattatctcgcttggaaacatatctaggcgggattaaatatatgacgggattgcctga

SEQ ID NO: 93688 - DNA, 462 bp, Arabidopsis thaliana columbia
gtccagttgatgcattcttttaactaaaaaaacagattctttaccaatgaatttgagacattttgtttggcagctgataacgaacgataagttcttgagcgtggagcatagggtacgaccgaacaaagatagaccgcggatttcagttgcgtgcttctttagctcgagtctttctccaaattccacggtttatggaccgattaaagatcttttgtctgatgaaaaccctgctaagtacaaagatatcaccataccagagtacactgcaggatttcttgcgagcatctttgatgaaaagtcgtatttgactaattacatgatatgaagaaaatacttgtccgagtgcaagatatatatttgtgcgttttgcatatgttacgctacattttctttgttcccgctatagagttcctcaaccattgtaccaataagaaaaaatgttttctacttcatgcttaaaac

SEQ ID NO: 93689 - DNA, 921 bp, Arabidopsis thaliana columbia
  unsure (1)..(921): unsure at all n locations
cttctcctatgaattggagagactntttcacttgttatattgctccagatcntccaaatcctgaggaaatccctctagcttgcaggagtgcggtgatcgaatacacgaagcacgtaatggaattaggagctgtgctcttccaacttctctcagaagctttaggtttagactctgagacacttaagaggattgattgtcttaagggtttgtttatgctctgccattactatccaccttgcccacaacctgacctaactttgggcataagtaaacacaccgacaactcttttctcacgcttcttcttcaagaccaaatcggtggtcttcaaggttcttcatgaaggttattggggtcgatgtccctccctatacctggagctctttgttgtcaacattggtgatttcatgcagctgataacggacgataagttctttgagcgtggagcatagggtacggaccgaacaaagatagaccgcggatttcagttgcgtgcttctttagctcgagtctttctccaaattccacggtttatggaccgattaaagatcttttgtctgatgaaaaccctgctaagtacaaagatatccccataccagagtacactgcaggatttcttgcgagcatctttgatgaaaagtcgtatttgtctaattacatgatatgaagaaaagacttgtccgtgtgcaaaatatatatttgtgcgttttgcatatgttacgctactttttctttgttcccgctctagagttcctcaaccattgtaccaataagaaaaaatgttttttacttcatgcttaaaacagcattctaggcttgtagctaacaagtcaaactaaaaaaaaaaaaaaaaaaaaaaaaaaaaagggcggccgctctagaggatccaagcttacgtacgcgtgcatgcgacgtcatagctc

SEQ ID NO: 93690 - DNA, 382 bp, Arabidopsis thaliana columbia
aggcacaggaaaggagcatgtagcccagatgattcgaagacgctgagccatttgcaaggcgaggctcttttggacgccaaatgctttaagtgaaaaggctctttgtatctccgtagaggtttactctgttactcgtgttttgataccatctagagagtccttaccaccttttgaatcgtactcgggtttaagaactagttgcttctcaatgttattttgacagaatattgttcttaaatacattacaacttctagttattgttttaattttgttttttattatccaaactcgtgtgtgtgacattctctgtttaaattagttgcttggaagatgcaaagaatctcgtttaatggggcatactgaatttcattttaaagttgt

SEQ ID NO: 93691 - DNA, 612 bp, Arabidopsis thaliana columbia
  unsure (1)..(612): unsure at all n locations
tgtatgagtggactaaggttgatatctcagatgaagcccagaaggagcgtgttagccagatgattgaagacgcagagccatttgaaggtgaggctctcttggacgccaagtgcttcaagtgagaagagagaatggtttggtacttccatttacaggttttgcagctggggctttacatatctttctatctgtctgtctcacataggggttttgctctgtgacgtgtcgcatagactgtttttttcttttctaatcgagtgtcaaggacaagtctttttagttctttgttaatgtttcgcctccgtccagaattgtttactataccagttttcgaaatcctgaccggccagtctaccctggcaataggcaatacatggtctggtttatttgttttacggtaattttgccttgattgattttctttgacgcgtttcggtcaacttatagacattggtctttgagttgaacatttagcggccgnnnnnnnnnnnnnnnnnnnnnnnnnnnnnnnnnnnnnnnnnnnnnnnnnnnnnnnnnnnnnnnnnnnnnnnnnnnnnnnnnnnnnnnnnnnnnnnnnacgagagtgcaaatcaaagggtcgtgccctgtagt

SEQ ID NO: 93692 - DNA, 453 bp, Arabidopsis thaliana columbia
  unsure (1)..(453): unsure at all n locations
cagggncaccaaaaacgggtaaaaaaggggcccgntatgtacaatggcattctagcaaccttctttcaccccaacaaccaaaaaaatttatggataggttgtgtggttccttccttttcaaaaaaacctcgattttctcggggatgattctttcttcgnagacctcagcttcataacaagacttccttcgccggatctactaaatcctgtggtggtttccgtttaaagagagaagaacaacaaacaaaacaaacctgaattaaccaaaatccagattaaaatcaattctcatcagctttcgccatgattgagagtcgactaggacgtggctgataagcagctcgtcttttcagatgatgcgaagaaggtcgaattaaagtagtcaaagctcttctcacccactctccttcaacaccaccaattctcaccagcgaattagtcatcgcagatcga

SEQ ID NO: 93693 - DNA, 547 bp, Arabidopsis thaliana columbia
  unsure (1)..(547): unsure at all n locations
gtatttctcgccgccgcttttgtatcttcttctctctcgctttgctctctcggaattgtttttgcagaaagtctctcatctgaactcagaaaatctccgagttcgtatatcttctccgtttgagcaatggcgttggtcatgcacacatacaagggaaacaaaggtgccaataaggcacttattgctgcagagtatgcgggtgtgaagatcgaggagtccgcagactttcagatgggcgtcactaacaagtcacctgagttccttaagatgaaccctattggaaaggttcctgtgcttgagactcctgaaggtcccatatttgagagcaatgccattgcccgatatgtgagccgtaagaatggtgacaactctttgaatggatcctcccttattgaatacgctcacattgagcaatggatcgatttctcctcattggagattgatgctaacatgttgaagtggtttctcccagaattgggctattgncccttntttnncccagcttngggaggggnaattnntnnattnagngggggctttngggnnt

SEQ ID NO: 93694 - DNA, 870 bp, Arabidopsis thaliana columbia
ctggagctccaccgcgggtggcgggccgctctagaactagtggatcccccgggctgcaggatttcgcgggcgcctccgtttgagcaatggcgttggtcatgcacacatacaagggaaacaaaggtgccaataaggcacttattgctgcagagtatgcgggtgtgaagatcgaggagtccgcagactttcagatgggcgtcactaacaagtcacctgagttccttaagatgaaccctattggaaaggttcctgtgcttgagactcctgaaggtcccatatttgagagcaatgccattgcccgatatgtgagccgtaagaatggtgacaactctttgaatggatcctcccttattgaatacgctcacattgagcaatggatcgatttctcctcattggagattgatgctaacatgttgaagtggtttgctccaagaatgggctatgctcccttctctgccccagctgaggaagcggcaatttctgcattgaagagaggacttgaggctctgaacacacatctcgcctccaacactttccttgttggacactctgtcacccttgctgatattgtcacaatctgcatcttgaacttgggatttgccaccgtgatgaccaagaaatttacctctgcattccctcatgttgagagatacttctcggacaatggttaaccagccagaattcaagaagggtgtttgggtgatgcccaaacaaacccgaggctgtccctccagtttccctactaagaaacgctcccacagcccttgcttaggcccaagggggcggcccaagaaggcagtcccctgttgcaggggcaccaaagcctgctggggggggggaagcaccaaatcctaaagccaagaatcctct

SEQ ID NO: 93695 - DNA, 1378 bp, Arabidopsis thaliana columbia
  unsure (1)..(1378): unsure at all n locations
nnnnnnnnnnnnnnnnnnnnnnnnnnnnnnnnnnnnnnnnnnnnnnnnnnnnnnnnnnnnnncacgcgtccggctattccacgcctcaactttttgcttcttctctctcgatttgctctcacggaagattcttcagaatatctgatccgatatcagaagccccaagttcgcttgaattccgtctgagcaatggctttggtcttgcacacgtacaagggaaacaaaagtgctgagaaggcactcattgcagcagagtacgttggtgtgcagatcgatgtgccctctgactttcagatgggtgtcactaacaaaacccctgcgttcctcaagatgaaccctattggaaaggttcctgtacttgagactcccgagggttcagtatttgaaagcaacgcaattgcccgttatgtaagccgattgaatggtgacaactctttgaacggatcctccctgatcgaatatgcacaaattgagcaatggattgatttctcttcattggagatctatgcaagtatcttgaggtggttcggcccaagaatgggctttatgccatacagtgctccggctgaagaaggtgcgatctctacgttgaagagagcacttgatgctctgaacacacatctcacgtctaacacttaccttgtcggacactctattacccttgctgatatcatcactgtctgcaacttgaacttgggatttgctactgtcatgaccaagaaatttacctctgaatttcctcatgttgagaggtacttctggactgtggttaaccaaccaaacttcactaaagtgttgggtgatgtcaaacagactgaagctgtccctcctattgcttccaagaaagctgcccagcctgcaaagcccaaagaagagcctaagaaaaaggaagccccagtagcagaggcacctaagcttgctgaagaggaggaggcaccaaagcccaaagccaagaaccctcttgacttgctaccaccaagccctatggttctagatgattggaagaggctttactcgaacaccaaatccaacttccgtgaggttgctatcaaaggattctgggacatgtatgacccggagggtactcactatggttctgtgactataagtacaacgatgagaacatggtctcctttgttacactcaacaaggtaggagggttccttcagcgtatggacttggcacgtaaatactcctttggaaagatgcttatttncgggtcanagggtcctttcaaaggtgaagggttttatggcttttccgtggaccagagatccccaagttcataattggatgagggtntacgnnaattggngctgtacggntttggctaagggttnanatctnccgctgaagnannannaggnncnttttancc

SEQ ID NO: 93696 - DNA, 1133 bp, Arabidopsis thaliana columbia
  unsure (1)..(1133): unsure at all n locations
aaacccctggaagcttttcggcagggcntcagggaggtnngnctcccgnggccaggcccccnagtcaaaangggntgggnntccccatgggctttacgagtggcctagggttggtccctccgatgaaccacaggagggcccgtgttagccagatggttgaagccgctgagcccatttgaaggcgaggctcttttgggccgccaaatgcttttaagtgaaaaggctctttgtatctccgtagaggtttactctggttactcgtgttttgatgccttctagagagtccttaccaccttttgaatcgtactcgggtttaagaactagttgcttctcaatgttattttgacagaatattgttcttaaatacattacagcttctagtgttcatttttttttgcaggatgttttgtatttgtccactcagtgaggaagaaacattcttaaatcacaagatcataaaatttcacggttcgatatgattgaccagagtaatttcttttttctttgtcaaataacattaagctttaaaacaacaacaaaaacagtgggccactgggcctaaaagcccaatttctcactagacgcgagaaacccacagtgactgtcatcattcattgtcccgtgaatcaactcgtcgccgcaagctcacggcctccgagcactgagaagcttaacgtcgtcgatcaccggtccacataagctcgagaaatcgtcgtttctcatcgcgtaaaacgtactgtagaacataactctagtccgactcgagacagcgacgaatctcaatgacgatcgcttgaatcctcctttccctttcgattcatacgggaccttgatcgtgtcttttccggcgaaagcttcgacgatcattgatccggcgcaagcgttgctagcatctccgacagagaaggataggacgtaggtttttccaggggtagtgcggacaacttgtgcgacggggctttctttcccggcgacgagttcgacggcgcgacggcctttaggaccggggaatgttcggaatctatgaattgaaccttaaggggcggcatcaccaggaacgggatgtcgccaggggttggcgacntgggnaccnggatccggcggactgagggacagttcccaaagggcgatag

SEQ ID NO: 93697 - DNA, 810 bp, Arabidopsis thaliana columbia
ctccctggtcctcacaacaccctatactgagtcataataacagaaggggatgactggaagaggccttacccaaacaaaaccaaatccgtgaggttgctatcaaaggattctgggacatgtatgacccggaggggtactcactatggttctgtgactataagtacaacgatgagaacatggtctcctttgttacactcaacaaggtaggagggttccttcagcgtatggacttggcacgtaaatactcctttggaaagatgcttatttgcgggtcagagggtcctttcaaggtgaagggtttatggcttttccgtggaccagagatccccaagttcataatggatgaggtgtacgacatggagctgtacgagtggactaaggttgatatctccgatgaagcacagaaggagcgtgttagccagatgattgaagacgctgagccatttgaaggcgaggctcttttggacgccaaatgctttaagtgaaaaggctctttgtatctccgtagaggtttactctgttactcgtgttttgataccttctagagagtccttaccaccttttgaatcgtactcgggtttaagaactagttgcttctcaatgttattttgacagaatattggtcttaaataccttacaacctccaggtaatggttttaatttggtttttaataacccaacttctgggttgtaccatcttttccggcccccaaatccttccagcccggggaatccccaagtttaaaaccgccgccccccccgtgaagctccagcttttgttccccttagtgagggttatttcgagctgaa

SEQ ID NO: 93698 - DNA, 678 bp, Arabidopsis thaliana columbia
tgcagtaccgctccggaattcccgggtcgacccacgcgtccgctcatgttgagagatacttctggacaatggttaaccagccagaattcaagaaggtgttgggtgatgccaaacaaaccgaagctgtccctccagttcctactaagaaagctccacagcctgctaagcccaaggaggagcccaagaaggcagcccctgtagcagaggcaccaaagcctgctgaagaggaagaggcaccaaagcccaaagccaagaaccctcttgacttgctaccaccaagccctatggttctagatgattggaagaggctttactcaaacaccaaatctaacttccgcgaggttgctattaaaggattctgggacatgtatgacccagagggatactcactatggttctgtgactacaagtacaacgatgagaacatggtgtcatttgtcacgctcaacaaggttagggtgggttccttcagcgtatggacttggcacgtaaatacctcctttggaaagatgcttatttgtgggtcagagggtcctttctaaggtgaagggtttatgggctttttccgtgggaccaaaaaatcccccaagttcataaatgggattgaggttgtactaaccatggcagccttgtaccaagttggcactaaaagggtttgaatattctttccgaatggga

SEQ ID NO: 93699 - DNA, 863 bp, Arabidopsis thaliana columbia
  unsure (1)..(863): unsure at all n locations
tttnaaaaaatttttccccgnaaaaaaaccncnnnccnaaaaatttagggccccaaaacttttaaaactttaacgcccgtcgatcaccggtccacataagctcgagaaatcgtcgtttctcatcgcgtaaaacgtactgtagaacataactctagtccgactcgagacagcgacgaatctcaatgacgatcgcttgaatcctcctttccctttcgattcatacgggaccttgatcgtgtcttttccggcgaaagcttcgacgatcattgatccggcgcaagcgttgctagcatctccgacagagaaggataggacgtaggtttttccagggatagtgcggacaacttgtgcgacggcgctttctttcccggcgacgagttcgacggcgcgacggccttgaggaacggagaaatgatcggaatctatgtatttgacagctttaagagactcgaccatccaaccaggtaacggagagtgatcgtcgatggagtttggtggaatcaaaacaccagatgatatgtttggtaaaacccaaggaccttcttcgaatcctccgttctttagaatgttcttattggtgggacgaggagggaaaagggctcgcatagcaacaccatcaatgagaggtccacaagcaggatcttcctcaacacctggattatgtatcactatatctgcatagtcactttgggccttaaaagcccacgaatacaaatcccaacctgagctactatacactgtttgtatcggcatcactgcatggtgaggagccacgcgaccgcgaannnnnnnnnnnnnnnnnnnnnnnnnnnnnnnnnnnnnnnnnnnnnnnnnnnnnnnnnnnnnnnnnnnnnnnnnnnnnn

SEQ ID NO: 93700 - DNA, 552 bp, Arabidopsis thaliana columbia
  unsure (1)..(552): unsure at all n locations
cccacgcaaccgatctctctctctctctttctcttccatctgacctgttgatgtgagtttgcagatattcaaacaactcaatcctcattccctttgtttcgcctctctggatttcgaagagctgagagattagggtttctcgattttcgagattagagtctaatccccaccaccagcatagctgatatcctggaggagagaatgacggattcgggtctaatgatgccggcggagattgctggaattctaaccacggcgattacgagttggtgggatgatgttaatgagtcaactcagtggcaagatgggatctttttcgctctttgtggtgcttatgctcttgtttccgccgttgctcttgttcaactgataaggatccaaatgagagtgcctgagtatggttggactactcagaaggtgtttcatcttatgaactttgtcgtcaatggagttcgtgcgggtcctgtttggatttcacaatgnaagnatttcttngttcaacccaagggtnttttcttgggacctatttgnacttccnnggccttcttttgt

SEQ ID NO: 93701 - DNA, 499 bp, Arabidopsis thaliana columbia
cccacgcgtccgtcaaacatggcttctcactcgtcgactctcctctcttctcctactttcgctcctttctcctctcatcgtcttcattattctcccaatccctctactctcagattctcccgtccaatcagaaataaacctaatctcgccttgcgatgttcagtctcaattgagaaagaagttcccgaaactgaacgaccctttactttccttagggattctgatgacgtcactccatcttcttcttcttcttccgtcagggctcgtttcgagactatgattagggctgctcaagacagtgtttgtgatgcaattgaagctatagaaggcggtcctaagtttaaagaagatgtttggtctcgacctggtggtggcggtggaatcagtcgtgtgttgcaggacgggaatgtctttgagaaagctggtgttaatgtctctgtggtttatggtgttatgcctcctgaagcttatagagctgcaaagggctcagcttctgatc

SEQ ID NO: 93702 - DNA, 425 bp, Arabidopsis thaliana columbia
caggcaccgatccgaattccgacctacgacgccacgcagtctctattgttgtcgtttcgaaacaatttccttatctcgatctcataggggcaggaagagacatgggtgatagctgtgccgtctgcgctgacaatctcgagatgggttgcctatggatcttgtggtcaccgagaggtttgctccacatgcgtcgttcgtctccgattcgtcctcgacgatcctcgctgctgtatctgcaagaccgagtctcctatcgtttttgtcaccaaggcatcgggttgtttatacaaggacgatcaatgatttctccaccttcccatcagcaccaagggaaggtcgagtcggagctctctggtatcatgaagacactcaggctttctttgatgacttggatcagtacaggatgatcaaagctatgtgtagac

SEQ ID NO: 93703 - DNA, 457 bp, Arabidopsis thaliana columbia
cggacgcgtgggcggacgcgtgggcggacttatatcgttgccagagagagtttgacggcggagagatatggcggcgttgatggagtcagtcgtcggccgagctctaaaattctcatcgacggcgaatttcaggtcaatccgacgcggcgaaacaccaacactctgtatcaaatcattctccaccattatgtcaccaccgtcaaaagccatcgtctacgaagaacacggctctcccgattccgtcaccagattggtgaatctcccgccggtggaagtgaaagaaaacgacgtttgtgttaaaatgatcgccgctccgatcaacccctccgatatcaatcgaattgaaggtgtgtatccggtgaggccaccggtaccagcggttggtggttatgaaggtgttggtgaagtttatgcagttggctccaatgttaatggtttttctcctggtgattgggtc

SEQ ID NO: 93704 - DNA, 1039 bp, Arabidopsis thaliana columbia
  unsure (1)..(1039): unsure at all n locations
nnnnnnnnnnnnnnnnnnnnnnnnnnnnnnnnnnnnnnnnnnnnnnnnnnnnnnnnnnnnnnnnnnnnnnnnggagccacgcgtgcgctgactgtctctctcctctaatcttttttatccgctagggttttgaagcaaggtttctcgcgattttctcgatatctctcgcccatggcgaaaccaagtcgtggccgtcgttccccctccgtgtctggctcgtcatctcgttccagttccagatctcgttcgggttcgagcccctccaggtctatttcccgctcacgctcccgttctagatcgctctcttcatcttcatctccttcgcgaagcgtcagttctgggagtcgcagtcctccacgtcgtggaaaaagtcctgctggacctgctaggcgaggtcgctctcctcctcctccaccatctaaaggagcatcttcaccttccaagaaagctgttcaagaatctcttgttctccatgttgattctcttagcaggaatgtgaatgaagcccatctcaaagaaatctttggcaactttggtgaagttatacatgtcgaaattgcgatggatcgagctgttaatcttccaagaggacatggttatgttgagttcaaggcaagagctgatgctgagaaagctcagctctacatggatggtgcccaaattgatggaaaggttgttaaagcaacgttcacactaccacctcgtcagaaagtatcttcaccccctaaacctgtctcagctgcaccaaaaagagatgctccaaaatctgataatgctgctgctgacgctgagaaagatggtggtcccaggcgcccaagagagacatctcctcaacggaaaacagggctttctccgagaaggcgatcacctctacctaggagaggcttatcacctagaaggcgatcacctgattctccccatcgccggaggccgggctctcctatccgccgtcgcggtgatacaccttctagacgtaggccagcatcaccatctagaggccgttctccatcttctcccccttcaagacgatatagaatct

SEQ ID NO: 93705 - DNA, 1324 bp, Arabidopsis thaliana columbia
cctaaatatctctcacccaattttgtgtttcttctttctgctaaaaggttataatttttgtttcttggtttggtgagaatcttcaagaaactgaaacaaagaaaatggattctagttgcatagacgagataagttcctccacttcagaatctttctccgccaccaccgccaagaagctctctcctcctcccgcggcggcgttacgcctctaccggatgggaagcggcgggagcagcgtcgtgttggatcccgagaacggcctagagacggagtcacgaaagctaccatcttcaaaatacaaaggtgttgttcctcagcctaacggaagatggggagctcagatctacgagaagcaccaacgagtatggctcgggactttcaacgagcaagaagaagctgctcgttcctacgacatcgcagcttgtagattccgtggccgcgacgccgtcgtcaacttcaagaacgttctggaagacggcgatttagcttttcttgaagctcactcaaaggccgagatcgtcgacatgttgagaaaacacacttacgccgacgagcttgaacagaacaataaacggcagttgtttctctccgtcgacgctaacggaaaacgtaacggatcgagtactactcaaaacgacaaagttttaaagacgcgtgaagttcttttcgagaaggctgttacacctagcgacgttgggaagctaaaccgtctcgtgatacctaaacaacacgccgagaaacactttccgttaccgtcaccatcaccggcagtgactaaaggagttttgatcaacttcgaagacgttaacggtaaagtgtggaggttccgttactcatactggaacagtagtcaaagttacgtgttgaccaagggatggagtcgattcgtcaaggagaagaatcttcgagccggtgatgttgttactttcgagagatcgaccggactagagcggcagttatatattgattggaaagttcggtctggtccgagagaaaacccggttcaggtggtggttcggcttttcggagttgatatctttaatgtgaccaccgtgaagccaaacgacgtcgtggccgtttgcggtggaaagagatctcgagatgttgatgatatgtttgcgttacggtgttccaagaagcaggcgataatcaatgctttgtgacatatttccttttccgattttatgctttcgttttttaatttttttttttgtcaagttgtgtaggttgtgattcatgctaggttgtatttaggaaaagagataagaccaaaaaataaattggaacaatggttttgtggaaaagtggtaaatagacctacctc

SEQ ID NO: 93706 - DNA, 628 bp, Arabidopsis thaliana columbia
  unsure (1)..(628): unsure at all n locations
aacccctattcaggcaacgaaactctacngctagtccccctaggttaggttgggtagggnnatgggaaagcctttacnagttccgaacttccctaaactcgggtttttaatttctgcttaatcgtcaggttctctgggtaaatcataggtgggcttttgtcatttcgtctgtgtcttaagtggattagttggtcgtaagacaagttatagagatgtgtttacgggtaaagatgaagcttaggttttgatgtaatcttcttcggtttttcaattctctgtatttctctatctttttagtttatcaagtttaagttttatttggggtttcttcttcgtttgggtatctttctgtttttccttaaggttcttcgtttgtttccgtgtcgtctaggttaagtcaaagtaaagagatgtaattactggttagatgaatcttaaggtttccatgtaaccgtttgtactacaattctctgtacttctctatctttaatattatcgaatttaagtttaaaaaaaaaaaaaaaaaaagccaaaaaaaaaaacacaaagnnnnnnnnnnnnnnnnnnnnnnnnnnnnnnnnnnnnnnnnnnnnnnnnnnnnnnnnnnnnnnnnncacaataattcatg

SEQ ID NO: 93707 - DNA, 621 bp, Arabidopsis thaliana columbia
gactagttctagtaagtctctcgagtttggtacgagtactcggatgagcaatggtaaagagatagaagtgattaatttggatgatgatcaagaagtggtaaagtccagcaatgatccaggaagaaagcaagaagctgctccatatttgggcatcgatgccgtcccagacttcaatgaaggactcatgatggtagagtatctggattcctttactccaataacccagggacccagtagtgtcccacagaataacaacacagttagccttcaagaccgagagggagctattggaaatgaccaagtaccaaataatacagtcgatgattcgattcttcatgtcactccggaggaattcccattgacattctttgcaagctttgggaccaacctccagctcgaggctacgggaaggcctttctgattctctttttttttgttatgtttcttcagtctgtgtaatgagtgtgtagtagcccaatttcgtttgtttccgtgtcgtctaggttaagtcaaagtaaagagatgtaattactggttagatgaatcttaaggtttccatgtaaccgtttgtactacaattctctgtacttctctatctttaatattatcgaatttaagttt

SEQ ID NO: 93708 - DNA, 1537 bp, Arabidopsis thaliana columbia
  unsure (1)..(1537): unsure at all n locations
ccaattcccgggtcgtccatctttctaatttatctttccatttccgagccgttgagaattttttctgagagataatttaacaaatttcttcttcttcttctgtttctgaaccaccaaatctgcctttctcaattagctatgggcgtcgctgttctaaatccccaggattgcttgaaagatccattctctcacatgaaacaacatcgtaatcctagcgcatgtcccaacaggcagaagaagacggtctccaacaaccgtacacgccggagtcctcctcgtagtcaatcctccagatcttcttctcctcctgtagcgccgccgcttcctcctcctcgtgcggctgtctctgctttcgttccaaagggaacccttaagaagagtcttagcaataccgttgccgttagccaggtgagaatccttaagcgcggcgaagaaatccccaaggagacttcagatctggttgtggaaatgtcagatctgggatctactcgtcggattggaccagatccgggtttgattccgggtcagatccgtttatctggccgcaaatcgaaatcagcaccgttttacgccggtcctgtgaccatgacctcgccgcctcctagcgatgtcccgcttccagctttcttcacgaagaaggcaacaaatgatctcatcaggatccttcgcctagacatcgcctgacggtgtctgtcaccgatcatttttgattttttaaaaatctccgatgatccaaatggttaccaaagtgttacatttccgtattaccgatcgtccgattccgcctgaaaaccggagatctgcaacaaaatataatctccagacgatgatgaatctagaagatgaagaaacacacatcttcgttatgaaccgtttcgaatcttcccttattttttcaaggggcaagatcgaaatatcttcttaacaggtcttagtttctcttcttagggtttagtgtttgtgtaggagtatttgtgtatagactttttactagttttcgtatctttctctgtatcttcgggtttttaatttctgcttaatcgtcaggttctctgggtaaatcataggttggcttttgtcatttcgtctgtgtcttaagtggattagttggtcgtaagacaagttatagagatgtgtttacgggtaaagatgaagcttaggttttgatgtaatcttcttcggtttttcaattctctgtatttctctatctttttagtttatcaagtttaagttttatttggggtttcttcttcgtttgggtatctttctgtttttccttaaggttcttcgtttgtttccgtgtcgtctaggttaagtcaaagtaaagagatgtaattactggttagatgaatcttaaggtttccatgtaaccgtttgtactacaattctctgtacttctctatctttaatattatcgaaaataaagttttaatctttggcgtttaaaaaaaaaaaaaaaaagnnnnnnnnnnnnnnnnnnnnnnnnnnnnnnnnnnnnnnnnnnnnnnnnnnnnnnnnnnnnnnnnnnngtacctaa

SEQ ID NO: 93709 - DNA, 385 bp, Arabidopsis thaliana columbia
atcctctagttccacaagaatccttagtcggaatgggattccagcgctgcaccttttgtgattgggagaagagccgccctttggagagcacagtacgatgaaagttgtaagctgtgttcgggggggagttcttgtctatcgttggcctctatggtagaatcagtcaggggcctgataggcggtggtttaccctgtggcggatgtcagcggttcgagtccgcttatctccaactcgtgaacttagccgatacaaagctatatgatagcacccaatttttccgattcggcagttcgatctatgattcttcattcatggacgttgataagatctttacatttagcagcaccttaagatggcatagccttaaagttaaaggcgaagttc

SEQ ID NO: 93710 - DNA, 744 bp, Arabidopsis thaliana columbia
  unsure (1)..(744): unsure at all n locations
ggtggatctgtatcttacgagaatgttgatgaagctcgattctgtgttggggtgtacatgcatcttcagaaaactctgaagtcgttgggtgcgggtaaagtctctgtgggagtaataaccccgtacaaactgcagctgaaatgccttaagcacgagtttggcaatgctttgggccaagatgaactgaaagagatttatattaatacagtagacgcgtttcagggtcaagaacgtgatgttataatcatgtcatgtgtgcgtgcttctggtcacggggttggcttcgttgctgatatccggcggatgaatgttgctctcacccgtgcgagaagggctctgtgggtgatgggaaatgcatctgctctgatgaagtccgaggattgggcagcgttgatctctgacgccagagccaggaactggtttatggagatggactctcttcccctggatttcccggtccctaaggtacctagctttaatcccatgagcacctaatgctagaggtttcaaatcaggtgggccaaggaccagatccatcgntattgcaccctgaattccaggtcaagggacaaccattcagaagncggcaaaggaagctngggcacaacaaacattttccaaggaattggnatttttncgaaggggggacntcagtttgtgntttttnanccccccnggggggtaggntttgggggggnttttgnaanaggggtcccaaaggggganaantttttggcggctttt

SEQ ID NO: 93711 - DNA, 670 bp, Arabidopsis thaliana columbia
atgagtacttacggtatcatatccactcgagattggaggattctaagctgaaagatggttacttggttgacatggggataggagttctcactggtgggcttggaggcatagctgtaggaatctatatagtgtgtttcataaattccatcataaaaaatgttgctattttatatgaatattacttctgcttctatgatgcagtgctggtcagctgttttgccttttgatgtagcaaaaaccataatccagacctcttcagagaaagctacagagagaaatccttttaaagtgttgagctcggtcagtcagccatcttccctctatgaatctaattaccgatacaaaagagtatatgaaatattggttttgactttaaatcatctctgcagattcacaagagggcaggactcaagggatgctatgccaggtttgggtccaacccattgtgagagcattccctgctaatgcagcagcaattgttgcttgggagttctcaatgaaaatgttgggaatcaaacgtgactaggattagtcttccaatctaatttatttggttcgatttacagatctttaaaccacaaggagcttgcatttgcttcagattttgatgagctttcatgtaacagaactacatatagcacgaatcaaaagtgtctcccagattattatt

SEQ ID NO: 93712 - DNA, 429 bp, Arabidopsis thaliana columbia
tttcaatttccttctctccttaacaaaaatctcttcttggcaagaaacaaacacaaatgaggaatgggcatgctaaccggagatcaccgggtccaatcacgtcggcagcaactcaacgccggctaaaaccggagccagaaccgacggtgaagaaattcatcaagattattctcctctcaacaatcatagaaaaaatgatgaaagttccggctagatttgtgaggtttggtcctaaactcactgacaacgtgactctccagactcctgttggtttcaagagatcaattcggattaaaagaatcggtgatgaggtttggttcgagaaaggttggagtgagtttgcagaggctcactctttaagtgatggtcactttctgttttttcattacgaaggggattcttgttttcgtgttgtgatctttgatgtgt

SEQ ID NO: 93713 - DNA, 968 bp, Arabidopsis thaliana columbia
atctgtaatcttttgatttttttcgtcaaattaaaccacaaaaacctctccatcgattcggataatccacaacactctgcgatgaaacccgacccgaccagacgcagaaacagagccttatcttcttcttctccatcaaagacccgacccgaactatcttccgggtctcccaaccggaataccggtgaagcccgtggtggaaaggtgaaaacttcggccactttactcgaccgggaggagatgggtcttttacccgggccgggttacggtgacccgaatccagaacctaggagttttccttatagtgtgaagcagcaatgttgggaaaaagcagagaagattaaaggaagagatcctgagcgttggaggagagatcatttagggaacattgtgtttaggaagcttgttggttgtcctggatgcttgtgtcatgattatgatcacattgttccttactccaagggcggcaagagcactctggaaaactgtcaggttttgcaggcaaaggtaaaccgatcaaagggtaataaaaccgatatttctcgatccgagcttatccaaaggagttcttactgtcgagttgctggccgagatatggatctgattgagctaacagcttacgggaatgtacagcgtgcacctacgtccagcggatgcagaattcagtgatctgttgaagatctattgatggaattgaaaatgttgggtttctcaatatttacttggtcaagagtctgtaaacttgcagttcttctccgagttacttgtgtactcattagtcattatctttcctatattgtggacatgtaagtaagttgtaagttgtaacattagtcatttagtgctcatgcttcttctatattctattaagttctactctttttattaaaaaaaaaaaaaaaaaaagggcggccgctttaaaggatcccagcttacggaaggggtccatgcaacgtcaagctgttcat

SEQ ID NO: 93714 - DNA, 614 bp, Arabidopsis thaliana columbia
tgaatcgtcgttatcaaggtgatttctttctctgcctcaaacatcgcttaccctcttgattgattcctccaagcttcgtcgtgtggtttcacaggttttacttatggttaatgcaatcaaaggagtgttcgtctcttgcgatattccgatgacacaattcatagtgaacatgaacaattcgatgcctccgtctcagaaattcataattcatgtacttgatagtactcacttgttcgtgcaaccacatgtagagcagatgatccgcagcgccatttctgattttagagatcaaaactcttacgagaagcccacttcttagatcacatcacatcacacttgcttcttggtttttctttcatttgattcaaatgaataaaaacttcattgagatcgtgagattgggttgatatggctcatgctttaatagagttaaagtgaactttgttgacaaataatctctctgtaccggtttagtatcagtcggttttctctggttgtgttgattactttgtcactcttttgttgaataaacacgtttgtttggttattgttcaattacttgtagtagataataaacagattaaagaattcggaagttccaaatttcattttac

SEQ ID NO: 93715 - DNA, 1100 bp, Arabidopsis thaliana columbia
gtaattaatattgacataatagaagtaagtgtttttataaagtaaccgaactcaaaagaagacgcattatttatggtccaagaccggacatttggatgaatgcaacttagaaaaattggttgaatagatagatagattgaaaagatcataactatacttaacaaaaaaatactaagaaaagtccacatgcggcgaaggttttttgttgctgtcggaaaaaggagaagtccaactcctagtaaaataggtactggaagtggaatgaaagggatgatccatgaatattgatatgtatgttccataaaataaaaaatcctttttattttattcttaattttattttttcttattcactggtttgtatatatatatttttttttcaaaggggacaataaaaaagcacgcgatttcaaacctaaatagaaatgttttcgaattaatataatccttcataaatctttgaaaagcaatatatattcaaataaaaaaattagaaatgattaaaaaatattactaagttactgtcaaaagattttatttgtctttttttattactactaaataaaattttattgtgattttatgcaaatacagaaaaagtgaattataattccatattacaataatttatatacatatattaagaatagaacaaagatttccacgacaaaaaaaaacttaatattaattatataaaaaaagcttgacctaaaacaaagttatttgagtttgattatttaggattgttaaggaatggattttcatcgtggaatttagtgattgtctttcagtacactaagtgagctttttttatttatattttttaagaaagattactataatcatatgttttttttacatatgatgtgaagaaatattataatttttttataatataagctatcagtatagattatttaaatgagtactctcatacggatttcaaacgttaaaaaaaaaagttgggtttgaaacttttgaatgtcttttttgttttggaaattatttataattaaatttgacagaaaaacacaaaaacggcgtacgaaacaataaaataataaatgtctttgacatccaattataccactgaaattttt

SEQ ID NO: 93716 - DNA, 755 bp, Arabidopsis thaliana columbia
  unsure (1)..(755): unsure at all n locations
caaaacttcaaacaaaaggtcaaaagctaatttcttttatttgntaagaaaaactaatttcttcctcttcgacctctcaagcatcattagataaacaaatcctattcccgtcatggcagcaatgaccgcggcagcagttccagcaactggatctttccagaaacaagacgaggagtggcgtgcggttctgtctcctgagcagtctagggcttctcagactaaaaggcacagataaacgaggcaaaggagagtttacaaagaagttcgaggaagggacttatagttccacccgctgcggcccggccctttataaatcagaccactaaagttcgactccggttgcggttggcctgcgttcttcgacgccatccccggtgctattaaacaaactccagaagcaggtggaagaagaatggagataaccatgtgcagtgtgtgatgggcatttaggccatgttttcaaaggcggaggttactctactccaacccgtcaacgtcactgcgttaaacagtgtctctctcaaattcttcttcttgctgggtcctcccaataatcatatcattgatcggaccactttatctcatgaaatcaagaatctattctatgatctgtgtgagcttgcnaggtttctttcccatacgcatgtaatatnatgattcccatgtgtgtggttttcncgactttccaataaatggtattggattccacntcgtcgnatggancncnctgnaaananatggaaaaaacnttggga

SEQ ID NO: 93717 - DNA, 1864 bp, Arabidopsis thaliana columbia
agcccaagcgtccgcattccttaaatcgatttcatccagatctaaactcgagcttttgttgatcgaaaaaatggaagaggatttgattaagcgccttgaagctgcggttacgaggcttgaggggatctcaagcaacggaggaggagtagtttctctttcccgcggaggagatttctcctccgccgccggaatcgatatcgcgtcgtccgatccatcgattctggcttatgaagatctgatttctcaatgtgttggtagggctctgaccgccgctgagaaaatcggtggacctgttctagatgtgactaagatagtcgccgaagcttttgcttcccaaaaggagctgcttgttcgcatcaagcaaactcagaagcctgacctcgctggattggctggatttctcaaaccgttgaatgatgttacaatgaaagctaatgcaatgactgaaggaaaaaggtcggattttttcaatcacttgaaggctgcatgcgatagtttatctgcattggcttggattgctttcactgggaaagattgtggtatgagcatgccaatagctcatgtggaagaaagttggcaaatggctgagttttacaacaataaggttctggtggagtatcgtaacaaagacgcagatcatgtggagtgggctaaagccttaaaagaactttatttacctggtttaagggaatatgtcaaaagtcattaccccttgggacctgtatggaatgcatcagggaaacctgctagtgctcctgcaaagggtccacctggtgctcctgctcctccaccagcacccctcttcagtgctgaatcttcaaagccatcatcatcgtcaaaccagaaacaagggatgtctgctgttttccagcaactcagctcgggtgctgtgacctcaggtcttagaaaagtgacggatgatatgaagacaaagaaccgtgctgatagatctggagctgttagtgcggttgagaaggaaactcgtaccagtaaaccggccttttcgaaaactggaccaccgaaaatggaacttcaaatgggtcgcaagtgggctgttgagaaccaaattgggaagaaggacttggttatcagcgagtgtgattccaaacagtctgtgtacatatatggttgcaaagattctgtcttgcaaatacaaggaaaagtgaataacatcaccattgacaaatgcacgaaagtgggtgttgttttcacggatgttgttgctgcatttgagattgtgaattgcaacaacgtagaagtgcaatgtcagggttcagctcccacagtttctgtggacaacacaactggctgtcagttatatctaaacaaagactcattagagacagctataacaacagccaaatcaagtgagatcaatgtaatggtgcccggtgctacccctgatggagattgggtggaacatgcgctgcctcaacagtacaatcatgtgtttactgaagggaagtttgagacaacaccggtctcgcattcaggtgcctaagcaaaggagaaactattatcactctggattgtgcttgaatatcaggcctttttatactcatatactttgtttcttcagattataatagaggaaagaatctgtttgtttgtttgttggttttttcttttgtctctatcccccaattttgggtttggaggttgtgggtttttgatttttttgtgtgatctgatcatcttgtgtcttgttcgtccttggggttttggatttggatttgggtttctcgtttcttttgtttttacttgtgggcttgtcccgagtccttgctgatgacgttgtgcacaaatcatacttatcatggatagaaaaagttgcaatcctgtttttggaatatgcagttattta

SEQ ID NO: 93718 - DNA, 789 bp, Arabidopsis thaliana columbia
ctttgttcaccatctttctctttctgtttaaaaatccaaatcttttaagaataaaatattgaaatgaaaagaagaataaacttaatttttcattatttcaaccgaattcaaaaaaaatctatttgcttttttaatttgtgtgatgcgggtaagtaaggtagaaccgcagattctaagagttttaataaaaaaatctatatttatttatttatatataaatatagatttctattcaaactaatatggaattcattttcattctgaccgaacctttacgcgtgggtaagcgattccattcatagagaaagaaaaggtatagattattatatactgactgaactatgactattcatgattccatcattgaatcaattacacaaactagaggaatgttatggtaaaacttcgtttaaaacgatgtggtagaaagcaacgtacgacttgaattgaaggacattatctgctgtggatttttgcatccgccacttttatttttatattaggaatataggtgctcttggctcgacattttgtattctattttacaagagtcctacacttttttgtaatataaaaaagagtacaggatggagctcgaggagaatagaaagtttttagtcctttcgcaggagtaaggatctagggttagtgcgaattaataagttggaacaacttcgtaagtctttttatattgaaaaaagtcctttcaagcaattttacaatggaaaaggaaattttcttaaaattgtaaaattctttgaatcaaaagtctatcatgcgtgaatcaag

SEQ ID NO: 93719 - DNA, 844 bp, Arabidopsis thaliana columbia
gccacaatttcaaatgcttttaaggttctttcagtttcaacgtttataggagcaatattttgctttgctgctttctgtttcaagagcatgtatgcatttttagctctttttgctgttggtgaacttcttgtctttgccacacagggtcctgtgaatttcatagttctccattgtgtcaaaccaagtctgagaccacttgcaatggcgatgtctactgtctctatccatatctttggagatgtaccttcctcaccactcgttggagttcttcaggactacgtgaacaattggagagtgacttctcttgttcttacattcgttctctttccagctgctgcaatttggtccatagggattttcctgaatagtgtggatcgatataacgaagattccgagcctgatgcagtaaccagagaatcaaccgctgcgcctcttctccaggaagcatgagacaaaaaaactcaaaaggtcactgtgagaattttatggtttattctcagttctttatctactttcttgtacaaatagaattgtggctgaaacataaacaaatgtcaaattaccttcatttgtgtattcttgtttcactgtttgcaaaattatgaaaggaccatccctatttctctacagaaaaaataacttaatagtccattacgacatgaatctcgggtctttgagatcataccgggaaatgtttttcaacatcatcattcacaagatagagcttaaggtgcatccaaagaaatcgcaacaatcttccaatctagctctccttcatcaatcatagccaaaagcagctaaaggcttaacctttagaacgtcaccaatctcaacaacatcaact

SEQ ID NO: 93720 - DNA, 467 bp, Arabidopsis thaliana columbia
aacctaacggaaataattattttactaaccggttaatgtcttgattaaaacattttatgatatgccactaagagagttagagacgtatggatcacaaaacatgaagctttcttagatggtatcctaaaactaaagttaggtacaagtttggaatttaggtcaaatgcttaagttgcattaatttgaacaaaatctatgcattgaataaaaaaaagatatggattattttataaagtatagtccttgtaatcctaggacttgttgtctaatcttgtcttatgcgtgcaaatctttttgatgtcaatatataatccttggttattagagtcaagctctttcattagtcaactactcaaatatactccaaagtttagaatatagtcttctgactaattagaatcttacaaccgataaacgttacaatttggttatcattttaaaaaacaagattggtcataatatacgat

SEQ ID NO: 93721 - DNA, 790 bp, Arabidopsis thaliana columbia
gggatgaagtacgtggcaaattttggaagaggctctctctcttctctcacctctatctttcagagagagagtccaaattttccgatcttaatcggatttcaatccggcggtcatgccggttttagcttgtttatagtttatgtttcagtttgttacttctcttttgctttccgatttagatcaaaactctcacatatgattctgaaacttaattttattgtctgatgagtttttgatctagattcggataataaattccttcttaatccggtttgttcctgattaagtcggattgtgtgtttttgttcttccttctccagagagtataactttgatcccgattgcaaccggcagatctcctttgattctccatctgctcaacccctctcttcaagctggagtaatttcttcgtcgttatgcttcttatgaagtagaccttcttaggtctcaaggcggagcttcctcttggagtcagaattgagaagtttgaagattgaagatcttcctgaggttattcatggtgggagtgaaggattttgatcggacctgcaacggatagatctgtggaaggttgaggtggtggaactacgaagcccggcggcggagctgcgtcaaatcgtggatttttccggcaccgtctgcgacaaaccgctccttcttgcgtgttggacacctggcggcacgtggcaccattttctcttaattttagcttaattagctaggttaagcagtaattactctaatcatggttgtaaatgggggagaatgggcttgtaatccactctatgt

SEQ ID NO: 93722 - DNA, 539 bp, Arabidopsis thaliana columbia
aaaatctgctctttgccctaaaaacggcaaaaagatcccacctttcaatcaacccggattattcccctgtttcggcagcggttgtatgaaccaaccgacgctgaaccacggaaaaaccgagcttcagagagatggtcaaaccatgaagggatggttcaatggtacgtacgagcaaggggcagattttggaaatgggttggatgggataagttattacgaggttgtgtgggagaagagagtaggcgttggtggttgggtatttaaacataagcttaagacttcagctaagtacccatggcttatgctttaccttagagctgatgccactaaaggattctctggtggataccattatgacactagaggaatgctcaaaacacttccggagtcaccctacctttaagtgagactaacactaaatgtaaaacatggatgcggagccaagagtcaattctattcttttgacattggaagctgttgtaaaaacaacggtatgccctgcgactgtgactgtactaccgacgtaactcgttacttgg

SEQ ID NO: 93723 - DNA, 849 bp, Arabidopsis thaliana columbia
acccacgcgtccgcttttgctggagctggaacccgaatctgatcctgtgtggcattatctaaatgttcagaatcatagaatccacggcttgcttgagaaatgtacatatgatcatgaagcaagggtggaaattttgcgtaacgacactcatgagaaagccatctcagatgcaaagtggcaacaaattcaacaaaatggcgtttcatattcagataccgcctcttctaatgaaaataatgcagttcaagttgacctacaatcagtggaattccccagcgaagagattgatattttgaagggaagatacatcaaaagattgactgctgtgcttgtgcatcatatccctgtgttttggaaaacagctatatctattttcagtggaaaatttgccaagtcctcccaagttactgatacttcagccaataaagctgaggagaaggtcacagaggcaagatattcaactcattctttggaagaagttgctgggatgatacgcaagactatttctgtctatgaagcaaaggtgaacagcacattttgtgattttgatgaatcatgcattctccgcccatttatgagtgatgccatcaacgaagtatcaaaagcatgccaagcttttgaagccaaagagtcaacgccccacagtgctgtcgttgcactgagaaaaatccaggcggaaatcactaagatttatatccaaaggctttgctcttggatgagggcctccacggaaggaatatcacaagaggagacgtggatcccggtttctattcttgaaaggaatagagctccatatgccatctcttacttgcctcttgcattccgttcagttattgtctctggcatgga

SEQ ID NO: 93724 - DNA, 530 bp, Arabidopsis thaliana columbia
cggacgcgtgggcggacgcgtgggcggacgcgtgggcggacgcgtgggtaagaatcagacagaagttgcagagaaaagagaattaattgattggtgtaatggagaaggcagttcatttatccaccaaaaatggacccaaggttccaggagagccaacgaagaccggaacctccatggttgacacggcagcttcagccgtacaaagcttcgctccgattaaccaaatccaccaacatctctgcgcgtttcatttctatgcatatgacatgacccgacaagtggaggcacaccatttctgtggtcacatcaacgaagacatgcgccagtgtctgatctacgacggtcctgatgccaacgctcgtctgatcggtctggagtacattgtgacagagaagctctttatgacattgcctgacgatgagaagaagctttggcacactcacgagtgggaagttaaaggaggcttcttgttcatgcccggtgttcccgaagctattcaacggcaagatctcgaaaaagtcgccaagact

SEQ ID NO: 93725 - DNA, 747 bp, Arabidopsis thaliana columbia
  unsure (1)..(747): unsure at all n locations
tttccccacgtgtgtggcctacaatctctatcgattccacagcacaaaaatcttttgcgcttttgagatttttccagaattcaatctttcgagtgttgttgaattcagaaatggaggtttcgtcttcactcaagctctcatcggcgttatctccttccatcatcaaacttcagggttcttcatcaagtattgatataaaattctctaagtacacttcacttcctaaaccgtttcttcaacttgatgataaaagccgacgtcttcgtgaccaacaagtttcacattctctcgagctaaggtcttacagaaaacgggtcactgcgaaatcaggttctcaaggttgggactttggtagattcgtcaaaacattgtactttttcaatggaccaccatctcctctaaagtttgtttcatcggtgtttgagaaacttactaacggagcaacggaggaaccggttgctgaaatgggaacttctggaatcatacttgtggctggagcctcctgggggtgtaaggaagaaggattgttgatatcttgaggaaaagagggttgcctgttaaagcattggttagaaatgaagagaaggctcggaagatgttaggacctnagattgacttgattgttgcagatattccaaaggggatacattggttccngaaagttcaaaggngtttnggnaagtgatcaatgctgtttctgttattgttggnccnaaggagggggtcncctgngggcaaaatntattg

SEQ ID NO: 93726 - DNA, 509 bp, Arabidopsis thaliana columbia
gtcaaattgttcaaagcatcaaataagtaaataaaaactcttttatggtcacctttttcactatcctctctttgtgtttcaaatcgtgggaacaaattatcacaatggaggcttctaaagaagctcatcaccttccaaactacatgaaagacgacaacgttaatcaagaaaccaagaacttgatcacttctctaccttcagacaaagatttcatgggttatggtctctacaactacaaaggttgttggtactatccaaacacactccaagccgttcttgacgtccaaaaacacttcaagccacgagatactgatataatcctcgcttctttgcccaaaggtggaaccacttggctcaaatccctaattttcgctgttgtacatagagaaaagtaccgcggaacccctcaaacacatcctttttgcactctttacaaaaccctcatgaccttgtccatttcttgaggttgagttatacgctaatagcaatcggatctcgcaagatcttct

SEQ ID NO: 93727 - DNA, 439 bp, Arabidopsis thaliana columbia
  unsure (1)..(439): unsure at all n locations
aaaaagtacaaancttactcttttatctgcttgattttactaatcactcgccaaggacaaccaatggccggtcgatcaaccggtcacttgaaaaacgtagtgcagaggttaagaacttacacgacggcgacaaccgcaccaagatccaaagcgtattctacggcggcaacagagtatggtggccagagaaccgccaccacagcggcagcaacaaaaggtgacttcacaccagtttacgtctccataggattgatttcattgtcagtaacatgtggtgtctacactgcgtatcttcatctacatgaaaaccctggcgtacgtgtcaacaagaagatgagagagaccgctcccgagatcgaagatccagatagagctctaaacgaagcggaccgcgtcgctaacaggtcttgggttaggaaaatagctaacgttcaagagt

SEQ ID NO: 93728 - DNA, 574 bp, Arabidopsis thaliana columbia
  unsure (1)..(574): unsure at all n locations
gacggcacattggaatccacatttcaatantattcctgtctggnctcaggtccggatggttgaggatgatctcatgtacaacactttccttgaggtgtatgagaatcactgtgcacgcaatgaccgagaggcagatcttccaattacccactttaaggagcaactcaatcaagctatatcagggcaaatatcagcagaggcaataggagatcttcgtctgcaggcatatattgacatcacaaaaaccttggtcaatgacagtatcttttctcagtacatgtacaagacgttgatgagcggaagccatatgtgggctttcaagaaacaatttgcagtccagctagcagtctccagtttcatgtccttcatgctacaaattggtgggaggtccccgaacaaggtcttgtttgcaaaaaacaccgggaaaatgttccagacagattttcaccctgcttatgacgccaatgggatgattgaatttaacgaacctgtgcctttccgcctcacaaggaacatgcaagctttcttttttcagtttggagttgaaggtctccttatgtcatccatgtgttca

SEQ ID NO: 93729 - DNA, 504 bp, Arabidopsis thaliana columbia
cactcacacaaaattggtcctaaacgagtctccttcagtcgtaatttgcagcagagcaacgatggcagcgactccaatggaaggcaaatgggttcagcttaaacagaaaggaaccggaccaggagcaagaagctctcatgctatagctcttgtgggaaacaaaatgtatgcctttggtggcgagtttcaaccacgtgttcctgttgacaaccagctctacgttttcgacctcgaaactcagacatggtctatccaggaagcttctggggatgctcctcctcctagagtaggtgtagccatggctgcagtcggacccatcatctatttcttttggtggccggggctcgactcaccagggagctcaaacgaggttatccttgttttgaacacttttgaccaacccagtgggaaccttactctctttcaggggaaacccggtccccagacccggagcttaccactctattactgcggattctcaaaacgtgtatgtgtttggtggat

SEQ ID NO: 93730 - DNA, 439 bp, Arabidopsis thaliana columbia
tttatcatctccttctctcgagcccaccttcgcttcttcttctccctccttctcctcgccgccctaacctcaccttaatccgccgtatcccagctcatcctcgcctcggaaactcgaccagcttgctttcttcttcgtcaccggtaattcggaaaattctggttcgtagcactctccgggaagaccaacccatcgcctctgactccgagagtagtcctactctactgatcggtgaagattctgctgcttttgaattagggaaacagaagcttgtttcctgggtttatttcggtgttgtccttggagttgttctctttatcctcaatgttgtttggatcgataattccaccggtttcggaaaatcattcatcgacgccgtctctaacatctccggctcaccggaggttgctatgttaatgcttatccttatatttgcaat

SEQ ID NO: 93731 - DNA, 677 bp, Arabidopsis thaliana columbia
atttagtcgtagcgaacaaatctatcccactcattggatttcaatttcataaattttaggttgtaaaattcgggtttggagaaaattgggggtaaatctagggttctgggaaaattagggttctgggaaaattagggttcatccatgctgtcgagttttagggtcaagtaaatgacggatccattaggatccgttttatatcttatgctctctcgtctcaatatatatatttaaaaatctcagcctttgggcttcgttagtgttggtttgctttcagaatttaacttagttacggtaaaagcaatgcttagcgttatacgagtgcatctaccgtcggagattcctattgttggctgcgaacttacaccttacgtacttctccggcggcctgataagaccccctccaccgatgatgtgcctgagtcagccccgcttgaaggtcacttcttaaagtacagatggtttcgagtacagagtgataagaaagttgcgatttgtagtgtgcatccatccgagacggcaacattgcagtgtctgggatgtctaaagtctaaagttcctgttgccaaaagctaccattgctctactaagtgcttttcggatgcgtggcaacatcaccgtgtgttgcatgagcgtgctgccagtgctgctacagaaggaaatgatgaagaagagtt

SEQ ID NO: 93732 - DNA, 674 bp, Arabidopsis thaliana columbia
  unsure (1)..(674): unsure at all n locations
ttnnnnnnnnnnnnnnnnnnnnnnncggacgcgtgggcaaggaagaagaagaagaagaccaaagagagtaagtaatggcgaagatcaaacctcaagcattgttgcagcaaagcaagaagaagaaaggaccgtctcggataagcataaccaacatcgtcatttacactttggctgtgcttttgcttgtctttgttctcttctctgcttacagacgttggactcacagatctgagatcccaacgcacaatggtagatcagttcttgaggatgcagccttccctggaatgaagaatgttgatcttccgcggtttgctaccttagatacgggcaaaggttcagtgaccattgaactcttcaaggatactgctcccaatgtggttgaccagttcatgaaattctgtcaagatgggtatttcaaaggtttcttattcagtcgagttgtaaagcattttgtgattcaagccggtgactctgcggagttcgatgctgtcatagattgggcactcgacagaagaacattgtaccagttgaaacagaagattcaggngggaancnaaagcaaaaacggcaagggggtcggtcttcatggggcgcccaatnaaattgaacgggaatgcngcttggcggttcaaaggnaaacgtttcaggatcaaagtaanatgcngtcacaattc

SEQ ID NO: 93733 - DNA, 714 bp, Arabidopsis thaliana columbia
  unsure (1)..(714): unsure at all n locations
cggaancgnncccaanncggcatttccctttggggtgccnttccnttccttggcccntccnngtncagccnttggccccaggcctggccccaccnccattggtagacagttcttgaggatccaccctcccctggattgaagaatgttgatcttccccggttcgctcccttggattcgggcaaaggttcagtgcccattgacctcttcaaggatactgctcccaatgtggttgcccagttcatgaaattctgtcaagatgggtatttcaaaggtttcttattcagtcgagttgtaaagcattttgtgattcaagccggtgactctgcggagttcgatgctgtcaaagattgggcactcgacagaaagaacattgataccagtttgaaacatgaagaattcatggtgggaactcctaaagctaaaaacgagcaaggaggattcgagttcttcattgtgtctgctcagatcaaagatctgaacgagaaattgactgtctttggtcgagtttctaaaggacaagacgttgttcaggagatcgaagaggttgagacagatgatcagtatcaaccaaagtcgccaatagagatcatgtccgtcactttgcttcaagacatgtaaaagcttttttacttcttgtctctctctcttgtatgaaactcaaggcggccgccttgtcgatatcaagcttagtgataccgtcgacgtctagggggg

SEQ ID NO: 93734 - DNA, 475 bp, Arabidopsis thaliana columbia
cgaacacaatctgcttcaagatttatgtgtttgatcagacacaaaaagtatctctctccgtagttttgtgtcaaggttatgcaagaagcggcactaggtatgatgggagccaccgtaggcggagacggagacaccgcggtcgtggcggagcagaatagacagttgaaaggtgagatagcgacacatccgatgtatgagcaattattagccgcacacgtggcgtgtttaagagtagctactccaatagatcaacttccgatcattgaagctcagctttctcaatctcatcatcttctccgttcttacgcttccacggccgttggataccatcatgatcgtcacgagctcgataatttcttggcacaatatgtaatggtgttgtgtagcttcaaagaacagctgcaacagcacgtgagggttcatgccgtcgaagctgttatggcttgccgtgaaattgagaacaaccttcattctt

SEQ ID NO: 93735 - DNA, 482 bp, Arabidopsis thaliana columbia
  unsure (1)..(482): unsure at all n locations
caagcagatgaaggaagagaggagataaaaagccaaacaaatggcgttcaatatcataacacctggtcgtgtttattcagccacgtctctcaccttcgtttccaccattaaagcagctttcgttaaaccttcttttgcctctcggtctcatcgtaacctccttcgtttctcatcatctcctttgtcatttccgtcgctccgtcgaggttttcacggtggtcgtattgtgtcaatgggttcttctgctcctgaatcggtcaataagccggaagaagagtggcgtacggttctttctcctggacaatttagggattctcaggccaggaaaggcacctgnatattccagggactgggggatttcaaccaaagtntttgggcggcggggatnttctttttttttcaaggatttggggcncccccttttcaaatccccccccaatttnacccctggtttggntggccaatttntttannggctnccc

SEQ ID NO: 93736 - DNA, 931 bp, Arabidopsis thaliana columbia
  unsure (1)..(931): unsure at all n locations
nnnnnnnnnnnnnnnnnnnnnnnnnnnnnnnnnnnnnnnnnnnnnnnnnnnnnnnnnnnnnnnnnnnnnnnccacgcgtgcgggaagagaggagataaaaagccaaacaaatgggcgttcaatatcataacacctcggtcgtgtttattcagccacgtctctcaccttcgtttccaccattaaagctgctttcgttaaacctcctttggcctctccgtctcgtcgtaaccgccgtcggttctcatcatctcctttgtcatttccggcgctccgtcgaggtttccacggtggtcgtattgtggcaatgggttcttctgctcctgaatcggtcaataagccggaagaagagtggcgtgcgattctttctcctgaacaatttaggattctcagacagaaaggcactgaatatccaggaactggagaatacaacaaagtattcgacgatggcatctattgttgtgcaggatgtggaactcctctctacaaatccaccaccaaattcgactctggttgtggctggccagctttctttgatggactccccggagctataacccgaacccctgttccagatgggagacgaatcgagatcccatgtgctgcttgtggaggacatcttggtcacgtttttaaaggagaaggtttccctactcctaccgatgagcgacactgtgtaaacagtatctctctcaagttcacaccagagaatccgaccctgtaataatatgatcacagaaaaaaagacgtgataatataggtgtgttgtgtgatgcttctgtctctctctcgtactgtgtttttgtcttttttctgtgagactaatgtttacttttgatggttaataataaggtcgttgaataaaaaaaaaaaaaaaaggccgcccgctctagaggatccaagcttacgtacgcgtgcatgcggcgtcatagct

SEQ ID NO: 93737 - DNA, 619 bp, Arabidopsis thaliana columbia
  unsure (1)..(619): unsure at all n locations
aaaagctgttgtcaagagaagaaggaagagaggagataaaaagccaaacaaatggcgttcaatatcataacacctggtcgtgtttattcagccacgtctctcactttcgtttccaccattaaagctgctttcgttaaacctcctttggcctctccgtctcgtcgtaacctccttcgtttctcatcatctcctttgtcatttccgtcgctccgtcgaggtttccacggtggtcgtattgtggcaatgggttcttctgctcctgaatcggtcaataagccggaagaagagtggcgtgcgattctttctcctgaacaatttaggattctcagacagaaaggcactgaatatccaggaactggagaatacaacaaagtattcgacgatggcatctattgttgtgcaggatgtggaactcctctctacaaatccaccaccaaattcgactctggttgtggctggccacttttctttaatgggctccccggggctttaacccgacccctttnctaccaattngggtcgggttgggtcaaatttgctnttttgggggcaatttggcacggtttaaagggagggttccnctcttcccttnggnntttnaaaaattttttagtaacng

SEQ ID NO: 93738 - DNA, 449 bp, Arabidopsis thaliana columbia
ataattgcaaatccagtatcaatttaaaattatgaaaaaagatttataagcgacaaatacaaaagaaaaacggtgctaaaaatcagggagaaacaagaacctgatcggtttgttaccaaatgttacaaaagaagaagcagctggcaagcgcgggaaacttacttaccgttgaagagaagtgtttattcttctttacgtggttttggtcttgaaggttttgcaggaacaacgtaactgaggagaatcaatccaacaggtatgatcgttccaatgtaatatacgcttccgtaggcggtgagtgtttcgtgcaagcttaacacctgagacattgcgattgaaaacaaggttaaaaaaggcgttaagagtgattctatcaatgtgacgagagaggaaagagttggtaattaccatgaaaccgacggctgagtagttgagaaccaaaacggtgt

SEQ ID NO: 93739 - DNA, 425 bp, Arabidopsis thaliana columbia
gcgggcaaaaaggtcattatctgatgatgccggtgaaccccgtgcgtaacatgacggagtgtggaactcttgcgtacgcgcttcgaagattcaagaaaagacgttgaagatgacaaagaaagcggcgtttatgttcctgacgagagggaagcttcctttggctaaactgtgggagagatttttcaaaggccatgaaggtcttttctctatttacattcatacgagtgaccctttttactttgacgatcatacgcccgaaacttcgccgttttatcgccggaggattccaagcaaggtcagtagtcaatttcctcattaattcccctcagattatataattgatataggcgaattcttcatagataaacttaattagcctagataatcttgatatagatatttaaagatatatttgcgatattcgg

SEQ ID NO: 93740 - DNA, 886 bp, Arabidopsis thaliana columbia
  unsure (1)..(886): unsure at all n locations
nnnnnnnnnnnnnnnnnnnnnnnnnnnnnnnnnnnnnnnnnnnnnnnnnnnnnnnnnnnnnnccacgcgtccgcccacgcgtccgtcggctgnagaagccacagaaggggggagattaaattttccagagataaaaccctagagagattctcatcttcttttcttcaatctctctgagaatttctaggttttcgttaccgattgggtcaatctggtgaaactcaaggttgagatcagataatttaattggaagattttaggttatggagaacagaggccagaaacgaatggaggttgtggaagagctacctgctgataagagagcttgtaactctcaggattttagaccaagcacattcggatcatctgttcaagctcaagctaatgatacgaatccaggacatgaaaacgttgacgctgatatggatacttcttcatctgcttcgccttcgagtcgatcagatgaagaagaacaggaagagcaggataaggaggattcggactatggatcttgcgattctgatgaggaagatccgaggcagagggtgcttcaggattaccagaggcagagatcatctggtgatcatgggaaattgaagtctcttttgttgaatttgactggagaaactgatccttctggacagttatccaggctcactgagttatgtgaagtgttgtcattttctactgaagaatcgctgtccagtgttatggccaacatgctatcaccggtgcttgtaaagttagctaagcatgagaacaatgcagatattatgctcctcgccnnnnnnnnnnnnnnnnnnnnnnnnnnnnnnnnnnnnnnnnnnnnnnnnnnnnnnnnnnnnnnnnnnnnnnnnnnnnnnnnnnnnnnnnnnnnnnnnnnnnn

SEQ ID NO: 93741 - DNA, 442 bp, Arabidopsis thaliana columbia
ttcttctccttctctctcccttcgtcattatctctcttctgtaacttctctttctttccctctctctctttcgctgcttctcttctgtatctgattcccttttttacgggagctgtagatttgagtagtgtaagcgtcgatgaagaaggttacatcgtctaagattccggccaaggatgattgggtggctgtagcgataactgacgacgatttggtcgttgagcttcttttacggctgaagcatgccggaacggtagtgtcggataatccggcggtgattctccctccgttgcggtggggaatccgtcaacgacggtctcgttcctcaagatttggtggcggcggcggcgttctcgtttccttgaagaaagatgtcgattccgttagagccagtcccgaagactccctctctcggtggcagcggcggatctggaagtggtgg

SEQ ID NO: 93742 - DNA, 850 bp, Arabidopsis thaliana columbia
  unsure (1)..(850): unsure at all n locations
tctatgcgactcactatagggaaagctggtacgcctgcaggtaccggtccggaattcccggtcccttttttacgggagctgtagatttgagtagtgtaagcgtcgatgaagaaggttacatcgtctaagattccggccaaggatgattgggtggctgtagcgataactgacgacgatttggtcgttgagcttcttttacggctgaagcatgccggaacggtagtgtcggataatccggcggtgattctccctccgttgcggtggggaatccgtcaacgacggtctcgttcctcaagatttggtggcggcggcggcgttctcgtttccttgaagaaagatgtcgattccgttagagccagtccgaagactcctctctcgtggagcggcggatctggaagtggtggcggctctgcttctccttccgccgatggattcgaggataacagtcgccaagctagctgctctacatctacaggatctggatctaaggtttttcccacaaacgaaatcaccagttgtttctccaagagattgaagaagaggaagtcatcttttgagcttaaaaatgaagagaacttgaagttgaaggagagacttgaccttgaaaaggagattgcaagtctccgagcaacattcgatgaacaaaaccttagganccaaaagctgaagaggattaagcttgacttaaactcaggccgtntcacaaancaaggaancntgttgattttgattcggaaaatcancaactcgggggggttacaagggttccaaaatttttgnaaanccgggtgcnntggaaantncanggggggnttttttggggcccccccggtttttnaaaatgggggnc

SEQ ID NO: 93743 - DNA, 1155 bp, Arabidopsis thaliana columbia
  unsure (1)..(1155): unsure at all n locations
ggtgattcatcttcgtcttcttcatcttctgatgatgaagacgagaagaagaagactaagaagccctcttctccttcgtcttctatgaaatccaaagtttaccgcttgttcggacgacagcagcctgttcataaggttctcggcggtggaaagccggctgatatattcatgtggaagaacaagaagatgtctggtggtgtacttggtggtgctacagctgcttgggttgtgtttgaattgatggagtaccatcttctcactctgctttgccacgtgatgattgttgttctcgctgtgctgtttttgtggtctaatgccactatgttcattaacaagtcccctccaaagattcctgaagttcatatccctgaagaacctattcttcagcttgcgtctgggctcagaatcgagatcaaccgtggattctcttctctccgtgaaattgcatcaggaagggatctcaagaaattcctcattgctattgccgggttatgggttctctcaatcttgggcggttgcttcaacttcttgacattggcatacatagctcttgtgttgctcttcacggttcctcttgcctacgacaagtatgaagacaaagtcgacccattaggtgagaaagcaatgatcgagctcaagaagcagtatgcagtgttggatgagaaggtgttgagcaagatcccacttgggccgttgaagaacaagaagaaagattaggggtttacacaaggttgtccgtggctagcaaaacgggtgttgtgaaatggtatcgaagtaatgtgttttgggcgtttttttaggtggctctttcggttatgtgaatgaacttggaattttcctgactggtttgttctgttgtttatgtcattgttgatcagcgtcgagggataaaagtagtgatatttcttctctctctaagcctctatataactaagaatttcaagatatttgaattttgcaatctcgtggttaatgttgttctttctctatattctcctctttcattacatttgtaaaatggaatcaatgtcccgaattgataagttgtacgaagcttatacgtttaaaaaaaaaaaaaaagnnnnnnnnnnnnnnnnnnnnnnnnnnnnnnnnnnnnnnnnnnnnnnnnnnnnnnnnnnnnnnnnnnnnnnnnnn

SEQ ID NO: 93744 - DNA, 655 bp, Arabidopsis thaliana columbia
  unsure (1)..(655): unsure at all n locations
nnnnnnnnnnnnnnnnnnnnnnnnnnnnnnnnnnnnnnnnnnnnnnnnnnnnnnnnnnnnnnnnnnnnnnnnncccacgcgatccacgcgtccgagctaaaatactgtgttctttgtttcttccatcgaaatcgaaaaaagctaagatctttgcgttttgaaacgatggcggaagaacataagcatgatgaatctgtgatcgctcctgagccagctgttgaggttgtggagagagaatcgttgatggataagatatcggagaagatccatcacggtggtgattcttcttcgtcttcttcatcttctgatgatgaagacgagaagaagaagactaagaagccctcttctccttcgtcttctatgaaatcgaaagtttaccgcttgttcggacgagagcagcctgttcataaggttctcggcggtggaaagccggctgatatattcatgtggaagaacaagaagatgtctggtggtgtacttggtggtgctacagctgcttgggttgtgtttgaatttgatggagtaccatcttctcactctgctttgccacgtgatgatttttgggctcgccgcttgtcctggtttttttgttgggcttaattncnactantgttccaataaaaaaaagtccccctccaaaanantccntaaagtt

SEQ ID NO: 93745 - DNA, 374 bp, Arabidopsis thaliana columbia
cacgttgatcttgttgtttactctctctctctcctccatcggcgacgaccaccggagatcagcgtcaccgtaccaagacatcatttaccttcttttagatttgttgttttttaatcagttgaatcggaataaaatatcgcatcagagatgagtaacgagcttctcaccatcgatcctgtcgaccttcaattcccttttgaattgaagaagcagatctcttgttctctctatttgggtaacaagaccgataattatgtcgccttcaaggttaatttcaatttttgaattggatatatattcttttgtgtatatcgtaatgttttcaagggtcaattattttttaaaggttaagacgacgaatccaaagaagtact

SEQ ID NO: 93746 - DNA, 703 bp, Arabidopsis thaliana columbia
  unsure (1)..(703): unsure at all n locations
agaaacnaactgnggtccttttttnccncncanccccannacgggtcccnaggncctaaaagggncnttccccagggcttttccnnaaaaanggncaanggtctgaaatttccgtttnaaaatttaccgnggacaanaaaggctgganatcaagaaaacacaatctgaggcgagggcactcattaccaagcttacccgaggaaaaacagtctgccattcaactgaacaacagacttcaaagagaactggatcagttaaggcgtgaaagcaaaaagagccaaagtggtggtatcccattcatgtacgttcttttggtcggactcatcggtctaattttgggatacattatgaagaggacataaaccacccaccttgaaattaatccctcacccgccacgaaggaaaaaaaaaagacttttaactcttttcagtcggacatttttttctcttctgtatttgtcaatttcgccttaaaaaggtgtcctagaagatttgtgtttcgtaactcagtttgctatgtttttttcaacttttgtaatccaaatgactttgcgttggttctttctccactaattctcttatatttcttaacttcattttccatcaaaaaaaaaaaaaaaaaaaaaaaagggcggccgctctagaggatccaagcttacggacgcggtccatgcgacgtcatagctttctatagtgtcaccta

SEQ ID NO: 93747 - DNA, 1103 bp, Arabidopsis thaliana columbia
  unsure (1)..(1103): unsure at all n locations
nnnnnnnnnnnnnnnnnnnnnnnnnnnnnnnnnnnnnnnnnnnnnnnnnnnnnnnnnnaatctctcccgatcgacgactgctctctctctgaaccggagacggtgtcacgggacgaatctaatcgccgggaaaccgttttttttttctctcggaaaatcgatttgaatctccggcgatctgatcgggatgagtaacatcgatctgattgggatgagtaaccgcgatctgatcgggatgagtaacagcgagcttctcaccgtcgagcctctcgatcttcaattcccttttgaattgaagaagcagatctcttgctctctctatttgacgaacaagaccgacaataatgttgcctttaaggttaagacgacgaatccgaaaaagtattgtgttaggcctaatactggagttgttctcccgaggtctacttgcgaagttcttgtgaccatgcaagctcaaaaggaagctccttccgatatgcagtgcaaggacaagtttctgcttcaaggtgtgatagctagtcctggtgtcacagccaaggaagttactcctgagatgtttagcaaagaggcagggcatcgagttgaagagactaaattgagagttgtctatgttgctccaccacgaccaccatcaccggttcgagaaggatctgaagagggctcttcaccgagggcttctgtctctgataatgggaatgcttctgattttactgctgctccaagatttagcgcagacagggttgatgctcaggataattcatctgaggcaagagctctggtcacaaaactcaccgaggaaaagaactctgcggttcaactgaacaacaggcttcaacaagaattggaccagttgaggcgcgaaagcaagagaagttagagtggtggaatccctttcatgtacggtcttctggtcggcctaatcggtttaaatcctggggttcattatgaagaggacatgatcagatcccttcaacaaaatactccaaaggcttaaggtgcttaaaaagcattgaaagggaagaatnaaattttgttngggggcaanttnttttttcctttncgcgnnttgacctttggtaaatntacttaggcggtggggttna

SEQ ID NO: 93748 - DNA, 837 bp, Arabidopsis thaliana columbia
  unsure (1)..(837): unsure at all n locations
atccactcactttagggaaagctgctacgcctgcaggtaccggtccggaattcccgggtcnacccacgcgtccgtgaaaaggaagctccttccgatatgcagtgcaaggacaagtttctgcttcaaggtgtgatagctagtcctggtgtcacagccaaggaagttactcctgagatgtttagcaaagaggctggacatcgagttgaggaaactaaactgagagttacttatgttgctccaccacgaccaccatcaccggttcacgaaggatctgaagagggttcttcacccagggcttctgtctcagataatggacatggttctgaattttcgtttgagagatttatcgtggacaacaaggctggacatcaagaaaacacatctgaggcgagggcactcattaccaagctaaccgaagaaaaacagtctgccattcaactgaacaacagacttcaaagagaactggatcagttaaggcgtgaaagcaaaaagagccaaagtggtggtatcccattcatgtacgttcttttggtcggactcatcggtctaattttgggaatccataatgaaaggacattaaccccccccccttgaatttattccctccacccgcccccgaaaggaaaaaaaaaaagaccttttacttctttccagtgggccatttttttctcttctgtattggccaatttccccttaaaaaggtgtcttagaaaatttgtgtttggtaacccagtttgctatgtttttttcaacttttgtaatccaaatgactttgcgttgccgcccgcgaattcgatatcaagctttccgatcccgtcgccctcgagggggggcccg

SEQ ID NO: 93749 - DNA, 487 bp, Arabidopsis thaliana columbia
ctttaattcataagagtgatgattatcgctgttggttcttaaaaaagtaaggaacaaacatctgtttcgtaagtttcagcaatgtacagtggaactgtgaagagggtatcaccactgcaagatattaaactgcgtgtgcagattacagtttctttggaaatggaggataatgatccgaataaagaatatttgtatgctaaaggcttaagtgattttgttacttggctaaatgctgataagaaaccgcttcacgatgtgctgggatttagaaaagagataaatggtaccaccataaacatcgcgcttcaatggtgcgtagatggatattcaaacaaaattctgggatacgccaatggcatccgcaccatggatggtggaacatacatagatggtgtgaaagcgtcaataacaagaaccctgaacagccttttggagaagtctaagcttgttgaggacaaggatattatctttactgaggagcatgtta

SEQ ID NO: 93750 - DNA, 937 bp, Arabidopsis thaliana columbia
  unsure (1)..(937): unsure at all n locations
aacggacgcgtgggctcttttaagtctctgtttcataaataaaactaataaagaagaagaagaaaacagagcaattaaagtccttaaatcttcttcttctccaattcaatggctcttccgttgccattgatcttccttatcttctctcatttgttcgtttctggagttagatcaacgagcttcattatggtgaacaaatgcgaatacacagtctggcctggacttttatcaaacgccggagttccaccacttccgacgaccggattcgttctccaaaaaggcgaagaacgaacaatcagcgctccaacttcatggggaggaagattctgggggagaactcaatgttccaccgacaccgacggaaaattcacttgtctcaccggagattgcggatctggtaccctcgaatgctccggatccggagcaacaccaccagcaacactagcggaattcacactagacggatctaacggactcgatttctacgacgttagcttcgtcgacggttacaacgtcccgatgctagtggctccacaaggaggctcgggtttaaactgtagcagcaccggatgcgttgtagatctgaacggttcgtgtccgtcggagcttaaagttacgagtttagacggcagaggtaaacaatccatgggatgtaaaagcgcgtgtaaagcttttcgtacgccggagtattgttgcagcggcgcccacggtacacctgacacgtgtaaaccgtcgtcgtactcgttgatgtttaaaactgcgtgtccacgtgctttacagctacggttacggtggtcagagtagtaccttcaacatgtgctgaatctccctaattacgggtatcacggttttgccctacttcctaaccaccaggggattnttccctttaaacccttttataacttttaacaancttncctntnngggagtttttnaa

SEQ ID NO: 93751 - DNA, 975 bp, Arabidopsis thaliana columbia
  unsure (1)..(975): unsure at all n locations
gccagctctatacgactctcttagggaaagctggtacgcctgcaggtaccggtccggaattcccgggtcgacccacgcgtccggagactacactgctccatcatcttctccttctggggatttttttttggaaaaatcgttctgttaccttttttttgcccattactcaaaccctaaccctaattttctgaaatcgcagagagagagagagagaggtttcttcgaattctttcatcatcaattcgctaactttgtttttttggggttaaatcgattaatcgttattttattagatactgtcgatcggagctaatcgactctctcttaacaaaccctaattttttggtcctctctcatggcttccgccacttccaataaccctgcttcttcttctatgtctcctcgtcgtatcagcgggaatcacggcagccccaccgcttccgtagcacaatcacctcgccgtccttctcggcaggtttcttctccgtggactcaaatcgtccgcggcgaatcagagccgatcgccgccgccgccgctgtagccggtccttcctctcctcaatccacggctccgatcgagccgattgcttctgtatccgttgctgctccaactgctgctgttttgacggtggaggcggcggctggtgatgagaaatcggcagcatctggtggtcaggacaatgctggaaagataccagtttggaaaaggccgtctaatggggcttctgaggttggacctgtcatggggagcttcttcgtggcctgctctttctgagaccaccaaagctccttccaacaagtcttcttctgattcgttaaaaagtctcggggatgtaccatcatcattgggagcatcatcatctggccccggtactcagggaattgcanatgcttctgttcctgacccaagcaagctggccgggcaaccctatccaactccaaacactcgcgccagagatatttaaacaacgcaat

SEQ ID NO: 93752 - DNA, 688 bp, Arabidopsis thaliana columbia
acaaagcccttaaagataggaagatactttgtcatagctttgctatttctcaaaaaaaaatgagggacgacagagaaagaggagagggtgatttgtcatggcctttgatcggagagaaaagtagtgtcaaggaagaagtgaagaagcagctatggctttcaggcccactcatcgccgtgagtcttcttcagttttgtctacaagttatctccgtcatgttcgttggccatcttggctctcttcctctctccgccgcatccatcgccacctctttcgcctccgtcaccggtttcagcttcctcatgggaacagcaagtgcgttagatacgctttgtggccaagcgtacggagcaaagaagtacggaatgttaggaatacaaatgcaaagagctatgtttgttcttacactagcttctattcctctctccatcatttgggctaacacagagcaccttctcgtcttctttggacaaaacaaatccattgctacactcgctggctcctacgcaaaattcatgatcccaagcatcttcgcctacggtcttcttcaatgctttaacaggttcttgcaggcccaaaacaatgtgttctctgtggttttctgctctggagtaacaacttctctacatgtcctcctttgttgggtctttggttttcaaatctggttaagggtttcaaggagctgctc

SEQ ID NO: 93753 - DNA, 517 bp, Arabidopsis thaliana columbia
cgactcactttagggaaagctcgtacgcctgcaggtaccggtccggaattcccgggtcgacccacgcgtccgtcttctccccaaaaacctccaaagtttcaatctttacttctctctttttctccaagttatcttcttttctaggaagagatatgtgcggtgcaaagagcaacctttgctcatctaaaaccctaacagaagtcgaattcatgaggcagaaatcagaagacggagcttccgccacgtgtctcctcgaattcgccgcctgtgatgatctttcatcgtttaagagagagatcgaagagaatccatcggtggagattgatgagtcagggttttggtattgcagacgggtcgggtctaagaagatgggttttgaagaaagaacaccacttatggttgctgctatgtatggaagcatggaagtgttgaattacataattgccacaggaagatccgatgtgaacagagtttgcagtgacgagaaagtcactgctcttcactgtgcagtttctgg

SEQ ID NO: 93754 - DNA, 609 bp, Arabidopsis thaliana columbia
  unsure (1)..(609): unsure at all n locations
tggacaagtcggattaaggnttagggctggttagtgtccgatggcacaggaagtccntntgcncncggatcaggggaacatggccagtgttttcgagttgatggaagccattgttgaccaaccgccacccgctcttccttcaggaaatttctcccctgagttatcttcattcatctccacatgtttgcagaaggatccaaacagtcggaagctctgcaaaggaactgatggaacatcctttcttgaacaaatacgactactcggggatcaatctcgcgtcctacttcacagatgcaggatcgccacttgcaacacttgggaacctgtctggtacgttctccgtgtaaactacaagggagacataatatcaccatctggttcctgttatcatctgaagatttcttgttttaccttccagtgataaaatgatctttataatacatatagatatatttaattgctgtattttaagattatagatatattaggtacatgagaagggttgcggcccgcggaannnnnnnnnnnnnnnnnnnnnnnnnnnnnnnnnnnnnnnnnnnnnnnnnnnnnnnnnnnnnnnnnnnnnnnnnnnnnnnnnnnnnnnnnnnc

SEQ ID NO: 93755 - DNA, 1382 bp, Arabidopsis thaliana columbia
caagggagtaatttaggtagacgaagacgatgaagaaaggtggattcagcaataatctcaagctcgcaattcctgttgctggcgagcaatccatcaccaaattcctgactcaaagcggtacgtttaaggatggagatctacgtgttaacaaggatggagttcgaatcatttctcaattggagcctgaagtcctgtctccaattaagccagctgatgatcagctgagcttgtcggatttggatatggttaaagtcattggcaaaggaagtagtggtgttgttcagctggttcaacacaaatggactggccaatttttcgccttgaaggtcattcaactaaatattgatgaagcaattcgcaaggcaattgcacaagagctcaaaataaatcaatcgtcacagtgtccaaatcttgttacctcgtaccagtcattttatgacaatggcgcaatctcactaatcttggagtacatggacggaggatctctagcagactttctcaagtcagttaaagccatccctgactcctatctttctgccatctttagacaagtgcttcaaggattaatctatcttcatcacgataggcatatcatccatcgtgacttgaaaccatccaatctgttgatcaaccacagaggagaagtcaaaataactgactttggtgtgagtaccgttatgacaaacaccgcaggtttagcaaacacatttgtggggacttacaattatatgtctccagagagaatcgttggaaacaagtacggaaataaaagtgatatatggagcttgggtttagtagtactcgaatgtgcaacaggaaagttcccttatgcacctccgaatcaagaggaaacatggaccagtgttttcgagttgatggaagccattgttgaccaaccgccacccgctcttccttcaggaaatttctcccctgagttatcttcattcatctccacatgtttgcagaaggagcccaacagtcgaagctctgcaaaggaactgatggaacatcctttcttgaacaaatacgactactcggggatcaatctcgcgtcctacttcacagatgcaggatcgccacttgcaacacttgggaacctgtctggtacgttctccgtgtaaactacaagggagacataatatcaccatctggttcctgttatcatctgaagaattcttgttttcccttccagtgataaaatgatctttataatacatatagatatattaaattgctgtattttaagattatagatatataaggtacatgagagtgtttatttaaaaaaaatcacttggaattcatgttttgtgatacgttagattggaatccatttgggaaaaggagaatcatctgttcttatgtctcaaattttgacttcg

SEQ ID NO: 93756 - DNA, 1104 bp, Arabidopsis thaliana columbia
ggcggtggaagctgagacatgcaacaatggcgttcgtgtcattctcttcttctccttctctctctcttacactcgcgattcaacattaatttcgttcttcttcatacacatctatagatagcgtcttcagtgtccaaccatgaccggtggggaaatcctccacaagatgaaggaatccgtcaaggagaaagttgggcttggtgcatctgcttcatctgcagattcagggaaaggtaagagcaagatgtcgaagcagatcacacatggttttcatttggtgaaagggaaagcttttcacgagatggaagattatgtggttgccaaattcaaggaagttgatgataatgagcttggtctgtttgctatcttcgatggccatcttagccacgagattccggactacttgtgctcccatttgtttgagaacatcttgaaagagccgaatttctggcaagaacctgagaaagcgataaagaaagcttactatataacggatacaacgattctagacaaggcagatgatttgggaaaaggaggttctactgctgtgactgcgatattgatcaattgccagaagctggtggttgctaatgttggtgactctcccccggctattttcccaaatggtgttccgacccactctcagttgatcatggcccgaacatggagagggatgaaatcgagaacagaggaggattcgtttctaactttcctggggatgttcctcgagttgatggtcaactggctgtggcaagggcatttggtgataagagtttaaagatgcatttgagttcagaaccatatgttacggtggagatagttgatgatgatgcagaatttcttatcctagcaagtgatggactatggaaggtcatgtcaaaccaagaagccgttgactcaatcaagggaataaaagatgcgaaggctgcagcaaagcaccttgcagaggaggctgttgcaaggaaaagctcagacgatatctcagtcgtcgtcgtgaaatttcagtgacattagctttcggttagtcttttcttcttcttttgggcgactctaacactttacttgtaatctgtattataagccttttcaattaagacgttacgc

SEQ ID NO: 93757 - DNA, 510 bp, Arabidopsis thaliana columbia
acgactcactataggaaagctggtacgcctgcaggtaccggtccggaattcccgggtcgacccacgcgtgcgggacatcattaacatttacctaccaaagcctcaaggagaccagatgagaatccgacccagcgcgggccctcggagcttaggccatggcgctttccatggcttcggctcagcctgctgatttcgcgcttaaggagacaagccccgcatcttcggttggttggaaggaaggtcgttggtgggccgtggtattccacaaggacaaaaccgctacgagtccttaggatcttgtccgagagaatgtatttcctttatgtccgcgtggtcaaagctcgtgagcttcctatattggatataacaggaagtgttgatccattcgtcgaggtgagagtgggggaactacaaaggaatcacaagacattttgagaagagacaacatccggaatggaaccaagtgtttgcattcgcgaaagagcgaatgcaagcctcggtgttggaagt

SEQ ID NO: 93758 - DNA, 583 bp, Arabidopsis thaliana columbia
  unsure (1)..(583): unsure at all n locations
gcgtccgaggaatcaatgcttgtttactatttggggatgaggattatttatacatttttcaagaagctgggggatctgcaatgcagaaccgtgcacaaggatccttggtatgtagaagtcaatatggattccgcagctattgtctggccagtatttaacagccttcaagctttctggccaggacttcaggttttagctggagacgttgatccagcaataagaactcacactgccttctttagcgtctggaaacgatatggtttcacccctgagggttttaatcttgctacacttagtgtccagtatgggcaaaagagttatcccttaaggccggaattaatcgagagtacatactggttgtacaaagctaccagagatcccaggtatcttgatgcaggacgtgactttgtggctagtttgcaatacggggcaaaatgtccttgcggttattgtcacatcacagatgtagnactncataaacaagnaggtcacatggggggcttnttcctcggagnaaanccgtaaagnactttttggntnncncttttgacttnncctgatttaacncngggtaaatctcgtt

SEQ ID NO: 93759 - DNA, 976 bp, Arabidopsis thaliana columbia
  unsure (1)..(976): unsure at all n locations
nnnnnnnnaggactatcgactactatagggacaagctcgcacgcctgcaggtaccggtccggatcccccgggccgacccacgcgtccgaaaaacacaactcaaacgattcacgggtttcacttggaatcgtttggttttctcatttccgaaatataaaaagatggccaaagcgccaccgtcaatctctcttctcctcctcctctgcgccgccgtattcctcaccatccccgccgtgatctccgccatcggtgttaactacggaactctcggaaacctcccaccaccgactcaggtggctaactttatcaagacacaaacttcgattgatagcgtcaagatcttcgatgtgaatcccgatatcctacgtgccttcgctggaactggtatctccgtcgttgtcaccgttcctaacggtgatattccggcgttggctaacggaagacaagctcgtcggtgggtttcggttaacattttgccgtttcatcctcagacgaagattaagtatatctcagtcggaaatgagattctgctcaccggagataataacatgatcaataatctcttaccggcgatgaggaatcttaacaacgctttggttcgtgctggtgtcagagatgttaaggttacaaccgcacactcacttaacatcatagcctatgacctgaccggtgcaccaagcagcggtagattcaggccgggttgggacaaaggcatattggctccaatcctagcttaccatcgccgaaccaagtctcctttcatggttaacccgtacccttactttggttttnaccccaaaaacgtcaacttcgcaattttccgaacaccgtacaaggcagtccgtgaccngttcacccgncacgtntacaacaacatgtttnatgcactnatgggctnggcatanttagccatgnaaggttttgggtanggtgntgtaacattgtngttggggnttggttggcatttgttttaagg

SEQ ID NO: 93760 - DNA, 609 bp, Arabidopsis thaliana columbia
  unsure (1)..(609): unsure at all n locations
nnnnnnnnnnnnnnnnnnnntgaggtcaactgcacgcgtacgtaagcttggatcctctagagcagtccagccctctttgttttttcctttatgtaagaactctctagacttaggattaaaatattttagatattttgtagtttggaggctataaatacctcctccccctctcaaatgttgcaatgttgtgaagttgtattcaaagtttaaagcaaagtaataaaagttctatttcctaaaaaactctctcaaaacacttaaacactttctccattacctctaaaagaattttactctaacagttttaaccagacacagagccgtgtgcggtttgaaaatcggagacactggtcagcagatgatgcgtagccttctcataattcacaaaacccatgaaccagaagtcatgaccatccaccgtcgtcaactgaatatacttctcagggggagtctctttcaccaccaccggattcaccggcgcttacattcgccaaaggacaaccaccctgtagtagccccagatctgnccagangggctgggagacaggggcgtcggacaangggccgggatcgaagnagnagtcngaaaggctgcgcgcggggaaagga

SEQ ID NO: 93761 - DNA, 460 bp, Arabidopsis thaliana columbia
caattatccaataattaattatggccaaatccaagttctagagttttctctagaaatatcatcatttccacctccttaaaagatgctagaaattttctagaatcatcttccacctccttaaacataaaaatctagatactctaatagaataatctagataatttgaataatgtaatctagatcttatgtaagaactctctagacttaggattaaaatattttagatattttgtagtttggaggctataaatacctcctccccctctcaaatgttgcaatgttgtgaagttgtattcaagttttaagcaatagtaataaaagttctatttcctaaaaaactctctcaaaacacttaaacacttttctccattaccctctaaaagaatgttaactctaacaagcttttcagggaatctaactacccttcgatccgatatctcatccgagaattatctccatg

SEQ ID NO: 93762 - DNA, 640 bp, Arabidopsis thaliana columbia
gcggtaacctacaaagcggattttctctcaagaaagacgcagagagcgagtttgagatccctgaaatcgtggccacattcaggaagaacaaagagagagtcaacgagatgattaaagagagtcttcaaggcaatacaattggtcagagtttgttgagtttgatggcggaaactgtgtcagagtcaacggagatagaccgatacataatgtctagctggtgcagaaagcctttctacgaggttgacttcggatcgggtagtccggtctgggtgggatacgcgtcacataccatttacgacaacttggtgggtgtcgtgttgattgattcaaaagaaggtgatggtgtagaagcatggataagcttacctgaggaagacatgtccgtgtttgtcgatgaccaagagttgcttgcttatgccgtcctaaatcccccggtcgtggcataaaacaagactctaccaattgctctacgatggatttaattaattattggctttcgcttttcgttgtgatttgaataaagtgaccaatcatttcaagttccatgttaattcagtttatatgttaccttgatcttgtaaaaactctatatggttatttgttttgtcaaaaaaaaaaaaaaaaagggcggccgctctaa

SEQ ID NO: 93763 - DNA, 520 bp, Arabidopsis thaliana columbia
  unsure (1)..(520): unsure at all n locations
ggaatnnnccgggtgcgacgccaacgcgtccccggaaaaaggtggggtnncatgctggaacactttgatctctcatggcttactcggtctatcctaatcgtgctgcgcctcggtaaagaccacctaagggggttgttgacacgatacccaacggtgattgatcaaagcgttatacgcccggacgtttttcgtctttggttgaagccccacttcaactcttagacgcttgactctcctcgtgattcaagcgagagtcttgggagcatataaaaagatgatgacattatagaaagctttgacatcatttcttggagaaatatggcaagttccaccgatgttctctgcgatataagttggaggtgagaagatgtacgagaaggcatgaagaggagaaaccgtagagctttctccaagaagaatttcaattttccagtttgacattgaacgcagtttagatgacagacaaaatctgatattccgggttttatgctctaagggtacatacatatgatctctttgt

SEQ ID NO: 93764 - DNA, 938 bp, Arabidopsis thaliana columbia
catcattatctctttttctaaatctctccaatggcgtctcttcgtagcctttcgatttggttcttcttcttcttcgtcttcgtcttcttaatcaatccctccatttctattcgaacttccttcatcaagcttcccggaagcgacggatctcgctactgcgacagctggagattagccgccgagaccaataacgtcggaacttgggatctgattccgtcaatctgcgtggattccgtcgccgagtatcttaacggagaccagtttttatccgattacagtgtcatcgtcgattatgctctcgcgtttgcgaaatcggttgaaatttccggcgacggcaaggacgtgtggatcttcgatatcgacgagacgcttctcacgaatattgactactacaaggctcatggttacgggtctgaaccgtatgacgataataaatttagtgagtgggtggaacaaggaacagctccagcttttgatgcgagcttgagactgtacaatgctctcaagaaacttggtttcactatcattttgctaaccggtcgggacgagcatcaaaggacttccaccgagacaaatctccgggatgccggttattccggttgggaacgtctcctcttgagaggtccaaatgatcaagggaagtcagctacaaattacaaatccgagcagcgatcgaaactgattgaggaaggtttcaaaatccgtggcaatagcggtgatcaatggagtgacttgcaaggttttgccgtggctgatcgttctttcaaagtcccaaatcccatgtactacattccttgatcactattcatttctgattttatgtattgagtaacaaccacttatgtgttttagacgttaatattacctttgctcctatattacattgatctttagtataaacattaactaatactttcatataaagtataattataatt

SEQ ID NO: 93765 - DNA, 904 bp, Arabidopsis thaliana columbia
  unsure (1)..(904): unsure at all n locations
catttaacgaccctgtgtttcacggctttgtgtgcacatttgcattttgcatattgtttagccagcaattccatgcttgggcacatggaaccaagagcaagcttccacctctcgtggtcgcgttgcaggacatggggttacttgtttcacggagacagcatgcggaacatcatcgagcaccgtataacaacaattactgcatcgtgagtggagcatggaacaatgttctggatgagagtaaggtctttgaggcattggagatggtgttttatttccagcttggggtgagacctaggtcatggagtnagccaaactctgactgggtagaagaaaccgnaatctccaacaaccaagcataaatattttttttacagagtgatacatgtacaagaaaatttcagtaatatactgaaaagatttcttcgtaatttatatgtaacgagtgtgactgtatttaatactgtataaaacaagcaaaacaactgagcatgtaccatttaagtatcagatccgatggatgagtaaaccgaagaaacacagggaaaccagtaccgacactttccgtctttatggccattgtcgatcatggcaaggccctcctctaacaaagtttcgagagcatctataacgcgaccagatgtccatgagaggcgtctttgtacctcttccacaatcacaaagccttggccctgagccaactccaaaatctggttatgggctttgttcagctctgtgggtactgaacggacaagctttttcttgccaatagtgataacctcaaatccgctacccaatacctttagcttgctaatagctcgaagacaatcatcttcagtcacagcttcacggtctttcttccttctctgacgaagatggttgcagagctcttgcaagctgatcaaac

SEQ ID NO: 93766 - DNA, 1026 bp, Arabidopsis thaliana columbia
  unsure (1)..(1026): unsure at all n locations
cttcttcggagaaggctttgtgtctgtatcatctgattatagcgcagagagattaggtgaggtgaaggagaaacatggggagaatctttggagcgaagaataacaaagagcctcctccgtctattcaagatgcctctgatcggatcaataaaagaggagattcagtggaagagaaagttaagaggcttgatgctgagctctgcaaatacaaagatcagatcaaaaggactagacctggtcctgctctagaagctatcaaagctcgtgctatgagagttctcaagcaaaagaagatgtatgaaggacaacgtgacatgctctataatcagacttttaaccttgatcaagtttcatttgctgctgaaggccttaaagatgctcaacaaactatgacagcgctaaaatctgctaacaaggagctgaaaggaatgatgaaaaccgtcaagattcaagatatagataatttgcaagatgatatgatggacttaatggatgagagttctgaaattcaagagacacttggtaggagctacaatgttcctgatgacattgacgaagatgacctcctgggcgagcttgatgctcttgaagctgacatggggaacgagactgaagcagacggagtgccttcttatctccaacccgataaggaaccggatcttaatgatgagctcaacttgccttcagcaccaatggggcatacaggagctccacccggacgagctcaggctgaagatgaatggggattaccagcggtaccacgtgcatcacttcggggctaaatcccatttacacacctctttgtgtgcataaatattcatctccagcgactatgcttttaaagtcttgttactgtatgtaataagtttnttgnttagcaggttcattaaccnnggaattcctcagatttgggctntattatnttatttnattagggaatcttatcgggagncttcaagcaatcggaattcttaatngatggtttangattttttggntgaaaaggtgaangtttttggggttcaa

SEQ ID NO: 93767 - DNA, 441 bp, Arabidopsis thaliana columbia
ctcaatctcttcctctcaaatccaaacaactttgattgatccttcgccaatcgattccacatgaacgcgcagtacttaccgactctgatttggccggtgatgctcacaacgagacaaacaagaagatgaagagtacagaggaagaagaaatcggattctccaatttagacgagaatctagtgtacgaggtgttgaaacacgtcgacgcaaagaccttagctatgtcatcttgcgggagccagatctggcacaaaacggcacaagacgagcggctttgggagctgatctgtactcgtcactggactaacatcggctgcgggcagaaccagctcagatctgttgtgttggcgcttggtggcttccgaagactccactctctgtacctctggcctttctctaaacccaatccgcgtgctaggttcggtaaggacgagcttaaac

SEQ ID NO: 93768 - DNA, 809 bp, Arabidopsis thaliana columbia
attgtccgtctgcaagtaccggtccggaattcccgggtcgacccacgcgtccgcaagaagatgaagagtacagaggaagaagaaatcggattctccaatttagacgagaatctagtgtacgaggtgttgaaacacgtcgacgcaaagaccttagctatgtcatcttgcgtgagcaagatctggcacaaaacggcacaagacgagcggctttgggagctgatctgtactcgtcactggactaacatcggctgcgggcagaaccagctcagatctgttgtgttggcgcttggtggcttccgaagactccactctctttacctctggcctctctctaaacccaatccgcgtgctaggttcggtaaggacgagcttaaactcactctttctcttctctcaattcgatactacgagaagatgagtttcactaagagacctcttccagaatccaaataattgactacaaattattagagtttggttttggagtttgtgtatttggagtttgttgattggtaagtcagatgtgatgttcaatgctggcaataaaatttgttggtatccataagccagactgttagcaacagttgtgttctgtaataatagagggtgatgagaatttttaattactgtaatcggagctgattaaaagtagatttaatatcaaatgtgattcgattttgttgtaatggttctgtcgtgaagttaagttggtccgtagttggacaatgattgtaacaaaatcgattcgtgatccagtttggtaagattaagaactgttagtgaccaataaaatagaaaaaaccgttttt

SEQ ID NO: 93769 - DNA, 2390 bp, Arabidopsis thaliana columbia
tcgaagttccaaattttctcttagcattctctttcgtttctcgtttgcgttgaatcaaagttcgttgcgatggcggatgttcagatggctgatgcagaaacttttgctttccaagctgagattaaccagcttcttagcttgatcatcaacacgttctacagcaacaaagaaatcttcctccgtgagctcatcagtaactcttctgatgctcttgacaagatccgatttgagagcttaacggataagagcaagctcgatggacagcctgaactcttcattagattggttcctgacaaggctaataagacgctctcaattattgacagtggtattggcatgaccaaagcagatttggtgaacaacttgggaaccattgcgaggtctggaacaaaagagtttatggaggcgcttcaagctggagctgatgtaagcatgataggacaatttggtgttggtttctactctgcttatcttgttgcagagaaggttgttgtcactacaaagcacaatgatgatgaacaatacgtttgggagtctcaagctggtggttccttcactgtcactagggatgtggatggggaaccacttggtagaggaactaagatcagcctcttccttaaggacgatcagcttgaatacttggaggagaggagactcaaagacttggtgaagaagcactctgagttcatcagttaccctatctacctttggaccgagaaaaccaccgagaaggagatcagtgacgatgaggatgaagatgaaccaaagaaagaaaacgaaggtgaggttgaagaagttgatgaggagaaggagaaagatggtaaaaagaagaagaaaatcaaggaagtctctcacgagtgggaactcatcaacaagcagaaaccgatctggttgaggaagccagaagagatcactaaggaagagtatgctgctttctacaagagcttgaccaatgactgggaagatcacttagccgtgaaacacttctcagtggagggtcagctagaattcaaggccattctctttgtaccaaagagagctccgtttgatctctttgacacgaggaagaagttgaacaacatcaagctttatgtcaggagggtgttcattatggacaactgtgaagagctaatcccagagtacctcagctttgtgaaaggtgttgttgactctgatgacttgccactcaacatctctcgtgagacgcttcaacagaacaagatccttaaggtgatcaggaagaatctagtgaagaagtgcattgagatgttcaacgagattgctgagaacaaagaggactacaccaaattctatgaggctttctccaagaatctcaaattgggtatccatgaagacagtcagaacaggggaaagattgctgatcttctacggtaccactccacaaagagtggtgatgaaatgacgagcttcaaagattacgtcacaaggatgaaggaaggtcaaaaggacattttctacatcactggtgaaagcaaaaaggcggtggagaattctcccttcttggagaggctgaagaagagaggatacgaggtactttacatggtggatgcgattgacgaatacgctgttggacaattgaaggagtatgacggtaagaaacttgtttctgcgactaaagaaggcctcaaacttgaagatgagaccgaagaagagaagaaaaagagggaagagaagaagaagtccttcgagaatctgtgcaagacgattaaggaaattctcggggacaaggttgagaaggttgtggtctcagacaggattgtggactctccctgctgtctagtaactggtgaatatggatggactgcaaatatggagaggattatgaaggcacaggcgttgagagatagcagcatgagtggttacatgtcgagcaagaaaacaatggagatcaaccccgacaacggtataatggaggagctcaggaagagagctgaagcagacaagaatgacaagtctgttaaagatcttgtcatgttgctgtatgagacagctttgttgacgtctggattcagtcttgatgaaccgaacacttttgctgctaggattcacaggatgttgaagttgggtctgagtattgatgaggatgagaacgttgaggaagatggtgatatgcctgagttggaggaggacgctgctgaagagagcaagatggaggaagtcgactaagagatgaagaaattgctcttatggttctgaaaacttctaatatgtcgagttgttctgagttttaagattttccaaaatgtctgtcttttttttttatctttagagttacttgaacattgtgactacttctagggttgggtttgtgtcaggtctgttatatcgtgtggtgggtctgtctaatactgattcgagtttttgttatt

SEQ ID NO: 93770 - DNA, 460 bp, Arabidopsis thaliana columbia
ttcgttttctcttaaatacttaattcttttttttcccaaacagtttctctgaaactaagaaactctaacagagaatccggatgcttttctctgattcttctactctttcctaatttaccgattttctcgggaatccaaaatcccgtttctctttttctcgagttaaaaaactttcgatctgaagtcaattcagattcttcttggaagctcaaagaagaagaagagagaagagagagagactagtgatttggtttagttcgttggatcagaaaggtctctgctttgatctttgtagtacacgtggcgaaaagggtcggaatttggagttgtgttgatgatgttccaagtctcagatttcttgtattaacattctcttgcctttctccaatgtctttgtcttgattctcagaaaaagatcttcagatccggttactctgaggggaaagagacgaatagtttt

SEQ ID NO: 93771 - DNA, 937 bp, Arabidopsis thaliana columbia
actatagaagactatgacgtcgcacgcacgcgtacgtaagcttggatcctctagagcggccgccctgtttttttttttcttttgaagtaaaacgacacggcgtttcattcccacatcaaaaaacgacagtgcttgtatttggacccacggaaggtccaataataaatgggcttttttacgagcaaacaaacaaactaattagaaaacaacagcacgtgaagtcgagaggctattctcgtctttgccgttcccggttaagcatcacctcgaccattagatcattccatgaatcaatcggaccgggtaagcaccaatgaagacaatcgttctgaacctgattcagctccttgttcttcagcccagcgaaaggatttggataccggtacggtcccggatgtccatctggtcggagaagcgacattgaagttgtgtcaagtaatacaatgtttgaattggaaccttcttgttgtgtagtagtagtcttatagaactcttcaagctcgatatcacgcatcgatacatcctcgctcttcatctctccttcgctgccttccgtaaacggcattgttcggttacagaaaccaccagagtcccactctccattctcgaaatgatcaggtgttgttgttctgaagagaacctgagctttatggttcggttcagcgacaaagtctaaaaccaaacgaagaacctttcggtacgagtatagataaccgagttcggtcatattgttcttcccttggcagtaatggcatccggttacggtgttgttttcatggaagattgttgttttgaggaaccattttccaccggagatgacaacgtagtcgaaattgatgtactgatcagtccatttctggtctagcttgtcgaggtgtactcgaatgtctgagaaaggaactccgttctcaaaggtttcagcttttacaaggaaagg

SEQ ID NO: 93772 - DNA, 542 bp, Arabidopsis thaliana columbia
  unsure (1)..(542): unsure at all n locations
cacacgcgtccgcccacgcgtccgctaaatttcgttgtacagagaagaagcaaaagagagaaacatctgacccggaatctgacctgaaaacccggaagaatcgaaaaatggggaaagatggtctgagcgacgatcaggtctcgtcgatgaaggaagccttcatgctcttcgacaccgatggcgacggcaaaatcgcaccgtcagagctcgggatcctcatgcgatctctcggcggaaacccgacccaagcccagctgaaatccataatcgcatccgagaatctctcttcaccgtttgatttcaacagattcctcgatctcatggcgaaacatctgaagacggaacctttcgatcgccagctccgtgacgcattcaaagtgctcgataaggaaggtaccgggttcgttgctgtggcggatctgaggcatattctgaccagtatcggagagaagctggagcctaatgagttcgatgagtggtcaaaggaggtggatttttggtnccgatggnaaaatnccgganttaagntttttttttttttt

SEQ ID NO: 93773 - DNA, 842 bp, Arabidopsis thaliana columbia
  unsure (1)..(842): unsure at all n locations
nnnnnnnnnnnnnnnnnnnnnnnnnnnnnnnnnnnnnnnnnnnnnnnnnnnnnnnnnnnnnnnnnnnnnnnnnnnnnnnnnnnnccacgcgtccgatttgagggcgcttctcagttgagggaggagcttagacagatgagtgctccagatcaggaggctgagcggaatgacaaagaaaaattgttgaagctcaagactctaggaaatattcgtttgattggtgagcttttgaagcagaagatggtcccagaaaagattgttcatcacattgttcaggagcttctgggggccgatgagaaagtttgtccagccgaggaaaatgtcgaagctatttgtcatttcttcaaaactattggcaaacaacttgacggaaacgtgaagtcaaaacggattaatgatgtatatttcaaacgcctacaggctctgtcaaagaatcctcagttggaactgcgtctgagattcatggttcagaatatcatcgacatgcgctccaatggctgggttccaaggcgggaagagatgaaagcaagaactataaccgaaatacatactgaggcagagaagaatcttggtctccgaccaggtgccactgcaaatatgagaaggggtatggtttctagtggtgggcctgtgagccctggccctgtctaccctggtgggcgacctggtgcgggtggcttgatgcctggtatgcctgggacgcgaaggatgcctgggatgcccggagtggacaatgataactgggaggtaccccggacaagatcaatgtttagacgcgatgggccaggacctctacattctccagcagtgagcaagtcggtctcaatgaacacgaggctttt

SEQ ID NO: 93774 - DNA, 543 bp, Arabidopsis thaliana columbia
gcgtccgattaattcacaaaattttgctatagtgatcatttatataacctttgtaagattcctaaattgttcaaacggggacattaaaatagacaatagtacttctgattggatacatgtcataatcatggaatgacataaagtaaagttaaagtacggtatgaaacaattctagagatcaaaagtttcataatgaaataagctatcatggaatgacataaagtaaagttaaagtacggtatgaaacaattctagaggtcaaaagtttcataatgagtaagctactacatccatagttatttgcatgataaatctttgacttgtgtttttaggccaaatcttgcatttttaagttttatttagcattatatccatagttatatatctgcattaagaacgtcgtgacgccattatgcggaacaccaatcgaaaccacatcacaaactgcttctgtgcacaaaatctatcttttaaacctgatcaaaatccttccattcttctacgcagtctgtggacacctaaaaggccttaaacttaaatata

SEQ ID NO: 93775 - DNA, 528 bp, Arabidopsis thaliana columbia
  unsure (1)..(528): unsure at all n locations
cacaattctatccaaaatcaacccaaaaaaagaaagaaatatgtgggatgaaactgtagccggacctaaaccggagcatggccttggccgcctccgcaataagatcaccacccaaccccttgacatcaaaggtatttatttttctttgtcaaccataactccgtaataaacttgcatatacagatctttgtagaaacgtatgatctcataattatatcatgtgatggtttttggaaggtgtaggagaagggagcagtagtaaaactgtggcggcggtggccgggagtcctggaactccgacgacgccaggatcggcgcgtaaggaaaacgtgtggagaagtgtgtttcatccaggaagtaacatcgccactagaggaatgggcacaaacctcttcgacaagccttctcacccaaattttccaccgtttacggttgggtcgnctcagtttctgtattatnttttnccggncggtnngataantctagntngttnaccgttttntntccgangttttcagggcgcnttgg

SEQ ID NO: 93776 - DNA, 576 bp, Arabidopsis thaliana columbia
  unsure (1)..(576): unsure at all n locations
cacaattgtatccaaaatcaacccaaaaaaagaaagaaatatgtgggatgaaactgtagccggacctaaaccggagcatggccttggccgcctccgcaataagatcaccacccaaccccttgacatcaaaggtgtaggagaagggagcagtagtaaaactgtggcggcggtggccgggagtcctggaactccgacgacgccaggttcggcgcgtaaggaaaacgtgtggagaagtgtgtttcatccaggaagtaacatcgccactagaggaattgggcacaaacctcttttcgacaagcctttttaacccaaacttttcccacccgtctacgggttgggtttttccaggggccggccctttggggcaaagcacccgttttagcccgagagggttaggagttgccattggggatttgttgttaaaataaattattggtccttttacggccaccgggttttatggttccttgttttcggcctnattttttggctttnttgtgccaaatctttttaattttgntttcaatgccggtttgngttttttnaggntncccnttggtttccnccnannttggg

SEQ ID NO: 93777 - DNA, 782 bp, Arabidopsis thaliana columbia
  unsure (1)..(782): unsure at all n locations
atgatcctnnnnnnnnnnnnnnnnnnnnnnnnnnnnnnnactctagggttagttggtacgcctgcaggtaccggtccggaattccacgcgtgcgcacaattctatccaaaatcaacccaaaaaaagaaagaaatatgtgggatgaaactgtagccggacctaaaccggagcatggccttggccgcctccgcaataagatcaccacccaaccccttgacatcaaaggtgtaggagaagggagcagtagtaaaactgtggcggcggtggccgggagtcctggaactccgacgacgccaggttcggcgcgtaaggaaaacgtgtggagaagtgtgtttcatccaggaagtaacatcgccactagaggaatgggcacaaacctcttcgacaagccttctcacccaaactctcccaccgtctacgattggctatacagcgacgacactaggagcaagcaccgttgagccgagagggtagagtgacatgagaatgatgtaaaataattatgttctttacgccacgtgtttatgttctgtttcgtctattttggctatatgtgcaatcttttatttgcttcatgtcgtttgtgtttgttagtgaccgttgatttccaccatctgggttagtttttagcttttaacggtggcgatgcgtcttcagtgtcttgtaatatttttactgttcggtaatattacaattagcttctcaaaaaaaaaaaaaaaaaagggcgggcggtctagaggaaccaagcttacgtacgcctgcatgccacgtcatagcttttt

SEQ ID NO: 93778 - DNA, 534 bp, Arabidopsis thaliana columbia
gaaagatatagagaatttgttgtctttttttctttttcttttgtggggtatttgtttttttttttctccttaaaaagttttttttttttgtgtgtatgaaaaaaaaagctttgaaattctctctcgacaatggtgtcggaccaggatctagcgaaaggagtcgagactttgcttcgacaatccgaccctagctctctcacatcgttaagcagtattgttcagcagcttgaagctaagttagggttagacctcacggagaagacgactttcatcagagatcagatcaatatcctcctccgtgctcaccaaaacccttctgcctccgtcgcctccgcttcatccgtacaacaatctcaccctcctcctccgccgtcttctcaccagcagcagaatttgcattccggcgtcaatgttcctccgatggcgaaagggcttttcacacttagccatccttcgcaattctctggttcttctcaatcacaacaatatcctttacatttcgctcttcagcctccttatcactcttatgaccta

SEQ ID NO: 93779 - DNA, 1091 bp, Arabidopsis thaliana columbia
ctcttcatcttctaagaaagaaacaaagaaagacttcacattttaccattatttgctctgagctcagtaggagagttcaagaaacaatggcaaagatgcaattatcaatctttatcgctgtcgttgcgcttatcgtctgctctgcatctgctaaaaccgcaagccctccagctccagtgctgccaccgacaccagctccagcaccagccccggaaaatgtgaatctcaccgagcttttaagtgtagctggtccgttccacacattcctcgactaccttctctcgactggagtcattgagactttccaaaaccaagctaacaacactgaggaaggcatcacaatctttgtccctaaagatgatgctttcaaagctcagaagaatcctcctttgtcaaatctcacaaaggatcagcttaagcagcttgttctcttccatgctctgcctcattactattcgctttcggaattcaagaacttgagccaatctggtccagtgagcacctttgctggtggtcaatactccttgaaattcactgatgtttctggcacggttaggattgattctttatggaccaggactaaagtcagcagcagtgttttctccactgaccctgttgcggtttaccaagtgaaccgcgtgcttctacccgaagcaatctttggtactgatgtccctccaatgcctgctccagctcctgctcctatcgttagtgctccttcggattctccttcagttgctgattctgaaggagcttcttcaccaaagtcctcacacaagaactccggacaaaagctgctacttgcaccaatctccatggttatttccggtttggtggcattgttcttgtgatcagatggttttgcagattgagttatgtttttaagttacaatgtgaaagattgtattacatcatttgaattgtctttttgatttttgaaacccattttttattatacatttttatcattattattgtttgtcattacgattgttgtgaattgaaaatgttcatccaaaaaaaaaaaaaaaaagggcggccgctctagaggatccaagcttacgtacgcgtgcatgcgacgtgatagtgtt

SEQ ID NO: 93780 - DNA, 512 bp, Arabidopsis thaliana columbia
  unsure (1)..(512): unsure at all n locations
cggacgcgtgggctcgaagcgagtgagatatggcaacaaagaccgatgattttgcaccatttccagttaaagatcagcttcccggagtcgaattttgtgtctcgagctctccaaattggccggaaggaatagttcttgggtttcaacattacattgtaatgcttggaactactgtaatcataccttccatactcgtccctctaatgggtggtggcgacgtggagaaagcggaagtcataaacacagtattgttcgtgtcaggaataaacacgttgttgcagagtttgttcggaagtcgacttcctgtggtcatgggaagcttcttatgcttacctcatcccggctccttacatcactttctcttatcgattcacttactatctccatcctcatctcagatttgaagagactatgagagctattcaaggagctcttatcatngcttcaataagtcatatgataatgggttcttcggtttgtggagaatcttggtcaggttctttctctctttc

SEQ ID NO: 93781 - DNA, 561 bp, Arabidopsis thaliana columbia
  unsure (1)..(561): unsure at all n locations
tatagggcgatttgggtcccgacccccccctcgaggtcgacggtatcgataagcttgttatcgaattcgcggccgcgaaatttgtcgtccgccatgaagattcgagcttcgatgtcgactacaacactgaagatggtcttgaggttttacgatttctaatcttctccctcactttagttcctcctgaagaacaaaagatcgttgcggaagatgataatcgattggtgtctgatgagtctgatctcgcttctttatctgagagacttcgattagtttcagttggagaagattctgtagagaactcagatgcggaaatgttgaaatcagatgaagaattggctcgaatgttgcaggcagaagaagatgctattatgtttcaacagtttgtcgctgcacgagataacggcgaatttcgaaggggaattaggccttatgttagtcaagttctcatgtatgaagatccagtccgccaagatgctgctcgaaagactgttcctaaagacgagcttggggagaaagcattggtttctctggccaaggaagggaatnttgagccatcga

SEQ ID NO: 93782 - DNA, 550 bp, Arabidopsis thaliana columbia
cgcgcccgggttgcgtgacggctgaactgctgcttggactggttggtgcactatttttgctttagctatgtgcttggtattcgatttctgcaccctcttactcatttttgctctcgcggacttgttttacagcctctgtttcctggcgaaagtggagtcgatcaacttgttgaaatcataaaggtagtatttttgctatcaattcttttagggttagttgtatttacaaagaaaatgacatctttagagctggcactgactaatagtttctcactgctgattatatttttttcataaaactttaccaccatttctgtagtaggactcgtacattctctcttcatggtttgctaatcgtcatgcaggttttgggtacaccaacaagggaggagatcaaatgcatgaatccaaactacacagaatttaaattttctcagataaaacctcatgcttggcacacggtgtaccgactagagcatcaattatcacctaatagggagctctctatcgatatatgaccaagcttgtctcggttaatcgaggtgattga

SEQ ID NO: 93783 - DNA, 975 bp, Arabidopsis thaliana columbia
  unsure (1)..(975): unsure at all n locations
tgcccggggccgccacgcccgcggtcctaccctgcccacgaccccgcgtccgcatctaagtcgttccaatgattcccctttaaacccgatttgcagcggtaatcggttcttagtatgaaggtctacagggtcagtgaaaacacattactgtcacctgcagatctagggtagttatccaaccgtccaagttatgtaacaaccctgaattttatactctgtaaacgttaagatctgatttggagtataggatctggctcagctatggatcgggtattcatctgtggaccattgcttatatagtctgagaggattacactgatttaatcagggacagtatgatggataagctggagatattggagcttaggtgttagcatttggagttttacttggggaggtctcctttccctgtgagtagacaaggtgattgggctagtcttatgtgtgccatttgtatgtctcagcctccagaagctccagcgaatgcgtcgccggagtttcggcattttatctcgtgttgcttgcagagagaaccggggaaaaggaggagtgctatgcagctattgcagcatcctttcatattaagagcaagtccgagccagaacaggtctcctcagaatctacatcaactcttgcctcctcctcgtcctctgtcctcgtcttcttctccaaccacatagcgttttctctcttcttcccttcatcaactcatattttttgtgttactcctgttcttgagtctgttgtccaattttttgctaatcatggagggtctctgaattttacatttattagggagtaaaaaactcgagagagggtttttgggattattgttttctagaaaggtaaaagagaacaatgataatattcttatgctaaaaaaaaaaaaaaagagggcagccgctttagaggatccaagcttacgtacgcgtggatgcgacgtcaaagtcttgtataggtcacnnnnnnagattc

SEQ ID NO: 93784 - DNA, 1664 bp, Arabidopsis thaliana columbia
cccacgcgtccgcggacgcgtgggttcgatgaagcttcattctcctcttgatttgatctctttgaaaaacgacgaatcaaacaaaccctagagtcaagtcaatcatgatgataaatacaaacctggaagataaagaatcaaccttgtgaaaaaaaaaaaaaacttttgattccctcttcttctaaaagccatgaaaccgattcaatctccttctggagtagcttcacctatgaagaaccgtttacgcaaacgtcctgacctaagcttaccactcccacaccgcgacgtcgctctcgccgtacctctccctctcccacctccttcttcctcttcatccgctccggcgtcttcctccgcgatctcaaccaacatctccgccgctaaaagcttatccgagctagaacgagtgaaccgaatcggaagcggagccggaggaacggtttacaaagtaatccacactccgacgtcacgtcctttcgctctcaaagtgatttacggaaaccacgaagataccgtgagacgtcagatctgtagagagatcgagatcttaagaagtgttgatcatccaaacgttgtgaaatgtcacgatatgtttgatcataacggtgagatccaggttttgcttgagtttatggatcaaggatctcttgaaggagctcatatatggcaagaacaggaattagctgatctctctcgtcagattcttagtggattagcttatcttcatcgtcggcatatcgttcatcgtgatatcaaaccttcgggatcttcttataaactcagctaaaaatgtgaaaattgctgattttggtgtgagtaggatcttggcacaaacaatggatccttgtaattcatctgttggtactattgcttatatgagtcctgagaggattaatactgatttgaatcatggtcgttacgatggttatgctggagatgtttggagtttaggtgttagtatcttggagttttacttggggaggtttccttttgctgtgagtagacaaggtgattgggctagtcttatgtgtgctatttgtatgtctcagccacctgaagctccggctacggcgtctcaggagtttcgtcactttgtttcttgttgtttacagagtgatcctcctaagagatggtcagctcaacagcttttgcagcatcctttcatacttaaagctaccggtggtcctaatctccgtcaaatgttgccgccgcctcgtcctcttccttctgcctcttagtgtttctaccattttcgtctttcttgtttttcaatttttcgtagtttttcctgacatttttccataagttttgcataccccaagcaaagataatgagaagagtagaagaacaatgtggtttgtgattggggtatgagtcgtcaggaagaaactcagtttgtggttagggtttattgagtctttatcttatgctgctaagcttgatttgtcttatgggtaatgaagaatgttttgctagaaatggaaacaaaaaaatagacaagaagaattcttatggtttaagagtgattttagctggatttgcttatattattgtttatataaggaagtaaatggaggatctttcattggataattctcattaataaagcttcttcctttaattctctagaggatccaagcttacgtacgcgtgcgtgcgacgtc

SEQ ID NO: 93785 - DNA, 1613 bp, Arabidopsis thaliana columbia
gttcccttttcagtgtcctttcaatttctttcgacgaaacttcatttctcaatttcttttgattttgatcgcttcgaagaacgaatcaatttaagcctgccacaaacaaaccctagaatacgacaacgcacgacgacgaagaagtcgaagaagactactactataaacgacgaagatcattacttcaatcttcaatcgagcttttaaattttcagatcgtagaagaaaatcgaacttttgattccaaaagcgatgagaccgattcaatcgcctccaggagtttccgttccggtgaaaagccgtccccgtcgccgtcctgatcttaccttaccgcttcctcaacgcgatgtttctctcgctgtacctcttcctctcccacctacttccggtggttccggtggctctagtggatctgcgccgtcttctggtggttcggcgtcttcaacgaacactaacagctccatagaagcgaagaactattcggatttagtgagaggtaaccgtatcggaagcggagcaggtggaacggtatacaaagtgattcaccgtccgagttctcgtctatatgcacttaaggtgatatacggtaaccacgaggagactgtgagacgtcagatctgtagagagatcgagattttacgagatgtgaatcatccaaacgttgtgaaatgtcacgagatgtttgatcagaacggtgagatccaggttttgcttgagtttatggataaaggttctttagaaggtgctcatgtgtggaaagagcaacaattagctgatctatctcgtcagattcttagtggtttagcttatctccatagccgtcacatagttcatcgtgatatcaaaccatcgaatcttttgataaactctgctaaaaacgttaagattgctgattttggagttagtaggatcttggctcagactatggatccgtgtaattcatctgttggaaccattgcttatatgagtcctgagaggattaacactgatttgaatcagggaaagtatgatggttatgctggagatatttggagcttaggtgttagcattttggagttttacttggggaggtttcctttccctgtgagtagacaaggtgattgggctagtcttatgtgtgccatttgtatgtctcagcctccagaagctccagcgactgcgtcgccggagtttcggcattttatctcgtgttgcttgcagagagaaccggggaaaaggaggagtgctatgcagctattgcagcatcctttcatattaagagcaagtccgagccagaacaggtctcctcagaatctacatcaactcttgcctcctcctcgtcctctgtcctcgtcttcttctccaaccacatagcgttttctctcttcttcccttcatcaactcatattttttgtgttactactgttcttgagtctgttgtccaattttttgctaatcatggagggtctctgaattttacatttattagggagtaaaaaactcgagagagggtttttgggattattgttttctagaaaggtaaaagagaacaatgataatattcttatgcttatgatggtgcatgtatccccaatgtagctttgttgaattttcataaaagtttttgccaaaaa

SEQ ID NO: 93786 - DNA, 624 bp, Arabidopsis thaliana columbia
gcaaggaggatcatcgggtattggttatggtttgaagtatcaggccagatgtatatcggatggtaaagcagatagagatcacactagcttcctcactggaaccctaagcttgaaagaagaaaatgaggttcatttgcttcgtttgtcttctggtggatctgagctgttatgtgagggattgttctcgcatcctaatgaaatttgggacctttgcttcttccccttttggatcaacggcattttctctactgtcttctccactggcgactcatatggagcagcaatatggcagattcctgagccatatggtcaatcgaattcttcaacattggaatgtgttgcttcccttgatgcacatgttggtaagattaattgcgttctttggtgtccctctggaaattctgacaagttaatcagcatggatgaacaaaatcttgtcttctggagtttagactcttcaaagaaaagtgcggaggttttatctaaggagtcagctggtatgcgtcattctttatctggtggagcatggaatccacatgatgtgaattctgttgcagcaacttctgaatcatctatccagttttgggacttacgtactatgaagaagaataattcaattgaacg

SEQ ID NO: 93787 - DNA, 550 bp, Arabidopsis thaliana columbia
atcacgttcttcttctcttttaaataaccctaaatcctcaccaaacccaaaccctcactcactattttcacattctcttctctctcgatatcatctaaatctctctcgatctcaatttcgcaaaatggctgacaagaagatcagaatcggaatcaacggtttcggaagaatcggtcgtttggttgctagagttgttcttcagagggatgatgttgagctcgtcgctgttaacgatcctttcatcaccaccgagtacatgacatacatgtttaagtatgacagtgttcacggtcagtggaagcaccatgagcttaaggtgaaggatgacaaaactcttctcttcggtgagaagccagtcactgttttcggcatcaggaaccctgaggacatcccatggggtgaggctggagctgactttgttgctgagtccactgctgtcttcatctgacaaagacaggttttcttcttactttacttgttgttcctataatctgattccttttttttttttattttatatttcttccattttttacttttttttctccaa

SEQ ID NO: 93788 - DNA, 442 bp, Arabidopsis thaliana columbia
  unsure (1)..(442): unsure at all n locations
gttcttctctcttttaaataacctcttcacggttcccttctcactcacctatctcacgctagaatctctctctgccaatctcatcttcaacctctctctaactctcgttttcgattctacaatggctgacaagaagattaggatcggaatcaacggattccgaagaattggtcgtttggttgctagagttgttctccagagggacgatgttgagctcgtcgctgtcaacgaccccttcatcactactgagtacatgacctacatgttcaagtacgacagtgttcacggtcaatggaaacacaatgaactcaagatcaaggatgagaagacccttctcttcggtgagaagccagtcactgttttcggcatcaggaaccctgaggatatcccatgggccgaggctggagctgactacgtntgtgagtctactggtgtcttcact

SEQ ID NO: 93789 - DNA, 852 bp, Arabidopsis thaliana columbia
  unsure (1)..(852): unsure at all n locations
cggacgctaaaatctctctctgccaatctcatcttcaacctctctctaactctcgttttcgattctacaatggctgacaagaagattaggatcggaatcaacggattcggaagaattggtcgtttggttgctagagttgttctccagagggacgatgttgagctcgtcgctgtcaacgaccccttcatcactactgagtacatgacctacatgttcaagtacgacagtgttcacggtcaatggaaacacaatgaactcaagatcaaggatgagaagacccttctcttcggtgagaagccagtcactgttttcggcatcaggaaccctgaggatatcccatgggccgaggctggagctgactacgttgttgagtctactggtgtcttcactgacaaagacaaggctgcagctcacttgaagggtggtgccaagaaggttgttatctctgcccccagcaaagacgctccaatgtttgttgttggggtcaacgggcccgggttcaagtccgaccttgacattgtctccaacgctagctgcaccactaactgccttgctccccttgccaaggttatcaatgacagatttggaattgttgagggtcttatgactacagtccactcaatcactgctactcagaagactgttgatgggncttcaaatgaaggactggagaggtggaagagctgcttcatttcaacaattattcccagncagcactggagctgnccaaggcttgttcgggaaaaggnggnttncnanctcnttaaacgggaaaagtttaacttggaatgnctttttccngggtcccaanccngttgaatgtgctnaanttgnttnncccttaactttnaa

SEQ ID NO: 93790 - DNA, 646 bp, Arabidopsis thaliana columbia
  unsure (1)..(646): unsure at all n locations
nnatgatctnnnnnnnnnnnnnnnnnnnnnnnnnnnnnnnnnnnnnnnnnnnnnnnnnnnnnnnnnnnnnnnnnnnnnnnnnccacgcgtccgcccacgcgtccgctaaatctctctcgatctcaatttcgcaaaatggctgacaagaagatcagaatcggaatcaacggtttcggaagaatcggtcgtttggttgctagagttgttcttcagagggatgatgttgagctcgtcgctgttaacgatcctttcatcaccaccgagtacatgacatacatgtttaagtatgacagtgttcacggtcagtggaagcaccatgagcttaaggtgaaggatgacaaaactcttctcttcggtgagaagccagtcactgttttcggcatcaggaaccctgaggacatcccatggggtgaggctggagctgactttgttgttgagtctactggtgtcttcactgacaaagacaaggctgctgctcacttgaagggtggtgctaaaaaggttgtaattttttccccccaagcaaaagatttggcccctttttcgttttttgccttcaacgggccccgggtcaaanntttcccctttnnaatttttnccccgnttngttancccntaanttcntttcncctttnccaggnttntt

SEQ ID NO: 93791 - DNA, 852 bp, Arabidopsis thaliana columbia
  unsure (1)..(852): unsure at all n locations
gctccctacgactcactatagggaaagctggcacgcctgcaggtaccggtccggaattcccgggtcgacccacgcgtgcgctaaaatctctctctgccaatctcatcttcaacctctctctaactctcgttttcgattctacaatggctgacaagaagattaggatcggaatcaacggattcggaagaattggtcgtttggttgctagagttgttctccagagggacgatgttgagctcgtcgctgtcaacgaccccttcatcactactgagtacatgacctacatgttcaagtacgacagtgttcacggtcaatggaaacacaatgaactcaagatcaaggatgagaagacccttctcttcggtgagaagccagtcactgttttcggcatcaggaaccctgaggatatcccatgggccgaggctggagctgactacgttgttgagtctactggtgtcttcactgacaaagacaaggctgcagctcacttgaagggtggtgccaagaaggttgttatctctgcccccagcaaagaccctccaatgtttgttgttggngtcaacgagcacgnatacaagtccgaccttgacattgtctccaacgntagctgcaccactaactgccttgntccccttgccaaggttatcaatgncagatttggaaattgttgagggcttatgantacagtccactcaaatactgctactcagaagnctttttatgggcttaatgaagnctnnngaggtgaaggnttctnatnaacattattccagagactggggttcaaggcttcggaagggttcactttaacggaagtgctgaatttttccggccaccgttgtgcnaantttc

SEQ ID NO: 93792 - DNA, 958 bp, Arabidopsis thaliana columbia
gcctgcaggtaccggtccggaattcccgggttgacccacgcgtccgaaagcacgagtacaagtctgaccttgacattgtttccaacgctagctgcaccactaactgccttgctccccttgccaaggttatcaatgacaggtttggcattgttgagggtctcatgaccactgtccactctatcactgctactcagaagactgttgatgggccttcaatgaaggactggagaggtggaagagctgcttcattcaacattattcccagcagcactggagctgccaaggctgtcggaaaggtgcttccagctcttaacggaaagttgactggaatgtctttccgtgtcccaaccgttgatgtctcagttgttgaccttactgtcagactcgagaaagctgctacctacgatgaaatcaaaaaggctatcaaggaggaatccgaaggcaaactcaagggaatccttggatacaccgaggatgatgttgtctcaactgacttcgttggcgacaacaggtcgagcatttttgacgccaaggctggaattgcattgagcgacaagtttgtgaaattggtgtcatggtacgacaacgaatggggttacagttcccgtgtggtcgacttgatcgtccacatgtcaaaggcctaagctaagaagcagatctcgaatgatagggagtggaaagtcatctgttcatccccttttatggtctgaatttgtcgttttcgaataaaatttctttgaacttggaactttttttttttttggttttcttaattctcattcatgtgaggtgatgggagtttgtagaccgatgttttactggaagccctttgtttttggcttttgatatattgagttaacgttatggttttcaaataaaaaaaaaaaaagggcggccgctctagaggatccaagcttacgtacgcgtgcatgcgacgtaatagctggtcggtagtgta

SEQ ID NO: 93793 - DNA, 1480 bp, Arabidopsis thaliana columbia
  unsure (1)..(1480): unsure at all n locations
nnnnnnnnnnnnnnnnnnnnnnnnnntggccgtcgttgtaccggtccggaattcccggctcgcgcgcccattttcacattctcttctctctcgatatcatctaaatctctctcgatctcaatttcgcaaaatggctgacaagaagatcagaatcggaatcaacggtttcggaagaatcggtcgtttggttgctagagttgttcttcagagggatgatgttgagctcgtcgctgttaacgatcctttcatcaccaccgagtacatgacatacatgtttaagtatgacagtgttcacggtcagtggaagcaccatgagcttaaggtgaaggatgacaaaactcttctcttcggtgagaagccagtcactgttttcggcatcaggaaccctgaggacatcccatggggtgaggctggagctgactttgttgttgagtctactggtgtcttcactgacaaagacaaggctgctgctcacttgaagggtggtgctaaaaaggttgtaatctctgccccaagcaaagatgcgcccatgttcgttgttggtgtcaacgagcacgggtacaagtttgaccttgacattgtttccaacgctagttgcaccactaactgccttgctcctcttgccaaggttattaatgacaggtttggcattgttgagggactcatgaccactgtccactctatcactgctactcagaagacagttgatggtccatcaatgaaggactggagaggtggaagagctgcttccttcaacattattcctagcagcactggtgccgccaaggctgttgggaaagtgttgccatccctcaatggaaaattgaccggaatgtctttccgtgttccaaccgttgatgtctcagttgttgatctcaccgttagacttgagaaagctgcaacatacgacgaaatcaagaaggccatcaaggaggaatctgaaggcaaaatgaagggaattttgggatacactgaggatgatgttgtgtctaccgactttgttggtgacaacaggtcaagcattttcgatgccaaggctgggattgcattgagcgacaagtttgtgaagttggtgtcatggtacgacaacgaatggggttacagttctcgtgtcgttgaccttatcgttcacatgtcaaaggcctaagcttacaccggcgagagtttgtgtgtggttgagttcgtactgttctgaataaaaaaaaggagaaaagaaaactcgagttgttatgttttttcactgattccatgcgcagtcatgagagtttgtagcttttgtctttttgctttctcttaatgtttccctgctttatttactgaaaccattggtttggttttttatgttaattaagtttttagttcattcctaaaaaaaaaaaagaaannnnnnnnnnnnnnnnnnnnnnnnnnnnnnnnnnnnnnnnnnnnnnnnnnnnnnnnnnnnnnnnnnnnnnnnnnnnnnnnnnnnnnnnnnnnnnnn

SEQ ID NO: 93794 - DNA, 620 bp, Arabidopsis thaliana columbia
  unsure (1)..(620): unsure at all n locations
ttnaaccccgagtaccggnncaatacacncntccanagaatattgaanccttctttttggnaaagtncagttncnttaaaattcctagggttccggtttgaacacagtctgaacaagatgtttccgagatgtcccctctacagaggaacatcccacggactgtgtcggggctaataccggccgtggcattggaataggatccgagagaggaacggaggcggagagaggagagtacggtttcgcggtttgtctcgtatgtgctggtttgtgtaaagttgtcggagaattggttgcagaaggtgctcatatggatgtggtcagattcggatatggttaggttagtagagaagagaagagataaaagagaaagaaagcaaaagagagaagagagactttggatcattgttgccattatttgttcttcttgtttatgaattatgactgaaagatgatatttatagtagacagatttgtaaaaagatgcattatatatactctttaaataggaaaaataatttattactataaggtgattgttgaggccatgttgttctataaaatattaactttgtgattctgtaatattgaaaaccagatgaaatacttgtttaggaataata

SEQ ID NO: 93795 - DNA, 467 bp, Arabidopsis thaliana columbia
gtagtgatgtttcactgtgcgtttcagagtgtgaagaagtcgattcaggcttatgtctctcgtgtgggaggttctactgttgaggttaggttacctttccctgtaaattcgaacgaagagattatctccaagtttagagaaggactagagaaaggtagagcgaatggtagaacggttaggttagctatcattgatcatataacgtcgatgccgtgtgttttgatgccggtacgagaattggttaagatctgcagagaggaaggtgtggagcaggtttttgttgatgcagctcatgccattggtagtgttaaagttgatgtgaaagaaatcggagctgattactatgtgagtaatctgcataaatgggtcttttgtccaccgtctatcgcgtttttctattggaagaaacgtggttctgagtctgatgttcatcaccctgtggtgtctcatgagttttggaaatggtt

SEQ ID NO: 93796 - DNA, 413 bp, Arabidopsis thaliana columbia
cgcgtccgaacccttctctctagctcacactcacaacactctctctctcctgccataactcagcctgagatgtctccggaagcttacgttctgttctttaacagttttaacctcgtaaccttcgaagcctttgcttcagtctcacttatcatagccacagttgctttcttgctctcaccaggtgggctcgcatgggcctggaccgggtcatccaagagtcgggtttcgattccaggaccatctggttctctttccgtcttctccggctccaatccccaccgtgttctcgccgctcttgctaaacgcttcaaggcctctccgttgatggcgttctcagttgggttttcgcgtttcgttatctctagtgaaccggagacggctaaagagattttgagcagctctgcttttgctga

SEQ ID NO: 93797 - DNA, 584 bp, Arabidopsis thaliana columbia
gtccgaaaggaattaacaagacactggattcaactcttctagagaacagcaggaaccaagtgagattcagacagtttgatatggttaatgactgctcggaccatcatttcctttcttcggataaagggttggctcagtcccaggtcacaaagagttgggtgaagaaagtccagcaagaatggagcaatttggaggcaaatcttccgaacacgatatatgtgcgtgtgtgtgaagaaaggatggaccttctgcgtgcagccctggttggtgcccctggaacgccatatcacgatgggcttttctttttcgacataatgcttccacctcaatatcctcatgagccaccaatggtacattatcattcaggtgggatgcgactgaatccgaacctgtatgagtcaggaagagtttgcttgagtctgctgaatacatggagtggctctggcactgaagtatggaacgcaaggagctcctccatccttcaacttcttctttcgtttcaggctctggttctgaatgagaagccttacttcaatgaagctggctatgataagcagttgggccgagccgagggagagaaaaac

SEQ ID NO: 93798 - DNA, 540 bp, Arabidopsis thaliana columbia
tacgactcactatgggaaagctggcacgcctgcaggtaccggtccgtcgtccttgaagcagtcaaattcttctctgaactccaaacatcgccatgtccgagattctctcttcgttgaggtcactaatggcctctcactctcctcctcttgatgctttggttgttccttccgaagactatcaccagagcgagtatgtttctgcacgagacaaacgccgtgagttcgtgtctggattcagtggaagtgcaggtttggcacttatcacgaagaaggaagcaagactttggacagatggtcgatacttcttgcaagcattgcaacagcttagcgatgagtggacactaatgcggatgggagaagatcctcttgttgaagtttggatgtctgataatctacctgaagaggcaaatataggtgttgattcatggtgtgtctcggtagacactgcgaatagatgggggaaatcgtttgccaagaagaatcagaaactaatcaccacaactactgatcttgtggatgaagtttggaagagtcgtccac

SEQ ID NO: 93799 - DNA, 833 bp, Arabidopsis thaliana columbia
  unsure (1)..(833): unsure at all n locations
tacgactcactatanggaaagctggtacgcctgcaggtaccggtccggaattcccgggcttgctgggttaaaaggtttcaatggccagcttgaatttttcaacgtggatgagctcgagacaatggccacagctgaacacttcatggccacggatatcgaatgggacccgactggaaggtacgttgcaaccgcagtgacatcagtccatgagatggagaatgggttcaccatatggtctttcaacgggattaccctttcccggatattgaaggatcactttcctccaagttggcttggccgccaagaccctcccaatcattcctgactgcaagagaaggaagaagagatagccaagaccctgaagaagtacagcaagaagtatgaggcagaggatcaggacgtgtcgttgctgttgagtgaacaagacagagagaagagaaaggccttgaaggaagaatgggagaaatgggtaatgcagtggaagtctctgcatgaagaggagaaactcgtgaggcaaaaccttcgggatggtgaagtaagtgatgtggaagaagatgaatatgaagccaaagaagttgagtttgaggatcttatcgatgtcactgaggaaatcgttcaagagtcgtaagatactcggtctcttttgttgccatctctttggatcccttagacaattttaaatcgtgttcgctatacttggaagataatttttggttccttcatgattgaaaatttcgttgttagttgatgaaaaaaaaaaaaaaagggcgaccgctctagaggatccaagcttacgcacgcgtgcgtgcctcgtcataatcttgtagagtgca

SEQ ID NO: 93800 - DNA, 748 bp, Arabidopsis thaliana columbia
tatacgactcactatagggacaagctggtacgcctgcaggtaccggtccggtattcccgggtcgacccacgcgtccgcccacgcgtccggattcatggtgaccaaccaagaccagatgtcagtttctactcaatgaagaccgcacaaaacactggaagggtttcaaagctcgcaactttgaaggccaaacaagctaatgccctcttctggtcgcccacaggcaagtacataattcttgctgggttaaaaggtttcaatggccagcttgaatttttcaacgtggatgagctcgagacaatggccacagctgaacacttcatggccacggatatcgaatgggacccgactggaaggtacgttgcaaccgcagtgacatcagtccatgagatggagaatgggttcaccatatggtctttcaacgggattatgctttaccggatattgaaggatcatttcttccagttggcttggcgtccaagacctccatcattcttgactgcagagaaggaagaagagatagcaaagaccctgaagaagtacagcaagaagtatgaggcagaggatcaggacgtgtcgttgctgttgagtgaacaagacagagagaagagaaaggctttgaaggaagaatgggagaaatgggtaatgcattggaagctctgcatgaaaagagaaaccgcgaggacaacctcgggatgggaaatagggaggggaaaaaaataatttaacccaaaaatggagttggggtcct

SEQ ID NO: 93801 - DNA, 505 bp, Arabidopsis thaliana columbia
catggggtcagtatggggattgaatcggtggtggacaaggaaaacacgggatcatctagtggtcggcgggacgcgggttgtcctgcatgtgaaatggcggttgtgtggatacagagccaattgaggcagaacatgactcaagagaggatagtgaactacattaatgagatatgcgagcgcatgcctagtccaaatggagagtctgctgttgactgctcacaactttctaaaatgcctactgtttcattcaccattggaggcaaagtctttgatcttgctcccgaagagtacgtactgaagattggggaaggaccagtggcacaatgtattagcggctttaccgcacttgatatccctccacctcgtggacctctctggatacttggagatgtgtttatgggaaaataccacactgtctttgacttcggaaacgagcaggttggcttcgcagaagccgtgtgaaaaatgtaacatcgatcttttgttgatatgtttttggtgtgag

SEQ ID NO: 93802 - DNA, 1052 bp, Arabidopsis thaliana columbia
  unsure (1)..(1052): unsure at all n locations
tctacccctgcttctggtcctattcctggcggtcccactattcaggttgattggtccttgaaccaagcacgtgccatcagaaccaatttgacagctagtggaccaagaccaaacccgcaaggctcataccattatggtcttataccgctcattaggacaattgtgttcggtagttcagccggacagataaacgggaaacaaagatatggtgtcaatagtgtgtcatttgtgccagctgatacccctctaaaactggctgacttcttcaagattagcggtgtctataagatcaacagcatctcagacaaacccacatatggaggtttataccttgacacctcagttttgcaagtcgactatcgaacctttatcgagattgtattcgagaaccaagaagatatcgtccaaagttatcatctcaatggttactccttttgggtggtcgggatggatggtggacagtggaagacaggaagcagaaatggttataatttacgcgatgcagtttcacgttccacagtccaagtgtacccaaaatcatggacagccatatacattgcattagacaacgttggaatgtggaacttaagatcagaattttgggcaagacagtacttgggacaacaactttacttacgtgtcttcacgtcatctacgtctttgagagatgagtaccctatcccgaagaattcgcgtttgtgcggccgggcaagaggacgacatactaggcctttgtaaggaagatatacgagcttacgtgaaattcgtcatatccatacacgtttaagtatttcttgggaagacttgcaaggttacaaacaatgagagaggatatatgtagtaacaatctagtttgacgtgatctcagctcgaggtctaaatttttatgtaattcgaatttgaagttccagtttttctttatatgcttttgtcattcatgttcttttaattttctttcctttttctaacgaaaaaaaaaaaaaaaaaaatttaatttgactttttnnnnnnnnnnnnnnnnnnnnnnnnnnnnnnnnnnnnnnnnnnnnnnn

SEQ ID NO: 93803 - DNA, 581 bp, Arabidopsis thaliana columbia
  unsure (1)..(581): unsure at all n locations
acaaaacaacgattcttttaaaataagaacctctctctgtttctctctctctctatatatatctccctccccgctgatcgatggcggcttctgttgatcctttggtggtcggaagagtgatcggagatgtgttggacatgttcatcccaaccgccaatatgtctgtctactttggccccaaacacatcactaacggctgcgagatcaaaccctccaccgcagtcaatcctccaaaagtcaacatctcgggccattccgatgagctttacactctcgtgatgactgacccggacgcacctagcccaagcgagccgaacatgagagaatgggtccactggattgtcgtggatattcccggaggcacaaattcctcaagaggaaaagagatacttccatacatggaaccaaaggccaaccagtggggattcaccggttacatattgggacttttccgggcaaaactcaccggtgggtctgatggtgaagagacttcatcacgggcaattnaagacacgnatgttgntngnaaatttcnatcttgggcnactgtgggnangnttttnaanggccaaaagnacctg

SEQ ID NO: 93804 - DNA, 646 bp, Arabidopsis thaliana columbia
  unsure (1)..(646): unsure at all n locations
tcggcaaaaagccaaagtttcttttttaaagcctcttgttttgttcttcttctcttgtttcttcttttccaatcttcatttttccagtcaaattcagaaaacgcgtaagttctctttctcgttaaaagggtttgttataaaacccttgattttacttgttttagagaggttcttggtttaaatcttcttgtggtttaagtctttgtggtttctctaatattttcttcccaagatttggatttgctctgttttgtttgtttgtttcagttttaataatggatgatcagagtaatcgtggtaatgataatcataataatgatcatcatcatcatcatcttggtgtgaataagatgggaaaaaacattcgtaaagatccaccaaaccaacaaaatcaacaacaaaaccctcaagctttggtttacaacatcaacaaaaccgatttcagatccattgttcagcagctaaccggactcggttctacttcttccgtcaaatcctccgcaacaaaccatccaaggctccaattacggntnggtaagttagnccggnncttggccccanttaacatnctcactttnacttacntcccgngggtantaggtcnattgatttgnccggtagctttnacaatttggggcccggngtc

SEQ ID NO: 93805 - DNA, 648 bp, Arabidopsis thaliana columbia
  unsure (1)..(648): unsure at all n locations
caaaaacaaaaatttctgctttgaagaagaagagtcgatccataatcgccactttcagatttccagattctggggaaacatctctaaactcttcaacgatggcgactgagaatctcaccgataagaatgttgttttcagaaagctgaaatcaaaatccgagaacaaggtttgctttgattgtagtgcgaagaatccaacatgggcttctgttccttatgggatcttcctatgcatcgattgttctgctgttcatcgaagtctaggtgttcatatcagcttcgtcaggtcaacgaacttagactcgtggagtcctgagcagctaagaacaatgatgtttggagggaacaatcgagctcaggtgttttttaagcaacatggatggaatgatggtggtaagattgaggctaagtatacttcaagagctgctgatatgtatagacagactcttgctaaagaagttgctaaagccatggctgaagaaactgttttaccgtcgttatcctctgttgctacttctcagccagtggaatcatctgaaaatggggtttacttctcgaatctccggaagcagagttctttggggcaaggcgcggctgcagcctgtttgtttcttgcacccaaaaaggtttctnaagaaagtttgttgc

SEQ ID NO: 93806 - DNA, 778 bp, Arabidopsis thaliana columbia
ttgacgtcgcctgcacccctacctaagctcggaattcggcttgagggctggtattcggctgggtgatggaccccaccactttggaaagaccttggcccctggctcggttaattcttccggccaccatggctcctagcaggagcttcgcgccattggatcccttggcctaaggcactgggaagagggtggacccaaaaaggacgtggtccacacctgtgcggggaaaatcactgtggagccattttaggaccgagacagaatataccgttacacaggccatttctgcacaggaggctaaccgacggaataacacctggctgccacctccatgggcaatccttgccctggttgttcttggattcaatgaattaatgactctcttaagaaatcctctatggctcttagttctatttgccggataccttgtatccaaagccttgtgggtgcaattaaatatttcaggagaattccaaaacggcgcgctacctggacttctctctttgtcaaccaaattcattccaacggtcatgaacctcctcaaaaagctcgcggaagaaggacaagcaccacccacaaatagcaaccaatcaatgaactctacagctcaatccgaggttacaaccaatggagaaagcagcagcagcagtagctctggttcatctccagcaaaaaacgtacccattgatacaagtgcatagaacaaagaagtatacaagcttaagctgttgtgctagcccacgaagctagaaacttaaaattcgttaccttttcaaaaagg

SEQ ID NO: 93807 - DNA, 527 bp, Arabidopsis thaliana columbia
  unsure (1)..(527): unsure at all n locations
ccnattggtagagatttcntcnccaaatcctttcncaanncttttnggtggcctccccctggcctcccaaaagatttgnaaaaaacggacngtccctttctttttcccancggaagaagcaagaaaaggcctgggntgaaaaagttggacaggcctggaagtcccncggatcttaaaatgggagcccttgtgatttcctgttttgacagttggtccaataccaaccccccgtgtttccccggatgccatcactgttgagagatagtctcctttacgatgccagtcaatagacgatatgctcttaaaatgtcttatcttaatccctccatataactcatcaggtagccaggttacaattgctgcaacagatgcgtctggttctgggatgtttcctgagtgaagcctctctttagtaatttcctgttcctcatcagtcccaagttcagtgttcagaaaaaacaaatctcgtcccctgcaatgtgagatgagaaggtttcatcacaacagaccaggggaggacgcgtggg

SEQ ID NO: 93808 - DNA, 739 bp, Arabidopsis thaliana columbia
  unsure (1)..(739): unsure at all n locations
gcatccaaccggggctccgggctnnnntttgcacccaatncatccaccgnnatggcccncnnaaaaagcttccggaggagggcaagccccccccccaattgcccccccaaccagggncctctacagctcaatccgaggttccaacccaatggggaaagcagcagcagcagtagctctggttcatctccagcaaaaaacgtacccattgatacaagtgcatagaaccaaagaagtatacaagcttaagctgttgtgctagcccacgaagctagaaacttaaaattcgttaccctttcaaaaaggtagctctcagttttggtgttgatcagagagattcaccgagagccatatgttttatgtctccgatggcattggttccctcttgcaggtgtcaaagtgatcttgtatgttcctagactaagattctgatgcagacaaaaacaaaaaaactcatgatttgtttgcgagttctgtagtgatgtggttattgtatctgataaaaagaatgttacttgaagaaaaaccggtttttgattaagtgaaattcagtttggtttttgttgattgaaaaaaatttcaggttcccattgcaagtttaaagggtaatcatgttagcataaagtttttgggcccccacaaaaaaaaaaaaaaaaaaaaaaaaaaaaaaaaaaaaaaaaaaaaaaaaanaaagggcggccgctctagaggatccaagcttacgtacgcgtgcatgcgacgt

SEQ ID NO: 93809 - DNA, 801 bp, Arabidopsis thaliana columbia
cttctaaaaatttcccaagggcaccatcaaaggattctgggtccagatcattatacaccattccatggaaaaccttaagcggttgaatcctccgagcccaaagccaaatacggattatgtccgattaacctgccacattggtaatgtcttaagaatgattcttaagagtctgaatgggtttcgaagatagatccatgtcaaaccaacacttcttcccttctttgcttcttactatcagattatcccccccagggtggaccccccaattggtgagattcccctaaaccctgtctaaaactttttgggggccccccctggcttaaaaagtttgtaaacccgcccgccctttcttgccgcaacgaagaagttaaaaaaggcctgggatgaaaaaggtgtacagactggaagtccacgaatccttaaatgggagcctttgtgtttcctgttttgacagttggtgcaataccactccccgtgtttccccggatgccatcactgttgagagatagtctcctttacgatgccagtcaatagacgatatgctcttaaaatgtcttatcttaatccctccatataactcatcaggtagccaggttacaattgctgcaacagatgcgtctggttctgggatgtttcctgagtgaagcctctctttagtaatttcctgttcctcatcagtcccaagttcagtgttcagaaaaaacaaatctcgtcccatggcaacggctaaaactggaagcctggaaagaggattcctagcggacgcgtgggtcgacccgggaattccggacgggtactgca

SEQ ID NO: 93810 - DNA, 978 bp, Arabidopsis thaliana columbia
  unsure (1)..(978): unsure at all n locations
cccaaaagaaactaggaagaggaaggacaatcgtncccaaaaaaacctctcttctctctcctcactgtaacaaatttttagatctagatctgcttttctcggtgcctttgatcttcatctctttggctttgctttgaaatttcaggggtgaacaagatgccttctccgttggcagtggtgtggtttttctctccttcgatgtagttgtggatccgatgtgttggaagtagagagttgctacgattcccttcggttgtggacgccggttggtgtagcgatttcttctcgtggctcagccgtcgtgtcggcctctgcaactacggcggaagtcgatcgagagaaggtgggtagtgccaattcgccatggaggttaacggtggatcttcctagatttgttggctgtcgcggattcagtgtgtttgggtgtttcgcttgagccttgggcctcaaacaccaccgtgacttgcttcctcttggccggttgaaggttttttgttcggtaaatcggagattcgttggattgggaaagaggggttatgtttgattgtcggcttgctaggtacgggagctaacaacggcgtgccgtgatgtcggagggttgaccatgccgagagatttgtggtggaaacggttggtcgcgggaaaaggaatagtagcggaagtcggatgcttcctctctgtttactagatacttcgatctgctgcaaagctgtggttctcgcatccgtcggtgctaatggtcggtttctttgcgtcacggtgtcactagggcaagatcctcttttccggtcccgacagattttttcgtttttcctttgtctctggttttctttgtaaaccaaagcccagcccaattttgtgggttctataactaataaaaggccgttttaaaaaaaaaaaaaaaaaaaaagggcggccgctctaaaggatccaagcttacgtacgcgtgcatgcgacgtcagagctcttctnnnngta

SEQ ID NO: 93811 - DNA, 597 bp, Arabidopsis thaliana columbia
caaccccagtgtcgcctccatcgactgatagattgttaacgccatcaaacattatccatttgctgatatctttgtaatccgatcgtttttgagatgcggataacgttccgaatatctgaacggtgagaatagaattgcatggaccagttaattgaatagacttaaggagataagtattccctttaggaactaggagattaacagctccatttgaagaacatgctttcttccacgcattcacgaacgcctgcgtgtcatcggtttttccatctcctttagctccaaaatcagaaacactaacggtggttggagtccgcaaagaggctcttacaaaacttctcaatcccgtgatgtcctctcttcgcttgattaagctatcggatttgaaccttttataagaatggtcatatacattagggctgattcttgaagctttacaccatgagaacatcaaaagagcccataataggaaaacggtaacaaggttggtacaacgggccattggcaaggaaccgtgttttttctttgttgctggcaaaggaatgctgtcgtttttgggcagtaggtggagaatgtttgatgtttgtgaattttttg

SEQ ID NO: 93812 - DNA, 666 bp, Arabidopsis thaliana columbia
  unsure (1)..(666): unsure at all n locations
gggggacccacgcgtncggaaaaaaaaactcatatatatatctaagaaaatcaactacataattaccttctccgttgctttttgagtagatttctcttgatccgtattaacgttcttatatccagcttcggctacagcatttgccggttgagcctccttacctccaaccttccatggctcagccggcacatcaatggccatcggtcgaacgtccttacctccatattcaagagccttccatggctcagccggctcatcaatggccatcggcgaacctccttacctccatattcaagaactttccatggctcaaccggctcatcaatggccatcggtgtagacatggtcattatcggggcttctaaccacagggtatggattatctttaggttctgagtcagcaaaggattggaaaagtgaggaccagaactctacgggatctcgatcccttgtccatattcatgaaaggtaactagctggaaaggtgggtttggggggttttgccaattgaaggggttttttttggggggggaaccagagcggggaagagggggtttcggccttaaattttttcggaccttgtccaattcctttggggttttattttttccggtttggggattttttcacaatcccccnccttggtttatgggaantnctttanta

SEQ ID NO: 93813 - DNA, 692 bp, Arabidopsis thaliana columbia
  unsure (1)..(692): unsure at all n locations
aaaaacccttttttctagganccactcatattcctcccgtgctttgngtgattcnctgcccgtttacgtctatnccnctcgctcagcattcccgtgggctctncctccacctcctggctcaccgcctcatggcctcgtcgacgcctacccctattcaggcctccatggctcagccggctcatcaatggccatcgccggaacctccttacctccatattcaagaacctttccatggctcacccggcctcatcaatggcccatcggtgtagactggtcattatcgggcttctaaccacaggatatggattatctttaggttctgagtcagcaaaggattggaaaagtgaggaccagaactctacggtatctcgatccttgtccatattcatgaaaggtaactagctgaaaagtgatatggagagtttgtgccaattgcaagaggtatttataggagaggaaacaagagcgggaaagagggttatcgactcaaacttctgtcggaacttgatcatattactataggatttctattttgtcgcttgaggatatatattatatatccatcttcttgttttatgttaatttctttatccatcagtttctgttttcgttatttatccacttttcacttgttgttaactataataaatcggaaagttgatcaaaggaatccgatccaaaaattatttctc

SEQ ID NO: 93814 - DNA, 587 bp, Arabidopsis thaliana columbia
  unsure (1)..(587): unsure at all n locations
cgaagatgatcgtgcaagaccgaagcgataagtctcttgcagaaccaacttttaagatttaaggttgcttgtcccttttttggctccttaattcttggattgatagagaaaatggatattgggattagaaacggatggagaactccgaagacttcagaaagctctggatctaatttcctgggtttgcttagatcctaccctaacaccatccccagggagagaattcatatgggtaatgttcatagtggcaaaagagcaatggtgatttctagtttaaagaaagcgaatatctctgcttcgaggaagcagagaattaagctagagattaatggagaaaaggagctgactttcagtgagtttttgaaacacccatctggcatggaggctgtgatcaacgcaaaggctttgcagagttaccatttagttgatgatagtgatgatacttacagatgtacatttgccaaaagttcagttaatgagttttgaagtttatccagtactgggttttaaggggtcacttcccacanagggangtttntnccagtttnagctnntttccctncaaagttngggaggttccnaaagnt

SEQ ID NO: 93815 - DNA, 657 bp, Arabidopsis thaliana columbia
gacagataccacaagcaaaggaacttttagccaacttgataatctatcaatggctaacatcacaaaaaaaagttcgaggctgtgggcgttcctaggagctgtttactggatatctttggtcacatattgcgtcttgtggaaagcttataagcatgtctcttcattgagagctcaagctctgatgtctgctgatgtaaaacccgagcaattcgctattcttgttagggatatgcctgcaccacctgacgggcagacacagaaagagtttattgattcttatttcagagaaatataccctgagacattctacagatcgcttgtcgcaacagaaaacagcaaggttaataaaatatgggaaaaattggaaggttacaagaagaagcttgcgcgagcagaagcaatattagcagcaactaataaccgtcccacgaacaaaaccggcttctgtgggctagtcggtaaacaagtagacagcattgagtattacactgagctaatcaacgagtctgtagccaaactggaaacagagcagaaagcggttcttgctgagaagcagcaaaccgcagcagtggttttcttcacaaccagggttgctgctgcatcagcagctcagtctctgcactgccagatggttgataaatggactgtgaccgaagc

SEQ ID NO: 93816 - DNA, 729 bp, Arabidopsis thaliana columbia
  unsure (1)..(729): unsure at all n locations
ctttagagaacttgagaagatttagaaagaaacagagagcttgagagattcctctggctaaacccagatggagtttggatcttttcttgtgtccttagggacatcttttgttatcttcgtcattctcatgcttctcttcacctggctttctcgcaaatctggaaatgctcccatttattacccgaatcggatccttaaagggctggagccatgggaaggcacctccttgactcgaaacccttttgcttggatgcgtgaagctttgacttcctctgaacaagatgtcgttaacttatccggcgtcgatactgctgtccactttgtcttcttgagcactgttctggggatatttgcttgttccagtcttcttctcctaccaactctactgcctctagccgctacagacaacaacataaagaacacaaagaattgcgacaagataccacaagcaaaggaacttttagccaacttgataaanctatcaatggngaacatcacaaaaaaaaagtccgaggctgtgggcgtnctaaggagctggttactggananctttgggcacaanattctcctggtggaaacctntnaggatggcccctnacttggnagcccaanncctgatgctggngatgaaaaacccgggaaatccggaaccntggaaaggggntcntnaccacccnncgggggcccccaaaaggttnntngccncaantnccgggnaaaaccccgggg

SEQ ID NO: 93817 - DNA, 512 bp, Arabidopsis thaliana columbia
  unsure (1)..(512): unsure at all n locations
nnnnnnnnnnnnnnnnnnnnnnnnnnnnnnnnnnnnnnnnnnnnnnnnnnnnnnnnnnnnnnnnnnnnnnnnnnnctttttttttttttttccaaaagattggattagattaatattcaatcaacgtcatcattccaaaagcatttacaaactacaaatctctctaaagctttttaagcaatgcacaaaaacatataactaaccccaaaaaaagaaaaagaatttgatcaactcccttaagtttgtttcatcatcacacaaaaacctctgcatgtaacaaacctattttttcagacagcaatcttgtagatgactgccactggaatgttaacaacgtgacctctatctccaaacagtccaattctcccaaaactagccatcgaaacattcttcatcgctcgaaagacaaggctcaagacccgtgtctgcccgtttcctattgtaaacttggcaggtgagaccttaaccgagactgagtccggtgccatccacccgactatatatgtttcgtt

SEQ ID NO: 93818 - DNA, 435 bp, Arabidopsis thaliana columbia
aacaggtctcttaaagttttgaacgatattcttttattcttgttgagatgttagaccatttcaagcagtctgatcacggtgcttggtgggtttatttttttaggttgtgactttgcaagaagagattgagtttctcgggtcacagatgaagaatttttcatactctaatcaaaacggatcacaacttaacaacataccggagtttgtgaatcagatgactatggccacgaccaatttcgtcgacgagagtgttttgaacaatgccgacggaagaaactgctatgatgggttcttcacgaactcagaggaaatgctcgtgaatcatcaatggctccagaacatggattattattactaagcacaacaaaattcgacgcgaactaaaaacgatggatctatatataatagttgtggagcatgggttttgtgtatgat

SEQ ID NO: 93819 - DNA, 425 bp, Arabidopsis thaliana columbia
attagctatgagattatgaaagtgaagatataaaacaaacacctaaaagtgaaaagtacacaccagatccttcatgtttcatctctttacgcaaccacgactaagttaccaaaaaacagaatctgttctttttttgccttcttgcagatttcttcagagtcaaagacacataaagatttataattgagttgtgagttttggaggccatggacgtaggagagagcaatgagagggtaaaagacgattctgcccttcaagcttcaccgaggagtcctctgagttctatagatcttgcaattgatggagctatgaatgcttctattgagcagttgtatcataacgtttgtgaaatggagagttctgatgatcagtctccgtccagggcgagttttatttcgtatggagctgaatttaggattgatttt

SEQ ID NO: 93820 - DNA, 522 bp, Arabidopsis thaliana columbia
  unsure (1)..(522): unsure at all n locations
ttnccnttcggnggaccncnttggaagctttccgtggagtcccaatggtgtgttccgccgttttttgcggaccacccaactaattgtaagttttctcgtgccgattgggaggttgggattgagattggtggagatgtgaagagagaaggaggttgaggccggtggttagggagttgatggatgaagagaagggaaaggaatatgagagagaaggcggaagagtggcggcgcttggcgaatgaagcgacggagcattagcatgggttcttctatattgaactttgagatgctcgttaataagggttcttttaggggagtagagactagttaatatggatttccagaaaaaagggattttagccccccagagtaggcccttgcttcccaaagaacctctttatttccccaattaattactcctttactcattctccaaataaccttcttctaattaaaaaaaaaaaaaaaaggcggccggttcaaaggaatccaggctaaggaaggggggcatggaaggtcaag

SEQ ID NO: 93821 - DNA, 967 bp, Arabidopsis thaliana columbia
  unsure (1)..(967): unsure at all n locations
attccttggtcaacccacgcccccgaaaatacaatgccactgtcgtaatccctgtgcataagacacttttttatgggatctcatggagcacaacaacaacacgtgggaggctgtacttatgcggctcaaggccacatcaacccactgatgaaagtggctaaactcctttacgccaaaggcttccatattaccttcgtcaacaccgtctacaaccacaaccgtatcctccggtcccgtgggcctaacgccggtgacgggcttccttctttccggtttgagtacatccctgacggtctacccgagactgacgtggacgttactcaggacatccctactctttgctagtccacaatgaaacactgccatcgctccattcaatgagcttctccggcagatcaacgcaagggatgatgctcctcctgtgagcatgatcgtatccgacggttgtatgagcttcacacttgatgctgcggaggagctcggtgtcccggaggctctttcttggactactagtgcttgtggcttattggcttacctttaccactatcgcttcatcgagaagggattatcaccaataaaagatgaaagttactttaccccggaacccttggacccacaaaacggaccggatgccttcgatgaagaacctaagacttagagacctccctagcttcatccgaacgactaatcctgacgacatcatgctcaactttatcatccgtnaggctgaccgagccaaacgcgcttcagctatcattctcaacacgtttgatgatctcgaacacgacgttatccaatctatgnaatccattgtacctccggtttatnctattgggccgttacatttactagngaaacaaagagagcggcggagtatagtgaaatcgggacgggaccagggttcgnaatctttttgnggngnggnggccttnnggtgtcttngacttgggttaaaccacggaannct

SEQ ID NO: 93822 - DNA, 1797 bp, Arabidopsis thaliana columbia
  unsure (1)..(1797): unsure at all n locations
cnnnnnnnnnnnnnnnnnnnnnnnnnnnnnnnnnnnnnnnnnnnncccggnacttcctgggtcgacccacgcgtccgaaaatacaaatcgactttcatattttctctgcataagagagaaagaaaatgggatctcatgtcgcacaaaaacaacacgtagtttgcgttccttatccggctcaaggccacatcaacccaatgatgaaagtggctaaactcctttacgccaaaggcttccatattaccttcgtcaacaccgtctacaaccacaaccgtctcctccggtcccgtgggcctaacgccgttgacgggcttccttctttccggtttgagtccatccctgacggtctacccgagactgacgtggacgtcactcaggacatccctactctttgcgagtccacaatgaagcactgtctcgctccattcaaggagcttctccggcagatcaacgcaagggatgatgttcctcctgtgagctgtatcgtatccgacggttgtatgagcttcacacttgatgctgcggaggagctcggtgtcccggaggttcttttttggacaactagtgcttgtggcttcttggcttacctttactactatcgcttcatcgagaagggattatcaccaataaaagatgagagttacttaaccaaggaacacttggacacaaaaatagactggataccatcgatgaagaacctaagactaaaagacatccctagcttcatccgaacgactaatcctgacgacatcatgctcaactttatcatccgtgaggctgaccgagccaaacgcgcttcagctatcattctcaacacgtttgatgatctcgaacacgacgttatccaatctatgaaatccattgtacctccggtttattctattggaccgttacatttactagagaaacaagagagcggcgagtatagtgaaatcggacggacaggatcgaatctttggagagaggagactgagtgtctggactggctaaacacgaaagctagaaacagtgttgtgtacgttaacttcgggagtataactgttttgagcgcaaaacagcttgtggagtttgcatggggtttggctgcaacggggaaagagtttttgtgggtgatccggccggatttagtagccggggatgaggcaatggttccaccggagtttttaacggctacggcggaccggaggatgttggcaagttggtgtcctcaagagaaagtcctttctcatccggccattggagggttcttgacgcattgcgggtggaactcgacgttggaaagtctatgcggtggagttccaatggtgtgttggccgttttttgcagagcaacaaactaattgtaagttttctcgtgacgaatgggaggttgggattgagattggtggagatgtgaagagagaagaggttgaggcggtggttagggagttgatggatgaagagaagggaaagaatatgagagagaaggcggaagagtggcggcgcttggcgaatgaagcgacggagcataagcatggttcttctaaattgaactttgagatgctcgttaataaggttcttttaggggagtagagactagtaaatatggatttcaagaaaaaagggatttaagcacacaagagtagaccattgctcacaaagaacctctttatttcccaaattaattactcatttactcataatcaaataaacatcttcttattcatcacaaaccaataaaacttactttcctcagttcaaatatttcatactattagactttgttttgataaaaaattgttcnnnnnnnnnnnnnnca

SEQ ID NO: 93823 - DNA, 519 bp, Arabidopsis thaliana columbia
  unsure (1)..(519): unsure at all n locations
actnnnnnnnnnnnnnnnnnnnnnnnnnnnnnnnnnnnnnnnnnnnnnnnnnnnnnnnnnnnnnnnnnnnnnnnnnnccacgcgtccggcggctgggtttatatcattgcttggttgttctgatgatgacataaaagaacttctgcagctgtcgcaggagttcactttagtgcggtacccagaccaggttgcccttgaaaggcttttccgagttgaagatattagagttggggctacttctcgaaaggcgattcccttactagttgaacttcttaaaccaattccagaccgccccggtgctcctctactttcacttaatcttctaactcagcttgctggggactgtccacaaaatatgattgtcatggtagagtcaggtgctcttgagggtctctcgaaatatctttcccttggacctcaggacgagcaagaggaagctgcaacaggtcttttaggcatcttatttagcagtgctgaaattcgaaggcatgagtcagcatttggcgcggtcagccaact

SEQ ID NO: 93824 - DNA, 963 bp, Arabidopsis thaliana columbia
  unsure (1)..(963): unsure at all n locations
ttttgaaccccagtgctatagaaaagctaaaagcaatggagcaaacactggccaaaggcaagcagatccaagatgactgttctacagtggtcaagaagctacgtgctatgctccactccgcagatgagcagctacgggtccataagaagcaaaccatgtttttgactcaattgactgctaagaccattcctaaaggacttcactgccttcctctgcgcctcactacagactattatgctttaaattcatctgaacaacaatttccaaatcaggagaaactagaagatactcagctgtatcactatgcccttttctctgataatgttttggctacgtcagttgttgttaactctaccataaccaatgcaaagcatcccttaaagcatgtcttccacatcgtcacagacagactcaattatgcggcaatgaggatgtggttcctggacaatccacctggcaaagccaccatccaggttcagaatgttgaagaatttacatggctgaattcaagctacagtcccgttctcaaacagcttagttctagatcgatgatagattattacttcagagcccaccatacatattcagacaccaacttgaagttccggaatccaaaatacttatcgatccttaatcatcttcgtttttacttgcctgagatctttcccaagctcagcaaagtgctcttcttggatgatgatatagttgtgcagaaggacctttctggtctttggtcagttgatctgaaaggtaatgttaacggtgctgtagagacgtgtggggaaagctttcatcgctttgaccgttatctgaacttctcaaatccactcatttccaagnactttgaccctcgagcttttgggttgggcggatggattaantgcttttancttgntgaattggaggggaaaacatcccagngggttttcatnggtgnagggcttattaagncccggnattttc

SEQ ID NO: 93825 - DNA, 198 bp, Arabidopsis thaliana columbia
cttagaagcggtaaagaattacccacaaatgagagtccgaaccagatcactgaggacagtgtggatcaagatggggaggggttctggcaaaatggaaattccgctgaaaaagcaatagaagagcctatactccaccaacctactcgaccactagctcctgcagcatctcctcttgttgaaaaaccagttgccgccaaa

SEQ ID NO: 93826 - DNA, 516 bp, Arabidopsis thaliana columbia
  unsure (1)..(516): unsure at all n locations
tccccccttaaanntgggaaaacncagttncagggnttgnaccccctggacctnctganacctgaccatgatccccctgttgncccctgttcctatcaacattaccaccagtcttggaggtttccccgttccagcaaccccccagtcacagcctcttgccgcacaagattcctcttcccaaaacccttagaagggaggaggaaaaatggatccgagaataccagaagaggaaggagaagaagggttttctctggaaccaaaaagctcagaggttaacgaggaagaagaacaaggagaggaagacgaagctttcttctttcttccttccattggaattcgtcgctcgctctaaaaaaaaacactctttcagctattatacgtatatgtatgatgtatgtgtctatatacgtatgtgtaaatacggagagagagatatatatatatatgtgggtgtgggtgtatgtatcggtttatacgaagggtgaagttatagagagaattgtgaaaatatttggg

SEQ ID NO: 93827 - DNA, 512 bp, Arabidopsis thaliana columbia
gtagtgcttcactcttttgagtaaatagtatagtatttaatttatacgaattcgtaagttctgtgaggaataaatgaaaatcgcaaacatctctaaaaatacgaagagtaaagtcttgagaaaaccttttgtttttgttaattgcatgagaaaataacttacgatttaggaaactacctgacggattcttttcaaattgttaatctttttgaataacagtatcgtgagtgaattcgaactaacagattcctttgaagtaggttaagcttttatacttcaaataaaatataaatatataaaaatcaatcatatcattcggccggcaattttttgtattctattaatatattatccttcttgaagacgaatagaaaaattgagttagcgaatggtgacaagctcatctggaaccctaatttgcatagttctcagtttatctatttattccaatcaaacatcattttcattcacacgttaactacctgcttaaaacgttcaatgcaattcctagt

SEQ ID NO: 93828 - DNA, 509 bp, Arabidopsis thaliana columbia
  unsure (1)..(509): unsure at all n locations
ttaatggatgtgattagatcaatcggaagctggaagtgcgagatcgtacggtgaggattcgctaccggaagaagcagtgaaagttacacgtagtatcatgataattaaaccaccgggttaccaaggcagttcagctccagcttcgcctgccggttcaactccgccgctatcacctttctctccgccgctgtctccgttctctggtgagtttttatttttcattagttggtgtaggtgaaacagtacactcacttaattcgttgaaggatattttcgtcaattctttaaaggattgtttttgacatttcatgttatacgtcaatttggtgtatagtggattagattaggtctagtagtgtttatgcacagtgcacttacatagttttgtcgagaaaataaactaagttttgtcccatagtgtgaccattatgatttgattatatgtgacattattgattatattggttgaattaggtcattangtgtgttgtctaatcaaatgttatacg

SEQ ID NO: 93829 - DNA, 374 bp, Arabidopsis thaliana columbia
  unsure (1)..(374): unsure at all n locations
aaaaaaccccaaaaactttacattcttaacaatttcaaccctatgggcttacttnatcatctctgggatgatactgtcgctggtccacggccagagaacggccttggcaagcttcgtaaacaccataccttcagtttccgacctagctccggcaatgatcaatcggaagctggaagtgcgagatcgtacggtgaggattcgctaccggaagaagcagttaaagttacacgtagtatccatggtaatttaaaccaccggcgttaccaagggcagtttaagctccaacgtttggcctgccgggttcaaaattccggccgggtttttaacctttttttttccgccggtttgtttccgntttttntggggggaaaang

SEQ ID NO: 93830 - DNA, 629 bp, Arabidopsis thaliana columbia
  unsure (1)..(629): unsure at all n locations
aaaactttacattcttaacaatttcaaccctatgggcttacttnatcatctntgggatgatactgtcgctggtccacggccagngaacggccttggcaagcttcgtaaacaccataccttcagtttccgacctagctccggcaatgatcaatcggaagctggaagtgcgagatcgtacggtgaggattcgctaccggaagaagcagtgaaagtnacacgtagtatcatgataattaaaccaccgggttaccaaggcagttcagctccagcttcgcctgccggttcaactccgccgctatcacctttttttccgccgctgtctccgttctctgggggaaaggaaccccttttcgggtttaggagacggtcgacgtcggatgcccgttcgagaagggcagcaggaggttcagagacttggcccaaggagctctcctcctacttacggcatgttatctctaacacacaacacaangtntttgaaaaaggtgaaggtgaaggaggnaaacaagagttacccacccctttaaaacggattttccgtttangncttncantgaaagtgggggggtttttttttgcctttttttnanggcccaaaaaagggttttcaantgtttcnttaananttc

SEQ ID NO: 93831 - DNA, 805 bp, Arabidopsis thaliana columbia
  unsure (1)..(805): unsure at all n locations
acntccagggnancccacngngtcctgaaaaacgtgcaaaaacntgatacngtcgcnggtccacggccagagaacngccttggcaagcttcgtaaacaccataccntcagttcccgaccnagcnccggcaatgatcaatcggaagcnggaagnncgagatcgtacggtgaggattcgctaccggaagaagcagtgaaagttacacgtagtatcatgataattaaaccccccggtttcccaagccagttcaggttcaagtttgcctcgcgggttcacttcgcccgctatcacctttctctccgccgctgtctccgttctgagcaaacgcagggggaaaggaaccctttcggtttaggagacggtcgacgtcggatgcgttcgagaaggcagcaggaggatcagagactggaccaaggagctctcctcctacttacggcatgtgatctctaacacacaacacaagtcttgaaaaagagaagagaagaagaaaacagagtacccacccttaaacgatgtcgtttagactgcatgaagtggtggtttttttgcttttgtaggccaaagaggtgttcagtgttctcttatgtatgcgtgtatgagtttgtttgtgtgtttgttttttatatgtaatctcgtttttttcggtaatgcttttatgcgttttgtaaatttttgctgcaatgaaaataaaaacttgtagatacttaaaaaaaaaaaaaaaaagaaaaaaagggcggccgctctagaggatccaagcttacgtacgcgtgcatggtacgtcatagctaatnctatagttcattct

SEQ ID NO: 93832 - DNA, 503 bp, Arabidopsis thaliana columbia
  unsure (1)..(503): unsure at all n locations
aacagattttaaaaaaccccaaaaactttacattcttaacaatttcaaccctatgggcttacttgatcatctctgggatgatactgtcgctggtccacggccagtagaacggccttggcaagcttcgtaaacaccataccttcagtttccgacctagctccggcaatgatcaatcggaagctggaagtgcgagatcgtacggtgaggattcgctaccggaagaagcagtgaaagttacacgtagtatcatgataattaaaccaccgggttaccaaggcagttcagctccagcttcgcctgccggttcaactccgccgctatcacctttctcttccgccgctgtctcccgttctctgcaaacgcagggggaaaggaaccctttcggtttaggagagcccgggtcgacgtggatncgttcgagaggnacaggaggtcaggncttgnccagggntttctctantnnggatgtntcttncancacanagtttaaaaaggnggggggg

SEQ ID NO: 93833 - DNA, 721 bp, Arabidopsis thaliana columbia
  unsure (1)..(721): unsure at all n locations
cgcgtctccacgactcactattgggaaagctggcacgcctgcaggtaccggtccggaattcccgggtcgacccacgcgtccacagattttaaaaaaccccaaaaactttacattcttaacaatttcaaccctatgggcttacttgatcatctctgggatgatactgtcgctggtccacggccagagaacggccttggcaagcttcgtaaacaccataccttcagtttccgacctagctccggcaatgatcaatcggaagctggaagtgcgagatcgtacggtgaggattcgctaccggaagaagcagtgaaagttacacgtagtatcatgataattaaaccaccgggttaccaaggcagttcagctccagcttcgcctgccggttcaactccgccgctatcacctttctctccgccgctgtctccgttctctgagcaaacgcagggggaaaggaaccctttcggtttaggagacggtcgacgtcggatgcgttcgagaaggcagcaggaggatcagagactggaccaaggagctctcctcctacttacggcatgtgatctctaacacacaacacaagtcttgaaaaagagaagggaggaggaaacagggtacccacccttaaacgatgtcggttagactccatgaagtggtggttttttctttttnggccaagggttttagggttnttatgatgcggattagttttttggggttgttttaa

SEQ ID NO: 93834 - DNA, 610 bp, Arabidopsis thaliana columbia
ggcatgtataaaaaaaatattgtgacatttcatttcttacaatattttcaattttatcattttttatatatcggtttggtcgattccatcttttataatcgaaaacgagagttacaaatggtttttcaaaccataaaaaatgatcctcttttttttttattttgaaaaattctaaattcgaattttctttatttccatatagattttcagaaacaggtttatagttatagtatgttcgaacgtggaattcatcatccttattaattttgtcttttccattcactcggatttcttccatttcatcgattttgtccagatcttccccttcttccgaaaaaagagaaggaaaaggagcttcttcggtggatacctcttggtcctgtttagtcccacccgtttctgaggttcctttaagtttcttagtaaaaatgggtgatggtattctgcctaaatagtagacacaggtaataaataagagaatactaaagattcgagccatagaatctctcaattctgacacaaggaacttatacttattagatctaataactacattagacctaatagaattattttgctgtatccagactaataccaatccaacccattt

SEQ ID NO: 93835 - DNA, 765 bp, Arabidopsis thaliana columbia
  unsure (1)..(765): unsure at all n locations
atgatactccagctctctacgactcactatanggaaagctggcacgcctgcaggtaccggtccggaattcccgggccaagaaaccaaaagagtaaaacaaacacagagaagcttcttcttaaacgatgccgtactataccagagatgacaacgacgtcgacgatttcgatgagtttgatccaacgccgtacagtggtggttacgacatcacggtgatctacggccgtccgattccaccttccgatgagacttgttatcctctctcatctggtgtcgatgatgatttcgaatacgagagacctgaatttactcagatccatgagccttctgcttacggtgatgaagctcttaacacagagtacagtagctattctcgacccaagccacgacccgcatttcgacccgattcaggtggtggtggtcatgttcaaggtgaaagaccaaatcctggttatggatctgaatccggttatgggaggaaaccggaatctgagtacggatctggctatggtggacaaacggaggtggagtatggtcgggcccttagcagagttttggatctgggtatggtggaaggccggagactgaatcggagtatggatctggtggtggtggaagaactgaggttgagtatggtaggagacctgaatcagggcttggatctggttatggtgggagatcggagtctgagtatgagcgtaagcctagctatggaaggtctgaggaacaagaagaaggttattggaagcctagctatggaagatt

SEQ ID NO: 93836 - DNA, 437 bp, Arabidopsis thaliana columbia
aaaacatatcaaaataattaggaaaatatctattataccctcaaatggtatgttgaccaataatatagacggaaagtgttttatagttgaattttaaaatagtcttgtatagttgcatataaattaaaaaagcgatctagtataggaaaaatttggacgtaccgaggtaaagaccaaaacaatgttttgtcattttcacaacaatcaatgcatatgttcgtgaagtcgtcacgaaccacctatataagccaatgcatccatatatataaagatataacacacatatagatatagtacaagttaaatgaaaaatattttgattgtacaattagaattctgattatactttagaataaaaagaacagaaaaaagtagaagttcattgagagagatccaaaagaaataataaggcaataatgagatagaaaccatggtac

SEQ ID NO: 93837 - DNA, 556 bp, Arabidopsis thaliana columbia
ctctgttttatttttttcttccggtggtacaaaaattcacaatgaactgtatttatcacaattaatgaccgattgcttcttcacctactctctctctctctctctctctctttggaagtaaccaaacaagcctatatgctgctgatcccatctaggggccaagcctctcttctttaaaaacttttgacttccattttcttgagaattcccctttctgggttcttgatttggaaagatgggtaacaagataatctcaatgatgaagaaagatagcaaagatggaggaggaggaggatctaagagcaagagaatgaatcggtctcagaggaaattacttgctgatgaagagatgttgcatcgtcgagctctttccatggcgattcatcaagctcagctttctcagagatttgatggatctatgtctagacgggtcgggtctactagtactaggaaacgtactctctctgacccgttttctaatggcaagcaggttaagtcactactgattctcaatcttctccacacttataaaagtttcaatcttgaaaagttcaaa

SEQ ID NO: 93838 - DNA, 432 bp, Arabidopsis thaliana columbia
cggacgcgtgggctcaaatcaaattgatcctatccgcgtaaaacagagagtgttagggtaatgaaactctgtacctgttcatgaagtaaagaactctggaaacaaactaaacttaggctgcaaataagataatgagatctttaacttatgtgtccaaagtagttgcagcaatgaccaaacaattggtctcggaagctgttctaatgtaagatagatggtttacaaaatgaggaaaaagaataaagaaaaatgaaagagttggagggaatgtacaaatcagatatgaatgatgagaatcaagcatcatcagtatcgctgtctccggcttcaacttcttgagccacccaataattgttcccatctggaccccagaccttgtacctgtcaagaatatgaacaaatgcatcatctcaagtatctctgtcaaagaag

SEQ ID NO: 93839 - DNA, 739 bp, Arabidopsis thaliana columbia
gtcttgaattgggttcttttgctgcgggggtcatgatatccactactgatctcgctgaacatacattggagcaaatcgaacccatccgtaatttatttgctgctcttttcctagccagcattgggatgttagttaatgtccattttctgtggacacatgtggatatcctggtaccctctgtgatattaggtatttttattaagccaccaatagttacacccgttgttaagggatttggatacaacaataagacggctcttctggttggaatatctctggctcagataggggagtttgcctttgtacctacttagccgtgcctccaatcttctcctcatcggaagggaaactctatctgcttctcccttgggacaaccgctctaagcctggtttcgacaccgctggttttcaaaatgataccagcacgttgtacatcttgggatactgttgaaatggttttctccaggcagtcctatagagaaaggaggaattgtaagatcagaaagtgggtaacaacggatgattctaatgtcacgtcaatcccaccgctccttaaaccccaaaatggtcctctccactaaagtttgggccactccatccattttgccaaaggaaaaatggggaaaagaacagaaaaaggtttttaccccaaccttggttggttcctgggaggtaccaaacccccagccgcccccaaatcgaaaaccagcctaatcattccctcccacctcaagggggg

SEQ ID NO: 93840 - DNA, 431 bp, Arabidopsis thaliana columbia
tattaattaaaaactttttgtagtttagtgtaaaataacataagtagtagcttcaatatataatgatggggctaataaatcaaatatactcattcgatttgagaataatattttcaaaagagaaattatatagattcttataaatatataaattatatatttatgaaagttttgtaaaagtaaaagtaaatatgggttaatttgcaaacttttataaataaaaggtggtaatgcaaaaataaaaatcgaatctattaatatttatttttagaggaaaacatagagaaataaattgaaataaaaacaacttatttataaagttcctctatgtagaagcaaaaatacatatgaacctgcatattttatatttttatctcattgacatcgggcatggcatcttaacctaatatgagtcagtgtaagggaatttt

SEQ ID NO: 93841 - DNA, 462 bp, Arabidopsis thaliana columbia
ctctccctttccccaactgtacccatcatttccctcgtccattcctctcccttgcacataagctttgctctgtctatttaatttaactcttcttctgcatgaaagttttatgctttcgatgattcccaaaatctttctcatgcgttttttactttcttgatttggcaacatgtgctgattttgatttcttctttatggttgccgacacgaaagaagaagctaggacacaaaacaactcaaattttgtttggtgagaaaaatcaaccaagaaaatattgattcttttggagcaaggagttggtttgattgaagaaggaatggtgggaagcattgaggcaaagagtctgcaatcaaacgggtctgttcatcatattggtcttattttggaggagaaacttgatgaatttcgtcgtcttttggggaaatcagaaaaagatccgttaaggattgtaagtgttggtg

SEQ ID NO: 93842 - DNA, 1119 bp, Arabidopsis thaliana columbia
aaaataaacccaccaccaaataactccactctttatctctcttcctccttctcctataacttgcaacttcccacaccaaaaaagattccatcaaaggtctctctctcttcataaaccaatattttcacgtaagaaacaaactttttccgatcaaagattgtgtgcagagtcagaaattttcccggggaaaagaaaaatgcaggatctgacgtcagcagcagcgtattatcatcagtcgatgatgatgacgacggcgaaacagaaccaaccagagttaccagaacaagaacagctaaagtgtcctcgctgtgactcacctaacactaaattctgttactacaacaattacaatctgtcacagccccgtcacttttgcaaaaactgtcgtcgttactggactaaaggcggtgctcttcgtaacatccccgtcggtggtggaactcggaaaagcaacaaacgatccggttcttctccgtctagtaatctcaagaaccaaaccgtcgctgagaaacctgatcatcatgggtccgggtcagaagaaaaagaagagagagtttcgggtcaagaaatgaatccgacccggatgttatacgggttaccagttggagatccgaatggtgcgagttttagttcgttgttggcgtcgaatatgcagatgggtgggcttgtttacgagtccgggtcgcgttggttaccaggtatggatttgggtttgggttcggtacggaggagtgatgacacgtggactgacttagctatgaacagaatggagaagaattgaagaggcgaagggtaatttggtcaatttgacatagatgtcttttttttagtcatctcatagtcaaacataacaacaaatgatgtcggtccatttagcgctgtagtcattttttttcactttgtttttcgtcattttccacccaaattggctttagtgagtgttatttagaaaaaaaaacatttccgcaaactctagcgagttttatatgatgataagtatttgatgaatatctatttcttttggaattatattattgtcctaatgtgaaccaaggagttgacatatattctatttctttgtaaggaaacatataataaaaagtcaccgcgtttacatgg

SEQ ID NO: 93843 - DNA, 469 bp, Arabidopsis thaliana columbia
aacgatttgtcaacagaaccaaatgggaaaagaagctttattaaactccggtctaattttacacatttatgatattcgtgatctaccaaccaacctatcctttcgtctttttttttttttatttggtgagaaactacaaatgcacaaaaccaaaactgcatattaatacagaaatgttttggatattcatgattctctaaaaacatgaattactccatataactgataataaatttaatcatcgccttcacatctctatttgactatcaaccatataattcgctctcattttctttagtgaaaggtttgggggggtgaatatccatgaaattcatatggatagactttaatggaacataaaataaataaataacgaagtggggattagtagtagtatgtggagaaaagttggacaactcatttggttttgcaaactttgcaagtgtcccatttatttctcgtctcttat

SEQ ID NO: 93844 - DNA, 572 bp, Arabidopsis thaliana columbia
  unsure (1)..(572): unsure at all n locations
ctatagggaaagctggtacccctccaggtaccggtccggaattcccgggtcgacccccgggtccggacagagaagatgggcatggcaatgaagtcagtttctaacttcgcaatctttttaatcctctttttggtcacctctgaaatatctgagatagaagcgaaagataaggaatgtctaaaaggatacattgatgcgcctttaagctattgtatggctaggatttatccgtcgttgtgttatcgaaattgtcgtttttacaagggcgcgaaaggtggaaaatgcgacggtcttaagtgcttctgcgacttctgcagcgacaagcctttttagtcagtttctgatgagaaatgtttgaatcttggcatgtataatggtttgtgtaatgattaaaggtaaacgaacaagtaatagtcaataagtaaaataaaaattaaaaacgctagactttgattgtgttatcactaaaataaatgaagataagtgggacnnnnnnnnnnnnnnnnnnnnnnnnnnnnnnnnnnnnnnnnnnnnnnnnnnnnnnnnnnnnnnnnnnnnnnnnnnnnnnnnnn

SEQ ID NO: 93845 - DNA, 639 bp, Arabidopsis thaliana columbia
  unsure (1)..(639): unsure at all n locations
ccggcactatacgactcacttagggaaagctggtacgcctgcaggtaccggtccggaattcccgggtcgacccacgcgtccggaagattagagactacagagacagagaagatgggcatggcaatgaagtcagtttctaacttcgcaatctttttaatcctctttttggtcacctctggtaaattttaactccgtacttctcacatacttattaaaatttgtgattcatacgatccatagaggatttaattatttctgttggtgattgctgcaagtttctttatatgtgaattttatttgccaaaactaatttatttgtatatacatgatatgtgagcagaaatatctgagatagaagcgaaagataaggaatgtctaaaaggatacattgatgcgcctttaagctattgtatggctaggatttatccgtcgttgtgttatcgaaattgtcgtttttacaagggcgcgaaaggtggaaaatgcgacggtcttaagtgcttctgcgacttctgcagcgacaagcctttttagtcagtttctgatgagaaatgtttgaatcttggcatggtataatggcttgtgtaatgattaaaggtnaacgaacaagtaatagtcaataagtaaaataaaaattaaaaa

SEQ ID NO: 93846 - DNA, 624 bp, Arabidopsis thaliana columbia
  unsure (1)..(624): unsure at all n locations
nnnnnnnnnnnnnnnnnnatgcnnnngcacnnnnnnnnnnnnnnnnnnnnnnnnnnnnnnnnnnnnnnnnnnngatagcaattcataacaagaagattaccaactacagagacagagaagatgggcatggcaatgaagtcagtttctaacttcgcaatctttttaatcctctttttggtcacctctgaaatatctgagatagaagcgaaagataaggaatgtctaaaaggatacattgatgcgcctttaagctattgtatggctaggatttatccgtcgttgtgttatcgaaattgtcgtttttacaagggcgcgaaaggtggaaaatgcgacggtcttaagtgcttctgcgacttctgcagcgacaagcctttttagtcagtttctgatgagaaatgtttgaatcttggcatgtataatggtttgtgtaatgattaaaggtaaacgaacaagtaatagtcaataagtaaaataaactttataaaaaaaaaataaaaaaaaggaaaanaaaaaaaaanaaaaataaaaaaaaaaaaaaaaaaaaaaaaggggcggccgctctaaaggatccaagcttacgtacgcgtgcatgcaacgtaatagcttttnnnnnnnnnnnnnnnn

SEQ ID NO: 93847 - DNA, 847 bp, Arabidopsis thaliana columbia
  unsure (1)..(847): unsure at all n locations
aagaggctcccatacccaagcagatcctttgaacttgctcactgttcacgttgtcgtatcgattggnttcaaagagatggtattcttcttctcgagctagacagggtgctaagaccnggtggctattttncatattcatctccagaagcatatgcacaagatgaagaggacctcagaatatggagagaaatgagtgctcttgtgggccgtatgtgttggacgatagctgcaaaaaggaatcaaactgtaatttggcaaaaacctttgacaaatgattgttatttgggaagagaacctggaacccagcctcctctttgcaattctgacagtgaccctgatgctgtgtatggtgtaaacatggaagcatgcattactcaatacagtgaccatgaccacaaaaccaagggaagtggattggctccatggccagctcgattaacctctcctcctcctcggctagctgactttggctattccactgacatttttgagaaggatacagaaacttggaggcagagagtagatacttattgggatctcttgagtcctaaaatccaatcagacacttgtgaggaacataatgggcatgaaaggcaagcattggggctccctttgctgctgctcttgaaggaaaaagatgtctggggattgtgtgttgttcctgaggncggacctaacacgcttaaactggatatatgccagnggtttaatggggcgnnggtcatnagctggtntgaagattctcggccatntccaagggcatttgntcccctncatgcttgggntattttacngggtttcaaggnaaaagggtttaggtaagggggttttnnaccgggnatggncc

SEQ ID NO: 93848 - DNA, 449 bp, Arabidopsis thaliana columbia
gaaagtctctcccagactagagtcttccctaattttttctatctcatcctcacgatgcacctcaatggctgggtcttcttcttcctgttttgtcttctttttactaaaattttataaaatagcatttcttcttagatagtgcgtttcccaacataagaccctacaaaaatttatgggatgaaaattataataataatttctatgtactttttttttttttttttttttaaacttcgttttcatctaatactatgcagcccatatactaaatgcctaaatctatacatatttagattgatctttaaatatcaataaaaaatttagctaaattttgactggtttagaggatttttccgatgtgtcattaggattatacaactatggtttaaatatcaataaaaaatatagctggttttacaatgcaatatgattggagtgtaatttttatt

SEQ ID NO: 93849 - DNA, 687 bp, Arabidopsis thaliana columbia
  unsure (1)..(687): unsure at all n locations
cnnnnnnnnnnnnnnnnnnnnnnnnnnnnnnnnnnnnnnnnnnnnnngcaggtccgcgattccgggtcgacccacgcgtccgcacaatcagagtcagttcatagatggtgggagatatcatatcgacttggataggattgctacgtggagatgaaatccgaactacattaatcatcaaaaacatcccaaacaagtacacttacaagatgctggtggctgaaatcgacgaaaagcacaagggagactatgactttctatgcttgccgacagactttaagcttttttctggatacagaataaatgcaacatgggtcacgcttttatcaacatggtctctccattgcacatcgttcccttccaacagactttcaatggtaaaatatgggagaaattcaacagtgggaaagttgcttcattggcatatgcagagatccaaggaaagtctgcccttgcgtcatacatgcagactccaagttctatgaaggaacaaaagcaattgtttccagaagtctcctaccatgatgatggtcaagacgccaatgatcacgagcaactgttttcaagcatttggaacataaccgcgcctgattcagattggtcttacacaatggatcttatcgaaaatccgagggagaacggtaactccaagaatgctgcagaagagtcctcttgaatccccactaaaaa

SEQ ID NO: 93850 - DNA, 1112 bp, Arabidopsis thaliana columbia
  unsure (1)..(1112): unsure at all n locations
cggacgcgtgggcggacgcgngggtgttcagtgattatcaaacctnggngttagtctaccggggaacagtagtgaacaggatttcactggctttggcatgtcttcaatgcctacagttcctttcggtgggagtagaggattacaatcagtaaggcctgaaccttttgctgagcagggtaggatacataaccacgagagtcacaatcagaatcagttcatagatggtgggagatatcatatcgacttggataggattgctagtggagatgaaatccgaactacattaatcatcaaaaacatcccaaacaagtacacttacaagatgctggtggctgaaatcgacgaaaagcacaagggagactatgactttttatgcttgccgacagactttaagaataaatgcaacatgggtcacgcttttatcaacatggtctctccattgcacatcgttcccttccaacaggctttcattggtaaaatatgggaggaattcaacagtggggaagttcgcttccttggccttatgcaaagatccaaggaaagtctgcccttgcgtcatacatgcagactccaagttctataagggaacaaaagcaattgtttccagaagtctcctaccatgatgatggtcaagacgccaatgatcacgagcaactgttttcaagcatttggaacataaccgcgcctgattcagattggtcttacacaatggatcttatcgaaaatccgagggagaacggtaactccaagaatgctgcagaagagtcctcttgaatccccactaaaactagtagttgggaactctaactcaccatcaaaggtaaactaagtgtacaggtctggcgcggttatggaagaaacagaatgtacagtattaaggcttgttttctccacggaacaaagtaaccagtttttagggattacttcactcgaagcaaccgattaaagaaacatccctattagtacattacgttgtatactttatattcggaaacttctctctatatcagtcatgtgtatattaaaaaaaacacaacaaaagnaaacaaagggcggccgctctagaggatccaagcttacgtacgcgtgcatgcgacgtcatnnnnnnnaac

SEQ ID NO: 93851 - DNA, 839 bp, Arabidopsis thaliana columbia
  unsure (1)..(839): unsure at all n locations
aggtgacacttacaagacnatgacgtcgcctgcacgcgtgcgtaagctcggaattcggctcgaggtcctaaccctggtgaggagtttacttttactgagcttaaccaaacaaactggtcatttgaagatacaccacagattctcgtacccattgcagaggagtcagaggaaattgaagctctagcgcttgtagatatcctgaggcgggcaaaagcaaatgttttgattgctgcaggggggtaacattttggaagttgaaggatctcacaaagctaagctagtagcaaaagtttttcttgatgagggggcagagaagtcgtttgatctgattgtgttacctggcggtcttaacggggctcaaagattcgcaagctgccagaagctagtttatatgttaaggaaacaggcagaagcaaacaacccttttgggggaatctgcgcatcccctgctttcctctttcgagcctaatgggtttctcaagggtaagaaggctactccctcacccagtggtgagcgacaaactttcggacaagagtcacattgagcacagagtcgtggtagatggaaatgtcataacaagcagagctccagggnctgcaatggagttttcacttgccattgtcggaaagtttttacgggcgagagaaaagctcttcaagtcggaaaggcaacacttgtgtgnttttcaaacaatgaaagtatgagagtggcttgaataaaaagaaggctttncntttaggtatctcccnccattaggaattccttccttatggttttgcatatnnccttgcttagnnttgggggancttntncttttaatgataccgggttnttaaat

SEQ ID NO: 93852 - DNA, 494 bp, Arabidopsis thaliana columbia
  unsure (1)..(494): unsure at all n locations
tgcaggcaacgggttaccctgtttttatggagaaacttgcggctacttgtgcaactgctgttgagtcaagagtgcaaattgatggaagaatagtgaccagtcgtggaccaggaaccaccattgaattctccatcacgcttatagagcagttgtttgggaaagaaaaagctgatgaagtctccagtatcttgctgcttcgtcctaaccctggtgaggagtttacttttactgaggttaaccaaacaaactggtcatttgaagatacaccacaggtaaatgttcagttgcctctccacttggcccttttaacatttttccaagnccaggcttttgtttgatcccgctatacaagattncttagggacatgctgtgttgtaaagnattttggctttccttgatcaataggccttttttgnggccaggggggttaatggtttnccctttcaanttnncggancccnttcnaggggggcaagngggaatttagncttag

SEQ ID NO: 93853 - DNA, 1418 bp, Arabidopsis thaliana columbia
  unsure (1)..(1418): unsure at all n locations
gcaatacccttccggaatttccggcgcgacccacccgtccgctactattctaaccccattagtgacactcctttcttctccactacactccatttctctttcttcttgactcgaccatcgtttctctaatctccgcaactatggcttcatttacgaaaacggttttgatccctattgcgcacggtacggagcctctagaagcggtggcgatgattaccgtgttgcgtcgaggtggtgctgacgtgacggtggcgtctgttgagactcaggttggcgttgatgcttgtcatggcatcaagatggtcgctgatactcttctctctgatattaccgactctgttttcgaccttattgtgctccccggagggcttcccggtggcgagactcttaaaaactgtaaatctttagagaacatggtcaagaaacaagactctgatggccgacttaacgcagctatatgttgtgctcctgccttggctcttggtacttggggtctactagaaggcaagaaagcaacgggttaccctgtttttatggagaaacttgcggctacttgtgcaactgctgttgagtcaagagtgcaaattgatggaagaatagtgaccagtcgtggaccaggaaccaccattgaattctccatcacgcttatagagcagttgtttgggaaagaaaaagctgatgaagtctccagtatcttgctgcttcgtcctaaccctggtgaggagtttacttttactgagcttaaccaaacaaactggtcatttgaagatacaccacagattctcgtacccattgcagaggagtcagaggaaattgaagctatagcgcttgtagatatcctgaggcgggcaaaagcaaatgtagtgattgctgcagttggtaacagtttggaagttgaaggatctcgcaaagctaagctagtagcagaagttcttcttgatgaggttgcagagaagtcgtttgatctgattgtgttacctggcggtcttaacggtgctcaaagattcgcaagctgcgagaagctagttaatatgttaaggaaacaggcagaagcaaacaaaccatatggaggaatctgcgcatcgcctgcttacgtccttcgagcctaatggtttactcaagggtaagaaggctactactcacccagtggtgagcggcaaactttcggccaagagtcacattgagcacagagtcgtggtaggtttggaaatgtcataccaagcagagctcccaggggcctccaatggggttttcacttgcccatttccgaaaaccgttttccgggcgagagaaagctcttcacctcggcaaagcaaccctttttggtttcaaacaattaaacgatttngggggnttattaaaanaggctttccctttaggttcccccccattgnattcctcctttgattgcattggga

SEQ ID NO: 93854 - DNA, 753 bp, Arabidopsis thaliana columbia
  unsure (1)..(753): unsure at all n locations
gagagggatgacaaaccttgaaatactggggcccaaccattattgttctcagtggtacaagtgggagtggaggctctcccaactaacctataagcagagtcttcttgttgggttgcagagaagtcgtttgatctgattgtgttacctggcggtcttaacggtgctcaaagattcgcaagctgcgagaagctagttaatatgttaaggaaacaggcagaagcaaacaaaccatatggaggaatctgcgcatcgcctgcttacgtcttcgagcctaatggtttactcaagggtaagaaggctactactcacccagtggtgagcgacaaactttcggacaagagtcacattgagcacagagtcgtggtagatggaaatgtcataacaagcagagctccagggactgcaatggagttttcacttgccattgtcgaaaagttttacgggcgagagaaagctcttcagctcggaaaggcaacacttgtgtgatttcaaacaatgaaagtatgagagtggcttgaataaaaagaaggctttgccttttagttatctctctccattagtaattacttactttatgatatatgacatatgagcttggcttagtgattggtgtgtaactttatgcctttataaatgaataaacgagatttttctaaaaaaaaaaaaaaaagnnnnnnnnnnnnnnnnnnnnnnnnnnnnnnnnnnnnnnnnnnnnnnnnnnnnnnnnnnnnnnnnnnnnnnnnnntacaatcg

SEQ ID NO: 93855 - DNA, 799 bp, Arabidopsis thaliana columbia
  unsure (1)..(799): unsure at all n locations
cagcnnnnnatacgactcaccttagggaaagctggtacgcctgcaggtaccggtccggaattcccgggtcgacccacgcgtccgcggacgcgtgggcggacgcgtgggttttacctctaaagccaaagaccaacatgtctaattcaaaccaaccacttctttccaaaccaaagtctcttaagcacaagaatctatgccttgtcctctccttcgtagccattcttggctctgtggctttcttcacagcccaattaatctccgttaacaccaacaataatgatgattccttattaactacgagccagatttgccatggagctcacgaccaagactcatgccaagctctcttgtccgaattcacgacgttgtcgctctcaaagctcaaccgccttgacctattgcacgtgtttttgaagaactcggtgtggcggcttgagagcacgatgaccatggtgagcgaggctaggatccgctcgaacggtgttagagacaaggcaggttttgctgactgcgaggagatgatggacgtatcaaaggatcggatgatgagttcgatggagggacttcgcggaggaaactataatcttgagtcatacttcaaacgttcatacttggcttgagcagttgtgcttacatacctacaatgacatgtgtagaaagtattaggtgatgtctccgtcaacttttaagcaattagtcaagcnacaacttgagggctttggtttttngggcaannantggctnttngcatcttttctccgnnttncttccnaaancggtnttaaatggccattccnat

SEQ ID NO: 93856 - DNA, 1116 bp, Arabidopsis thaliana columbia
  unsure (1)..(1116): unsure at all n locations
gttcaaaacagtgaatgaggcagtggcggcaaccggagaacagcaatacaagataccgggtcgacccacgcgtccgggtttacaaagaaactattgacataggaaagaaaaagaagaacttaatgcttgttggtgatggcaaagacgcaacgatcataaccggtagtttgaatgtcattgatggatccaccaccttcagatcagccactgttgctgccaatggagacgggtttatggcacaagacatatggttccaaaacactgcagggccggcaaagcaccaggctgtggctctacgagtgagtgctgatcaaactgttataaatcgttgtcgcatagatgcgtatcaagacacgctctacactcacacgttgagacaattctaccgcgacagctacatcaccggtaccgtagatttcatcttcgggaactctgctgtggtattccagaactgcgacatcgtggcacgaaatcctggagctgggcaaaagaacatgttgacggctcaaggacgggaggatcagaaccagaacaccgccatttcgatccaaaaatgtaagataacggctagttcggatcttggctcctgtaaaaggatctgtgaaaacgttccttgggcgaccgtggaagttgtactcaagaacagtgatcatgcagtctttccattgacaaccacattgacccggctggttggttcccatgggatggtgagtttgcgctctcccacattgtattatggagagtatgcaaataccggtcctggagcggatacgagtaagagagtgaattggaagggatttaaagttattaaagactcaaaagaggccgaacaattcactgtggcgaagcttattcaaggaggattatggttgaaacccactggagttactttccaagagtggctttgattttaatgtctacttgttcttgtactttgtgttgtgttacctctgttttagtttgatgtattttttctgttttgttttgtatgacttacccaataaataacatgctctgtttcgccnnnnnnnnnnnnnnnnnnnnnnnnnnnnnnnnnnnnnnnnnnnnnnnnnnnnnnnnnnnnnnnnnnnnnnnnnnnnnnnnnnnnnnnnnnnn

SEQ ID NO: 93857 - DNA, 891 bp, Arabidopsis thaliana columbia
  unsure (1)..(891): unsure at all n locations
tccagcactatcgactcacttagggaaagctcggtacgcctgcaggtaccggtccggaattcccgggtcgacccacgcgtccgagatgatggacgtatcaaaggatcggatgatgagttcgatggaggaacttcgcggaggaaactataatcttgagtcatactcaaacgttcatacttggctgagcagtgtgcttacaaactacatgacatgtttagaaagtattagtgatgtctccgtcaactctaagcaaatagtcaagccacaactcgaggacttggtttctagggcaagagtggctctagccatctttgtctccgtcttgcctgccagagacgatctcaaaatgatcatttccaatcgcttcccgtcgtggctaactgctcttgacagaaagcttttagaatcttctcccaagacacttaaggtgaccgcgaacgttgtggtggcaaaagacggcaccggaaagttcaaaacagtgaatgaggcagtggcggcagcaccggagaacagcaatacaagatacgttatatacgtaaagaaaggggtttacaaagaaactattgacataggaaagataaagaagaacttaatgcttgttggtgatggcaaagacgcaacgatcataaccggtagtttgaatgcattgatggatccccaccttcagatccagccactgtgctgcaatggagacgggttatggacaagcatatggtccaaacactgcaggcggcaagaccngctgggccacgaggagtgtgacaactgataatcgtgcgataatgcgatagaccctcaactacacgtgaacatctacgcaagtactaccggccgaattatctcgaacttgctggatcaactgactgtggcaatctgactggaagactgtac

SEQ ID NO: 93858 - DNA, 449 bp, Arabidopsis thaliana columbia
  unsure (1)..(449): unsure at all n locations
gatactaaagattgtgaaggagagcttcgacttcagaccaggaatgatgacatttaaccttgccctaaagagaggaggaaacggaaggttcttgaaaactgcggcttacggacactttggaagagacgcccctgacttcacctgggaagtcgtcaagccactcaagtgggacaaacctcaagcttaaattttacctactctgtttctgtcttcattccacaaaccaattatctgctcacttttttatttctctgtttttgtggtttattgtgtttatgtatcattgtacttgagctatttcaattgggtgtttgtttttatggcgacttttcaaaaaaaaaaaaacaaacgaagtaaagtggtaaataacaaaaaccacaaaaacaatatttgnnnnnnnnnnnnnnnnnnnnnnnnnnnnnnnnnnnnnnnnnnnnnnnnnnnnnggc

SEQ ID NO: 93859 - DNA, 605 bp, Arabidopsis thaliana columbia
  unsure (1)..(605): unsure at all n locations
aggtgacactatagaagagttatgacgtcgcatgcacgcgtacgtaagctcggaattcggctcgaggcagctaagagcgttgtggctaacgggatggctcgtagggctcttgttcaggtctcatacgccattggagtccctgagccattgtctgtctttgtggacacttatgagactggattgattccagacaaggagatactaaagattgtgaaggagagcttcgacttcagaccaggaatgatgacaattaaccttgacctaaagagaggaggaaacggaaggttcttgaaaactgcggcttacggacactttggaagagacgaccctgacttcacctgggaagtcgtcaagccactcaagtgggacaaacctcaggcttaaattttacctactctggtttctgtcttcattccacaaaccaattatctgctcacttttttatttctctgtttttgggggttattgggtttatggatcaattgtaccttggagctatttcaatagtgggggtgttttgttttttatgggggggcttttacancgggntttgnggaaggttcaaggttggccccatnnaattnttanccctgnaaattnatttt

SEQ ID NO: 93860 - DNA, 662 bp, Arabidopsis thaliana columbia
  unsure (1)..(662): unsure at all n locations
gactttnagngggcncncggttnntggtttacggccnnaaccntttttcanaatcggaggttggagcccatggaggtggtcctttctcaggcaaagacccaaccaaagccgacagaagtggggcttcccccgtgaggcaagcagcaaagagtgtggtggctaatggcatggcccgcagggctcttgcccaggtctcatacgccatttggagtacccgagccattgtctgtcctccgttgacacttacggaacagggttgattccagacaaggagatcctgaagatcgtgaaagagacattcgatttcagaccaggaatgatgacaatcaacttggacttgaagagaggaggaaatggaaggtttcagaaaacggcagcgtatggacatttcggaagagacgaccctgacctttcacctgggaggtcgtgaagccactcaagtgggacaaacctcaagccttaaccttgattttatggttccttctgcctttttactttaaacatctaccatgggccaataatcaaatccccctggtcctttttctgaataatgnnatgaaagcggccgaatcctgaacccgggggnccctgtctaaaggcccncccggngggnccacctttgncccttagaagggnattcaccttgggacatggcaactntc

SEQ ID NO: 93861 - DNA, 577 bp, Arabidopsis thaliana columbia
  unsure (1)..(577): unsure at all n locations
nnnnnnnnnnnnnnnnnnnnnnnnnnnnnnnnnnnnnnnnnnnnnnnnnnnnggaaaaccggccgggacccacgcgtccgctcttttaacacttgttcttttaaggcaaaaaggctcgagccacagagatctgagtttctcttcttcgagatctgatcgccgaatctcataatctcccatcgaagcagaatggagacttttctattcacatctgagtctgtaaacgagggacacccagacaagctctgtgaccagatctctgatgcagtcctcgatgcctgccttgaacaagaccctgacagcaaagttgcttgtgagacatgcaccaagaccaacatggtcatggtctttggtgagatcactaccaaggctactgttgactacgagaagattgtccgtgacacctgtcgcgccattggatttgtctctgatgatgttggtcttgatgctgacaaatgcaaagtcctagtcaacattgagcaacagagcccagacattgctcaaggagttcacggtcacttcaccaaatgtcctaagaaattggggccgttgnccaaggganatttttggttttnnc

SEQ ID NO: 93862 - DNA, 874 bp, Arabidopsis thaliana columbia
  unsure (1)..(874): unsure at all n locations
tnnacgactcactatagggaaagctggcacgcctgcaggtaccggtccggaattcccgggtcggcccacgcgtgcggtttccttcttcgctcgctgttcagattttgctttgaggctttaggctccccagatctctaatcgccgcagctttaagaaatggagactttcctattcacatctgagtctgtgaacgaaggacaccctgacaagctttgcgaccagatctctgatgcagtccttgatgcctgccttgagcaagaccctgatagcaaagttgcttgtgagacatgcaccaagaccaacatggtcatggttttcggtgagatcaccaccaaggctacgattgactacgagaagattgtccgtgacacttgccgttccattggattcatctctgacgatgttggtcttgatgctgacaaatgcaaagtccttgttaacattgaacaacagagcccagacattgctcaaggtgttcacggtcacttcaccaaacgtccagaagacattggagctggtgaccaaggacacatgtttggttatgccactgatgaaacccctgagctcatgcctttgagtcatgtccttgcaaccaagattggtgctcgtctcactgaagtcaggaagaatggaacttgccgttggttaagaccagatggcaagacccaagtcactgttgagtactacaatgacaaggggtgccatggtccnaatcngtgtncaaaacaantccttaattttcacccaacaaggatgaaaacttttnaccaacggnggaaatttccccntgnacctttaaggggcatgttcattaaagccagttnattccanggggaaggtacntnggtnggnaaaaccnttttttccattttta

SEQ ID NO: 93863 - DNA, 774 bp, Arabidopsis thaliana columbia
  unsure (1)..(774): unsure at all n locations
gtcttccacctcaacccatcaggccggtttgtgatcgggggaccacacggtaatgctggtttaactggacgtaagatcatcattgacacatacggaggatggggagctcatggaggtggtgctttctcaggcaaaggcccacccaaagtcgacagaagtggagcttacaccgtgagccaagcagcaaagagtgtggtgcctaatggcatggctcgcagggctcttgtccaggtctcatacgccattggagtacccgagccattgtctgtcttcgttgacacttacggaacagggttgattccagacaaggagatcctgaagatcgtgaaagagacattcgatttcagaccaggaatgatgacaatcaacttggacttgaagagaggaggaaatggaaggtttcagaaaacggcagcgtatggacatttcggaagagacgaccctgacttcacctgggaggtcgtgaagccactcaagtgggacaaacctcaagcttaaacttgattttatgtttcttctgtctttttactttaaacatctaccatggaccaataatcaaatccctctgtttcttttttcttgtattattgatatgaaagtttctggtttgtttaaacaactaccatagaccaattttctctttcactataaattgtagtagttgaaatttgtgttctcaaccaaaaaagggcaggccgctctagaggatccaagcttacgtacgcgtgcatgcgacgtnnnnnnnnnnnnnnnnnnnnnnnnnnnnnnnnnnnn

SEQ ID NO: 93864 - DNA, 1272 bp, Arabidopsis thaliana columbia
tgtccgtctgcagtaccgttccggaatttccgggtcgacccacgcgtccgccgggacacctgtcgcgccattggatttgtctctgttgatgttggtcttgatgctgacaaatgcaaagtcctagtcaacattgagcaacagagcccagacattgctcaaggagttcacggtcacttcaccaaatgtcctgaagaaattggagccggtgaccaagggcacatgtttggttatgccactgatgaaacccctgagttaatgcccctgagccatgttcttgccaccaagctcggtgctcgcctaacagaagtcagaaagaatggtacttgcgcctggctaagacctgacggcaaaacccaagtcactgttgagtactacaatgacaagggtgccatggtcccaatccgtgtccacacagtcctcatctccacccaacacgatgaaactgtgaccaacgacgaaattgcccgtgaccttaaggagcatgtcatcaagccagtcatcccagagaagtacctagacgagaaaaccatcttccacttgaacccttcaggccgattcgtcatcggtggaccccatggagacgctggtctcaccgggcgtaagatcatcatcgacacttacggtggatggggagctcacggaggcggtgcattctcaggtaaagacccaaccaaggtcgacagaagcggagcctacattgtgagacaagcagctaagagcgttgtggctaacgggatggctcgtagggctcttgttcaggtctcatacgccattggagtccctgagccattgtctgtctttgtggacacttatgagactggattgattccagacaaggagatactaaagattgtgaaggagagcttcgacttcagaccaggaatgatgacaattaaccttgacctaaagagaggaggaaacggaaggttcttgaaaactgcggcttacggacactttggaagagacgaccctgacttcacctgggaagtcgtcaagccactcaagtgggacaaacctcaagcttaaattttacctactctgtttctgtcttcattccacaaaccaattatctgctcacttttttatttctctgtttttgtggtttattgtgtttatgtatcattgtacttgagctatttcaattgggtgtttgtttttatggcgacttttacacggcttggagtaagtttcatgttgttcttatataattaatacaagcttccgtacgcgtgcatgcgacgtcatagctcttctatagtgtcacgtaaattc

SEQ ID NO: 93865 - DNA, 458 bp, Arabidopsis thaliana columbia
aataaatacaatttccaccttttatttcgtatttagtattacaaataaagtattttatattgggggcataaatatatataccacgctcaggattagtctcggtcaaaattgcatgtggtgttcccctatacgataagtaaccctaccaagtattgaaaatgacaagtacggtttcctgcaaaccgattgaaagttacaaatccatggattttacaatactatataatagctattattatttaactaaaagtacatacatctagctcaactgataataaatcgagtcacacagtatcaattattggtttaaaatttgatgaactctttccgtggatttggaatctagcacaaatattatctatagatttcatttttgatagatcacatatattatttctgtatattctcttgtgggaaataaaagtatgttttgaagacatcaatatctaatcatattc

SEQ ID NO: 93866 - DNA, 1192 bp, Arabidopsis thaliana columbia
  unsure (1)..(1192): unsure at all n locations
gtttacgcgttcgtccacctctctcaaatctagaaagagaaaaagtcttaaatttgtctcatttatgcgataagaaccacaattcctctatcaaaatctctctctctgacatacccagttggaaaaattcaatcttttatccctaagattcgatctttcttcttgggaagttgataaatgttcaaggaaacataaaaaagagaagatttttgaataaaggttgaagaaaaatgcaggatccagcagcatattaccagacgatgatggcgaagcaacaacaacaacaacaaccacagtttgcagagcaagaacagttaaagtgtcctcgttgtgactcaccaaacactaaattctgttactacaacaactacaatctctcacagcctcgtcacttttgcaaaagctgtcgtcgttactggactaaaggcggcgctctccgtaacgttcccgtcggtggtggttctcgtaagaacgcaaccaaacgatccacttcttcttcttcttctgcttcctctccttccaacagtagccaaaacaagaagacgaaaaacccggatccggatcctgatccacgtaattctcaaaaaccggatttggatccgacccggatgctttacgggtttccgatcggtgaccaagacgtgaagggtatggagattggtggaagctttagctcgttgttggcgaataatatgcagcttggtcttggaggaggagggatcatgcttgacgggtcgggttgggatcatccgggtatgggtttgggtttgaggagaaccgaaccgggtaataataataataacccatggaccgatctggctatgaacagagcggagaaaaactgaagaagaaaagaagagaggggtattttggtaaattatagcaaactgattttgggtgacttgagccatcacgtagacactgaacagtttcgatcatgtttatgtcattttggtaatattattattattcctcctcctactttatttctatttatataatcggttttgtcgtaattttaatcctgtgtaatagaaagaaatttctcagtttattttgtgcattctgatttgatgaaattttatgttttatgtaaaaaaaaaaaaaaaagnnnnnnnnnnnnnnnnnnnnnnnnnnnnnnnnnnnnnnnnnnnnnnnnnnnnnnnnnnnnnnnnnnnnnnnnnnnnnnncg

SEQ ID NO: 93867 - DNA, 502 bp, Arabidopsis thaliana columbia
  unsure (1)..(502): unsure at all n locations
aaccggtcccggnaattncccgggntgcgnacccacgtcgtccgtgccttacctctacaaatctcctcctcctccataccactattagatatctctatcacggagaacacgatgtacacaagaagacaaagacaagacgaaaccagtactggtgattgtaataagagaaacaaaagatgaaagagagaatccaagcagagaaagctttctcatcattttcaaagtattgtttgcgttttattgtaataaatttgaaacttgtgtgtgttgatcaatcaatggttcatgcatgcaatcaatagtcatatatctatgtttgtaaaattttaattacgtcttgtttctttctgatttttttcatgtgcaagtttgctttgtcccaattaataaaggagagtccttaataaaaaggagttaacaatactcaaaganagncanacnggttnnnnnnnnnnnnnnnnnnnnnnnnnnnnnnnnnnnnnnnnnnnnnnnnnnnnnnnnn

SEQ ID NO: 93868 - DNA, 1077 bp, Arabidopsis thaliana columbia
  unsure (1)..(1077): unsure at all n locations
aaaacaaccaatggggtctccaatggcctctttagtggcaactttgcttgtcttaacaatctctctcacctttgtatctcaatcaaccgctaactatttctattcttctcctccaccaccggttaaacattacactcctccggttaaacactactctcctccaccggtataccactccccaccaccacctaagaagcactacgaatacaaatctccacctccaccggttaagcactactcacctcctccggtttaccattccccacccccaccaaagaaacactacgtgtacaaatctcctcctccttcggtcaagcactactctcccccaccggtttatcactccccaccaccaccaaagaagcactacgtttacaaatctccccctcctccggttaagcactactcttcctcctccggtttaccactctccaccaccacccaagaagcactacgtgtacaaatctccccctcctccagtcaagcactactctaccccaccggtttaccactcaccaccaccaccaaagaaacattacgtatacaagtctcctcctcctccggttaagcactactctccccctccggtttaccactcaccaccaccaccaaaaaaacattacgtttacaagtctcctcctcctccggttaagcactactctccccctccggtttaccattccccacccccacctaaaaagcattacgtctacaaatctccaccaccaccggtgaagcactactcacctcctccggtttaccattccccaccacccccaaagaaacactacgtgtacaaatctcctcctcctccggttaagcactactctcctcctccggtttaccattccccacccccaccaaagaaacactacgtgtacaaatctccaccaccaccggtgaagcactactctccccctccagtttaccattccccaccaccaccaaagaaacatttcgtatacaaagtcccctcctcctccggttaagcactactctncccctncngtntactattccccaccaccatcaaanggancattacgtgntacaagtccccttngtccttcgggntaa

SEQ ID NO: 93869 - DNA, 820 bp, Arabidopsis thaliana columbia
  unsure (1)..(820): unsure at all n locations
cattccccaccaccaccaaagatatctctacgtgtacttttttcctcctcctccagttaagcactactctggtgctccggtttaccattccccacccccaccaaagaaacactacgtgtacaaatctccaccaccaccggtgaagcactactctccccctccagtttaccattccccaccaccaccaaagaaacattacgtatacaagtcccctcctcctccggttaagcactactctccccctccagtctaccattccccaccaccaccaaagaaacattacgtatacaagtcccctcctcctccggttaagcactactctcctcctccggtttaccactctccaccaccaccaaaggaaaagtacgtgtacaaatcacctcctcctcctccagtacaccactactctccaccacaccatccttacctctacaaatctcctcctcctccataccactattagatatctctatcacggagaacacgatgtacacaagaagacaaagacaagacgaaaccagtactggtgattgtaataagagaaacaaaagatgaaagagagaatccaagcagagaaagctttctcatcattttcaaagtattgtttgcgttttattgtaataaatttgaaacttgtgtgtgttgatcaatcaatgggtcatgcatgcaatcaatagtcatatatctatgtttggaaaattttaattacggcttggttctttctgatttttttcatgggcaaggttgctttggccccaattaataagggggggccccttaaaaaaaaaaataaaaaggggggcctggggcagnttcgngc

SEQ ID NO: 93870 - DNA, 1073 bp, Arabidopsis thaliana columbia
gtaaaaatagcaatgtattatgtatgtcgattaaatgttgagagactcgtatatagagtataatagatctcataaaagatcatacaatgtagacagtaacagaggattgacacatcaatgaaaaggaaggttgagactcacagagtaagaagatttacatacagtacatactgggttcagcgactttgtgtttacgtgttgtaggtcataatcacaaatcagagtagtcgtatagagacccgtcgattgcactcaccgtaatagtaatgaagtcaaggtgcatgcgaatatggaacatgacaagtacttgacagacgtcagtaggatagcgtatgacatgagaatactgatcgacatataagagtgaagaaaattatgattgtagatatagtatatagtaccagagtagacatagtattaggatgacatctaagactattataagtgggataaaggtgggatataatatataatcatatgacataatcaatttgtagctatatatatatataatcttgataaatcgatgagtattcatgacgacaaaaagatgaataaggattataagaaatataatatataatgaatgtacttgttaaatagttatatccaccacaccatccttacctctacaaatctcctcctcctccataccactattagatatctctatcacggagaacacgatgtacacaagaagacaaagacaagacgaaaccagtactggtgattgtaataagagaaacaaaagatgaaagagagaatccaagcagagaaagctttctcatcattttcaaagtattgtttgcgttttattgtaataaatttgaaacttgtgtgtgttgatcaatcaatggttcatgcatgcaatcaatagtcatatatctatgtttgtaaaattttaattacgtcttgtttctttctgatttttttcatgtgcaagtttgctttgtcccaattaataaaggagagttcttaataaaaagaaaaaaaaagggcggccgctctagaggatccaagcttacgtacgcgtgcgtgcgacgtcataatcttctatagttcacataatcaat

SEQ ID NO: 93871 - DNA, 593 bp, Arabidopsis thaliana columbia
  unsure (1)..(593): unsure at all n locations
gagacaacaaaaagagagaacaatgtcttcgtcgagggagctacaatacttggagggcgacatacagaaacaaccgtcccacgacgggtctcctcaactccatcttcatgaccaccgtcaacacggccgctcgttctctcgtctccgtcgcttccaccgcctctacaccagagattccttctaggcgatggtcggcttcggaccacctcaggttcatgtctatgatgatgacgtggcttaccctttggatccttagagttttcttggactatcttcctcttcctctcatctcttcttcttcttctgcttattcttattcttatcctccctttagtttcgcttcgggtcttcttaccacggctgcggagaacgcgttggtcccggctaaggcttcctcgtcgtcgtccacgtcatcaactgcgttggtgaagtattcagggtcgtcagatttgggtatgatgatttgcgacggcgttgatgagccttctgttaactctctcggtagagctctttgtcacgcattagcgcttatgaacgagattccagtaacctcaagaaaatatcaatntggcatgggaatggatgacaagatc

SEQ ID NO: 93872 - DNA, 432 bp, Arabidopsis thaliana columbia
caagaaccaattttgcatatacgatctttaagataaatgaatagcaggtggaaccggcactcctccttcgagtccaaaagcaagtgtaaagagtatttgttcataagaattgacacaaatggttcaaactatttgagatgagttctgttctctaaagccattaactttagtatcaaaaggtgagctaaactggttctaaactactgcattcataggcaggtagggaattagaatcatgggcaaacaaaagaacaaacagatctcagatgagttttcttctctaaagccatttctaagcatccatatggatcaaagggtcagctaaatgttctacaataacgcattcacaggcaggtaatgaattaggatcatcaattagcaaaagaacaaacccttttttctcttgttccttcccactgttcttcatgctca

SEQ ID NO: 93873 - DNA, 1456 bp, Arabidopsis thaliana columbia
aaaacaaaacaaaaccaaatcccaaaggattggtccaaaatctgtgtttacaaaatatcaatggcaatttcgtagtaaagataaaaaacaaggatattgtttttaatctttctattaccctattattctcttatatatatatactcttccctccggtcaaatctcgtcgtcttgtttggtctctgtttttcacgccggagatagagagagagaagtaaaaaagcgagaaaaagctagaaactttagaatacccaataatggatccgatcgaatctgtcgagtacaatggcttcgagacctctaacggtaacgtcgaccatggttggaagaaagtcgtgtacccgaaacgtcaccggaagcaaaaacaagcggatcaagcgacggcaaatggtggcaaaactgttgcttcaaatggaaccgtagctaacggcggagataacgttttccgttcgttggaagagcaagctgaggatcgtcgacgacggatcttagcggcgaagatgactgctattgattcagatgatgatggtgttgttagatctaaacatcgatctaatggttacggtgatgatgggtatgattttgatggtagtgatgatgagatcgcaacgctgaaggttgaggaagttaagaagccaaagcctaagaaggagaagaagcctaaagtttctttgcctgaagctgcatcaaagatcgatcctttaaatctcgaagcttttctcgttgaagcatcggaatcgtatgcgagtcagcctgagattcagctaatgagatttgctgattactttgggagagcactttctggagtctcatctgtgcaatttccatgggtgaagatgtttaaagagtctcctttgtctaagctgattgaagttccgttagctcatattccggaaccagtgtataagacatcagttgattggatcaaccatcgtccaattgaggcacttggagccttttgggtggggggcttttgattgtattctcacagatttagcagcacaacaaggtggtgctaaaggtgggaagaagggtggtcaacaaactacttccaaatctcaggtggcaatatttgttgcattagcgatggtattgcgtaggaagcctgatgctttgactaatgtattgccaactctgagggagaatcctaagtatcagggtcaggataagcttccggttacagtttggatgatggctcaggcctcccaaggtgatatagctgtaggcttgtattcatgggctcacaacttgttacctgttgtcggtaataagaactgtaaccctcagtcaagggatctcatcctgcagttggttgagaaaattttgacgaatccaaaggctcgtaccatacttgtaaatggagctgttaggaagggagagcgtttgattccacctccttcatttgagatcttgttgcggcttacattccctgcatcatctgcaagagtaaaggcta

SEQ ID NO: 93874 - DNA, 542 bp, Arabidopsis thaliana columbia
  unsure (1)..(542): unsure at all n locations
nnnnnnnctaccactcactattgggaaagctggaccgcctgcaggtaccggtccggaattcccgggtcgtcccacgcgtgcgcttctttttccgtacttttttatcagaacttgtagggtttcttctgtttcaattcgtggaatattttgcaacttcgatacgtaaattacgtaattagggtttgataatgttttatgtaaccagccccgaattgaattagttccaaagttagggtttttctctctcaaattagggttttgccccaattgtgttcttatattgaatttaccatttgcgcaggttatgtggtggaggttgtttccaatttaaagtatgtacctttaggttagaaattaggcttatttgtttctccagtgggtttcattgtagaaacaaattgaattttaggtgttaatgtgagattaggaaacagaatctctgcttttaacaaggtaataggagaatagggtttagtagaagaaaggttaaaactttgtgatgggtaataagtactcaaggaagaggcatgtggtgtaagaaa

SEQ ID NO: 93875 - DNA, 383 bp, Arabidopsis thaliana columbia
ctctctctatctctctcttcttcgggtttctaaaaaggacgaagcttgttgcataatatggtgaggtaaattactaattactgatccaaagttcgaatctttgctccaactccaggctagctgattgcgtagcttccgattgatttctacctgagttttgagttcctttgtggccacttcgttgttcttctgctgggttttttgctcgaggatctgatacttctgtttggtcgatgatcgagtgatcttcgttgggttttggggatctaagtcgtctatatagctaatggtttggatttgaggttgaatggagcgtttaggattttggggattgctaatggggagtgtggaaaagtcaatggattctggaaattcgttggctt

SEQ ID NO: 93876 - DNA, 472 bp, Arabidopsis thaliana columbia
cagctctatacgacttctatagggaaagctggtacgcctgcaggtaccggtccggaattcccgggtcgacccacgcgtccgagaaggcatgatgcagcagtgactgttatgctttgtgctcaacctgtcagtgggccatcagaatcaggaggttctggtgggaaagataaaaccaaaaaacctgcttgcgatgatatcatagggcttgattccttgaaacagttcttgttatacatagccaaaggtactgagattaagaaagatacccgagtaaaaaagagcattctctgtgcggctggcaagatggaaattcgatcagatctgatggattctcatatatatgccttcaagagagcagttctgcaggaagttttggatcaaaaacctgcttttaggagcctaaaacaggatgtactaccgtatcttgttcgtacacagctgagatcagatgtcttctctgaccaaagtaatg

SEQ ID NO: 93877 - DNA, 431 bp, Arabidopsis thaliana columbia
gtccgtcctgattaaccagtttctggtcttagtacaaaatgggaatcaggttcgtggaccgggtgtgaaattcaaacctgtcgatgatcatgatcgaattgaaggtagagaagctgcagaggaggaggataacaatgtggaggcagagacagagagggagaggaaggttcatgagtgtactgcaagtacgaagagacgcaagaagaagaagaaaagtgagtgttatcgatgcggaaaagcgaaatgggaaaataaggagacttgcattgtgtgtgatgaaaagtattgtggaaactgtgtgcttagagcaatgggttcgatgcctgaaggaagaaagtgtgtgagttgcatcggtcaagctattgacgaatcgaaacggtctaaattagggaagcattctcgggtattgtcgcggttgcttagtccattgg

SEQ ID NO: 93878 - DNA, 857 bp, Arabidopsis thaliana columbia
  unsure (1)..(857): unsure at all n locations
atgannnnnnnnnnnnnnnnnnnnnnnnnnnnnnnnttatctgaaaaattaaaacaaccgcgcctccgaaaaaaaaactaaaaatcaaaaatctcatcaccttccttgctctgtattttttctctctcactaaatcctccatggatccttctctctctgcaaccaatgatcctcatcatcctcctcctcctcagttcacatctttccctcctttcaccaacaccaaccccttcgcctctccaaaccaccccttcttcaccggacccaccgccgtcgcgccgccaaacaacatccatctctatcaagcagctcctccgcagcagccacaaacatctccagttcctcctcatccatctatttcccaccctccttactctgacatgatttgcacggcgattgcagcgttaaacgaaccagatgggtcaagcaagcaagctatttcgaggtacatagagagaatttacactgggattcctactgctcatggagctttgttgacacaccatctcaagactttgaagaccagtgggattcttgtcatggttaagaaatcttacaagcttgcttctactcctcctcctcctcctcctactagtgtagctcctagtcttgaacctcccagatctgatttcatagtcaacgagaaccaacctttacctgatccggttttggcttcttctactcctcagactattaaacgtggtcgtggtcgacctccaaaagctaaaccagatgttgttcaacctcaacctctgactaatggaaaactcacctgggaacagagtgaattacctgtctctcgaccagaggagatacagatacagccgccacagttaccgttacagccacagcagccg

SEQ ID NO: 93879 - DNA, 402 bp, Arabidopsis thaliana columbia
gagagaggagaagtactttttagctcttaagatagtgtgcgtataagcactgtccgccagacatatatcttcatcctcaatctcgtattttgacataggctatccatatgtcataacatattttctggaataaaatatttattcatgaaactctgacatagactatccatatgtcataatatataacattattccagaattacaaaagcatctataatgcttgtcatgcatagcatgataatacatatggctataatatattacattgatttctcgttgtcatgattaatcgagaaaatctgccatatcaagatgactatcatcatcttggccattaaaaggaagggtccgactcatcacagatgagattaggttcaacaatcctttttttttgcctttttt

SEQ ID NO: 93880 - DNA, 550 bp, Arabidopsis thaliana columbia
ggaaagctcactcttgcaaggcttttgtatggctcgtgaagctatggtatcggatgatgctgtcaagggtgttcactatgaagaaatccttcagctgtataacgatttgatggcgctggattcttcacactaccagtactacaaggatgagcacagcaaagcttttctccacaaggtgacttcaagcagtgaatctttgtcaagacaccttttgcgatatagggatatgaacaatcttgtatgtctacggctaaataacttatcactatctcggatagcctctgttgagaagttgctgtttgtccaaatgttagaccttagtcacaatgagcttcattccactgaaggattggaggcaatgcaacttctctcttgtctaaatctgagtcacaacagaatccggagttttcagcgctggactctctaagacatgtgaagcagctgaagtgttggatgttcacataaccacattggcaagcactcagtgacacaactagataccttgtcttcaccgctctctaattcagagttggtcagcatgatgtaggaa

SEQ ID NO: 93881 - DNA, 426 bp, Arabidopsis thaliana columbia
cacagatagagagaagagacagagacagagagtgttggaaacagctgtatttattatgagacgaaacaagaacctctgggtttctacttaaactcttctctctttcctctctcactttaaaaatccacactttagagcacacaatacaaaaaataagggtttctttatcttttcgtttcttccaaattttgtaatggatttgatgcaaatggataagcgtttggattcaacggagcaagtggttgaagaaatcatgagaattcacagatctctacccgcaagaccaggaattgacgaagttgaagctgccaagggtttgattgacaacgttgagaaagaagatcaagcttggttagaagccattgctagacagaggaaaagctctgaagttcctggtgagcttttcatggtgttgcaagaaatgaa

SEQ ID NO: 93882 - DNA, 646 bp, Arabidopsis thaliana columbia
  unsure (1)..(646): unsure at all n locations
gggcggggggggggtagtatcgccgggactatacgactcatatagggaaagctggtacgcctgcaggtaccggtccggaattcccgggtcgacccacgcgtccgcccacgcgtccgaacctggatcagatctagtcaggggtcagatcggagagccggcaatataatggcagcggcgagacgattacggacgctccaatctcagccggagaacaaggtctgtgtcgattgctcccagaagaatccacaatgggcatcgatttcatatggaatcttcatgtgcttggaatgctccggtaagcaccgtggtttaggtgttcacatctcattcgtcagatccgtcaccatggattcatggtccgagatccagatcaagaaaatggacgctggaggcaacgagcgtctcaacaattttctgcgctcagtacgggatctcgaaagagcttgatatcatctccaagtacaattccaacgccgcctctgtgtatcgagatcggatccaagctttagctgagggaagacaatggagagatccgccgtttgttaaggattcggttggtgggggattgatgaataagaagcccccgttgtctcaaggcggtggaagatctgaatgtggtggaattggnacgtntcttancncggat

SEQ ID NO: 93883 - DNA, 1990 bp, Arabidopsis thaliana columbia
  unsure (1)..(1990): unsure at all n locations
cggaagctctcacgtgacaaaaacacgcacaaaattattcaagttaccagctttattaagcaaaacgattgagccaaaaaaaacgcatcagaatctggaacctggatcagatctagtcaggggtcagatcggagagccggcaatataatggcagcggcgagacgattacggacgctccaatctcagccggagaacaaggtctgtgtcgattgctcccagaagaatccacaatgggcatcgatttcatatggaatcttcatgtgcttggaatgctccggtaagcaccgtggtttaggtgttcacatctcattcgtcagatccgtcaccatggattcatggtccgagatccagatcaagaaaatggacgctggaggcaacgagcgtctcaacaattttctcgctcagtacgggatctcgaaagagactgatatcatctccaagtacaattccaacgccgcgtctgtgtatcgagatcggatccaagctttagctgagggaagacaatggagagatccgccgattgttaaggaatcggttggtggtggattgatgaataagaagcctccgttgtctcaaggcggtggtagagattctggtaatggtggatgggataattgggataacgatgattcgtttagatctacggatatgaggaggaatcaatcggcgggtgattttaggtcatcgggaggtcgtggtgctccggcgaagtcgaaatcgtctgaggatatatattcacggtctcagctggaggcgtcggcggcgaataaggagagtttctttgcgaaaaggatggctgagaatgagtctaagcctgagggacttcctccttcacaaggtggtaagtatgttgggtttggatctagtccaggtccagctccgagaagcaatcaacagagtggtggtggtgatgttttctctgttatgtctgagggttttggaagattgtctcttgttgctgcatcagctgcaaatgttgttcagactggaaccatggagtttacttccaaggtcaaagaaggtggcttagatcagacggtcagtgagactgttaatgttgttgcgagtaagacaacagagataggacagaggacatgggggatcatgaaaggagtgatggcaattgcctcacaaaaggttgaagagttcactaaagaagaagcatcaacttggaatcaacagaataaaactgagggcaacggttactaccagaactctgggattggaaacaaaacagcaaattcatcttttggaggatcacaatcatcatcaagtggtcacaacaacagttatcgtaactcgaattcttgggatgactggggagaagagaacaatagcaaaaaggaagcagcaccaaaggtgtcgacttctaatgatgatgacgacggcggttgggctggttgggatgataatgatgctaaagatgatgatttctattatcagcctgcaagcgataagaaatctgtaggtcacaatgggaaatcagacactgcttggaccggtggaggttttctctaacggtgttacaggataatggtgaatgaagtttgtacaattaaggaatagcagagcctgtggtcttctcgtgctctgtcacaagagagagcagagtggtcatctcaaccattaagccaccactggtctttcttttcacatatcaattgcttggcgttcaatcaaatcgatcgtcactatttgttcttctacaatatatatagtttttttttttttatttgtacaagtttcacagtcacagaggattgcttgctaaactattcgggttagtcttcagctctttttttgagattcaaacttttatttttcttgaaatttgtaatgatcacaaaagacaaattttccgttttattgtcttctttctcattaaaaaaaaaaaaaaaaaaaaaaaaaaaaaaaaagggcggccgctctagaggatccaagcttacgtacgcgtgcatgcgacgtcatagtcttnctataaggtcaccta

SEQ ID NO: 93884 - DNA, 813 bp, Arabidopsis thaliana columbia
ctccattgagaccttttcgaccgtaaaccgattgcgatcaaattagctgatctgatcggaaaatcacaagaaaaccctagaaaactcctccggattcgaattctcgactcgattcaatgtatcaattgagaaaatttgacttcttcgaggagaaatacggtggcaagatacctgaggatgtaaccggagatatacaatgttgttccagtggccgtggcaaagtcgtcatcggctctaacgacggatccgtcagcttcctcgatcgcggtgtaaagttcgattccggtttccaagctcactcttcctccgtcctcttccttcaacacctcaagcaaaggaactttctcgtcaccgtcggagaagatgaacaaatatcgccgcaacagtcagggatgtgtcttaaggtttttgatcttgacaaagttcaggaggaaggtactagttcctcggctcctgaatgcattggtattcttagaattttcaccaatcagtttcctgaagctaagattacttcttttctagtcttggaggaagttccaccaatattgcttatagccattggcttagataatggctgcatttattgtgtcaaaggagacattgcacgagagcgtatcactcggtttaagcttcaagtggatggacggtccgctattacaggcttggggttcaggatggatggccaagcgcttctgttgtttgcagtcactccagagtcagtcaacttgtttagtatgcaggcgcagccaccgaaattgcagactttggattatattgggggcagtgtgaatactgttacaatgagtgaccgct

SEQ ID NO: 93885 - DNA, 470 bp, Arabidopsis thaliana columbia
cccacgcgtccgtgacatcctcgccgttgaagtctggcaggaggattgcaaagagtggagacgtatgagaagagtgtttggagcggttcatgatttgcagaatccacctagaggcactctcacattgaggttcttagtctacggaagcgcaggaatcaattggatccaatcgccaaacgctattcccgctgattggactgccggagccacctacgactccaacattctacttacttaattgattcacttttcatcagtgtgtttttatcatatagtatttattatggtttctgtatgcaatggctaatatatttaaataatgccctctaggccaatataattaatgatgataatataaataatcgtagtagattcaaatataatttatggattgtgtcccactaaaaaaattgtaatggtttgtatgagtttgattttgatggaataaatcaggactaatccctttttcc

SEQ ID NO: 93886 - DNA, 781 bp, Arabidopsis thaliana columbia
gctgacagagctagacactctctaattgttcctcattctttaactctctctcggcttgcacgtatacctggagttaaacaatcattgctcaaggactatggtgttcgcctagtgtccggccgccttccagggtttggagagagtgatccccatcgtgctcggaaccttagctcatctgcctcggatatgattgacctagctgctgctctagggattgttgacaagttctggttactcggctattccagtggtagtgtgcatgcctgggctgcaatgagatattttccggaccaaatagctggagttgccatggtagcgcctatgataaatccatatgagccaagcatgacaaaggaagagatggcaaaaacgtgggagcagtggcaacgaaagaggaaattcatgtacttcttagcacgtcggtggccaagtcttcttcctttctcctaccgtaggtcctttctctctggtaatctcgagccgctggataagtggatgtcagtggcattaggagaaaagggcaaacttgtaaccgcagatccagtttttgaagacctttaccaaaggaatgtggaggagtctgtacgccaaggaactgcaaaaccatttgtggaagaagcccgattataggtatcaaattggggctttagtcttcccgagttccccatgcagaagaagtggagaaccaatggcgtcccttcttggcttatggtcaatggtaccgttgaaatccgaatgggaaactaatttgggtttttcggaaaaccctattccacattat

SEQ ID NO: 93887 - DNA, 757 bp, Arabidopsis thaliana columbia
aaacaaattccgtgtgccctatactaataacttaataaacacgacagatactcgtcggacgtgatatgtgactcatctgtacacgtgcaaagctttttgttttgatgttttgattccttggatcaaatatccaaaattgtttgacccaaaaaaaaagattaattaattatccaaaaaaaaagcggccactaatcatatggagaggtcactaggtcagacaatttcgtttatccaaactagtaaaataagtataattagttacatcaatcgatttttttttgttcactacttgaatgttgcatcaactgatttaaaggtcaaagttatctatttaatttaaatagatcatagtttgacattagcgtgtttcggttatataaaatttcaagaatttgacatttgtagttaacaatagctgtatgatatttttgtaagaacaaatcgtattgttttggtcattatttaatgttgatacgcgggattgttgacttactctccttaaaactagtgaaacaaatctccctacactaactaccatgtgttgaattatacaaccgttgatccaactttctttggatgctttgagtttctactcgatcaatttgttttttcacatcatgataaactaacttgttttacgtcaaatcctttattttcagtttgttgttgtctaacagggagatgtttttcgtattatttatctaatgtcactattaattgttgctaaccaaaatatcatttgatcctaaacctaaac

SEQ ID NO: 93888 - DNA, 1380 bp, Arabidopsis thaliana columbia
  unsure (1)..(1380): unsure at all n locations
ggggcggccgcgcccgcgctgggggggggggtagtattgtccggtactatacgactcatttagggaaagccggtacgcctgcaggtaccggtccggaattcccgggtcgacccacgggtgcggcccaaatctctcttccattttctccacacaaatttctcttcaatctccgataatggaaggaaccggcgttgtggcggtgtacggtaacggtgcgataacggaggcgaagaaatctcccttctccgtgaaggtcggtttggctcagatgctccgtggtggtgttatcatggatgtcgtcaacgccgagcaagctcgtatcgccgaggaggctggtgcttgcgccgtcatggctttggagcgtgttcctgctgatatccgcgctcaaggaggcgtcgctcgtatgagcgatccacaaatgattaaagaaatcaaacaagccgttacgattccggtgatggctaaggctaggattggtcatttcgttgaagctcagatccttgaagcaattggaatcgattacatcgatgagagcgaggttttgactcttgctgatgaagatcatcacatcaacaagcataatttccggatcccgttcgtttgcggttgccggaatctcggcgaggctctgaggaggatccgtgaaggtgcggcgatgattaggaccaaaggtgaagctggaaccggtaacattattgaagctgtgaggcatgtgaggtctgttaatggtgacattagggttttgcgaaacatggatgatgatgaggttttcactttcgctaagaaattagccgctccgtacgatctcgtgatgcagactaagcagcttggtcgtcttcctgtagtccaattcgccgccggtggagtggctactccggctgatgcagctctcatgatgcagcttggatgtgatggtgtctttgttggttctggtatcttcaagagcggtgacccagctcgtcgtgcacgtgccattgttcaggctgtgactcattacagtgaccctgagatgcttgtggaggtgagctgtgggcttggagaagccatggttgggatcaatctcaacgatgagaaggttgagaggttcgctaatcgctccgagtgatcaaagaaataaaaggtaaaaatttccccagaccgaaatggtttcagaattttcctcagaccaattttgcagtaatctctttgaaaagaagaagatgatgatattgttggtagtttgtaacctttgtgttttccttataatctttgatagtcttttgttattgtaatctcgtaatccctttgcaagaacaagtttgtcagttataataatgtactactctcttgatcgatcagttggntttgaatctgatatattcttcgatccaaaaaaaaaaa

SEQ ID NO: 93889 - DNA, 425 bp, Arabidopsis thaliana columbia
  unsure (1)..(425): unsure at all n locations
ccctagttcccaacaaggtgacgatggcggcagcgagcttgaatgcatctggaaaaggatcgaagaaaccaaatgggttgaaggagtttctggaaagtctagaagctctgaaggcagatcttaaaaccttgagtaaggaggagctgcttgaactggaaaagcggctgaaaaatgtggctcgtaaggcgagggaagagctggagaggcgtatggagcagccctaatatgtctctgtttaccccttttaaaatgtcttaagggtcgttgaaatttagtcttaataatcgatttagtagctattgtcttaagggtcgttgaaaattagtcttaatatgtagtaaatgatcgatttagtacctaatgttttagctcctgtactgagagactcanggagttgttatgttgtatctttggatctatatatg

SEQ ID NO: 93890 - DNA, 568 bp, Arabidopsis thaliana columbia
  unsure (1)..(568): unsure at all n locations
tgatactctcnnnnnnnnnnnnnnnnnnnnnnnnnnnnnnnnnnnnnnnnnnnattctttgcgtcttccttttctacttatcccgcgcgcgcgctttctttttcctcttctttctctctcttctctctgaagacagtacttgtttctgtccggcgttaaaagcttcggtggtggtctcttgacttctctgagaagaagaaaaggaagctgagtctcattttagattcagctcacgaggaagtgacgacgatgtctcattctagaagactttcgttggaacctgctatagattcaatcactggtcgatttcgtgatttacagagaaatgatgatgacgtcaacaaacctgattttcgagaactcgatctaggttctcctgtttctaccttaatgccacgtggctctgcttcttcttccgctgctgcgactcctactagcagctctggctcttctggctctgcttctggtaaaccgtcggtgagttctcagatggctaaacggttagatgatgcttacaagagtcattccggtgagctttctagccccggatccggaatgccgaccacga

SEQ ID NO: 93891 - DNA, 541 bp, Arabidopsis thaliana columbia
caagggccaaagggtggcccagaccccgcctgaggggcacaatgttccttccgtaccggtgagccccgcgatcctgattgtgatcgccaacgggaagccgttgccgggacccggtgaccccaccgtaagggtatatatgtgatttaagtagctccccatgggtaaaattggaaacacccggtggtcatgttcaaccgggctgcttcttggaggtctaatggaaaccctattcatctttggagtttgaacctaacccgcctccaacccatgggtagtctcgtgtgtcccccccccaatcctttcatggccccccaaattaaggaatattggatttattcagtgtccccttacccaatatttatggtctctaatccaaacctccaaaaggaagttttgaccttttaggtcctctacccaaaaaaaaaaaaaaaggccgcccccgggacctacgtaccctggccgacccgggaattatccgggcccggtcctgcaggccgtaccagcttccctatagtgagtcgtatagtagctggagatatca

SEQ ID NO: 93892 - DNA, 785 bp, Arabidopsis thaliana columbia
  unsure (1)..(785): unsure at all n locations
nnnnnnnnnnnnnnatgatttttnnnnnnnnnnnnnnnnnnnnnnnnnnnnnnnnnnnnnnnnnnnnccacgcgtgcgaaccttgtctcgatccaaaatttcatcttttaccaaaactattacaatatccctcactctacttgtaaagcttcaatcttcttcacttctcaacaaacagataaacaaaaagcttcaatctttgatactttctcgatggaacttatccccaatcttcccgacgacgttgctcgcgagtgtctccttcgctcctcctaccaacagttccctgtcatcgcctccgtttgcagagcctggaaccgtgaagtctctctctctcagtttttacatcagcgaaaagcttcacgccatagccaagagcttcttattctgtctcaggctcgtgtcgaccccgctggatccggaaagatcatcgctacgcctgaataccggatctctgttctcgaatccgggtcgggtctttggacggagcttcctccgattcctggtcaaaccaaaggacttcctctgttctgcagattggtttccgttggatccgatcttattgtcttgggtgggcttgacccgattacgtggcaggcccatgattcggtattcagcttcagttttctcacttccaaatggcgcgtgggggcaccatgccaggtgtacggaggtccttcttcggatgngcttcggattcggatcgacggtgctggtngcggtagacacaacaagagaatgagcgctacgtagctatggtgatgacgtgcaaaagacaagggacg

SEQ ID NO: 93893 - DNA, 1242 bp, Arabidopsis thaliana columbia
atttaggcgaactatagattagctatgacgtcgcatgcacgcgtacgtaagctcggaattcggctcgagatcgcgtcgcctgaataccggatctctgttctcgaatccgggtcgggtctttggacggagcttcctccgattcctggtcaaaccaaaggacttcctctgttctgcagattggtttccgttggatccgatcttattgtcttgggtgggcttgacccgattacgtggcaggcccatgattcggtattcgtcttcagttttctcacttccaaatggcgcgtgggggcaaccatgccaggtgtacggaggtccttcttcggatgcgcttcggattcggatcggacggtgctggttgcgggtggacacaacgaagagaaatgtgcgcttacgtcagctatggtgtatgacgtgtcagaagacaagtggacgtgttttccggatatggccgggaccgagacgagtgcaaacgggtattccatctgccagattccacgtcatcggtggatatgccactaaggaccagggccagtttagtaaacagccgaatcgttcgatgtgtctaggtggagtggggtctacttacgaggacttcctcgacgacaccggcgataccgttagccctccgacctgcgtcgccggtggggatttgtacgcctgctggggtggcgatgtgatgatgtttctaaatgacaaagtggcaaaaggtgggccagatccctgctgatgtgtacaatgttacttacgtagcggtgaggcccgggatgctgattgtgatcggcaacgggaaggcgttggctggatacggtgaagccaccgtagggtatatatgtgatttaagtagctcacgatgggtaaaattggaaacacacggtggtcatgttcaagctggctgcttcttggaggtctaatggaaaacctattcatctttggagtttgaacctaaaccgcaacaaaccaatgggtagtctcgtgtgtcaatctacaaatcttttcatgaacaacaaaataaagaaatattgtatttattcagtgtcactttaccaaatatttatgttctctatacaaaacttcaaaaggaagatttgaacttttaggttctctatacaaaactgatctaattatataattgcaagcaaacaaactttcgaaaaaaaaaacaaaagggcgaccgctctagaggatccaagcttacgtacgcgtgcatgcgacgtcatagactcttctatagtggaccta

SEQ ID NO: 93894 - DNA, 626 bp, Arabidopsis thaliana columbia
  unsure (1)..(626): unsure at all n locations
caggtcactacgactcactatagggaaagctggcacgcctgcaggtaccggtccggaattcccgggtcgacccacgcgtccgcttcttctctgcagtctctcttctctctgttttgccttgctctgttctctcttcctctcatcgtctcctccatcggcatcaactatggccaggtcgctaacaaccttcctccccctaaaaacgtcatccctctcctcaagtctgtgggagctacaaaagtcaagctctatgacgccgatccacaagccctacgtgccttcgccggctccggcttcgagctcaccgtggccctcggtaacgagtacctggctcagatgagcgaccctattaaagcccaaggctgggtgaaggagaacgtccaagcttacctcccaaacaccaagatcgtggccatcgtagtgggaaacgaagtcctcacctcaaaaccagtcagccctcacggcagccctcttccccggctttgcaaagcatccacggtgctctggtggattgttggcctaaaaaagaggttttttttttanggcgggtnattaattgccatctttggtggttccnaccctcctttgggcaatntttttgnnggggctncntgggtncttatttc

SEQ ID NO: 93895 - DNA, 758 bp, Arabidopsis thaliana columbia
tggccagcctcgggttgacggtatcgataagctagatatcgaacgcgtcttcttctctgcagtctctcttctctctgttttgccttgctctgttctctcttcctctcatcgtctcctccatcggcatcaactatggccaggtcgctaacaaccttcctccccctaaaaacgtcatccctctcctcaagtctgtgggagctacaaaagtcaagctctatgacgccgatccacaagccctacgtgccttcgccggctccggcttcgagctcaccgtggccctcggtaacgagtacctggctcagatgagcgaccctattaaagcccaaggctgggtgaaggagaacgtccaagcttacctcccaaacaccaagatcgtggccatcgtagtgggaaacgaagtcctcacctcaaaccagtcagccctcacggcagccctcttcccggctatgcaaagcatccacggtgctctggtggattgtggcctaaacaagcagatctttgtgacgaccgctcactcactagccatcttggatgtatcctaccctccctggggcacttactttcgacgcgacctactcggatccctcactgccattttggactttcacgtccagactggctcaccaagcctcatcaacggctaccctttcttcgtctacgaagaaaacctcacacacgtttctctggactgcgtactcttccaaccaaattaaagattaaccgatcctggctgtaatttccactacgacaacatgctc

SEQ ID NO: 93896 - DNA, 548 bp, Arabidopsis thaliana columbia
  unsure (1)..(548): unsure at all n locations
nnnnnnnnnnnnnnnnnnnnnnnnnnnnnnnnnnnnnnnnnnnnnnnnnnnnnnnnnnnnnnnnnnnnnnnnnnnnnnnnnnccacgcgtccgcccacgcgtccgtgagaacgaacctacgtcaagaagtggaggcaaagccaaggcagtgcaacaaatacgaaagggtcgtctctacaagactatggccatgattggagatggtgctactgatctcgaagcacgtaaacctggtggcgcagatttgttcatatgcttcgctggagttcagcttcgtgaagccgttgcagcaaatgcagactggcttatctttaagtttgaatctctcataaactcattggactaaaagcctctatagtgattattctcgtttagctaaactcattattcatatctccaaatttgtacccttttatgaatttgtatcaaataccaattgaatcaacaaatgtttttgccaaaaaaaaaacaaaagnnnnnnnnnnnnnnnnnnnnnnnnnnnnnnnnnnnnnnnnnnnnnnnnnnnnnnnnnnnnnnnnnnnnnnnnn

SEQ ID NO: 93897 - DNA, 1100 bp, Arabidopsis thaliana columbia
caagcagcagccgaagacgaccgccggcgatttccggttggcaattgttctcatctgatctgctttctcgcgctccaagtttaatggaagcattaactacttcaagggttgtgccagttcaggtcccctgtagaaagctctcttcactttttgctaatttttcttgccttgagttaaggagatatccttgtagaggtcttgtctccattatgaaccatcccaaattgcttcgtccagtgactgcttctgtgcagcctcacgagttgtcgactttggggcatgaaggcaacattgttccttctaaagaaattcttgatctttggagaagtgttgaagcggtatgtttcgatgtggacagcacggtttgtgtggatgaaggtattgatgaacttgctgagttttgtggagctggaaaggctgttgctgaatggactgccagagctatgggtggatctgttccatttgaagaagctctagctgcaagactttctttattcaagccttctctttcaaaagtagaggaatatctcgacaagagacccccaaggctatctcctggcattgaagagttggtcaagaaactcagagccaataacattgatgtctatttgatatctggaggttttcgacagatgatcaatcctgtagcatcgattcttggcatccctcgggagaatatctttgccaacaatcttctatttggaaactccggcgagtttctgggatttgatgagaacgaacctacgtcaagaagtggaggcaaagccaaggcagtgcaacaaatacgaaagggtcgtctctacaagactatggccatgattggagatggtgctactgatctcgaagcacgtaaacctggtggcgcagatttgttcatatgctacgctggagttcagcttcgtgaagccgttgcagcaaatgcagactggcttatctttaagtttgaatctctcataaactcattggactaaaagcctctatagtgattattctcgtttagctaaactcattattcatatctccaaatttgtacccttttatgaatttgtatcaaataccaattgaatcaacaaatgtttttgccaaaaaccctgacgtag

SEQ ID NO: 93898 - DNA, 789 bp, Arabidopsis thaliana columbia
agttctgatttacatgacctatgcggatgggaaaaccacaatgtcggtttatgagagaaaaacaagtattaaagatttctatgctgtgatatttccgtcgttgttacaactagaaagaggtatcacagacctggatgatcgtaaacagaaagaagtctgcaaaatacggtacagaaataaagatgagactgaaaaggtcaagctctcggagattgacatcgagagagaagaagaatgcgggatttgtatggagatgaacaacatggtggttctccctaattgtacgcattctttatgcatcaagtgttaccgcgattggcacgggaggtcagaatcatgcccttttttccgagacagtcttaagagagtaaactcaggggacttattggatgttaatggagaaatccgatccggttaatatgtatccaattgagcgggagaataagaagaggttgtttgtgtatataaagaagccacctctagtggttccagatcaagtgtttgcttcttctccttatgattgccatgtcaagtaaataagacggagaagagctttggcaaaagccgaaaccgggtttggtaaacttttatctgaatgtatatgtatataatgttttagagtagtagtaagtaatatagtgtaactatttcttggggaagtccatttttacttgcttttcttttttaaaaaaaaaaaaaaaaaaaaaaaaaagggaaaaccccaaggcgaccgctctagaggatccaagcttacgtacgcgtgcgttcgacgtcatagctcttctatag

SEQ ID NO: 93899 - DNA, 651 bp, Arabidopsis thaliana columbia
  unsure (1)..(651): unsure at all n locations
cgactcactctatggaaagctgcgccgcctgcaggtaccggtccggaattcccgggtcgacccacgcgtccgctttgttttctttgcttcttctatcttcttcttctttcttcttctcgctttaatactctttgattcctctgttcgtttgatgagaattagattttaaatggcaaaagtttcgtttaaggattctctgaaagctcttgaagctgatattcaacacgctaacactgtagctttagattatcctcgggagaaggatggagcgcgtgttcaaatgaggctatcgtacactccagctgctcagtttttactttttcttgtacaatggactgattgccatcttgctggtacactcggtctgctcagagttctgatttacatgacctatgcggatgggaaaaccacaatgtcggtttatgagagaaaaacaagtattaaagatttctatgctgtgatatttccgtcgttgttacaactaggaagagggttcacagacccgcgggtcggaaaagaaggggggcttcaaaaacacggggccaggaattaaagggttnggggggnaaagggcaagccttccgggggtttcaccgggggaaatgaagcactcgggggttttttgggggtaccaccatgggggtnccccat

SEQ ID NO: 93900 - DNA, 732 bp, Arabidopsis thaliana columbia
atcgctaaagagaggtttatcgagaaaaatccaagatttactaaaaaaccactatctctctgctcttcctctgtctacattaatgtaattttgatcatcggattgggtgaaagaaacatcaaactcctaaaagagaagcctttaaagtttttttttaatcaaaaacaaaaggaagaaaattttcctttttgttttagatggcatgaatcatcatcatcgctttgctttcttgattctctatttcgtttgatgggatttgtttttctgggaatttattcattcacctgctgccatggctaaattatctttcaaggattctcttaaagctcttgaagccgatattcaacacgctaatacactagctttagattatcctcgggagaaggatggagcgcgcgttcagatgagattatcatacagcccgactgctcaattttttctttttcttgtacaatggactgattgtaagcttgctggtttcctcggtttactcagagttcttatttatatgacttatgcagatgggaaaacaaccatgtcggtttacgaaagaaaagccagtattagagagttccaaggtatgcttatatatatggcgatgatattatttctggtaaacaagattgatatcgtttaattcttatgagctttttaatattttcgttatgttttagctgtgatattaccatctttgtcacaactacaaaggggtgttacagacatagatgacag

SEQ ID NO: 93901 - DNA, 743 bp, Arabidopsis thaliana columbia
ttttttcccaaaaaaataccggggtgcccaggaaaaattaaaaggattggaggaccttgtataaagggtccaagcctcttcgggagaattttcacattcgaagaagagaaaaatagtattgccggattttgtatggaaattaaacaaccatggtggtttctccctaattgtacgcattctttatgctcaaagtgttcccgcgattggcacggaaggtcagaatcatgccctttttcccgagacagtcttaagagagtaaactcaggggacttatggatgttaatggagaaatccgatccggttaatatgtatacaattgagcgggagaataagaagaggttgtttgtgtatatagagaagctacctctagtggttccagatcaagtgtttgcttcttctccttatgattgccatgtcaagtaaataagacggagaagagctttggcaaaagccgaaaccgggtctggtaaacttttatctgaatgtatatgtatataatgttttagagtagtagtaagtaatatagtgtaactatttcttggggaagtccatttctacttgcttttctttttatctgcatttggcttttggttcccaaaaactcttatttctgttgtacattcatgtctgaatttaataacctcttcttcaagaaatggctttcactccccttctaataaaaaaaaaaaaaaaaaaaaagggcggccgctctataggataccaagcttacgtacgggtgcgtg

SEQ ID NO: 93902 - DNA, 496 bp, Arabidopsis thaliana columbia
gcgaaccaaagatgtgcataagcctagtgactttggtatagcaccagatatgattattctggtcaagaatgagacttgagagcgtccttaagcttaccaaaagattcaggaactatcccggaaaacttattcattcgaagattaaccgacactaacgagttagctcctgagatctgaaacggtagagaacctgaaaatctattattgctcaaatctaaagaacctagagacttggcattaccaatatcaccagtgaggtttccttcaaaatagtttgaagcaaggtcaagaaactgtagactaggaagaccccaaatccctgaaggaatcattccagagagagagttgttacttacacgaagacgaatcagagtcttacatttagcataactctctggaaattgtcctgtgaatctgttctgcaacatgagaagatgcgtcattacgcctttcttgcacatataaggaggaatctgaccttccaagaagttctcag

SEQ ID NO: 93903 - DNA, 656 bp, Arabidopsis thaliana columbia
gtttcaagctctctgtttctcagatcttctctctgttttgttcttctcataaaataagagttgtgattcaacagttatggtgagaatattccttctctacaatatactaaattcgtttcttctctctttagtaccaaagaagctacgaactcttttccctctttcttggttcgacaaaactctccacaagaactcaccaccgtctccgtcaacgatgttaccttctccatcatcgtcttcagcgccgacgaaaagaatagatccgtccgagctcaaacgcgttttccagatgttcgacaagaacggtgacggtcgaatcacaaaggaagagctcaacgactcgcttgagaatcttggaatctacataccagacaaagatctgactcaaatgatccacaagatcgatgctaacggtgatggatgcgtcgacatagacgagtttgagtcgctgtacagctcgattgtggatgagcatcacaacgatggcgaaacagaggaagaggatatgaaagatgcgtttaacgtgtttgaccaagacggagatgggtttatcactgtggaggagttgaaatctgtgatggcttccttgggactcaagcaagggaagaccctagatggttgtaagaagatgattatgcaagttgatgcagacggtg

SEQ ID NO: 93904 - DNA, 650 bp, Arabidopsis thaliana columbia
  unsure (1)..(650): unsure at all n locations
aattgtccggcactacacgactcacttagggaaagatcgtgcgcctgcaggtaccggtccggaattcccgggtcgacccacgcgtacgatcgtagtatgagagacaatgtcgacagtcggagaacttgcttgcagctacgctgttatgatccttgaagacgagggcattgccatcacttctgataagattgcgactttggtcaaagcggctggtgttgagattgagtcttactggccaatgttattcgccaagatggctgagaagagaaatgtcacagaccttatcatgaatgttggtgctggtggtggtggaggcggtgccccagtgtctgctgccgcacctgctgctgctggaggagctgctgctgctgcccctgctaaggaggagaagaaggacgaacccgcagaagagagtgatggagatcttggtttcggcttgttcgattagttgtctcctttcattttacgtttcatatgttctattgctttagttgctttgagatttaagtttgcattccgcactactacagttaccctanacatgactggggtacaattggcacncctctttgagcatngngaccnancnaatcatggccantaatacttggtaaaaaaaaaaccngggccgaccattccaatgngncntt

SEQ ID NO: 93905 - DNA, 548 bp, Arabidopsis thaliana columbia
  unsure (1)..(548): unsure at all n locations
cgnnnnnnnnnnnnnnnnnnnnnnnnnnnnnnnnnnnnnnnnnnnnnnnnnnnnnnnnnnnnnnnnnnnnnnnnnnnnnnnncttttttttttttttttaagaatgaccaatattattatttagagtctttaagttcagcccaaacttaatatacactcaaatgtttcctttagctttgacatacccaatttttttgccagattcgatcgtgtatgcattagcttttttttgttgtggtttgagcaaagaataataagtacacagcttgatgagtttcatagcatgtcaactttgttggagaatactgcacttagataaacgttctttaacttcatcccaagctggtaaatttctgaaatcaggttcaattccaccaccgttgatatccatatgggttaggtgtgacatattttcctattgtcacaacaactcctgaaccatctcggagctcatacaccgattgaatcaaaccctttccataagttctttcgccaacaagaactgctttacagttatcatgaagtgcagaggccacaatttcactagc

SEQ ID NO: 93906 - DNA, 581 bp, Arabidopsis thaliana columbia
cctctttctcttattgtctctctctcgctatctctccctcttaagtttttttttaaaacagactctccctctaagttattcggtcgcaattaaaaaagaaaacaaaatctttataaattttgattttctctttttcacccgattattttgatttgactgttttacgacagtcaatatttcaattttattattgggtgctgacgtggcatgcatccaatagagtatcaccatgaacaccaaaacgatgcgtcttcccccacgtcgcgttctaacggcggataagcgcaaagaacgagacgccttcatctcctccgtcaccgataatccgccggaaatcgccaagtttccctctccgccgccgaaacttgttcctccgccggttaatcccatttccaagaaatcttcaaccgcagcagccgagccgatcggctcgaaccaactgatgttagccggttatctgagccacgagttcctcacccaaggcacactcttcggagagcaatggaaccaggctcgagcccaagccgagtccagtaagataaagccgagccatactgttgagccggctgaagaatgtgagc

SEQ ID NO: 93907 - DNA, 1096 bp, Arabidopsis thaliana columbia
acgaatctccgtctcctccgtcgcattttccgaggtatagagagagatcaaaccaaagagacacagagagagtatccaccgatggaatccgcagcaacggctgttgtacctccggcagccgccgccaccaccgccaccgccaccgatgataatctccaatcaagcgactcatcatctcccgccgacgccgttaaccgattgatccacgccttttcgcagcgacaacaacatcttctcgacaaaacggttcctcacgttctctatcgatggatcgcatgtctctgtgttgtattgatctacatcgttcgtgtttactttgtggaaggcttctacatcatcacttacgccatcggcatctaccttttgaatctcatcattgcttttctatctcctcaagaagatcccgaagcttctctcacttccggtggttctcttcctactcggagatccgatgagtatcgtcctttcgttcgccgtctccctgagttcaaattctggttatcgatcataagggctttcatcatcggatttatgatgacgttcttcgaggtgtttgatgtacctgtattctggccaatacttctcttctactgggtgatgttgtttttccttacgatgaggaaacagatacagcatatgatcaaatacagatatgtccctttctcttttgggaaaaagcagtatggaaagaaaccggctccaacagagagcagtgaatgatcaatcaaaactgttcaggtcagcaattttacagtcttttgagagaagtagcatttgaaaaggtcggtcttttgttctcttttgatggcctatatctttgttagggatgaagtagagatagacatattttgctcttttatcatcctgactattttactggtttcacctgaactcaatgtacaatcttatttttttacatccttttttcagtgagaaaataatgtttcatacttgacccttttgtaatcatcatggtggaaaactaaagactaatcagtaatcactgtccggttctatcgatgttcatggattgtgtcctagttatttaagaacatggaaattgcgaaaaaaaaaaaaaaaaaaaagggcggccgct

SEQ ID NO: 93908 - DNA, 426 bp, Arabidopsis thaliana columbia
atcgtcttcgtcttctacaaattttgtttgttgcttggttttgaagccggcctttgatgggtgcggcagaatctggaaccgatcggagaagcttagcttatggatttggagtttctctgtgaatgaatctctgtttgttatggggaagaacaccgtcgaggagcagaatctccctgtgagcgacggagctgcttcggctaggaataacggaggtggaggaataagcacatgttgttgctgcgattggatctctagctactttagtctcagacgcgttccgattcctgctttttctgctgctgtgtgtctctccgccttgtttccgttaccttcatttcttcgatttgcagatccaggggatactagatcttgttccactgtctcacgacgagaaagcagaggattcaccagctgtcacgtacaccc

SEQ ID NO: 93909 - DNA, 562 bp, Arabidopsis thaliana columbia
aagaacgtatactttttactccaaatttcaattttaagatttaactggctgttgtagagggagccaatcattggggctaatgagatagagaaagagaatgtgttttcaacggattctttttgttaaagaatataaatatatattaatcataatgaggcttttacacacaggtcataattgaatgttaattagggctgtaattaagatataaaaatagcatatgaaaagaacataatgaaccaaaagcggctatatatgattcctccaaagaggagtcaacatgaagctgaatttgtatctggtggtccttttcatctcctttgatgttgtttgcagtggatgattccgcacagagggtgttgatctcaagttttcgtgttagttagcgagaaactggttagtgaggagttcaatagtgtattactgtctagctagtgacgtcgcgttaatccaaatatgcaaggtcttgtaagtgatctctggtatataaaaaaacgagaaccaaaacatgcttaaaatctcggtgaattagttgcgtcacttgtgttgatcattaatactt

SEQ ID NO: 93910 - DNA, 547 bp, Arabidopsis thaliana columbia
  unsure (1)..(547): unsure at all n locations
caacttttttnctttatctttaacatcaaaaaactttatcgttatctttacaaccattaaacaaaaaaatttggccgctactagttgaaaaagtggggagtatatctaatcgctgaaatggattacaaggcatcaagacgtggggagatagtagaaaggcgaagtagaagattcagaaaagattgatttaccacctggtttcagatttcacccaactgatgaagaacttataacacactatctaagaccaaaggttgtaaactcttttttctctgctatagctattggtgaagttgatctcaacaaagtcgagccttgggacttgccttggaaggctaagcttgggggaaaaagagtggtacttcttttgcggaagaggccgaaaatacccgactggtttaagaaccggatcgtgctactaaagccggttattgggaaagctccagggaagttaaggggttttcaanggggatcctttttgggntgaggaacattggtttttcaaggnnggccctaaggggaaancaattgggcatcntggttntta

SEQ ID NO: 93911 - DNA, 630 bp, Arabidopsis thaliana columbia
tgtatcgacaagctcgatatcgaattcgcggccgctcgatatctttacaaccattattcaaaaaatttggccactacaagttgaaaaagttttgattatatctaatcgctgaaatggattacaaggtatcaagaagtggggagatagtagaaggagaagtagaagattcagaaaagattgatttaccacctggtttcagatttcacccaactgatgaagaacttataacacactatctaagaccaaaggttgtaaactcttttttctctgctatagctattggtgaagttgatctcaacaaagtcgagccttgggacttgccttggaaggctaagcttggggaaaaagagtggtacttcttttgcgtaagagacccgaaatacccgactgggtttaaggtccgaatcgtgctactaaaggccggttatttggaagctacagggaaagataaagaggtcctttcaaaaggggaaacctctttggttggtatgaaggaaaacatttggttttcctccaaagggaggggctcctcaaaggggttaaaaccaaatttggggcatgccatgaggattcggttaggaggccaattccctatccgataatttttctaaaacccgctaaagaaccccc

SEQ ID NO: 93912 - DNA, 374 bp, Arabidopsis thaliana columbia
ttaaggactatataataacaaattaccttcttgttgttctcagtttcttctcccaataccaaaaatattttgcttcatccaaggtcttgaagatgggtataaaagtttcatcaaagatcaaaagaattctcgcatccacagcttcaggtagttcaaatcccaaagatggtgctgacgtggatgtccgagaggaatatgcaaacgcctttcgtacggaatcatacaatcacttttggacacgtgtcgtacagctaagccgcaaaaagtccgcagtgtcttcttcttcttcttctccaccaatcgaatcatcctccacgtcagctcgtctcatgtcttatcgcctattcgcgcacaatcttctagacccggatctg

SEQ ID NO: 93913 - DNA, 521 bp, Arabidopsis thaliana columbia
acgcgtccgttttcctctcagctcacctatggaaaccctacaaagatctctctctcaagatttctgaaaatggatatataatctcactgatttgtttctttttttgttcttgtttcgttttctatatgtttatggatgagttgtagtttccatctcccagccggatatagaaagaagaaacagaggaaatttgttcataaaggaggtacatatatacacatacaagtctctgtgaaatatgacatctcagctaaaacgaactttaaccaagagatacggtgttcttgaactgtgggagatcatagtgattgctctctttgcagccttcatagtaatccttgtcctttcagtttggctcagcttccgtaaaaagtccaaaagatctaatgctacaacgcttcctgtaactcaaagccctcgctttaccgaagaaatataagatatatgtgttgatcatgggtcatctaacaacattggtacttgttaccaaactgtggtgaagatattcgttgaggacatct

SEQ ID NO: 93914 - DNA, 443 bp, Arabidopsis thaliana columbia
  unsure (1)..(443): unsure at all n locations
caatcactcttcacttctccccactccttactccttttttttttgcctttctaagcaatctctctcttctccttatattctcatatttgattccttttctctctcatacgatctgcacaccactactaagaacaacagagctagagagacttgcaataattgtaaaacatgattggaacaagcttccccgaggatcttgattgtggcaacttctttgacaacatggatgatctcatggactttcccggtggagatatcgatgtcggtttcggcataggtgactccgactctttccctaccatctggaccactcatcacgacacgtggcctgccgcttctgatcctctcttttcttccaacaccaactcttgattcattacctgagctctatgttccggttagttctacgccctcttcgtnacgtatgatgtcaaacattaaac

SEQ ID NO: 93915 - DNA, 1220 bp, Arabidopsis thaliana columbia
cagctcacatacgactcacttagggaaagctgctacgcctgcaggtaccggtccggaattcccgggtcgacccacgcgtccggcgacctgcttcctcaggcagccagatgcaaaattcaagaccacaaaattcaagaccagcttccgctggtagccaaatgcagcaaaggcctgcgtcctcaggcagccaaaggcctgcgtcctcaggcagccaaaggcctgcgtcctcaggcagccaaaggccaggttcgtcgacaaaccgtcaagcacctatgaggccaccaggttcaggttccacaatgaatggtcaatcagccaaccggaatggccaactgaattccagatcagattcccgaagatcagctcctgctaaagtgccagtggatcataggaacacagatgagcagtagcaatggagttggtcctggtcggtcagcgaccaatgcaagacctttaccttctaagagttcattggaaagaaaaccctcaatctcggcgggaaagagttctcttcaaagccctcagagaccgtcctcatcaagaccaatgtcatctgatcctaggcaacgggtagtagaacagagaaaggtttctcgtgacatggccacaccccgaatgatacctaaacaatcagcgcctacctcgaaacaccagatgatgagttaaccagcgctcaagagacctccctcgcgtgacatagatcatgaaaggaggctgttgaagaagaagaaacctgcaaggtcagaggatcaagaagcattcgatatccttagacagttattaccacccaagcggttttctcggtatgacgatgatgacataaacatggaagcaggctttgaagatatccaaaaggaagagagacgaagtgcgagaatcgcaagggaggaagatgaaagagaacttaagctcttagaggaagaagaaaggagagaaagactgaaaaagaatcggaagctgagccgttagaagaatcctttctcctttgtgtctttgtcttcttttaggacttttttagtgttttctcattgaaatctctttggccgcttgaggcaaaaaagagtttgaccttttttttgttttgtgttttcaaattaaggatcttttttttgttcatggaaattgtacaattagaaataatatcttttgcggccgcgaattcgatatcaagcttatcgatacagtcgacctcagagggggccaagagccattcaatgggg

SEQ ID NO: 93916 - DNA, 650 bp, Arabidopsis thaliana columbia
  unsure (1)..(650): unsure at all n locations
aatgatactgccnnnnnnnnnnnnnnnnnnnnnnnnnnnnnnnnnnnnnnnnnnnnnnnnnnnnnnnnnnnnnnnnnnnnnnnccacgcgtgcgcggacgcgtccgcccacgcgtccggttggaggcgttcaagctggagcctttaaaattggtgacacagctggaactattgacaatatcatccaatgcaagttgtacaggcctggatctgttggctttgtctcaaaatctggtggcatgtctaatgaaatgtacaataccattgcccgtgtgacagatgggatctatgaaggcattgctattggtggggatgtgttcccgggctcaactttatctgaccatatcctgcggtttaacaacatcccacagattaagatggtggttgtacttggagagcttggaggaagagatgaatattctctagttgaagccatgaaacagggaaaagtgaccaaaccagtggttgcttgggtcagcgggacttgtgcacgtctattcaagtccgaagtacaatttggtcatgcaggggccaaaagtggtggagagatggagtctgcacaagccaagaatcaagcgctacaagatgctggagctactgtacccacttcattcgaagccctagagttgcaatcaaggaaacttttgcaaa

SEQ ID NO: 93917 - DNA, 544 bp, Arabidopsis thaliana columbia
tctgaatggaccaaaagcttgcgacatctttgtgtcttaatcttctctctcctcttctggaaaaactgaacctttaattcgttcttcacatctcctttagctttctgaagctgctatcttcaagctcaaaaccaacccctagaaataaaatgacggcgacacaaatgctgcttcatcttcttcttcttccacttctcttccttcacttcagcaaccaagtcatggcagaaatcaccgacgagttagcgacattgatggaggttaaaacagagcttgacccagaagacatacacttagcttcatggagtgttaatggagatctgtgtaaagactttgaaggtgttggttgtgactggaaaggacgagttttctaacatatctctacaagggaaaggcttatctggtaaaatctctccgaacattggaaagcttaaacatttgacgggtttgttcttgcactacaatgctcttgttggagatattcctagagaacttggtaacttgtcggaacttacggattcttatctcaatgttaataatctct

SEQ ID NO: 93918 - DNA, 879 bp, Arabidopsis thaliana columbia
  unsure (1)..(879): unsure at all n locations
ctaaacgcgataaattttagacctttttaaaccccctttgtttagaaaataacaggtccagttgggagtgatttttcgggtttcaagggccaaagggcaaaagggcgtttgtcagttaaacagcgatgcctagtgcacccttcactgcgatatcgctcaggggggggccttttaaaggcggcaactacgtattagagcttgggtaanaagcccaaaggcatagcctcaaaagcaaggggaaggatgtgccatcggaatttatctgttaaaaaggtcagatctttattatccactctcgtaagggtggtctgggaaaatatgccaaacgccgagttgcatggaaccaagatgaaaaggcttcagtttcctaactcccaggatctggacaaggctggtgattaaaattgccccaagtccatgaatccaaagcacttaacagggcttttagttgatgctgttcctccccgagctacaaagcagaagccgtgtatttgacagatcaagttcttccaaaatgaaaagaaaggtaaagttgatactaagaactactcccgtggagttgcctttgttgagtcacggagcatgaacatgctctggtagccctgagagtacttaacaacaatcctgagacatttggtcttcaacaccgccctgtcatagaatcccccgccgataatgtccagaagctgaagatacgagaagctaagcagcagcagtttcagcaacgcgagaaacacaatgaatctgatcagcagcaggcgaacggcgaagcacaggcccctgtcaataaatacaaacgaaaaaaaaaaaaaaagggcggccgctctagaggatccaagcttacgtacgcgtgcatgcgaggtcatagtntaaatatag

SEQ ID NO: 93919 - DNA, 512 bp, Arabidopsis thaliana columbia
  unsure (1)..(512): unsure at all n locations
ctacgctttactctttcactcctctctctcctgctttgctccgccgtgagaggagaaacagagggggaattgtcaagcggcggaggcggcaacgacggtgatacaacaaccagacggtaaatcggttagattttactgtacagtaaacgcgagcgaagtgattaagtcccatcccggtcaccacgtggctctcctcctctcttccgccgtacctcacggtggctctctccgcgtcactcgtataaagcttcttcgtccttctgataacctcttgctcggtcatgtttatagactcatctcctccgaagaggtgatgaaaggaataagagccaagaaatctggaaagatgaagaagattcatggagaggtttctgttgcagaagaagagattaacccactaaccctaagatctgatgcttctgacaaaggcactcagaggaggttatatgaaaagcagagaggaatgatgacacaggagggctnccaaggaagttagagttttgcagccttct

SEQ ID NO: 93920 - DNA, 448 bp, Arabidopsis thaliana columbia
cgcttgaaagaaacgccaatatcgcttggttgattgcttcgatgggttctgggttagagtcgttggggggataaagttcagggcttcaaatcgacacgtagattgactcctatctctctttaactcgccgggaaactctcttccaagtcaaccgttttgacataactaaatctctgacctagaggcttatcagtagaaaattagcgatattcatcgaaagaattcacctatagagatgagataggtctctataaaactcgaagctttccgttgtcgcgtagattgtatcttgtctctttctaggtcgcttggagtttgattcggaagttggctgttccgacagctgcggatttgtcagggaaattgtgtctagtgcagagaagtgatgataactcctaatagacagctcggatccaggcgaggtcggcttctttagaaaagcttactc

SEQ ID NO: 93921 - DNA, 456 bp, Arabidopsis thaliana columbia
cggacgcgtgggcgagaatggatataggatcccatgtaactcttcgcagtattgtttagttgctggcaaacaaatggggggtgtcttcttaaccatttgggtgaaaagtgagctaagagaacacgtcaagaacatgaaagtatcttgtgttggcaggggcctgatgggttatctgggaaataagggatcaatctcaataagcatgttgctccatccaaacaagcttttgcttcgtttgtacgcacttgacttcgggacataaagaaggcgatgagctaaagagaaactctgttgtcatggagatactgaagaaaacgaggtttccgcgcgttaagagttcagaggaagaaaagtcccctgagaacatccttcagcatgaccgggtaatatggctttgcgatctaaactaccgtatagcactgtcttatcgatctgccaaagcgcttgttgagatgc

SEQ ID NO: 93922 - DNA, 469 bp, Arabidopsis thaliana columbia
cacgagcgccaccctttttttttagattagtatctaaatgtatcttatacctttcttgggtgtgttagtggactcattacaaccttttattattcctttcgtcgttatggatttattctacataacactatatcttccgaaacaaattcaaaattttaaaggaagataatgataataattaattctcgaattagcacaaaagttttattgtatctacacctcgatttattaataactccaataccatatgcttagaggaaacaaaagcagaaccgaaccacaacaaactcatctaattctttctatccaaaccggaatttccaatacaataaaaaaacatcttctttttgtttgtttggtttagaattggttcctctgaaaacaaaatgcttaatacaaaaagaggtaccttttttttcagtcgatgtttttgtcttgaatcgacagtataataatgagattcatgttt

SEQ ID NO: 93923 - DNA, 559 bp, Arabidopsis thaliana columbia
atgcaaggccttagtttccccaacactacaagactactccacggagaagaagctactcaaccaaactcttcttcttctcctccaaactcacacctctaaactaagacaaccatggaggttcaaattcatgatgacatgcattgaacaagaaggaggaaattaatgtgatgaatggagctagagtaagcgctatattaattagtattaccatctatccatatatttatgattcaagactattattactcatttagtgtttgttattattattcaattttgcttgtttgtttcttatcatctttgcattgatcatcaagattgtgatatttgaaaagatgggttttatgtgtgttttggtttagtactggcgttaggctgggatattgtaatctcatatttttgttctacgagtgagtttgaattttctggtttttacttgcggtttctatttcttcggttaagtaaagagtaattgaagaacgttaaaagcataggtcgtattacatgagtaatgaagaaaaaggtgttcattatcatctgtgagataccaatttctttt

SEQ ID NO: 93924 - DNA, 470 bp, Arabidopsis thaliana columbia
tttcgccctttttttttttttttcgaccaaaagggtattttaaccaaatacaatgaatcagtctattatcaccttgaaacactatgatggattcaacgctacccaaccgaaattcactgtatttttccaaccacaacgagatgaattacaccacgactctaagtgaaatcatcttttaaaccaccaaaattcacccaatgacacgaaaacatttctagcacaaagaaaatcaaatcctatcctgagatccaatccaattccaagctattagtccctcatgatccgagtgtagaacatgtcctaatagcatctacgccaaaagcgcaacttcagaagggttttgactcctctgctttcactatttcggtcctaagcctaaaacggacatactaatccgactgatactcaaccggatcaaccgggctgagacaaaaatttcttgaagtcgaggctttattggagagcttttc

SEQ ID NO: 93925 - DNA, 743 bp, Arabidopsis thaliana columbia
atagaccagctatgacgtcgcatgcacgcgtacgtaagcttggatcctctagagcggccgcccttttttttttttttttttttttttttttccaaccacaacgagatgaattacaccacgactctaagtgaaatcatcttttaaaccaccaaaattcacccaatgacacgaaaacatttctagcacaaagaaaatcaaatcctatcctgagatccaatccaattccaagctattagtccctcatgatccgagtgtagaacatgtcctaatagcatctacgccaaaagcgcaacttcagaagggttttgactcctctgctttcactatttcggtcctaagcctaaaacggacatactaatccgactgatactcaaccggatcaaccgggctgagacaaaaatttcttgaagtcgaggctttattggagagctttccttcttcttctacaatccaaatggttttcttttctcccccatttctcattaattctccatcaggagtcgttgacggcagcatagctaatacgccttgaatcatgtaaatctgcccgggatcgataggatcttcacaaccaagctcgaaaaccacgatccgcctacctttgtacctttttaacactgagccaccactaccaaggaggttcaatcgcaggagaggtaccttcccgaaaaagactgaccaaaaaaaatcccaccagaacttgtttgccggtcgttcgaagagttcattaatttcccccattt

SEQ ID NO: 93926 - DNA, 446 bp, Arabidopsis thaliana columbia
  unsure (1)..(446): unsure at all n locations
tactttnctgtttcataacgtcataaagaacagtgacaggcgaaatttctcaagaaagcaaatcagaagaactcaaaaaaaaactaagatggagacagagaagaaaaatagcaaggaggtagcgctaaaacacctagcgttcgtgagaattgcaacgatccatattctggcttccgtctcaaatctctacgaatacgctaaacaaaactccggtcctctcaaatccgccgtggaaaaggtcgaaggagccgtcaccaccgtcgtcacccctgtctatcagaaattcaaagatgttcctgattctctcctggtctttctagatcacaaggtgggtgaagtttcgtacaagtttgattgagcatgctcctccaatggctaagaaagtggtggattcaagcacatgtattgttcttcaaggcgggcagagaaagctcaaagctttgtga

SEQ ID NO: 93927 - DNA, 683 bp, Arabidopsis thaliana columbia
  unsure (1)..(683): unsure at all n locations
attatcatcacttttgttcttccttcactcaaaatttctttcaaaatcgngatttcatcntctggggtgtttattgagacagaggggaagaatatcattgatgtagcgctaaaacacctagcgttcgtgagaattgcaacgatccatattctggcttccgtctcaaatctctacgaatacgctaaacaaaactccggtcctctcaaatccgccgtggaaaaggtcgaaggagccgtcaccaccgtcgtcacccctgtctatcagaaattcaaagatgttcctgattctctcctggtctttctagatcacaaggtgggtgaagctgcgtacaagtttgatgagcatgctcctccaatggctaagaaagtggtgaatcaagcacatgtattgatctacaaggcgacagagaaaagctcaaagctttgtgaaagaggctcgtaccggtggtcccaaagctgcgtttaactatgctgcaactgagtacaagtttttcgttgtgaccaactcggttaaagtctgggctaaacttaaccagtataaaccaatccatgcaatgggtgacaaagctttgcctgtggctgcacacttttccagtcggtacaacgatttggtgactgatatgactaatatgggttactctttggttggatatcttccgttggttcctgttgatgacattgtta

SEQ ID NO: 93928 - DNA, 477 bp, Arabidopsis thaliana columbia
tatggtccacaataagcatcactgtgattgccaatggtaagtaacaatgtacacaaataatgacaacaatttttgtaaagaaacagctctcttatgaatcagagagaagaatttggaggaaaggaaagacgaagaaagcctaataattcaaccaaaattattgtgaatagttatttagtaatactctctaagcacctgctaatgcgctgaagctgccacctctcctctgttttagaatatgtaagaggaatgaaaaggagtgttggtggcagtacctcatatatcaggcatggggagatggatgcagctgcatttctgtaaagttattgtttcctagaggagtaaataattgatttagaggtctttcttctcagacaaagctggagttttatgaagatgagtttgtgaggatgtgtttgggggtggtggtggtgggggtagctgggaagggtgctttgccgtttgggaacctcattt

SEQ ID NO: 93929 - DNA, 938 bp, Arabidopsis thaliana columbia
  unsure (1)..(938): unsure at all n locations
ttttaggtccactatagaagagctatgacgtcgcatgcacgcgtacgtaagctcgaaaacaagagaagcgtttggattcgacgtttgccttatccgttcagctcatcttcttcttcttcttcgtcacctctgaattagtttcccagaatccgaaattcctaggaagagaacataacaatggcgcagatggttgcgatgcccgtagcgcactcgctctcactcatttgcaattgggcaaaatccaatcctctctctcgcaacactcttgccctcccagcttcaaacactcccaataagcagagtctaagcatcagatgtgctcgtgttggtggagtggagattccggctaataagagaattgagtactctcttcagtacattcatgggattggtcgaactagggctcgtcagattcttgttgatcttcagatggagaacaagattactaaagacatggctgaggaagaactcatcattcttcgtgatgaagtctccaagtacatgattgagggtgatctgaggaggttcaatgctcttgcaatcaagaggttgaaggagatccagtgttaccgtggggtaaggcacatccaagggctgccatgtcggggacagagaaccaagaacaactgcaggactcttaaaggcaagaaaattgctattgcagggaagaagaaagtttccaagtaatcatcttcatgatctccttcttcttctgtaatactctttttagtttgtctagtcatctctgtttaaatgtgatttgtaattcccaaacctttgttcgaactgagccctttccagtttatcttcggctttttagctattaaaaaaaaaaaaaggaaaaaaaaaaccaaagcggccgctctagaggatccaagcttacgtacgcgtgcatgcgacgtcatagtaatctantagtgtcagtctaaattnnnnng

SEQ ID NO: 93930 - DNA, 1039 bp, Arabidopsis thaliana columbia
accacgcgtccgcggacgcgtgggcgaacaagagaagcgtttggattcgacgtttgccttatccgttcagctcatcttcttcttcttcttcgtcacctctgaattagtttcccagaatccgaaattcctaggaagagaacataacaatggcgcagatggttgcgatgcccgtagcgcactcgctctcactcatttgcaattgggcaaaatccaatcctctctctcgcaacactcttgccctcccagcttcaaacactcccaatgtaatcatttctcttggactctctcttgcgtatgatgttgtaatttatcgagcttgacttcatgtttttttatgtgttacttcattcttgttcgtcaatttttgggttaggggtggttatagaacactccatcaatttttgggggaatttgtctctgtgtttttaaagttttttttttttttgtaatgaaatgcagaagcagagtctaagcatcagatgtgctcgtgttggtggagtggagattccggctaataagagaattgagtactctcttcagtacattcatgggattggtcgaactagggctcgtcagattcttgttgatcttcagatggagaacaagattactaaagacatggctgaggaagaactcatcattcttcgtgatgaagtctccaagtacatgattgagggtgatctgaggaggttcaatgctcttgcaatcaagaggttgaaggagatccagtgttaccgtggggtaaggcacatccaagggctgccatgtcggggccagagaaccaagaacaactgcaggactcttaaaggcaagaaaattgctattgcagggaagaagaaagtttccaagtgaaaattgctattgcagggaagaagaaagtttccaagtaatcatcttcatgatctccttcttcttctgtaatactctttttagtttgtctagtcatctctgtttaaatgtgattgtaattcccaaacctttgttcgaactgagccctttccagtttttcttcggctttttagctattattattccgtat

SEQ ID NO: 93931 - DNA, 925 bp, Arabidopsis thaliana columbia
  unsure (1)..(925): unsure at all n locations
nnnnnnnnnnnnnnnnnnnnnnnnnnnnnnnnnnnnnnnnnnnnnnnnnnnnnnnnnnnnnnnnnnnnnnnnnnnnccacgcgtccgtacggctgcgagaagacgacagaaggggacggagcaaaaacaagagaagcgtttggattcgacgtttgccttatccgttcagctcatcttcttcttcttcttcgtcacctctgaattagtttcccagaatccgaaattcctaggaagagaacataacaatggcgcagatggttgcgatgcccgtagcgcactcgctctcactcatttgcaattgggcaaaatccaatcctctctctcgcaacactcttgccctcccagcttcaaacactcccaataagcagagtctaagcatcagatgtgctcgtgttggtggagtggagattccggctaataagagaattgagtactctcttcagtacattcatgggattggtcgaactagggctcgtcagattcttgttgatcttcagatggagaacaagattactaaagacatggctgaggaagaactcatcattcttcgtgatgaagtctccaagtacatgattgagggtgatctgaggaggttcaatgctcttgcaatcaagaggttgaaggagatcccatgttaccgtggggtaaggcacatccaaggctgccatgtcggggacagagaaccaagacaactgcagactcttaaggcaagaaattgcattgcagggaaaaaaagttccacgaataatttatgactccttcttctttggataccttttaggtgggctagctctttgttaaaagggtttggatctcaaaccttgtcggactgacccctccagttatttcggctttacctttaaaaaaaaaaaaaaaaaaaaagggccctttaggtccaacttctccggctcggtcatattttttg

SEQ ID NO: 93932 - DNA, 1187 bp, Arabidopsis thaliana columbia
cgctgttagagagaaactggagcaacttctcaaattttagcctttttttgtttttgcattttgcctaatcggtgcttctccagatttcgcttatcttgttcctatagcataacaatggcggatttcaaaccaaggatcgagatttcgttccttgaaaccttcatttgcagcgctttcgctgcttgttttgctgagttatgtactataccgttggacacagccaaagttagacttcagcttcaaagaaagattcccactggagatggtgagaatttgcccaagtatagaggatcaattggtactctagctaccatagctagagaagaaggtatttcaggtctttggaaaggtgttattgcaggacttcatcgccaatgtatctatggtggcttaaggattgggttatatgagcctgtgaagacacttttggttggaagtgactttattggcgatattcctttatatcaaaagattcttgcagctttgttaactggagctatagctattattgtagctaatccaactgatcttgttaaagttcggcttcaatcagaaggaaagttaccggctggggttcctaggcgttatgcaggagctgtagacgcttatttcaccattgtgaagctggaaggagttagtgcgctatggactggacttggtcccaatattgcccggaatgctattgtaaatgctgcagagttagctagttatgatcaaataaaggagacaattatgaaaattccgttcttcagagacagtgttttaactcatctactagctggtttagctgcaggcttcttcgctgtctgcatcggttctccaattgatgtggtgaaatctagaatgatgggagactctacttaccgaaacacagtcgattgcttcatcaaaacgatgaagaccgaggggattatggcattctacaaaggatttctcccgaattttacacggctaggaacctggaatgccattatgttcctcacattagaacaagtgaaaaaagtgtttctaagagaagtcttgtacgattgattctcagatccctagtcgaaaaccataccttattacataatcccttctataaaactttgaattgttagaattaaaacatatatactttctatgttatgtgagctttgttatttagattagtatagaaacattttatccaaaaaaaaattctttgc

SEQ ID NO: 93933 - DNA, 449 bp, Arabidopsis thaliana columbia
cagctttttaaacccaacagagcaaaaaagcaaaagattcaacaaaaatctcctcaaattctattcatggtctctagaaattctgacggatatttcttggatccgaccggtatgactgttcctggtctcggaccttcctttacagccgccgtttcttcttcttcttcaccaacgacttcttctacggccgtggctgtggcggatgtgacggcgatggtttcttcttcggaggaggatttgagtaagaagattaggaagccttatactattactaagtctagagagagctggacggagcctgagcatgataaattccttgaagctcttcaattgtttgatagagactggaagaagattgaagcttttattggttcaaagacagtgattcagatacgaagtcatgctcagaagtattttcttaaggtacaaaagagtgggaccggtgaaca

SEQ ID NO: 93934 - DNA, 529 bp, Arabidopsis thaliana columbia
cactcacttggagaagctaccacgcctgcaggtaccggtccggaattcccgggtcgtacccacgcgtccggaaaagacgacggagaaatggcggaggagcagaaaatgaagcagctaagccgattctggatttgggctttatcttccattgctttccgattgatcttgatctccttcccgggaaatctcaatctctcttcccgtccggaggtctctacccctctcaccagcattcgccgccttgctgaaggttattggttgaagcaggcatcgatgtcaccatatgcaggatctatgtatcatggctcaccattgctgctctcggttcttggacctctcacagttcaaaggattaaagggcaaccaagtcacctcttgtgcagcttggtttttgttattgcagatatattaagtgcaatgcttcttcgagctattggtcagaaactccagatggcttatggactgaatgcgagactacttggttttcttaagtcatcaagggataaagtgatcctaccttgtggtgata

SEQ ID NO: 93935 - DNA, 548 bp, Arabidopsis thaliana columbia
  unsure (1)..(548): unsure at all n locations
ctattttccaaatatcagtaaaatcagactttaaattttttgaaaatctgtctctctctctcgctgatcgctctagaatttttaagagagagagatacttttttaatcgatcttgccgtcaggatttgtttaaatttggcttccgtctgacatccatcagcttctacaatagtggttggtcagcttccgtctagcatcgtctagcttgtttagtaatgatggctagcttctgttatccaccggagtagtccggttttgcttcccgttctcgagttttctttttctactctttgtttttatcacagctaccttgtgtcgtgacgtgtttagtttcagtaattccgtgatctatgagacggcggtgtcaattcgatggccttgtttcgtttgatgcggatttcccttttgttaagtaagcggtctacaacatgaatcaacgttgattgcaaccaagggcctaaggnnattaaaagaaggttttttttcagcaaataatggntnncctatagntggcttttncatgaattggnnctccgnttnggggaaaa

SEQ ID NO: 93936 - DNA, 449 bp, Arabidopsis thaliana columbia
gtgcagtaggtggagatactgagactcagaaggatcttgctattgtatttcagtctgaggagcgacataaattaaagagggttattgatacattaaagcagagactggaaacagcaaaagctgacacggaagatcttatctcaaggctgaatcaggagttagccgttcgacaatttctgtcaacaaaggtaagagatttagaggttgaacttgaaacaactcgagagagctgcaagcaaggcatggagaaaacagtcctagatgaaaaggaaagatttactcaaattcagtgggatatggaggaactccgcaagcaatgcatggaaatggaatcgtttttaaactctataaaggacgagaaaacacatattgagactgcaaatgagtcacttgttcaagaaaatcagatgttgctgcagcagatcaatgatataagagaaaattttgag

SEQ ID NO: 93937 - DNA, 540 bp, Arabidopsis thaliana columbia
caacactacaaagaagaaacacactatctctctctctctctcaatacatctttcctcacttctgatcagtgtgatcacgtagagtgccttgaaggagaagaaagaaacaaaaaagaaagaaaaatgggatacctttttgaagaaaccttaagctctaaccctaaaaccccaattgttgttgatgatgataacgagttgggtttgatggccgtgagacttgccaatgccgccgcctttcctatggttctcaaagccgccctcgagctcggtgtctttgacactctctatgccgaagcctctcgcaccgactcgttcctttcaccatctgaaatagcgagtaagctaccaactacacctcgtaaccctgaggctccggttttgttggaccgcatgcttcgtctactcgctagctattccatggtcaagtgtggtaaggccttatccggaaagggcgagagggtctacagagccgagccgatttgcaggtttttcttgaaggataacattcaagatattggatcccttgcttctcaagtcatc

SEQ ID NO: 93938 - DNA, 373 bp, Arabidopsis thaliana columbia
cccacgcataagggagaggaagagagagcgatgggacacgtaacgaggctattgataaacccttcgtcttcctcgccacttctccacctccgttgttgccaccggactcttgaccctaactctgtcttctctcttcgaacctcaatcaccaaaagcaagggacgattctcttgtcttttctccggcggcaaccagagagaggagcaagctcgtaaatcattggaaagcgctcttggtgggaagaagaatgagtttgagaagtgggacaaagagatcaagaaaagagaagaatccggtggcggaaatggtggtaaaggtggagggaggaggaggttggtttggaggtggtggttggtttagtggcgaccatttc

SEQ ID NO: 93939 - DNA, 684 bp, Arabidopsis thaliana columbia
  unsure (1)..(684): unsure at all n locations
gcaaaaataagcgnncaaacctntgnanccaagacanctggaaaccctgcttgacgataggncaagtcactctgaacgnttgcaccncaagcnccgggttgcttcacaggttagcttcatgtacatggcctctgaaggctgaaagcgtataaaaaacacgtcccncccttggttttgacanttgaatatgncgccaggaacatctttaaactgaatgcgaatatctgccttctttgaactcattgcctttccggccttcagtataaaaggaacacctccccatctttcattgttaatgcgaagaattgttgtggcaaacgttggagtgtttgagtcatttggaacagttggatcatctctatatccttcatattgtccaagaaccacctcttcatcttttatgggaatcacagattgaagaaccttcactttctcatcccggatgtgctcgggtttaagagagattggtttctccatggcgacaaggcaaagaacctggagcaagtggttttgaataatatcacgaatgattccgtattcatcaaaatatccaccgcgaccttcagttccaaaatcttctctgaaaacgatctgtacgtttgcaatattgtcgcggttccatagtggcaaaaacaagcgattggcaaacagaagaaccaacatgttttgaactaactcttttcc

SEQ ID NO: 93940 - DNA, 666 bp, Arabidopsis thaliana columbia
  unsure (1)..(666): unsure at all n locations
ctttaatcaagctagcgacaatggtggttggtgtaatcctcctcgtgagcactttgtatctcgctatgcctatgtttctttccatcgctaagtataaggctggtatcgtccccgtctcttaccgcaggatcccatgtaggaagaagggaggaatcagattcacaatcaatggattcaagtacttcaacttggtgctggtcactaacgtagccggagctggagacgtcattaaggtgagtgtgaaaggatccaacacacaatggttagatctgagccggaactggggacaaaactggcaatccaacgcacttcttgtcggccaatctctttctttccgagtcaaaacctctgatggccgaagctccacctccaacaacattgctcccagtaactggcaatttggccagacctactccggcaagaacttccgcgtctgatttctagaatatgaaaaagagtcgtgtggcggaagatactaaagcttttttttatatcaaatatatatatttacgtgtctttgatttagtttacgatttggaatttggggttaccattttnccctaatttcccagggaaagnattgggatccttgggttcaagtagggtaccttaaagntaggngaaatggtttttggtttttgggggtggcctgttganganctgaat

SEQ ID NO: 93941 - DNA, 821 bp, Arabidopsis thaliana columbia
  unsure (1)..(821): unsure at all n locations
cccagggattcccccatgtcaagcaaagaaagggcagggaaatcagattttccgcaatccaatgggatttcaaagtccttccacctttgggggctgggtcacctaacgtaagccggaagttggagacgtccattaaggtgaagtgtcaaaggctccaacacccaatggttagatctgagccgaacctggggacaaaactggcaatccaacgcacttcttgtcggccaatctctttctttccgagtcaaaacctctgatggccgaagctccacctccaacaacattgctcccagtaactggcaatttggccagacctactccggcaagaacttccgcgtctgatttctagaatatgaaaaagagtcgtgtggcggaagatactaaagcttttttttatatcaaatatatatatttacgtgtctttgatttagtttacgatttggaattggggttttaccatttttcccttattttctcagggaaagtattgggattgcttggtttgcaagttagggtttactttaaagattagggctatattgttttttttgttttttttggtgtgttgtgtcttgtttggtatgtagtcttgtagagaggctgaagcggctgcagaaagaaagggttgggataaagattcatgtagcccgcagctctcttttacgttatgattgtattaaagtatatatatatcatgaagaaattaaacatggtttcttcgatttatataaataaaaaaaaaaaaaaaaaagnnnnnnnnnnnnnnnnnnnnnnnnnnnnnnnnnnnnnnnnnnnnnnnnnnnnnnnnnnnnnnnnnnnaa

SEQ ID NO: 93942 - DNA, 516 bp, Arabidopsis thaliana columbia
ggccgagaagcgtccggataagatcatagcatgtccaagatgcaagagcatggagacaaagttctgttacttcaacaactacaacgttaaccagcctcgacccttttgtaaaggctcccaccgttactggacccccggtggtgcactccggaacgttcccgtcggcgccggtcgtcggaagtccaaaaccacctggtcgtgtcgtggttggtatgcttggagatggaaatggtgttcgccaagtcgagcttataaatggcttgctcgttgaggagtggcagcatgccgcagccgcagctcacggtagtttccggcatgattttcccatgaagccggctccggtgttactccgacggtcaatcgtgctgattataattatttactctcttttttaaaaaataatttgttttggttttggggttgagtggttttcctctaaacccgttgaagaacgtggtgaatttggttgctattgggtacatacaggctggcaaagtagttaatttgtcatttgtc

SEQ ID NO: 93943 - DNA, 499 bp, Arabidopsis thaliana columbia
  unsure (1)..(499): unsure at all n locations
ctattttccattctctgcacgttttcatggcgactcgagattctcaagggattaaactctttggcaaaactattgcatttaacactcgaacaataaaaaatgaagaagagacacacccgccggagcaagaagccacaatagccgttagatcatcatcatcatcggatctgacggccgagaagcgtccggataagatcatagcatgtccaagatgcaagagcatggagacaaagttctgttacttcaacaactacaacggtaatcagcctcgacacttttgtaaaggctgccaccgttactggaccgccggtggtgcacnccgggacgttcccgtcggcgccggtngtcgggagcccaaaccacctggtcgtgtcgtggttggtatgncntgganattggaatggtgttcncaagtcgacttttnaatnggttgcccgttaagantggnacatccggaccggantccngganttccgnatgatttccctgangggccggt

SEQ ID NO: 93944 - DNA, 516 bp, Arabidopsis thaliana columbia
tgtcagaggtggtgcaacagctagtaagattagttcaaagggcaagtgttgtcaaacgaagatcaagtgatgacactggattttcatacaggacacctgaacacgagcacgtcgatatctcattctgagtaatgatccaaaactactccaaaatcgggtcttttctgtcattcgaagctaaaatgcagcttgaaaactcaaaaggaagagagagttttgctcaatgcataagagaatctgatccaaaggactacagagaagtaaagaagcatcttggttcataccaaaagtgtaagaaaatatatgtttgtgtatttttgtaagagtaaaattagagtacataaccatgtttcaatcatctttcttgtaccattttctcttcacctgttgaataatcaagtatgagacttgttgctgcatcaaaataacatttgaaattttgcctatttaaaaaaaaaaaaaaaggcaggccgctctagaggatccaagcttacgtacgcgtgcatgagacgtcaa

SEQ ID NO: 93945 - DNA, 744 bp, Arabidopsis thaliana columbia
  unsure (1)..(744): unsure at all n locations
acggtcacgtgggtttacacaacacagaatccatttttcttctttcataactatcagaaacaaacacaaattaaatcaaagtttcattagttttaaccccccacaaaaaaacatgggtagtgcaaaatcagccatgctgatcctcttagtagcaatggtcatcgcatcatgtgccacggccattgatatgtccgtggtttcctacgacgataacaaccgtctccatagcgttttcgatgctgaggcctcgttaatcttcgagtcatggatggtcaaacatgggaaagtgtacgggtccgttgccgagaaggaacggcgtttgacgatttttgaggacaacctccgttttatcaataaccggaacgctgagaatctcagttatcggcttggtttgaccgggtttgcggatttatctctccatgaatacggagaaatttgccatggggctgatccnagacctcctaggaaccacgtcttcatgactagcagcaaccgatacaagactagtgatggtgatgttcttcctaagtccgttgactggagaaacgaaggcgcagtgactgaagtcaaagatcaaaggccttttcaaggagttttttggnttttctccacctgttggggagcaattggaagggtttaaacnaagnntttttnnctttggnggagctttttaaactttntgcntttgggcaaagattttngtnccaaattttaaaccaaangggaancaaattggntttccgg

SEQ ID NO: 93946 - DNA, 521 bp, Arabidopsis thaliana columbia
  unsure (1)..(521): unsure at all n locations
atacggagaaatttgccatggggctgatccaagacctcctaggaaccacgtcttcatgactagcagcaaccgatacaagactagtgatggtgatgttcttcctaagtccgttgactggagaaacgaaggcgcagtgactgaagtcaaagatcaaggcctttgcaggagttgttgggctttctccactgtgggagcagtggaaggcttaaacaagattgtgactggagagctagtaactttgtctgagcaagatttgatcaattgtaacaaagaaaacaatggttgcggaggaggcaaagtcgagacagcctatgagttcatcatgaacaatggtggtcttggtaccgacaacggtttatccttacaaaagctctcaattggagtcttgcgaaggcccgcctcaagggaaggcaacccaaggatttttaattggttttatggggttttgagaattttcccttcaaaacgggttgaagccgcttttcattgaaacgggttntcaccaagcctttancntcccg

SEQ ID NO: 93947 - DNA, 723 bp, Arabidopsis thaliana columbia
  unsure (1)..(723): unsure at all n locations
cnnnnnnnnnnnnnnnnnnnnnnnnnnnnnnnnnnnnnnnnnnnnnnnnnnnnnnnnnnnnnnnccgggtcgaccacgcgtccgcttctcttctttaataacttttagaaacacaaataaaagtttaattacttttaagcccaacaaaaatgggttatgctaaatcagccatgctgatcttcttactagcattggtcatcgcatcttgtgccacggccatggacatgtccgttgtttcctccaacgataaccaccacgtgaccgccggtcccggccgccgtcagggtattttcgacgctgaagccaccttgatgttcgagtcatggatggtcaaacatgggaaagtgtacgactccgttgccgagaaggaacggcgtttaactatttttgaggacaacctccgttttatcactaaccggaacgctgagaatctcagttaccggcttggtttgaatcggtttgcggatttatctctccatgaatacggggaaatttgccatggggctgatccaagacctcctaggaaccacgtcttcatgactagcagcaaccgatacaagactagtgatggtgatgttcttcctaagtccgttgactggggaaacgaaggcgcagtgacttaagtaaagttaaggccttcacgggggttttgggtttcccccttgggggantgaggttaaaagtttactgggctgaattnntgaagttncattaaaagaanat

SEQ ID NO: 93948 - DNA, 499 bp, Arabidopsis thaliana columbia
  unsure (1)..(499): unsure at all n locations
cgatctcgtttgatcataatttctcaatcaaatttctttctctaaaaaggttttgctctttataaatttattttgattacttatattaatctatgaatgggttcgtcttcgtcgtcgtcgcttaataactctccgattagagctgatagtatggtaactccagaatctcagatgactgtgaacgataacaaaaacgacaacgtttcgatcttgtctccttctgtcaagaaaagctttgaatcgccaaggaagagtacttcgactccggcgaataataatctcactccggtcaaatctcggtggtctttctcttcatccaagaaaagtttcggaagcaaagatgaaacctttttcggttcgcagccatggcttacaactctggacttccgtcggttgattttccacagcgtaaattggcgnttttcacctncatcacnncggganaactcnnangggaggtttttangannggccccccgtttcccaaaccnttnttccc

SEQ ID NO: 93949 - DNA, 888 bp, Arabidopsis thaliana columbia
  unsure (1)..(888): unsure at all n locations
nnnnnnnnnnnnnnnnnnnnnnnnnnnnnnnnnnnnnnnnnnnnnnnnnnnnnnnnnnnngcgggacgacccacgcgtgcgtgcggctgcgagatgacgacagaagggtccggtcaaatctcggtggtctttctcttcatccaagaaaagtttcggaagcaaagatgaaacctttttcgattcgcagccatggctacaatctgactccgacgatgatttccacagcgtaaatggcgatttcactccatcactcggaaacactcctaagagcagcttctcagataggccaccacgtttccacaaccttatattccacgagaagaagccttcccgaggctcgtcttctccagcgccacttccaaggaggaagaagcttggtgagcttttcagagacagtataagagaagaacgagaagaaagcggttcatcgtcagctataagcactccttatctatcaggtgctaactcacgcgaattcaatgacaccgccatcgaaaaggaagagaagaagaagtctaactggcatcatcatcgttgtcttcctggtttctcttcatgtggtggaagtttcatggagaggaggaagaagatgagttctgaaactcccaattgttgctgtaaaatgagatgcttgtgttttgatatttggaaatgttttgtatatgaaagaatgataaagagaaagagagggagagatacagagctctcagagtaaaaagctctgctgaattttacagggcactctattatcttgtgatgataagagattgaatcaataggtgaagagataatgtaaaaaaaaaaaaaaaaaagnnnnnnnnnnnnnnnnnnnnnnnnnnnnnnnnnnnnnnnnnnnnnnnnnnnnnnnnnnnnnnnnnnnaacggaat

SEQ ID NO: 93950 - DNA, 397 bp, Arabidopsis thaliana columbia
gttgaatcgcccgtcactaaaatcctctccgagaatcctcctccgatctgccactagctatggcggaatcgtctggtaccacgctaatggatctgatctcggcggatccaaccccggttcctgcacaatctacttcttcgtccgcatcttccacggcgtctcagccgacttctgcttccgcatcgtcttcttcccatctgcaccatccaatgtcgacgaagacgactctaggagagaagaaatcgaagagagccactttgatgcagatccaaaacgacactatatctgttgctaaagctgcactgaatcctgttaaggccaatatcatgccacaaaggcagagacagaaaaagaagccggtttcctattcgcaacttgcaaggagcattcatgaatt

SEQ ID NO: 93951 - DNA, 603 bp, Arabidopsis thaliana columbia
  unsure (1)..(603): unsure at all n locations
ccctggaangccnncgtngcaacccatcgggncntncnttganggcaacctcccaagaaccccgaaatctttggatttgaaatcccaactgagatcgaagggataccttcagagatcttggaccccgtcaactcctggtctgataagaaggcacacaaagatactctggtgaaactgggaggtctgttcaagaagaacttcgaggtttttgctaaccataagattggtgtggatggtaagcttacggaggagattctcgctgctggtcctatcttttagaaaaaccaaactctgaatgatgttgtcgaaaagaaagaaagatctactattattaagaagaataaaatgagactttgtgtttttctttgctgtgataatctctctgaataatagagagaatttaatgttccaaatgtggtgcgatatggataatgatgatgactatatgtaatttattactatccatcgtcatatatttttgttgggcctttgccaacatttacatgatagaaccaagtacgnataatataaatcctggtccnnnnnnnnnnnnnnnnnnnnnnnnnnnnnnnnnnnnnnnnnnnnnnnnnnnnnnnnnnnnnn

SEQ ID NO: 93952 - DNA, 661 bp, Arabidopsis thaliana columbia
ccaactcaggaggagcttgagagctttggtactccggattttactatatacaatgctgggcagtttccatgtaatcgttacactcattacatgacttcgtccactagcgtagaccttaatctggctaggagggaaatggttatacttggtactcagtatgctggggaaatgaagaagggtcttttcagtgtgatgcattaccttatgcctaagcgtcgtattctctcccttcattctggatgcaatatgggaaaagatggagatgttgctctcttctttggactttcaggtaccgggaagacaacgctgtctactgatcacaacaggtatcttattggagatgatgagcattgttggactgagactggtgtttcgaacattgagggtgggtgctatgctaagtgtgttgatctttcgagggagaaggagcctgatatctggaacgctatcaagtttgggaacagtttttgggaaaatgtttgtgtttgacatgacgcacaccagagaagtggattactctgataaatctgttacagagaacacacgatgactgcctacccaattgagtcattcaaatgcgaaatacttggatgccaaccgcaagtgtaacttgactgagctggttacaccggaacgacgatgcaacagacataaagacgac

SEQ ID NO: 93953 - DNA, 558 bp, Arabidopsis thaliana columbia
atataggttgctggcacagaggatggtatcaaggagccaacagcaacattctcagcttgctttggtgcagctttcataatgttgcatcccacaaagtatgcagctatgttagctgagaagatgaagtcacaaggtgctactggttggctcgtcaacactggttggtctggtggcaggtatatatgtccttctatggaaatcgatacaacaaaacgctgccttgtaacacatgtttgtaggctattaacatgatctgtaatgttttatttcctgcagttatggtgttggaaacagaatcaagctggcatacactagaaagatcatcgatgcaatccattcgggcagtctcttgaaggcaaactacaagaaaaccgaaatctttggatttgaaatcccaactgagatcgaagggataccttcagagatcttggaccccgtcaactccgtaagtttctgcaaatctgtataatgtaattgcttaagtgatgatgaacaattttttgttgatttgggtttaatgaaaatgcaagggtctgataagaaggcacacaaagatac

SEQ ID NO: 93954 - DNA, 1114 bp, Arabidopsis thaliana columbia
  unsure (1)..(1114): unsure at all n locations
gaaagctggcacgcctgcaggtaccggtccggaattcccgggtcgacccacgcgtccgattggagatgatgagcattgttggactgagactggtgtttcgaacattgagggtgggtgctatgctaagtgtgttgatctttcgagggagaaggagcctgatatctggaacgctatcaagtttggaacagttttggaaaatgttgtgtttgatgagcacaccagagaagtggattactctgataaatctgttacagagaacacacgtgctgcctacccaattgagttcattccaaatgcgaaaataccttgtgttggtccacacccggcaaaatgtgatacttctggcttgtgatgcctttggtgttctcccacctgtgagcaagctgaatctggcacaaaccatgtaccacttcatcagtggttacactgctctggttgctggcacagaggatggtatcaaggagccaacagcaacattccaaccttccttgggtgcagctttcataatgttgcaccccacaaagtatgcagctatgttagctgagaatgatgaatgtcacaatgggtgctactggttggctcgtcaacactggttggtctggtggcagttatggtgttggaaacagaatcaagctggcatacactagaaagatcatcgatgcaatccattcgggcagtctcttgaaggcaaactacaagaaaaccgaaatctttggatttgaaatcccaactgagatcgaagggataccttcagagatcttggaccccgtcaactcctggtctgataagaaggcacacaaagatactctggtgaaactgggaggtctgttcaagaagaacttcgaggtttttgctaaccataagattggtgtggatggtaagcttacggaggagattctcgctgctggtcctattttttagaaaaaccaaactctgaatgatgttgtcgaaaagaaagaaagatctactattattaagaagaataaaatgagactttgtgttagcggccgcgcattcctgcagcccgggggatccactagatctagagcggccgccaccgcggtggagctccagcgtctgcccccatagtgagggttgnnnnnngaagtatcat

SEQ ID NO: 93955 - DNA, 1443 bp, Arabidopsis thaliana columbia
  unsure (1)..(1443): unsure at all n locations
agcggacgcgtccgcccacgcgtccttgaaaacgttaaatgatcttctcctccgatcattagtctctttaatctttctcagcctcttcttgttcgtgatctctcttcctccggaaaaagatgtcggccggtaacggaaatgctactaacggtgacggagggtttagtttccctaaaggaccggtgatgccgaagataacgaccggagcagcaaagagaggtagcggagtctgccacgacgatagtggtccgacggtgaatgccacaaccatcgatgagcttcattcgttacagaagaaacgttctgctcctaccacaccgatcaaccaaaacgccgccgctgcttttgccgccgtctccgaggaggagcgtcagaagattcagcttcaatctatcagtgcatcgttagcatcgttaacgagagagtcaggaccaaaggtggtgagaggagatccggcggagaagaagaccgatggttcaactactccggcgtacgctcacggccaacatcattctatcttttctccggctactggtgctgtcagtgatagctccttgaagtttactcacgtcctctacaatctttcgcctgcagagctttatgagcaagctattaagtatgagaaaggttcgtttatcacttctaatggagctttggcgacgctttctggtgctaagactggtcgtgctcccagagataagcgtgttgttagagatgctactactgaggatgagctttggtggggaaagggttcgccgaatatcgaaatggatgaacatactttcatggtgaacagagaaagagctgttgattacttgaattccttggaaaaggtctttgtcaatgaccaatacttaaactgggatccagagaacagaatcaaagtcaggattgtctcagctagagcttaccattcattgtttatgcacaacatgtgtatccgaccaactcaggaggagcttgagagctttggtactccggattttactatatacaatgctgggcagtttccatgtaatcgttacactcattacatgacttcgtccactagcgtagaccttaatctggctaggagggaaatggttatacttggtactcagtatgctggggaaatgaagaagggtcttttcagtgtgatgcattaccttatgcctaagcgtcgtattctctcccttcattctggatgcaatatgggaaaagatggagatgttgctctcttctttggactttcaggtaccgggaagacaacgctgtctactgatcacaacaggtatcttattggagatgatgagcattgttggctgagactggtgtttcgacattgagggtgggtncntgctagggtgttaccttcgnggggaagngcctnttctgaccgtncaagnttganagtttgaatnttngttntggccncngaagggttcccgaaactttnaggccatc

SEQ ID NO: 93956 - DNA, 519 bp, Arabidopsis thaliana columbia
gtcttccactttgatccacttaaagcagctttaaagctttgaacatgtttagctataatccctgaggaactatcctcatgtctctctccagttgcttgcttcccttttctcaatcagcgacggctccgtcttcctccgtctgctcttgccatctcgccgcctctttttctaattttccggtttcgtcaagagactatagtttctccagaagtggaagccttgttctcaacggaggaggctcgaatctctgccggagattctgtggtttgaaactgtggatacttaagagcttgaatcgtagacaaggcaacaacagaaaacatcagcctgtaaacgagcttacaacacactcaaagcacactttcctcagcgatgatgaacgaggttttgctgaagaaactagagctgaagatttacggccccgaggggaatattctggggacggttttgaatgatggggttcacaatgtgggagacttaccaccctgtgcaaaacaactctcggatgatctttcagat

SEQ ID NO: 93957 - DNA, 491 bp, Arabidopsis thaliana columbia
aaaacaaaaaaaaaaaacttacaccaaaacgatgtctggaggtgtcggtccaacgtacaacgacataaccttacccaaagaagaagaagaagaacatcaaacccaatccacctcaacagtatcatccaccggaaaacccgccggattcttctcattccgacaactaaacatcctcgcaataatcatcgttctctccgcaagtggtctcgtaacaatccaagatttcatattcacgatcctcactctcatctacttcttcttcctctcgaaacttatcttcccaccacacaacaatccaaaccgtgacgctcctctcacaagctccacaaacaaaatcttccgtatctatgttacagcggcggggatcgtcgggcttatcattccgatctgttacatcttcgaaggaatcgttgaggatgataagaacggtgttagcgcagctgcccgcacgtgttttttttagcgagtcagatttttatggaaggattagc

SEQ ID NO: 93958 - DNA, 857 bp, Arabidopsis thaliana columbia
  unsure (1)..(857): unsure at all n locations
ggctaacttgacaaagaatctggagcaagtttctgagactcttgcggctgcgaaaaggcatttatcacaaaggattcagaatctggatgataaggtagaaaagcagatcgatctctcgaaggaaatcaatagccaggttatttctgctcgtgagaatatcagctcacttgagatggatttggaatcattgcataatttgattactggactggatgggaagttggacacgctggaatacaagcaggatgtcacaaatgttttcatgctaaacttgtataactattttggaggcaagagcacaaagctgcctgaaatggaacagcttcagcttcctgtaaaccagagggctcgtaatttgcttgcagatgttgaaactaagggtctgaaaaacttggctgaagagctgtttaaaagcaatggcacacaggtgacaaccacagtgaaacaaatcagtttgagtaaagtgaatgtgaagtcgaggccattgttatcaagggctgcttcagctaagtgttgatatggaagttttcctgatggcggtttggcttgcgggatgtatataacaaaactcttacttatacaaatggtctcgtgagccgtagaatgctctcttacatctattcgttggtttggcttttttcccccaaaacttgggtcttatgatattttggtttgcactttggaggtttttccccgaattggagtttgtttattgacatgtgtagtgtccccttttgaacttttacgccttttataaaaaaataaaaaaaaaaaaaaaaaaaaaagggcggccgctgtagaggatccaagcttacgtacgcgtgcatgcgacgtcatagctggtntatagtgtaacg

SEQ ID NO: 93959 - DNA, 533 bp, Arabidopsis thaliana columbia
  unsure (1)..(533): unsure at all n locations
tgcactcccgtnnnnnnnnnnnnnnnnnnnnnnnnnnnnnnnnnnnnnnnnnnnnnnnnnnnnnnnnnnnnnnnnaagacgaataagaagaagaataagaaagcttgagaccttctctctgtgtgcaatttcgaaatcgataaagacttcaactttcggttctaacaatgacaatttccgtatagtttgattttgtccacctctttcaccgattacctgatttcatcgctggcgttagtcatcaaatgggagctcgttgctcaaagttctcattctgcttgttcccttctcacttcaaatccgcttcagttctcgagtctcctgatatcgagaatggaggaaaagtgtggccgacttttaaggaattcaaattggagcagctgaaatctgcgaccggaggtttctcttcagacaacattgtatcagaacacggcgagaaagctccaaacgttgtctacagaggaaggcttgatgatggtcgtttgattgctgtcaaacgattcaatcgccttgcttgggctgatcatcgacag

SEQ ID NO: 93960 - DNA, 815 bp, Arabidopsis thaliana columbia
gcagtaccccaccggaattcccgggtgcgacccacgcgtccgtccaaacgctgtctacagaggaaggcttgatgatggtcgtttttttgctgtcaaacgattcaatcgccttgcttgggctgatcatctacacggtctggattgaagctaaagctgctgggagcttgaggagtgatagattagcaaatctgattggatgtcgctttgaaggagaagagagattatctagttgctccctcctcgcctcatgaaacgcttgcaaagcatcttttccactgcgagaataatccgatgaaatgggcgatgagattaagagttgcattgtgtttagcacaagcattggaatattgtagtaataaagggagagctttgtatcatgatctcaatgcttacagggttttgtttgacaaggatgggaatcccaggttgtcttgttttggactcatgaaaaatagcagagatgggaagagttatagcacaaacttggcatttactcctccagagtatttgcgaacgggtagagttacaccacagagtggtgtattcagttttggaaccgttctgctcgatctcatgagtggaaaacatatttcatcgagtcatgcgcttgacctaatcagaagcaagaactgtgcaatggtaatggattctgctctcgagggttcatttctcaaacgaaaaaccggaactgaggctagtaaccccttagcccacaccgttggtccttgcaagtattgaaaagcctctgagtaaaaggacccacaattggttgaaaaatcctcttccgctggaactttccaccttgggtcaacaac

SEQ ID NO: 93961 - DNA, 671 bp, Arabidopsis thaliana columbia
  unsure (1)..(671): unsure at all n locations
ctggatttaagaataacattcgtgacttccttgtacagtctaaggagttttccgctcaggataacaaagatctctatgctgaggaagcagctgcacagagagagagagaacgtcaaagaatgctttcaattcctgggcttattgctcctaatgagattcaagacgagatggtggactcataaaattaagaagggtgcaacaagaagaagcttcctgtgttcaatgggctggattttttgtaatcataggtttttgaaaacaggaaagagttcaaggagagattaatttccccgaccgtatctctactaccgtattccgaagcttctcaattcgattttgaggattggaaaagctaagaaaacagagatctttttggggataaattagtgtcttgtttggttaattaattgggtttaatgtagatttaaacattagggaccttctctagttatctcatatggttggctcctttttgctttgacctttttttgggggtttgtttctattactcagtgattcgtgttttaggtgcaagatatttttttagactctatctttgtcaccccctagggggttccccattgtaagattgacttgtcgccatgtttctcattaaaatcgtccactttaaagtgtgctttgacaattttatcaaacaaaanctttgaatt

SEQ ID NO: 93962 - DNA, 523 bp, Arabidopsis thaliana columbia
cgcctcactttagggaaagcacgtacgcctgcaggtaccggtccggaattcccgggtcgacccacgcgtccgtgcggctgcgagaagacgacagaagggggcaacgcaaaataacactgccgtttaagacgacggtcccttgacagaatcttcatcaacgctcgatttgacgtctgccgatttccttagctccgacgtaaaccactgatcgtcggtattcagctatattttgatttctcagctccaaaaattcccaacgaaatggagaaaatggccaaaggatggtttccgatgagcggcactagtagcagcggagatcagcggcagcaaccgctgcaaacaggaggaacgtctctgctagctgattggaattcttacgcagcatcgagagattttgaagaagacaccggaactttaggcttcgatatcgaatcccgccgttagatctgccaacgacactgttccggacctttatggtgtttcaaaggggtaggattccccgcagttgcacaaggtgtttgct

SEQ ID NO: 93963 - DNA, 1012 bp, Arabidopsis thaliana columbia
ggccccccctcgaggtcgacggtatcgataagcttgatatcgaattcgcggccgcgctcgatttgacgtctgccgatttccttagctccgacgtaaaccactgatcgtcggtattcagctatattttgatttctcagctccaaaaattcccaacgaaatggagaaaatggccaaaggatggtttccgatgagcggcactagtagcagcggagatcagcagcagcaaccgctgcaaacaggaggaacgtctctgctagctgattggaattcttacgcagcatcgagagattttgaagaagacaccggaactttaggcttcgatatcgaatccgccgttagatctgccaacgacactgtttccggcacctttaatgttgtttcgaaaggagttagagataacctgcagtctgcaacaagtagtatgccttcaggaaaagctttgatgtatttcggtttacttctagcaagtggtgtattcttcatcttcattgccttcaccatgtttcttccagtcatggtgcttatgccacagaagtttgcaatttgttttacccttggatgtggatttatcatcggatctttcttcgctcttcgtggcccgcaaaatcaactcgctcacatgtcatcggcagagaggcttccactaactttaggtttcattgccaccatggttggcaccatatatgtctcgatggtgctccatagctacattctctctgtgattttctctgcattacaggttattgcactggcgtactactgtatatcatatttccctggtggatcatcgggaatgaagttcctcagttctactctcacctcctctgtcttccgaatgtttgggagatgagctttcgctttgacctatgcaaagaaaataactcgattctctcgtgtataaagaaagatgaaagatcttcaacagtggttaaatgacaaatctggtaaaatatgttggtccaatggctcaaagacagttttgttataaatttcctatattgatactttctgg

SEQ ID NO: 93964 - DNA, 795 bp, Arabidopsis thaliana columbia
  unsure (1)..(795): unsure at all n locations
gccgngnttgcnagtttntnggccaggaccattcttccggntgaacccttccattggggaatntgccggttcntgcanccacttttnttcagngcaataccgtcatggggatgtaccccatcatgttccgccctctgttctcaccccttcttactggataccaatgtttctcatagttggagcaggcatgggtcctattttcgcattgaagtacttccgctacacatacagacccagcaaaatcaataatactccagcaagctgaacgaatgggtggtccaatactgacactaggaaacatcgaaacgcaaccaaggaccattgaaaaggacttgtctccaatatccatcactcagcccaagaacagaagcccggtctatgagccattgctatcagattctccaaacgcaacacgacgctcatttggccctggaactccattcgagtttttccaatcacagtcaagattatcatcatcctctggttataccagaaactgcaaagacaactaaaaagctttttaattttttttgtttctttcaaatttttacggttccgtgacgtttgtgacttttctgatctcaatggtaaatgcagtccaagtcgcgggtattaacaagaacttgatttatacagcagccaagaaaacacattgtcttgtctgcaacaaagatcttattttattaatttattaatctttgcgagggaaaaaaaaaaaaaaaaagggcggccgctctagaggatccaagcttacgtacgcgtgcatgcgacgtcatagctaatctataggtcgcc

SEQ ID NO: 93965 - DNA, 423 bp, Arabidopsis thaliana columbia
tccgttttcatttaaatagaaggcccgaaagctcttatggaaaaatcggggttcaattttatgttttctaagggagaattggaatacagaggtgagctaaagtaaagcaatggatagttttgctcctggtgaaaagactactataagtcaagaccgttttatatatgatatggataaaaacttttatggttgggatgagcgttctagttattcttctagttattccaataatgttgatcttttagttagctccaaggacattcgcaatttcatatcggatgacaccttttttgttagggatagtaataagaatagttattctatattttttgataaaaaaaaaaaaatttttgagattgacaatgattttagtgacctagaaaaattttttatagttattgtagttctaggtatctaaataat

SEQ ID NO: 93966 - DNA, 521 bp, Arabidopsis thaliana columbia
  unsure (1)..(521): unsure at all n locations
nnatacgactcactttagggaaagcacgtacgcctgcaggtaccggtccggaattcccgggtcgacccacgcgtccgcccacgcgtccgtacgagaagacgacagaagggtcctccggatcagcagaggcttatctttgccggtaagcagctcgaagatggacgcacccttgcagattacaacatccaaaaggagtcgacacttcatcttgtgcttcgtctccgtggtggggtgcagatctttgtgaagacccttaccggaaagaccattactctggaggtagaaagctcagacaccatcgataatgtcaaggctaagattcaggacaaggaagggatcccaccagaccaacagagactcatcttcgctggaaaacagcttggggatggtcgcacacttgcagattacaacatccagaaggagtcgactcttcacttggttcttcgtcttcgcgggggatgcttctaagctttttgtgatctgatgataagtgggtggttcgtgtctcatgcacttgggag

SEQ ID NO: 93967 - DNA, 549 bp, Arabidopsis thaliana columbia
  unsure (1)..(549): unsure at all n locations
tccggattcatcatctctctcacagaaaaaagtaaaaaaaaacctagatcgctcttcacatctcttcgaacgattctctctttcaagatgcaaattttcgtgaaaacactcactggtaagaccatcactctcgaggttgagagctctgacaccatcgacaatgttaaggcaaagatccaggacaaggaaggcattcctcctgaccagcaaagattgatcttcgctggtaagcagctagaagatggccgcaccttggctgattacaacatccagaaagaatcaacactccacttggttctcaggttaagaggtggtatgcagatctttgtcaagactctgactggcaaaaccattaccttggaggttgaaagctctgacactatttgctaacggcaagggaaagnttcaggccaagggaggantcctncggnccagcaaaaggcttttttcnctgggaagaanttttaggttggagggcttttcttgnctcaaantccaaaggggtttcttttancttgnccttggttnccggggggtttnaaanttttt

SEQ ID NO: 93968 - DNA, 621 bp, Arabidopsis thaliana columbia
  unsure (1)..(621): unsure at all n locations
tctgactcttcaatctctcccaaagcctaaagcgatctctgcaaatctntcgcgactctctctttcaagatgcaaatcttcgtgaaaacactcactggcaagacaatcaccctcgaggttgagagctctgacaccatcgacaatgttaaggcaaagattcaggacaaggaaggcattcctccggatcagcaaagattaatattcgccggtaaacagctagaagatggccgtaccttggcggattacaatatccagaaagaatcaacccttcatttggttctccgtttaagagggtggtatgcagatcttttgtcaagactcttgacttggcaaaacccattacttttgggaggttgagagctcttgacactatttggtaacggccaaaggcaaaggttccagggccaagggaaggggattccctccggggttcaagcaaaaggcttttttttttcccgggtaaggagccttttaggccggggggaccttttggcttggcttcaaccattccaaaaagggggttggccccctcaattttggggnttgggcttaaaagggngggttcaaanctttttttaaagncctcctggaaaaatcccntggggttnnngnttncccctt

SEQ ID NO: 93969 - DNA, 641 bp, Arabidopsis thaliana columbia
tgacactatagaagagctatgacgtcgcatcgcacgcgtacgtaagctcggaattcggctcgaggataaagagggaattcctccggatcagcagaggcttatctttgccggtaagcagctcgaagatggacgcacccttgcagattacaacatccaaaaggagtcgacacttcatcttgtgcttcgtctccgtggtggtatgcagatctttgtgaagacccttaccggaaaaaccattactcttgaggttgagagctcagacacaattgataatgtcaaggctaagattcaggacaaggaagggatcccaccggaccaacagagactcatcttcgctgggaagcagcttgaggatggtcggactcttgcagattacaacatccagaaggagtcgactcttcacttggttcttcgtcttcgtggtggaagcttctaagctttttgtgatgtgatcacaagtggttgttcgagtctcatgcacttgggaggtgagatcttcacctggtttggtttctccttcggtctgcggggaaaaccttttccttatcggtggttctgaaggttcatttcctgttttcctttattttcttatgaacctttggttgctgtttcaacttttaataataatccaagtgcatgtt

SEQ ID NO: 93970 - DNA, 882 bp, Arabidopsis thaliana columbia
  unsure (1)..(882): unsure at all n locations
aggtaccggtccgaatttcccgggtctacccacgctgccgtgggtgctttacattctctcccaagccctaaagcgatctctgcaaatctctcccgactctctttttcaaaatgcaaatcttcttgaaacactcactggcaagactatcactctcgaggttgagagctctgacaccatcgacaatgttatggcaaagagtcaggacaaggaaggcattcctccggatcagcaaagattaatattcgccggtaaacagctagaagatggccgtaccttggccgattacaacattcagaaagaatcaacccttcatttggttctccgtttaagaggtggtatgcaaaatctttgtcaagactctgactggcaagaccattactttggaggttgagagctctgacactattgacaacgtcaaagcaaagatccaggacaaggaaggaatccctccggatcagcagagacttatctttgccggtaagcagcttgaagacggaagaactcttgctgactacaacattcaaaaggagtcgacccttcatttggtgcttcgtctcagaggtggtatgcaaatctttgtcaagaccctcactggtaaaacaatcacccttgaggttgagagttcagacaccattgacaatgtcaaagctaagatccaagataaagagggaattcctccggatcagcagaggcttatctttgccggtaagcagctcgaagatggacgcacccttgcagattacaacatccaaaagggagtcggcacttcatcttgtgcttcggtctccgtggtggtatgcagatctttttgaaggcccttacccgggaaacccccntttactttggggggtttnaaaagcntaggcccccctncggtnattt

SEQ ID NO: 93971 - DNA, 978 bp, Arabidopsis thaliana columbia
acgacccactatagggttaagctggtacgcctcgcggtaccggtccggaattcccgggtcgacccacgcgtccgggacaaggaaggaatccctccggatcagcagagacttatctttgccggtaagcagcttgaagacggaagaactcttgctgactacaacattcaaaaggagtcgacccttcatttggtgcttcgtctcagaggtggtatgcaaatctttgtcaagaccctcactggtaaaacaatcacccttgaggttgagagttcagacaccattgacaatgtcaaagctaagatccaagataaagagggaattcctccggatcagcagaggcttatctttgccggtaagcagctcgaagatggacgcacccttgcagattacaacatccaaaaggagtcgacacttcatcttgtgcttcgtctccgtggtggtatgcagatctttgtgaagacccttaccggaaagaccattactctggaggttgaaagctcagacaccatcgataatgtcaaggctaagattcaggacaaggaagggatcccaccagaccaacagagactcatcttcgctggaaaacagcttgaggatggtcgcacacttgcagattacaacatccagaaggagtcgactcttcacttggttcttcgtcttcgtggtggaagcttctaagctttttgtgatctgatgataagtggttggttcgtgtctcatgcacttgggaggtgatctatttcacctggtgtagtttgtgtttccgtcagttggaaaaacttatccctatcgatttcgttttcattttctgcttttcttttatgtaccttcgtttgggcttgtaacgggcctttgtatttcaactctcaataataatccaagtgcatgttaaactggattaaaaacacaaagggaggccgctctagaggatccaagcttacgtacgcgtggtatgcgacgtctagctcttctatagtggca

SEQ ID NO: 93972 - DNA, 814 bp, Arabidopsis thaliana columbia
  unsure (1)..(814): unsure at all n locations
acnnnnnnnnnngngggaccgggcctgaantcccngggtggccaactgcgcccggtcgttttctgactcttcaatctctcccaaagcctaaagcgatctctgcaaatctctcgcgactctctctttcaagatgcaaatcttcgtgaaaacactcactggcaagactatcactctcgaggttgagagctctgacaccatcgacaatgttaaggcaaagattcaggacaaggaaggcattcctccggatcagcaaagattaatattcgccggtaaacagctagaagatggccgtaccttggccgattacaacattcagaaagaatcaacccttcatttggttctccgtttaagaggtggtatgcaaatctttgtcaagactctgactggcaagaccattactttggaggttgagagctctgacactattgacaacgtcaaagcaaagatccaggacaaggaaggaatccctccggatcagcagagacttatctttgccggtaagcagcttgaagacggaagaactcttgctgactacaacattcaaaaggagtcgacccttcatttggtgcttcgtctcagaggtggtatgcaaatctttgtcaagaccctcactggtaaaacaatcacccttgaggttgagagttcagacaccattgacaatgtcaaagctaagatccaagataaagagggaattcctccggatcagcagaggcttatctttgccggtaagcagctcgaagatggacgcacccttgcaggttacaacatccaaggggtgccttantttnttggtccggggggttnnnnttttttc

SEQ ID NO: 93973 - DNA, 517 bp, Arabidopsis thaliana columbia
  unsure (1)..(517): unsure at all n locations
nnnnnnnnnnnnnnnnnnnnnnnnnnnnnnnnnnngttgaaataatgtcaaatttcaaaatatgtaaataaatatacattcgagaaagaaattcacaaactgtaaacaaaatttttgtaaaataataagacttgattggtaattgggcgtaaaggtaaatatagagttacataccctatcaaacaatcagcatcaataaccatacatgtaaaaagctaagagcaaatcatttcctttcttcattctgaatggtctttttctatttctcaaaaaaaaaagaaaaaaaaaaaacttccccaaaaaatgaatttaggaatttgacgagcttaggagtggacacaatcagagggtaagaggatcaacttccgagtttcgctccttaatgggactccaatcttttggctttggctttacagagatgaccataagccgccgttgtaatatggaggctccaaaaaggaagattgaccccataccaaacttgatttgggaccggaaatgcgtccacattgtacaa

SEQ ID NO: 93974 - DNA, 769 bp, Arabidopsis thaliana columbia
  unsure (1)..(769): unsure at all n locations
cgtnnnnnnnnnnnnnnnnnnnnnnnnnnnnnnnnnnnnnnnnnnnnnnnnnnnnnnnnnnnnnnnnnnnnnccacgcgtccgctcgatttattctgcaattcattggtaaaagatgttggcaacgagcttaatcttccttcttacatataccttacgtgtaacgctagatacttggggatgatgaaatatattccggatcggcatcggaaaatcgcatctgagttcgatttgagctccggcgatgaagaattgccggttccgggattcataaacgctattccgacgaaatttatgccgcctggattgttcaataaggaagcttacgaggcttacgtagagctagcgccgagattcgcagatgcgaagggtattttggttaattccttcacggagcttgagccgcacccgtttgactatttctctcacctggagaaattccctccggtttacccggtcggaccgattctcagcttgaaagatcgagcgagtccgaacgaagaagcagtcgatcgggatcagatcgttggggtggctcgatgatcagccggagtcatcggtggtgttcctctgtttcgggagcagaggaagcgttgatgagccgcaagtgaaggagatagctcgagctttggaactcgtcggctgcagatttctttggtcaattagaacaagcggcgacgtctagacgaatcctaacgatgtgttggccggaggggttcatgggccgaatagcaggcccagttttggtatgtgggtgggcttcaccaggg

SEQ ID NO: 93975 - DNA, 295 bp, Arabidopsis thaliana columbia
aaaacatttagatcgcttacctggttcgtgcacctgattagctgctgttattcctttttcttcccagagttcaggtcgttaaaaatctaatcttttttggtgggtgaagactcttctttatcaaatcaacctaatttctcagattctcagatctcaagagttttgtttttttagcaacaatgaataaaaatccacggctcgatttttcctcaccgtcgtcgttagccactatctccgactctgcagacggtgagctgaatgaagaccacatctttgcaatcgacatatctcacgc

SEQ ID NO: 93976 - DNA, 563 bp, Arabidopsis thaliana columbia
  unsure (1)..(563): unsure at all n locations
gttaagtgatttcatcaaagctctggtggatcattgcttctccaccaccaataccaatggcttccctttacctcaattccttacttccacttcctccttctcacccccagaaacttttagaaccttcttcttcctctttgttgagcacttctaatggtaacgaacttgctctgaagccgattgtcatcaatggagatccacccactttcgtctctgctcctgctcgtcgtatcgttgcagttggagaccttcatggcgatctgggtaaagccagagacgcacttcagttggctggcgtcttgagctccgacggacgagaccagtgggtcggccaagacaccgtactagttcaggtaggagatatacttnatcgcggtgatgatgaaatcgcaatactctccttattgaggtcacttgatgatcaggccaaggctaatggtggagctgttttccaggttaatgggaaccacgnggacaatgaattgttgaaggggatttcanatatgtaggatgcgngagattttnattgaggtggacctgattttttttgcctnncttngggg

SEQ ID NO: 93977 - DNA, 3323 bp, Arabidopsis thaliana columbia
cttctctagcgtcactcttcttcttcattggtcggtagaataaggccaaggaagggatcagttttaagttttgtttcattctttttgtagtggagaaaaagagtttttgaaaatcaaaacaacaaaaaatgccgattaggcaaatgaaagatagctctgagactcacttagttatcaaaacccaacctttaaagcaccacaatccaaaaaccgttcaaaacggtaaaatccctcctccttctccttctccggtgacggtgactactccggcgacggttactcagagtcaagcttcttcaccttcaccaccgtcaaagaatcgtagccggaggagaaaccgtggtggaagaaaatctgatcaaggagatgtttgtatgagacctagctctcgtcctcgtaaaccgccaccgccaagtcaaaccacttcctccgccgtctccgtcgccaccgccggtgagattgtcgctgtgaatcatcagatgcagatgggtgttcgtaaaaactcaaactttgctccaagacctggatttggaacacttggaactaaatgcattgttaaagctaaccactttctcgctgatttgcctaccaaggatttgaatcagtatgatgttacaattactcctgaagtgtcatcaaagagtgttaacagagctataattgctgagttagttagactttacaaagagtctgatctcgggaggagacttccggcttacgatggccggaaaagtctttacactgctggagaacttccttttacttggaaggagttcagtgttaagattgttgatgaagatgacggtatcatcaatggccctaaaagggagagatcatataaggtggcaatcaagtttgttgcacgggcaaatatgcatcacttaggcgagtttctagctggtaaacgggcagattgtccgcaagaggcggtgcagattcttgatattgtactcagggagttgtcggttaagaggttttgtcccgttggaagatctttcttttcgcctgatattaaaacaccgcagcgactcggtgaagggttagagtcatggtgtgggttttaccagagtattagaccaactcaaatgggtttatcactaaatatcgatatggcttcagctgcattcatcgagcctcttccagtgatagagtttgtagcacagcttcttggaaaggatgtcttgtcgaagccattgtcggattctgatcgcgtcaagattaagaagggtcttagaggagtgaaagtagaggttactcacagagcgaatgtaagaaggaaataccgtgttgcgggtttaacaactcaaccaacaagagagctaatgtttccagtagatgagaactgtactatgaagtcagttattgagtatttccaagagatgtatggattcacgatccagcacacgcatttgccatgtctccaagttggaaaccaaaagaaggcaagctatttgccgatggaggcatgcaaaattgtcgagggacaacggtacacgaaaaggttgaatgagaagcagattactgctctcttgaaagttacatgccaaagggccgagggacagagaaacgatattttgcggactgtccaacacaacgcatatgatcaagatccatatgcaaaggagtttggcatgaacataagcgaaaagttagcttctgttgaagctcgtattcttccagctccatggcttaagtatcacgagaacgggaaagaaaaagattgtctcccgcaagttggtcagtggaatatgatgaacaagaaaatgatcaacgggatgactgtgagcagatgggcctgtgttaacttctcacgcagcgttcaagaaaacgttgctcgtggattttgtaatgaacttggtcagatgtgtgaagtctcaggcatggagtttaatccagaacccgtgataccaatatatagtgcgaggcccgatcaagtcgagaaagctctaaagcatgtttatcacacttcaatgaacaaaaccaaaggcaaagagttagagcttctgctggcaatattacctgataacaacggttcactttatggtgatcttaagagaatctgtgaaaccgagcttggtttgatatctcaatgttgtctcacaaaacatgtgttcaagattagcaaacagtatctggcagatgtatcccttaaaatcaacgtaaagatgggaggaaggaacacagttctagtagacgccataagctgtagaattccactggttagcgatataccgacaatcatttttggcgcagacgtgactcacccagagaacggggaagagtcaagcccttcaatcgctgctgttgttgcttctcaagactggcctgaagtgacaaaatatgcgggtttagtttgtgctcaagctcacaggcaagaacttatacaagatttgtataaaacatggcaagatcctgttcgcggtactgttagtggcggtatgatcagggaccttcttatctcatttagaaaagcaacagggcaaaaaccgcttcgaattatcttttatcgtgatggagtaagcgaagggcaattctatcaagttttactctatgagttggatgcaattcgaaaggcttgtgcatcgcttgaaccgaattatcagccaccggtgacattcatagttgtacagaagcgtcaccacactcgtttgtttgctaataatcaccgagacaaaaacagtactgaccgaagcggaaatatcttaccaggtactgtagttgacactaaaatatgtcatccaactgaattcgacttctacctttgtagccatgcgggtattcagggaacaagcaggcctgcacattaccatgttctttgggacgagaacaatttcacagcagatggtattcaatctctgactaacaatctctgttatacctatgcgcggtgcactcggtcggtctctatagttcctccagcgtattatgctcatcttgcagcatttcgagcacgtttctacctggaacctgagataatgcaagacaacggatcaccgggtaaaaagaacacgaaaacaacaactgtcggagacgtaggtgtgaagcctttaccagccttgaaggagaatgtgaagagagtaatgttctactgctaaaaatccaaacattccttaatcagttttaataagtagtttggttgtttgcttgtagttcggctttagatttaccaatgtttttcttatgtaaattttgtcggtttggtttaagcctttaggaattagtgtattagggtttttctaaagttgtactttagctgatgataacgttgatgcagtgactttgttaaaacctcctcttctacagtagtgtttacgtcgttcctc

SEQ ID NO: 93978 - DNA, 545 bp, Arabidopsis thaliana columbia
aaaagacggccgtttggagaaagagaaaatttgggaccctctactaagaaaagtatcttccaaattagctgtccaacagctccgaccagtctgttctcttttgctcttctcacacacacacaaacataacatctcctccattttctctcttctctctttttataagaactcttcttcttcttcttcttctctctcaattccatctctctctctctttctagttcttgttccctttcgaatcaagtgatcatggctcaagaagagatacagaaacctactgcctctgttccagtggttaaggaggaaactcctgccccggttaaggaggttgaggtgccggttactacggagaaagctgtggctgcgcctgctccggaagctacggaggagaaagttgtgtctgaggtggccgtgcctgaaacagatgtgacggcggtgaaagaggaggaggttgcgacgggaaaggagatcttgcaatcggagtcgtttaaggaggaaggctatttggcttctgaattacaggaagctgagaagaatgctttggc

SEQ ID NO: 93979 - DNA, 765 bp, Arabidopsis thaliana columbia
gtacgcctgcaggtaccggtccggaattcccgggtcgacccacgcgtccgagttcttgttccctttcgaatcaagtgatcatggctcaagaagagatacagaaacctactgcctctgttccagtggttaaggaggaaactcctgccccggttaaggaggttgaggtgccggttactacggagaaagctgtggctgcgcctgctccggaagctacggaggagaaagttgtgtctgaggtggcggtgcctgaaacagaggtgacggcggtgaaagaggaggaggttgcgacgggaaaggagatcttgcaatcggagtcgtttaaggaggaaggctatttggcttctgaattacaggaagctgagaagaatgctttggctgagttaaaggagttggttagggaggctttgaacaagcgtgaattcaccgcgccaccgtcaccaccagctccggtaaaggaagagaaagttgaggagaagaaaacacaggaaacagaggaaaagaaggaagaagttaaagcagaggaaaaatctcttgaggctgacaccaatgaagaggagaaatctgctgttccggccaccgtagaaaccaagaaagaagagatcttggccgttccggcttcgatcgtcgcataagaccaagaaggaagagacacccagttgcctcctgcttcccggtagaagactaaaacccgcctggctttccggctcgattgccacgaccaccaaagaaagggaaagaaatctttttacccaggccttgctttcc

SEQ ID NO: 93980 - DNA, 691 bp, Arabidopsis thaliana columbia
  unsure (1)..(691): unsure at all n locations
ctcaaagatgantttaacttggtaatgancgctggttttaagaatgantttnatctcctcaagaacgttgtgcgggaagggaaagaagagtatatgcctttgaactttggtccttactgtgccacatcctcattcgatgctgcatctccgatcttccatgatattgtacccgcactcgagtccttgaacatcgaagttgaacagtttcatgctgaatccgggaaaggtcagtttgaagtatctctcggtcacaccattgcatcccatgctgccgacaacttggtctacacacgtgaagttataagatcggttgcaaggaaacagggattgctcgcaacctttgttccaaagtatgattattgtgacattggttctggatcacatgtgcatctaagtctttggaaaaacggcgaaaatgtcttcccggcatctaataactcatcttctcatggaatctcttccgttggagaagagttcatggccggagttctatttcatcttccatcaatcttagctattatagctccactcccaaacagctacgaccgaatccaacctaatacatggagtggagcattccaatgttggggcaaagaaaaccgcgaagcagcgttaagagcagcttctccaccaggaactcctgatggtttaattactaactttgagataaagtcttttgatggctcttcaa

SEQ ID NO: 93981 - DNA, 486 bp, Arabidopsis thaliana columbia
aaaaaaacgaatccggaagatgtggaatcagaagcatgatttggagtcggctcagacgcctctctacccgatgatgtcggagagcccggagctccgatggtctttcatccgcaaggtctattccatcatctccatccagctgctcgttacaatcgccgtcgctgccaccgtcgttaaggttcattctatttctgtattcttcaccaccaccaccgccggcttcgctctctacatacttcttatattgactccattgatcgttatgtgtcctttgtattactatcaccagaagcaccctgtgaactatctgttactcgggattttcaccgtcgctcttgcctttgcggttggcttgacctgcgcctttacaagcgggaaggtgattctggaatctgtgattttgaccgctgttgtggtcatatccctcactctatacactttctgggcggccaaaagaggccatgacttcaacttcctcggaccttt

SEQ ID NO: 93982 - DNA, 625 bp, Arabidopsis thaliana columbia
  unsure (1)..(625): unsure at all n locations
gacaaatcatacaatgatgatagagatcgcagttgaggaagtcagcttttactggaagactcgaaaagggatcctgaagagcggattattcctcgcagtgtagatgctgatgattctgatgttgatatcaaaagtgacgatgatagtgatgacgaaagtgacgatgatgatgaggacgacactgaagctcttatggcggaactcgaccagataaagaaagaaagagtggaagagaggctcaggaaggaaaaagagcagcagatggaagagctaaacgctaaggaagaggaacttctcaaaggaaacccattgcttaatactccaacgtcttttagcgtcaaaaggaggtgggatgatgatgttgtattcaaaaaccaggcacgtggtgaaatgaaagctcctaagcgcttcatcaatgatacaatcagggaatgacttccacaggaaattcctgcatagntacatggaagtgattgtttgtccaagagtgttattgctacttcttttgtatgatggtttntggccttaaaagctttttatcctggcctnggaattccgntgnctctngtncttcaaccaacnaantnntttttaaanctttnttnccaaaacctttttgccnttt

SEQ ID NO: 93983 - DNA, 794 bp, Arabidopsis thaliana columbia
  unsure (1)..(794): unsure at all n locations
gtccgaataagaagtgtgtttgaaagatctccaaacactgttttataacctctttggtctctttgatgagtattgtccctggtctgtttctaaaccaggatatcgttttttaaccatgcaactgccaattttcttcttttcatgggtaaaccaaatcagacgagagttctcgtcgtccttatctcgatcttggttgattcgctctccgatcggaaattagggcttttgttttctgaagatgacgactgcagcacgaccaacctgggctccagctaagggaggtaacgagcaaggtggtgctcggatctttggtccatctcagaagtattcgtcccgtgatgtcgccgctcacacaactttaaagccaaggagggaagggcaacacactcaagaggaactccagaagataaatcttcgtgatgagcttgaagagcgtgagaggagacatttctcatcaaaagacaaatcatacaatgatgatagagatcgcagaagaggaagtcagcttttactggaagactccgaaaaggggtccctgaagagcgggttattccctccgcagtgtagatgctggatgattcctgatgttgatancaaaagtggcggatgatagtggatgaccgnaaagtggccgatgatgatgngggcgncacttgaagcnctttttggnggggacnccggccaggtttaaggaaaggaagaagttgnaaaaaagnccccngggaggggaaaaagcccccnnnttgnaagncttaccnctttggggangnactttccnaaggancccnttnttt

SEQ ID NO: 93984 - DNA, 458 bp, Arabidopsis thaliana columbia
  unsure (1)..(458): unsure at all n locations
cgctctctcaaaagtcgaatatcccaaattcgatccgttttccggcgataatctccgatctagatccgatggcgaacgaccagttcgtgtgctcgttactggagctgcaggacaaatcggatatgctcttgtacctatgattgcaaggggtatcatgcttggtgctgaccaacctgttatcctccacatgttggatattcctccagctgctgaagctttgaacggtggtgagatggagttgatcgatgctgctttccctcttcttaaaggtgttgttgctacaactgatgccgttgagggatgtactggagtcaatggtgctggtatggttgggggttcctcatgaaagatggtttggaaaggaaggattttttatccattaatttattttttacaatttnnnnnnnnnnnnnnnnnnnnnnnnnnnnnnnnnnnnnnnnnnnnnnnnnnnnnnnnnn

SEQ ID NO: 93985 - DNA, 622 bp, Arabidopsis thaliana columbia
  unsure (1)..(622): unsure at all n locations
ccgcccgaatnccgggcgccacgcgtcgcgtacacgcctgagcctgagagttctcgtcgtccttatctcgatcttggttgattcgctctccgatcggaaattagggcttttgttttctgaagatgacgactgcagcacgaccaacctgggctccagctaagggaggtaacgagcaaggtggtgctcggatctttggtccatctcagaagtattcgtcccgtgatgtcgccgctcacacaactttaaagccaaggagggaagggcaacacactcaagaggaactccagaagataaatcttcgtgatgagcttgaagagcgtgagaggagacatttctcatcaaaagacaaatcatacaatgatgatagagatcgcagaagaggaagtcagcttttactggaagactcgaaaagggatcctgaagagcggattattcctcgcagtgtagatgctgatgattctgatgttgatatcaaaagtgacgatgattagtgatgccgaaagtnacgatnatgatgaggccgcctgagcnctnttgggggactcnccagttaatgaagantaatggananagncccgatggaaaanccccnntgangctacccagganggnctncaagacc

SEQ ID NO: 93986 - DNA, 617 bp, Arabidopsis thaliana columbia
  unsure (1)..(617): unsure at all n locations
aacacgggcctgaacacaaggcngaantgcaaggcnccncctntgcaancctccttnnccaacccnnacgggncctggaacccaaagggncgtncgttcncnatgggagnaaccccgatggctctacagcgttccatcaggacttacctactccttccctgtaacttgtcgcaatggagactggagtattgtccaaggccttccgattgatgaagtatcaaggaagaagatggatttgactgcagaggagctcaaggaagagaaggacttggcgtactcatgcctctcttaaacccttctggagcaaaattttcatctataaggtgtgagatcagttaaagcctttcagggctttgtccgaataagaagtgtgtttgaaagatctccaaacactgttttataacctctttggtctctttgatgagtattgtccctggtctgtttctaaaccaggatatcgtttttttcaatgggccggttggggcccataaaaaagaaaatggcagtgcnnnnnnnnnnnnnnnnnnnnnnnnnnnnnnnnnnnnannaaggcgccgctctaagatccaagcttacgtacgcgtgcatgcgacgtcatagtctttctatagtgtcac

SEQ ID NO: 93987 - DNA, 846 bp, Arabidopsis thaliana columbia
  unsure (1)..(846): unsure at all n locations
ctctacgctctctcaaaagtcgaatatcccaaattcgatccgttttccggcgataatctccgatctagatccgatggcgaaagaaccagttcgtgtgctcgttactggagctgcaggacaaatcggatatgctcttgtacctatgattgcaaggggtatcatgcttggtgctgaccaacctgttatcctccacatgttggatattcctccagctgctgaagctttgaacggtgttaagatggagttgatcgatgcttgctttcccctcttctttaaagggggttgtttgctacaacctgaatgcccgttgaaggggttgtacctgggggtcaatagttgctgttaatggttgggtgggtttcccgaggaaaagaagggatttggggaggaagggttgtgattgtccaagaatgtttccttctacaaagtctcaggctgctgcctttggggaagcatgccgctcctaactgcaaggtttcttgttgtggccaacccggcaaacaccaacggcattgatcctcaagggatttgcacccccaatccctgaaaagaacatcccttgtttgacaaggcttgcccacaacagggctttgggacagatctctgagaggttgagcgtgccagtgtctgatgttaagaacgtgatcatctgggggaaccactcatcctcacagtancccagatgtcaacccatgctaaagtgcagancttcgtnttggagggaagcctntccgtgaggnttgtcaaaggncggttgcattggtttgnccggggaatttttttnttacaagtttnaacaacggtggnggtnnaaatnattaaaggngggggaagttntttaggtgg

SEQ ID NO: 93988 - DNA, 1497 bp, Arabidopsis thaliana columbia
  unsure (1)..(1497): unsure at all n locations
nnnnnnnnnnnnnnnnnnnnnnnnnnnnnnnnnnnnnnnnnnnnnnnnnnnnnnnnnnnnnnnnnnccacgcgtccggcaagagtgagcttcacgggcagacaaaagctgactctacgctctctcaaaagtcgaatatcccaaattcgatccgttttccggcgataatctccgatctagatccgatggcgaaagaaccagttcgtgtgctcgttactggagctgcaggacaaatcggatatgctcttgtacctatgattgcaaggggtatcatgcttggtgctgaccaacctgttatcctccacatgttggatattcctccagctgctgaagctttgaacggtgttaagatggagttgatcgatgctgctttccctcttcttaaaggtgttgttgctacaactgatgccgttgagggatgtactggagtcaatgttgctgttatggttggtggtttcccgaggaaagaaggtatggagaggaaggatgtgatgtccaagaatgtttccatctacaagtctcaggctgctgccttggagaagcatgccgctcctaactgcaaggttcttgttgtggccaacccggcaaacaccaacgcattgatcctcaaggaatttgcaccatcaatccctgaaaagaacatctcttgtttgacaaggcttgaccacaacagggctttgggacagatctctgagaggttgagcgtgccagtgtctgatgttaagaacgtgatcatctggggaaaccactcatcctcacagtacccagatgtcaaccatgctaaagtgcagacctcgtctggagagaagcctgtccgtgagctcgtcaaggacgatgcatggttggacggagaatttatctctacagttcaacaacgtggagctgcaatcatcaaggcgaggaagttgtctagtgcgctctctgctgctagctctgcttgtgaccacatccgtgactgggtccttggaactccagagggtacgttcgtttccatgggagtatactccgatggctcttacagcgttccatcaggacttatctactccttccctgtaacttgtcgcaatggagactggagtattgtccaaggccttccgattgatgaagtatcaaggaagaagatggatttgactgcagaggagctcaaggaagagaaggacttggcgtactcatgcctctcttaaacccttctggagcaaaattttcatctataaggtgtgagatcagttaaagcctttcagggctttgtccgaataagaagtgtgtttgaaagatctccaaacactgttttataacctctttggtctctttgatgagtattgtccctggtctgtttctaaaccaggatatcgtttttttcaatgtgtctgatttggtttacccatgaaaagaagaaaattggcagttgcatggttaaaaaaaaaaaaaaagnnnnnnnnnnnnnnnnnnnnnnnnnnnnnnnnnnnnnnnnnnnnnnnnnnnnnnnnnnnnnnnnnnn

SEQ ID NO: 93989 - DNA, 408 bp, Arabidopsis thaliana columbia
gtaggatgtcttaaccacatagaggattgcttttcctttgagagtcaacaggcttggcaaaggccgaccactatacaatgtggagtttattcaatggttgaaacgtttttgcgattcaattaaagggcggctttttgaccgggatttttattccagtagaaccgaagttcaagaggtgggagagagaaaagcgtaatgggatctagtacgatctcaaagtcatggcaaacaaacaatatgcatcatcctcctgtggctacttccaacaaaccagctggtcccaagcaagcaacatcacatggaattggaggtgggagcaactcatcagccgaagtgcaagctctggcaaaggaggtagaagatcttaaggtctgggttgatcttttggaaaaagtaagagatttttac

SEQ ID NO: 93990 - DNA, 522 bp, Arabidopsis thaliana columbia
aacaaaaatggagactagagaaacaaaaccagtgatctttctcttccctttccctttacaaggtcacttaaacccaatgtttcagctcgccaacatcttcttcaacagaggcttctccatcactgtgatccacactgagttcaactctccaaactcttccaatttccctcatttcactttcgtatccatccccgatagcttgtctgaacctgaatcctatcccgatgtcatcgaggttcttccatgaccctcaattccaagtgtggttgctccttttcggtgattgctttaaagaaggcttttatcctgaaggagccaacagcagcctgtgtgattgttgacgctctttggtacttcactcacgatttaaccgagaaattcaatttcccgaggattgttctccgaaccgttaacctctcagctttcgtcgctttctcaaagtttcatgttttaccagagaaagggtatctttctttacaagagactaaggcagactcaccggatccggagcttccgtatctt

SEQ ID NO: 93991 - DNA, 470 bp, Arabidopsis thaliana columbia
gaaaaaacaaaaagaacaaaatttgttatctctctttcctctcattttgaccctcttcacttctttttgatccctaaatggaacacgagagcaagaacaaggtggatgggatggagatggagaaaggaaaaaaagagagtgggtcgagaaaaggacttgagttaacgatgagagttttggctttggtcctaacaatggtagctgcgacagtacttggtgttgcgaaacaaacaaaggttgtgcctataaagcttattcctactttacctcctcttaatgtctctacaaccgccaaagcctcttacttgtctgcttttgtgtacaacatttctgcaaacgcgatagcttgcggttacaccgcgatctcaatagtgattgtgatgatcagcaaaggcaaaagaagcaaaagtttgttgatggcggtcttgataggagatcttatgatggtggctttactgtttttcagcact

SEQ ID NO: 93992 - DNA, 691 bp, Arabidopsis thaliana columbia
  unsure (1)..(691): unsure at all n locations
acccgtactggacttcgccaagggagtcatgatgacttaggtaattgtcctagctacagccccaggagtgaggacaattgatcctgaccttgcacagaggcatatatacatggcatatttacctttggctcacatccttgagttagcagctgagagcgtaatggctactattgggagtgctattggatatgggtctcccttgacgctaacggatacttcaaacaagataaaaaagggtacaaaaggagatgtcacagcactaaagcccactataatgacagctgttccagccattcttgatcgtgtcagggatggtgtccgcaaaaaggttgatgcaaagggcggattgtcaaagaaattggttgactttgcatatgctcggcgattatctgcaatcaatggaagttggtttggagcctggggattggaaaagcttttttgggatgtgcttgtgttcaggaaaatccgtgcagttttgggaggtcaaatccgctatttgctctctggtggtgcccctctttcttggtgacactcaggagnttcatttaacaacctgcgtttgggctcccaatcggtcaagggtattgggctcacagagactttctccttggtcggaccctcctgggggttttgggcanaatccntttggcccttttggggctncnacttccttngnccctttaaaaannnt

SEQ ID NO: 93993 - DNA, 416 bp, Arabidopsis thaliana columbia
acggacgcgtgggcggacgcgtgggcattaatcatcatcttttcttcacagagaggaaaaaaaaaaaatggcgacagattctcaaccaaaccaaaagctaacgcttccgttaaaaacaagaatcgctctcaccgttatctccaccatgaccgataacgctcaacgtcctgacggaactatcaaccgccgtttcctccgcctcttcgatttccgtgctcctcccaatcctaaacccgtcaacatcgtctccacctccgatttcgtcgtggatcaatcccgtgatctctggttccgattgtacactccacatgtctccggcgataaaatccccgtcgttgttttcttccacggcggtggtttcgctttcctcagtcctaatgcgtatccttacgataatgtatgccggagattcgcta

SEQ ID NO: 93994 - DNA, 759 bp, Arabidopsis thaliana columbia
atcaccactatcgctattgtctccagctagtcccagaattcgatccaggtcatcttcgtcttcatcatcttcatcttcatcttcatcttccgtctcatcatcatcatcgggatccgagtcatcatctgttgctccttctcatagggtggactgactattcattcattctcatcatgtcgtcggaatctgaaatcccgccgttgtcgtcatcaaccgccgcagcggaggaatctggagagaagaccagcaagaaagcggctaagaaggaagctgccaagctagagaagttaagacgtcgtcaagaacaagaggaagcaacgcgtcgaacagcttcgatctctctggaagagaatgacgagttttccaataactacggcgacgtgactcttaccgagttgcaatcgtcggcggatccgaaagccgggaagtggatagaggctgttgagggaaaggagtggaccgatgtgagcgatttggtggaagagatgttggaatcagaggttctgatcagaggccgagtgcacacgaatcgtccaacgtcttaacaatttggggtttgtgggccttgagggagaccggttcaactgttcagtccggggtttcccaatccgggaagcccaaagtgggtgccaacatgggtaaatccctcaagcagctgacccgcgacccctttgtcgatgttatcggtgtcgtcactctccccaaggagccgcttacgggaactacgcagcaagttgaaatttaagtgagaaaagtgta

SEQ ID NO: 93995 - DNA, 465 bp, Arabidopsis thaliana columbia
cttttcgtcatcgtaatcccgcggtgaagtagtcgatgtaatcattgagagtgaaaagaaaaacaatgtcgcagctgttatcttctcctccaatggcggttttctccaaaaccttcataaaccataagttttcagatgctcgttttctctcttctcactcaattctcacctccggtggattcgccggaaaaattattcctttaaaaccgacggcgaggttgaaattaacggtgaagtctcgacaaagtgattactttgagaaacagaggtttggtgactcgtcttcttcgcaaaacgctgaagtatcttctcctagattttacgtgggtcattcgatttacaaagggaaagctgctcttacgatagaaccacgagcaccagagtttgtggctttggaatctggtgcgttcaagctgacaaaggaaggttttttgttgctccaatttgctcctgcagctggtgttc

SEQ ID NO: 93996 - DNA, 434 bp, Arabidopsis thaliana columbia
  unsure (1)..(434): unsure at all n locations
acactaactcccataantaatttaattttacatacaacacactgatttactattgacaaaactaatcttctaacaacgataggttatatcataaatatgtacagagaaaaaaataaatgttaccaagattctacctaacatccttctactacctattggtccaacatgaaagaccgaccaccaaattcttaactaacttcccacattttatatacataaaattaaatttgcccacaaaccaaatccataaccggttcactatctgctccagatacaccaattcaaccgcgtgggttgttgacaaacacgattgaattggtctacatggaccggttagttaccccggttaaaaatatgatttgatcaaacccaaatggtatagattcctcatcactagactcccaagtgacaccaacactgtccctcctccatac

SEQ ID NO: 93997 - DNA, 504 bp, Arabidopsis thaliana columbia
  unsure (1)..(504): unsure at all n locations
gcaagatatctggatacgcggaaaatagagagaagaaatcaaaaagcatatttttattttatctttgaaaagaagattattgtttttagtctacaatggtgactctaaaaatggagatttgcatcgagttgttgaaattgaccgtagatttcgtcgccgccgttgcagaatcaatcgaagtagctttccgccatcgtcctccaccggtgattcaatattcttcagtgatgtatggtcgccggagtaattacaccgccgttcccattcctctcgtggggtttctgtagttaatatattcttcttttgtggttcttttgttttttgttcattcttgttctattataattaccttcttgcctcggacaaaaaggtatatttcttatgaaagaacaagatgtgttttgtgtataaaccaaaaaaatcacgaaaagtttacgtaacccgtgaatatataaaagtttagacgttcccggttggaaananttttntccntaanttnnnctt

SEQ ID NO: 93998 - DNA, 503 bp, Arabidopsis thaliana columbia
  unsure (1)..(503): unsure at all n locations
agaacatgaaagcagtggtgagcaagttgtattgttcctcgatggaggaagtgaatggtggtgagacgacggccacacctggttgacggcggtggctttgtggtgacagattacaaagaaaagatagttttcaagatcgacggttgtggagttcttggaaccaaaggagagttagttctcagagatagtgatggcaacgatttgcttctcatccacaaaaagggaggagtggtgcaggctttgagcattcataacaagtggaaaggttatagttacgactaccaaggaagtcctaaaccggttttcacgttgaggggtcccaaacactcttgcttctccataaccagttcaatcccgcatctcggttggaccggggatttgctacttctgatgttaaagggttttccccggcatagggttcgtagcatccgttgttcccaaagggaatgtgattgcacaagtaaaagattggttngggntggggtttnttaaggnggggccat

SEQ ID NO: 93999 - DNA, 3513 bp, Arabidopsis thaliana columbia
caaacatggattttcaaggcggtgcactttcttacttttctttctctgtctcctagaagccacttcactgggatcgtctccatctttgatccaggttcagagattaaacaatttgaaaaatcggagactctgggattgtatggttcgttgttactgatagattacttaagctatggtttggtttagaatcggttcttctgtggcaaagcttgccataagaaggacactgtctcagtctcgttgtggttcatatgccactagaacaagggttttgccttgtcaaaccagatgttttcactctacaatactcaaatcaaaggcagagtctgctgcacctgttccacgtcctgtcccactttctaagctaactgatagcttcttagatggaacaagcagtgtgtatctagaggagttacaaagagcttgggaggctgatcccaacagtgttgatgagtcgtgggataacttttttaggaattttgtgggtcaggcttctacatcgcctggtatctcggggcaaaccattcaagaaagcatgcgtttgttgttgctagttagagcttaccaggttaatggccacatgaaggccaagcttgatcctttaggtctagagaagagagagattccagaggatctcacgccaggtctttatgggtttactgaggctgatcttgatcgggaattctttctgggtgtatggaggatgtcgggttttctctctgagaaccgcccggttcaaacactgaggtcgatactgtcgaggcttgagcaagcttactgtgggactatagggtatgagtacatgcacattgctgatagggataaatgtaactggttgagagacaagatcgagaccccaactcctcgacagtacaatagtgagcgtcggatggttatttatgataggcttacctggagcacacagtttgagaatttcttggctactaagtggaccacggctaaaaggtttggactggaaggtgctgaatctttgattcctggcatgaaggagatgttcgataggtctgcagatctcggggtagagaacatagttatcggtatgccccataggggtcgacttaatgttttgggtaatgttgttagaaaacctctacgccaaatattcagcgagtttagcggtggtactaggccagtagatgaagttgggctttacaccggaacaggtgatgtgaaataccacttgggtacatcttatgatcgtccaactagaggaggcaaacatctccacttgtctttggtagcaaatcccagtcacttggaagcagtagatcctgttgtgataggtaaaaccagagcgaaacaatattacacgaaagacgagaacagaacaaagaacatgggtattttgatccatggggatggtagctttgccggacaaggagtggtgtatgaaactctccatcttagtgcacttcctaactactgtaccggtggaacagtgcacattgtggtgaataatcaagtggctttcacaaccgatcccagggaaggaaggtcttcacagtattgcactgatgttgcaaaggctttgagcgccccaattttccatgtcaatgcagatgacattgaagcagtagtgcatgcttgtgagcttgctgctgagtggcgccagacgttccattctgatgttgttgttgatttagtatgctaccgtcgctttgggcataacgagatagacgaaccgtcattcacacaaccaaaaatgtacaaggtgatacgcagtcatccctcgtcacttcaaatctaccaggagaagctcttgcaatctggacaggtaacccaagaagatattgataagattcaaaagaaagtaagctctatcctcaatgaagaatatgaggcaagtaaagattatattccacaaaaacgtgactggctggcaagtcactggactggattcaagtctccggagcagatttctaggattcgaaacaccggagtgaagccagagattttgaagaatgtgggaaaggcaatctcaaccttccctgagaactttaagccacacagaggagttaaaagagtaagagtttatgaacaacgtgctcaaatgattgaatcgggagaaggcattgactggggacttggagaagcacttgcttttgctacactggttgtggaagggaaccatgttcggctaagtggtcaagatgttgaaagaggaactttcagtcatagacactcagtgcttcatgatcaagaaaccggggaggaatattgtcccctcgatcacctaatcaaaaaccaagaccctgaaatgttcactgtcagcaacagctccctttcagaatttggtgttctcggtttcgaactgggttattcgatggaaaatcccaattctctggtgatatgggaagctcagtttggagactttgctaatggcgcacaagttatgtttgatcagttcataagcagtggggaagccaaatggctccgtcaaactggtctagtagttttacttcctcatggatatgatggtcagggtcctgaacattccagtggaagattggaacgtttccttcagatgagtgatgacaatccttacgttatccctgagatggacccaactcttcgaaagcagattcaagaatgtaattggcaagttgttaatgttactacacctgccaactatttccatgttctgcgtcggcagatacacagggactttcgcaagcctcttatagtgatggcccccaaaaacttgcttcgtcacaaacagtgtgtatctaatctctcggaattcgatgatgttaaaggacatcctggatttgacaagcaaggaactcgatttaaacggttgatcaaagatcaaagtggccactctgatcttgaagaaggtatcagacgtctagtcctctgctctgggaaggtctactatgagcttgacgaagagcgaaagaagtctgaaacaaaggatgtagccatttgcagagtagagcagctttgcccatttccatatgatctcatccaaagagaactaaagcgatatccaaatgcagagatcgtgtggtgtcaagaagagccgatgaacatgggaggataccaatacatagccctaaggctttgcaccgcgatgaaagcactgcaaagaggaaacttcaacgacatcaaatacgttggtcgtcttccctcagctgctacagccacaggattttaccagcttcatgttaaggagcagactgatcttgtgaagaaagctcttcaacctgaccccatcacccccgtcatcccttaaaaaaacacagcttgagaggcttgagcctgtataaaaaagacacaacacaaaaataaaagattcatgagagaatctttggttaccaaagagtgtcactggaaaataaacagatgtttgctagacttacaaatttaagtttattcgatttgtttggtttgttataggatttaatcgagataaaaggaaaaaagattctagaggatccaagcttacgtacgcggcagtgcgacgtcataactcttctatagtagtaccta

SEQ ID NO: 94000 - DNA, 539 bp, Arabidopsis thaliana columbia
  unsure (1)..(539): unsure at all n locations
ggtactggagtatcaacaatggaagnngctcaagtgagttcaagggtggntccacccagatggggttcttataccacgtgttggaaagtatcttgcggcttcatcagcaaatcttgtcaatgtactagatgtagaaacacaagctattcgacactctttacaggggcatgctaatccgataaactcggtttgctgggatccctctggtgacttcctggcatctgttagtgaaggtatggtaaaagtatggacgctggggacaggtagtgaaggagaatgtgttcatgagctaagctgcaacgggaacaaattccagtcatgtgttttccatccggcttacccctcgctgctcgtaattggttgctaccagtctttagaactatggaacatgtcagagaacaagacgatgacattaccagctcacgaagggctaattacatctttggctgtttcaactgcaactggattggntgcatcaagctagtcatgataagctagtgaactntggaagtgaaaactatgtgagaggnaaagagacg

SEQ ID NO: 94001 - DNA, 456 bp, Arabidopsis thaliana columbia
  unsure (1)..(456): unsure at all n locations
tatccctgagactattccgcccaatccagaggatangccacccctncctcctatgcaatggcttattggaatggttccacattcttttcctaccttcatgggggaatcagtcgaaaccagtagttctgctttatcagcggcaccacccattggttctagcttgaatgttcaaattgggtctccaccatcagagctatctgtatctttaggaagtgacgaatcagaacgacttcctggagggtttgttcacaatgcatcagaaaagccattgcaatcatccattcagttcccaaccatgagcactgatttgaatagtcaatacgacagttctgagctccctacaataccttatcaggagtgcatagaggattttggttctgaggagaacaatcttttggctgaccatgcagctcagaaccacgagctcgtttactctcaaggcgtcgtcattgcagc

SEQ ID NO: 94002 - DNA, 422 bp, Arabidopsis thaliana columbia
agacaacaaaaatatcttgcattcatttttgttactctcttaaaatctcattctttgattatcttctcttcccctgtaagtactccgatctaattatttgttcctatcagacatcccccaatttctacgatcggatttattcgtcgatcaagaagctggctaagttgtattgttggtgattgtatagtttttattattattcgagagaatgaacagtagaagctgtatctgtgtctctgcgatgaaaccctgttgtagatttcttattagttttagaagttcctcgcttttcggtttttctcccccgaactctggcaaattcatcaattcgtcgaagttacactgtacaaagattgattccaggagtattagatctggtattcattgccgtcggattgttctggatcggaatgctttttgtg

SEQ ID NO: 94003 - DNA, 541 bp, Arabidopsis thaliana columbia
tagatgtgatttcactctcgctaggtggatcatcacgcccgttttacgtggatcctatcgcgatagccgggttcggagcgatgcagaagaacattttcgtgtcttgctctgcgggtaattcaggaccaactgcatccacagtgagtaatggagctccgtggttgatgactgtcgctgccagttatacggataggacgtttccggcgattgtccggatcgggaaccgtaaaagcttggtcggatcatccttgtataaaggaaaaagcttaaagaatctgcctttggcgtttaacagaacagctggagaagaaagcggagccgtgttctgtatccgggactcgctcaagagagaactcgtcgagggtaaaatcgtcatttgcttaagaggagccagcggcagaacggccaaaggagaagaggtgaaacggagcggaggagcagcgatgcttcttgtgagcacagaggcggaaggagaggagcttcttgctgatcctcacgttttaccggccgtttcacttggattttccgacggtaaaacctt

SEQ ID NO: 94004 - DNA, 477 bp, Arabidopsis thaliana columbia
aaacaaaccaaccatagtaaccaaaaccacaacaaaacacatggctaagctcattttcttcctcgccgtccaaatcctctttggggccgtggtttcttccgccggagacggtgaagacttcgctagaaccatggaccggaaacttcttggtctccacaaaaaggagaaacttacccatttcaaagtctattggcacgatatcttaagcggtccgaacccaacctccatcatgatacaaccaccggttacaaacagttcctattttggagccatctccatgatcgacaacgctttgacggccaaagttccgatgaactccacggtgttgggtcaggcccaaggattttacgccggagcggcccaaaaggagttgggtttcctgatggcgatgaactttgctttcaagacagggaaatataacggaagcacgatcacgattcttggcaggaacacggcgttgtcggaagtcagagaaat

SEQ ID NO: 94005 - DNA, 418 bp, Arabidopsis thaliana columbia
  unsure (1)..(418): unsure at all n locations
gaaaaaaaaaaataaagctgtgaaaaggtaataatttacatgaagttcacgggagtaggggtcgagttttgttcgtgttagggaccatgctgcctccagttccagtcaaagcaagggtggtcaaaggttccggagaagaagtgaacgtaacgtgtgatgcgacgcagcttagttcatgtgtaacagcagtaagcacaggagcaccaccatctacagattgttgcggcaaactgaaggagcatgaaacttgtttgtgtacatacattcaaaatccgttgtatagttcgtatgttacttctccaaacgctcgtaaaacgttagcagcttcgtgattgttgcttatcctacttgttgatggtttgtgatattacttaaacaaagctattattggcaataatagtaaaaattttaaacctnt

SEQ ID NO: 94006 - DNA, 555 bp, Arabidopsis thaliana columbia
tgagatctccagctctatggaccactataggaaagctggtcgccgcagtccggtccgaattccgggtcaccacgcgtcgaagacattcttcaccgccgctacagcttccggcggaaccgtttctctgactcaaccgcagttttcgccgttgttcccacatttctcacaccgtttatctccgctttcgaaatggttcgttcctcttaatggacctctcttcttatcttctcctccttggaaacttctccagtctgcgacacctttgcactggcgcggaaacggctctgttttgaaaaaagtcgaagctctgaatcttagattggatcgaattagaagcagaactaggtttccgagacagttagggttacagtctgtggtaccaaacatattgacggtggatcgcaacgattccaaggaagaagatggtggaaaattagtcaagagttttgttaatgtgccgaatatgatatcaatggcgagaatagtatctggtcctgtgctttgggggatgatctcgaatgagatgtattcttctgctttcttagggttggctgt

SEQ ID NO: 94007 - DNA, 768 bp, Arabidopsis thaliana columbia
  unsure (1)..(768): unsure at all n locations
gcaaaaaaagctaaatccaaaaagcttcagacccgtcctaacaatgacgatcgttaaaccgtcgcagtgtctcattctccggcggcggatcttccccgttatgttcactcaaaagctcactcctcaccgtcgctattctcactttcatttccctcttctacctctctctcaattccttacgcacttcgccgccgtctcctgtcatcgtggtaacaccgattcatgttcctcataccttcgtgaatgagtataagactgataacgaaacaccgacgatggaagaagaaacctactccgatgtttatcactcaccggaggctttccgattgaattacgccgagatggagaagagattcaaggtttatatttatcccgacggcgatccaaatacgttttatcaaacgccgaggaaagtcaccggtaaatacgctagtgaggggtacttcttccagaacattagagagagtcgatttcgaaccctagatccagatgaagcagatctcttcttcattccaatctcttgtcacaagatgcgaggcaaaggaacatcatatgaaaatatgactgtgattgttcaaaactatgttgatggattgatagctaagtatccttattggaatagaacctttaggagcagatcacttctttgttacantgtcatgatgttggtgttagagcatttgaggggatctccgcttctgattaagaatacntattagggttgtgtgctcacctagctacaatgttggtttcattcctcacaagatg

SEQ ID NO: 94008 - DNA, 539 bp, Arabidopsis thaliana columbia
  unsure (1)..(539): unsure at all n locations
nnnnnnnnnnnnnnnnnnnnnnnnnnnnnnnnnnnnnnnnnnnnnnnnnnnnnnnnnnnnnnnnnnnncccacgcgtccggctacctctactgtgaagacgttgctgaggcttttgaagttgttcttcacaagggagaagttggccatgtttacaatattgggacgaagaaggagaggagagtgaatgatgttgccaaagacatctgcaaactcttcaacatggaccctgaggcgaacatcaagtttgtcgacaacagaccttttaacgatcagaggtacttccttgacgatcagaagctcaaaaagttgggatggtcagagagaaccacgtgggaagaagggttgaagaaaactatggattggtacacacagaacccggagtggtgggggtgatgtttctggagcattgcttcctcatccaaggatgctgatgatgcctggtgggcgacactttgatggctccgaggacaattcgctggcagctactttatctgaaaaaccaagtcaaacccatatggttgttccaagccaaaggagc

SEQ ID NO: 94009 - DNA, 672 bp, Arabidopsis thaliana columbia
cccaagcgtccgaaagattcttggtctccgatccagtcacctgaagattctccgagcttcttttgaccacacactttcaatggcggatgctgtgaacgctcaaactccatcgctctccgagcaatatcatttggagaaagaagtgaagcaagacacaagtgcaaagcctgttgaagtgaaagaggtggcaccagaagttactacacaagctgaagaggttaagacggagcaagctaaggaagaatctcctgttgaggaagcggtttctgtagttgaagagaagtctgaatctgctcctgaatcaacggaagtggcttctgaggctcctgctgcagcggaagacaatgctgaagagactcctgctgctgctgaagaaaataatgacgaaaacgctagtgaagaagttgctgaagaaacccctgatgagatcaagcttgagacagctcctgctgatttccgtttccctacaacaaaccaaacaaggcattgtttcactcgctacgttgaatatcacagatgtgtagctgctaagggtgatgatgctccagaatgcgataagtttgcaaagttttatcggtctctttgccccagcgaatgggttgatagggtggaacgagcaaagaggaaatggggccattccctggtcctctaccctgaaggaaaaatcatatt

SEQ ID NO: 94010 - DNA, 733 bp, Arabidopsis thaliana columbia
  unsure (1)..(733): unsure at all n locations
cgggaaaagaccccaatttgctttaaagaaaagaactccccctggccctgccttggctttaaaaaaaaaaaaataaattggcccgaaaaaacccgtctaaattaaaagaaaagtttccttgaaaaggaaacccccctaattagagatccaaggcctttaaggcacagcttccttgcttgatttcccggttttccctcccaccaaacccaaccaaaggcattggtttcacccggttcgtttaattatcacaaatgtgtagctgttaagggtgatgatgctccagaatgcgataagtttgcaaagttttatcgatctctttgccccagcgaatgggttgataggtggaacgagcaaagagaaaatggaacattccctggtcctctaccctgaagaaaaatcatattgccatcattcctcttttgctgttaccttcatgagattacactgcagagtttaataagattttacaaaaccagcacttctggttcccatcatcataaaatgtgagaatttaacaaaactttatgaatctcaaattttcctcttatataagtttttgaggatcatctgattttcctgaattgttgttcttccctggtttaggctttactatggcaagcttcaaattcttgcggcccnggggccatttnngtnntccggttcccnaannnnnnnnnnnnnnnnnnnnnnnnnnnnnnnnnnnnnnnnnnnnnnnnnnnnnnnnnnnnnnnnn

SEQ ID NO: 94011 - DNA, 616 bp, Arabidopsis thaliana columbia
  unsure (1)..(616): unsure at all n locations
aatgttttaggtccactatagaagagctatgacgtcgcatgcacgcgtacgtaagctcggaattcggctcgagcggcgctccaatatcgtctccggcggctcagctgcagacacaatttctctccaatcccattctcccccgctttcgccggtctttctccaccggaaaatcaccagcaactttctccgtcgtagctatggctccccagaaaaaggtgaacaaatatgatgccaagtggaagaaacaatggtacggagctggattgtttttcgaagggagtgagcaaataaacgttgatgttttcaagaagctggagaagcgaaaagtgttgagcaacgttgagaaatctggcctgctgtcaaaagcagaggggttgggactcacattgtcatctcttgagaagcttaaagtcttctccaaagcagaggaccttggtcttctcagtctccttgagaacttagctggaacatcgcctgcggtcttagcctcggctgcattaccagctctcacggctgctattgtagccctggtgttgatcccggtggccaaacnanntaggnggttcnnagnggtttttgccggggnttttggttaaagggttttttttgggtggcc

SEQ ID NO: 94012 - DNA, 687 bp, Arabidopsis thaliana columbia
cctttggcagtttccggccggaattttatcaatttcccggcgtaatctccaccagagttatgggaatcaccggaagtctaacgccagatcagctcgattttttccactctcaagggtatttggtaatcgaatcgttcgcgagtgaggatgagataagaggcttaaggaagaggatggatgagttgcttaatcagtttgattgttccgtctcctctatcttctccaccaaaaatcagaagcacaccacagataattacttctttgagagcgctgagaaaatctccttcttctttgaagaaaaagcttttggtgatgatgggaaattgaagcaacccaaacaactctctataaacaaagttgggcatgcactgcatgagcttgacccattgtataaggatttcacatattcgtcaaagttttcaagtttggcatcatccttaggttacaggagaccagttgtcatgcagtctatgtatattttcaagcaacctggaattggagggcgaagttgttcccgcacccaggataattctttttggggtacaccggatcccccaaaagttggaacctggcccttctgggattggcttctttggaagaattccttccctttaaccttaaaatggtcttgggcttttttgggggccaatttccccctggggatccctcaaattaaagaaaatgggg

SEQ ID NO: 94013 - DNA, 1143 bp, Arabidopsis thaliana columbia
gtccgtctgcagtaccggtccggtaattcccgggtcgacccacgcgtccgataacttgtaatcaaccaaagtcgaaaaacagagttattttgtcggatcaaaatggtgaagattgagataggaagtgtgggtgactcctttagtgtagcatctcttaaggcttacttgtctgaatttatcgcaactcttctctttgtgtttgctggcgttggctctgctcttgcttttgccaagctcacatccgatgcagccttggaccccgctggtcttgtcgctgtcgctgtggctcacgcctttgcccttttcgttggtgtttccatagccgccaacatctccggcggacaccttaaccccgccgtgacactcggtctcgccgtcggtggcaacatcacagtaataaccggtttcttttactggattgctcaatgccttggctccatcgtcgcgtgtctcctcctcgtcttcgttaccaatggcggagagcgtaccgactcatggagtagcggccggtttaggagctattgaaggagtagtgatggagatttgtggtgacctttgctctggtctacacagtctacgccacagcggctgatccaaagaaaggttcactcgggaccattgctccaattgctatcggtttcatcgttggtgccaacatcctcgcagcgggtccctttagcggtggttccatgaacccggccaggtcatttggaccagctgttgtcagtggtgacttctctcagatatggatctactgggtgggtccactagtcggtggtgcacttgccggactcatctacggagacgtcttcatcggatcctacgctccagctcccaccacagaaagctacccttgatcaatcctatagcgttttaatttgcttggcttgctttttgttgtgtgaaaatgtttggtcctcgtttcttccaaaaatgaatgattgaatgtggagaaaaagatcaaagttgtactttgtgttggttataaataagaattgtatattttcaaattttatatctctgccttgtactttcttgcatgtgttaatggctaaaaataaccggttttaactgtccaaaaaaaaaaaaaaagggcggccgctctagaggatccaagcttacgtacgcgtgcatgcgacgtca

SEQ ID NO: 94014 - DNA, 449 bp, Arabidopsis thaliana columbia
  unsure (1)..(449): unsure at all n locations
acgagagctgtgttccgcatctcccggaaatacttcctttgagtcgaagngaaagactgagctgagaccatgtagttgcggtagtagggtatggaacaacgatagtcggaacaaagtattggattgttaagaattcatggggagaggaatggggagagaaaggatacataagaatgcagagagggattcgtcataaagaaggactttgtggtattgcaatggaagcttcttatcctctcaagaactccaacactaacccttctagactttccttggactcgcttaaggatgaactctaaattaaatctctttatattaagattgaaatagacattgacaagtttggttatggatgattgtttttttttttaatatatttctttttcattaataggttatggttttcaatgtatgaagttgatgggaatcgtttcaattcgttaaatgaa

SEQ ID NO: 94015 - DNA, 567 bp, Arabidopsis thaliana columbia
  unsure (1)..(567): unsure at all n locations
cagctctctacgactcactatttggaaagctggcacgcctgcaggtaccggtccggaattcccgggtcgacccacgcgtccgattcaattgtgcaacgtccaatggttgtgggaggaagcgtagtttccgaggccaatgatgtatgtcgcgctgacttacgatcataggctaattgatggaagagaggctgtgtatttcttgcgccgtattaaggatgttgtggaagatcctcagaggcttcttctcgacatatgataaagatccaagacagaagagatcataagtttctgtctttgtaccagtttcctttcaggtaaaaccattacggatactgcaatctgcaaatgatgctttgaaaaaagaacgaaacttttttttttggagttttcttaatagttttaagagtttttgccgggcgaggaaagcatcggtgtattgagttttcttttattttataatattcatacagtttgaacaaaaaaaaccaaaaaagggcggacgctctagaggatccaagcttacgtacgcgtgcatgcgacgtnnnnnnnnnnnnnnnnnnnnnnnnn

SEQ ID NO: 94016 - DNA, 746 bp, Arabidopsis thaliana columbia
  unsure (1)..(746): unsure at all n locations
ctctnnnnnnnnnnnnnnnnnnnnnnnnnnnnnnnnnnnnnnnnnnnnnnnnnnnnnnnnnnnnnnnnccacgcgtccgcgatcttctcgattctccaattccaaaccctaacattttgattagtccttctgggtttccacagccttgagagattcggaaccaatgatgatgcgtgctgttataaggagagctgccagtaatggctcttctccttcgttattcgcaaaatcactgcagtcttctcgtgttgctgcatcttcccctagcttgctatcaggttcagaaacaggggcatatctgcatcgtggaaatcatgctcatagctttcataaccttgctttgccagggaactcgggcatctcgaggtcggcgagtttagtttcttcaaccctgcaaagatgggtcaggcctttttcagctgaaactggagataccgtggaagcagttgtgcctcatatgggggaatcaattactgatggcaccttggccacctttctgaagaaacctggtgagagagtccaggctgatgaggctattgcacaaattgaaactgataaggtgacaatagatattgctagcccagcaagtggtgtaatccaagagtttctagtcaacgaaggagatactgttgaaccagggacccaagggtcgctattttatcaaagtctgaggatactgcatctcaggttaccccctctcagaagataccagagacaactgataccaaaccttctcctcctgctga

SEQ ID NO: 94017 - DNA, 1954 bp, Arabidopsis thaliana columbia
  unsure (1)..(1954): unsure at all n locations
nnnnnnnnnnnnnnnnnnnnnnnnnnnnnnnnnnnnnnnnnnnnnnnnnnnnnnnnnnnnnnnnnnnnnnnnnnnnnncccacccacgcgtccgcccacgcgtcctctctctctcctccttcaataatttctgcaaaccctaactttctcattcggcgctcaagtttctctccaccccttcgagatttggtgcgatgatgttgcgtgctgtttttaggagagcttccattagaggctcttcttctgcttcgggattgggaaaatcattgcaatcctctcgtgttgcagtgtctgctcaatttcattctgtttcagcaacagagacgttggtgcctcgtggaaaccatgctcatagcttccatcaccgttcttgtccagggtgtccagactgttcaaggactattatcaacggttaccaaggcacagccctgcaaagatgggtcaggcccttttcatctgatagtggggatgtcgtggaagctgttgtgccacacatgggtgaatcaatcactgatggcaccctagccgcctttctgaagaaacctggcgatagagtagaagctgatgaggctattgcacaaattgaaactgacaaggttacaatagatattgctagcccagcaagtggtgtgatccaagagtttttagtcaaggaaggagatactgttgaaccaggaaacaaggttgcaagaatttctacatctgcggatgctgtgtctcatgtggcaccctcagaaaaggcaccagagaaacctgctcccaagccttctcctcctgctgagaagcccaaagttgaaagtaccaaagttgcagagaaacccaaggcaccatcaccgccaccgccatccaaacagtcagctaaagaaccgcagcttccacctaaggatagggaaagacgggttcctatgacaagacttcgcaaacgggtggcaactaggttgaaagactctcagaacacttttgcgttgctgacaactttcaatgaagttgatatgactaatctgatgaagctccgatctcagtacaaggatgcttttcttgaaaagcacggagtgaagttggggcttatgtctggtttcattaaggctgctgttagtgccctccagcaccaacctgtagtaaatgcagttatcgatggagatgatatcatttacagagactacgtggatatcagtatcgctgttggtacctctaagggtcttgtagttccagtcataagagatgctgacaaaatgaactttgctgacatagagaaaacaataaacggtcttgctaagaaggctactgaaggaaccatatcaatcgatgagatggcaggaggatcattcacagtatcaaatggtggtgtctatggaagtcttataagcactcctatcatcaaccctcctcagtctgctattcttggaatgcattcgattgtgcaacgtccaatggttgtgggaggaagcgtagttccgaggccaatgatgtatgtcgcgctgacttacgatcataggctaattgatggaagagaggctgtgtatttcttgcgccgtattaaggatgttgtggaagatcctcagaggcttcttctcgacatatgataaagatccaagacagaagagatcataagtttctgtctttttaccagtttcctttcaggtaaaaccattacggatactgcaatctgcaaatgatgctttgaaaaaagaacgaaactttttttttggagttttcttaatagttttaagagtttttgccgggcgaggaaagcatcggtgtattgagttttcttttattttataatattcatacagtttgaacaaaatgttacaattttgactttcaaaaaataatgccactgataattattggttaaaaaaaaacaaaaagnnnnnnnnnnnnnnnnnnnnnnnnnnnnnnnnnnnnnnnnnnnnnnnnnnnnnnnnnnnnnnnnnnnnnnnnnnnacaatcg

SEQ ID NO: 94018 - DNA, 561 bp, Arabidopsis thaliana columbia
  unsure (1)..(561): unsure at all n locations
taaatgccgnancnccccccctgaatnngcgaaccacctaccnaattcccggccttanaattcgnaatttttttggnaggtaaaggatgaaaagggtttaaatcccagatgatggccataaaatgacttgaccttgatgcggactgtaatcctttgatgataaccttttggttgctgatggttatattattacccttttacagttttacattttgactgatttggttttgtgtttacatatttgtaacgagggacacaaattgtgtattggttatgtggttggctttgttttacagattcagttaattgatgtgatcttcgacgggtttgtcctaactgtagctgtgggtgatgatagttctgaaaatctagtctggatgttattgatgaaggtgtttggctcattccattatgtctagccgcttgagacgtttccgcagtttatgacctttagtttatgttcgttttgttatgttcccgaagccggtaataaaagtgtatttctgaaactactacgccttgtattcaatagataatattcatattctacatttgatttct

SEQ ID NO: 94019 - DNA, 465 bp, Arabidopsis thaliana columbia
cgaatcgacccactcgtcctgatgatggggtcttcgcggcctttaccagtttttcagttctttgaccagcttctttcattggtcctgaactcagggttagagcagcatttgcatatatacaaggtgttttggtgacaattgatagactctaagatgggttctgggaatttgattaaggcaataattagattgaagaagagtaaacaaggaactgaaaagaaaaaaactagtgctgtgaaaccaaaaaaaggttccaagaagaagggtacatcactagttactcgtagtgaggattgggctgctactcggattcagactgcttttaaagcctataaggctagaaaaagcttacggcgtctaaaaggaattgcaagagcaaagttatcaactgagaaacaatctgtgaagaccaagctttggtcacattgaaggatcttcactcatggaagtaaatacagtcagaga

SEQ ID NO: 94020 - DNA, 763 bp, Arabidopsis thaliana columbia
  unsure (1)..(763): unsure at all n locations
nnnnnnnnnnnnnnnnnnnnnnnnnnnnnnnnnnnnnnnnnnnnnnnnnnnnnnnnnnnnnnnnnnnnnnnnnnnnnnnnnnnnnnnnnnnnnnnnnnnnnnnnnnnnnaacatataaccagtctttattaacaatcctgcttctttttacctctacaactcttttatatccatcaatactcacaccagatgataaataaatgacaggagagggaatacaaagagatacatgaggctttcgacgaaaagaacaaagagaaagcacaccttgtttcaatcttaatggaggtaaatcaattgtagcctatcccagctctgattctctaagacttttagctttttgtatagctgggatgctgatcgcaatctcggtgatcttcttggcagctactagctaaagatatttttgttcctcgtgagttttggggcgactcctcaatcagattacaagagttttgtattcttccagcaacttcgagatgtcattaatccgcaactcgggaagaacttttgatatgataaaacggaaagggcctcggttccagggagggccaaaatcagcagatggttaagctggccctggggaagtgaaaatccgtgtaacaggccgctggtaatctcgaaggtgggggcccagccctttaggtggaaagccccggngnggctgttccaatgctggcnaggnctnacnggcacctgnaccaaaggccgnnaanannnaacccccaaaacctggccaattaaaacctggntttggccccgg

SEQ ID NO: 94021 - DNA, 907 bp, Arabidopsis thaliana columbia
actatagaagagttatgaggtcaactgcacgcgtacgtaagcttggatcctctagagcgttcgccctttgttttatcttttttttttttttttttttttttttttttggcccaaagctgccaaaagaaggtttcatataatcagtctttattaacaatcctgcttctttttacctctacaactcttttatatccatcaatactcacaccagatgattattttatgacaggggagggaatacaaagagatacatgaggctttcgacgaaaagaacaaagagaaagcccaccttgtttcaatcttaatggaggtaaaacaattgtagcgctatcccagctctgattctctaagacttttagctttttgtatacctgagatgctgatcccaatctcggggatcttcttggcaggtccctactaaagatatttttgttcctcgggagtgtttgggggactcctcaatcagaatacaagagttgtgttttcttccaccaccttggagatggtattatgcccgacttgggaaacctttggtatgataaaacggaaaggtcttcgtccacgggggccaaataagtaaatttaatcttcttttgggagggaaaatgtgggaacaagcgccgataatgcggaaggaggaacccgtcctttcatcgcaaagtaccgggagggactgtggccatgcttgcgatgggctggcgccgctttgaatttaaatgccgtggtcgagccgctggggtgagtgagcggggtctaggacacacctagagtagtactgcgaggatagaaggggccctatgaagctagactttctggacgatgaaagttcgagctttgtcggttgtgggacgtgtttgagcgtgtaagagaggccaccgagagcgcgacacgctgtttgcgttttcgg

SEQ ID NO: 94022 - DNA, 708 bp, Arabidopsis thaliana columbia
  unsure (1)..(708): unsure at all n locations
cgaaggacttatactgnctacaacattcgtccgcatctttgnanncacnagctgctggaggggcattgttccatcctcaggtccgctcgagcctattcacgcctatctgtccgcattctctatcattccgcccactaatattaccggaacacgtgacagtgagagtccaagtgccattcaacagcagaagctccgcttgggtctcctttgatgggaaagaccggaaacagcttgaagcaggggatgcactagtgtgtagcatggcaccatggcccgtctcaaccgcttgtcaagttgaatccactaacgacttcttacgcagcatccacgatggtcttcactggaacctaagaaagactcaatctgctgatggaccttagaaacaaattcctccagcttttttctctttcattcttaaccaataaccatatatagtctcgacgtctatctatctatctatatgcatatagataaatgtgaaatggaaagtgatgggttctgtgatagaatgtggtctgtatccattgttgtgtagagaatgtaataatgtagctgctatgacccataattctgttgatgtgataatcactcaaagttaatgaatcaaagatatttctgcaaaaaaaaaaaaaaaaaaagggcggccgctctagaggatccaagcttacgtacgcgtgcatgcgacgtcatagactcttnctatagtgt

SEQ ID NO: 94023 - DNA, 1751 bp, Arabidopsis thaliana columbia
  unsure (1)..(1751): unsure at all n locations
nnnnnnnnnnnnnnnnnnnnnnnnnnnnnnnnnnnnnnnnnnnnnnnnnnnnnnnnnnnnnnnnnnnnnnnnnnnnnnnnnnnccacgcgtccgctacacaatcacattagccaaaaccatggcctcctcaagtctccatttcttcttcttcttgacacttctcttgccattcactttcaccaccgccacacgtgacacatgtgcgaccgccgctcccgatggttccgacgacctctcaatcatccccattaacgccaaatgctcacctttcgcacccactcacgtctctgcctccgtgatagacacggtccttcacatggcctcctcagactcccatcgactcacctacctctcaagcctcgtcgccggcaaaccaaaacccacctccgtccccgtcgcctccggtaatcagctccacatcggaaactacgtggtccgagccaaactcggcactcctccacagctaatgttcatggtcctagacacaagtaacgacgccgtttggctcccttgctccggctgctccggttgttccaacgcctcaacttctttcaatacaaactcctcatccacttactcaaccgtctcttgctccaccgcacaatgcacccaagcacgtggcctcacgtgcccatcctcctcaccacaaccgtccgtctgctccttcaaccaatcctacggcggagattcatccttctctgccagtctcgtccaagacacgctaacgttagcccctgacgtcatcccaaatttctccttcggctgcatcaactccgcctcaggcaattctctaccaccgcaaggactaatgggcctaggacgcgggcctatgtcattggtctctcaaactacgtcgctttactcaggagtgttctcatactgcctccctagcttcaggtccttctacttctccgggtcgttgaaactgggtctcttgggtcaacccaaatccatcagatacactccactcctccgtaaccctcgccgtccatcactttactatgtgaatctcaccggagtgagtgtcggttccgtccaggtacccgttgacccagtgtatttgacgtttgacgcaaattccggcgccggtacgatcatcgattccggtactgttatcacccgttttgctcaacccgtgtacgaagccattagagacgagtttaggaagcaggtgaatgtgtcgtcattctcaacattgggagcgtttgacacgtgtttctcagcggataacgagaatgtggcgccaaagataacgctgcacatgacgtcactcgacttgaagctgccgatggagaatacgcttatccacagcagcgcgggaacgctgacgtgtctatccatggccgggatacggcagaacgcaaacgctgttctaaacgtgatcgcgaatctccaacagcagaacttaaggatcttgtttgacgttcctaattctcgcataggaattgctcctgagccctgcaactaagagaggacatatgaatgatctctctctccctctctttttattttacgttcttcgtacgttttgatttgaagaggtgcttaatggcgcttgaccttctacatatactttgtatgaacggctatcttcactacgcataacatggcctgcagtttcatctaaaaaaaaaaacaaaaaaagnnnnnnnnnnnnnnnnnnnnnnnnnnnnnnnnnnnnnnnnnnnnnnnnnnnnnnnnnnnnnnnnnnnnnnnnnnnnnnnnnnnnnnnnnnnnnnnnnnnnnnnnn

SEQ ID NO: 94024 - DNA, 584 bp, Arabidopsis thaliana columbia
  unsure (1)..(584): unsure at all n locations
gaaagaaacaaatatttagaaacaaaaaatgctataattcttcctttttcttgttctttcacagattttgattgctgttcaatcgactaagagggtgtgtctttaatccctctctgttttaattttgcttcctagtcttctaagagccatggcagccatagatgtgttcaatagcagcacacatccttttcaggaagagctcatgaaagcacttcaaccttataccaccaacactgattcttcttctcctacgtcttcaaacacagtcttcggtttcaatcaaaccacatctctcggtctaaaccagctcacaccttaccaaatccaccaaatccaaaaccagcttaaccaggagncgnaacataatctctccaaattttggcccaaaggcctgtccccaatgaaggaccatgnccgntcagnaanctttntagggggggttggcaaagggactnggggaaaatnggtaggttgngtccgttttcccaaggcccnggnccnggttttgggttngggctttggcaanagttaggnggngncctgggtttngcctgggttttaaaagtnagggggggtnnggggtt

SEQ ID NO: 94025 - DNA, 417 bp, Arabidopsis thaliana columbia
cgttcgtctggaactctgttctgttgccaggaacttgttgacgaagaaggtcgatgatgatagctcaagaattgggaatatatgttgtggagagcaaaggaggagcaatattatgtctattgctttctctgctctgtttaggcacttggcctgctcttatggctcttcttgaacggcgtggtcgtctcccacgacatacttatcttgattattccatcactaactttttgcctgcaatctttatagcctttgtgtttggtgggataggtgaaagtacacatgaggcaccaagtttcattacacaactcactcaggttagaacttgaaggattttgatctctataatggagattgcattgatgaatctcttgctgctgctgctacagattcaagataattgggcctctgtgttgtttg

SEQ ID NO: 94026 - DNA, 636 bp, Arabidopsis thaliana columbia
  unsure (1)..(636): unsure at all n locations
cggcaagactgtcaaggcanctagcnncacggccctcccntttcaagcaccgganaaacagcaggcgggctgctatcaaaagaaacatggcccctcaaaactatggctactcaaagcagatgctggaacttcttttatcaaaggcaccagcgagtaagcaagaggaattaagaggactagtcgatctctgtgtccagagaggcacatcgaacaaatccattgacccgcttgaagatccttctcagttatgctcagctacgctcagcagattatcgactattggatacgatgtttgtgatctctgtggtgctaagtttgctgctctttcgtcgcccggttgtatcatatgcggtatgggaagcatcaaacgctctgatgcactcgctggacctgcacctgtatccacaccgtttggctaaaggttatagacactatcaccgttggtgttaatcaacatctaagcaaatttcaaactggttacatgtacgaactcattcgatcgattttgtgggtttgattttgatttattcgtctgtatatgatttgattatttgtatctgtttattttccgtacgtagctaatacaatttgttgagatnnnnnnnnnnnnnnnnnnnnnnnnnnnnnnnnnnnnnn

SEQ ID NO: 94027 - DNA, 753 bp, Arabidopsis thaliana columbia
  unsure (1)..(753): unsure at all n locations
tttgtcagtatggaactatcttgatctttctggtaacatgttctctggcaagatcccggtttcattgcagagtttgaagctaaaccagctgaatctgtcttagggccggttagcgggtgacttaccgccttctttagcgaaagatatgtataagaatagcttcattgggaacccgggattgtgtggggatatcaagggattgtgtggctctgagaatgaagctaagaagagaggctatgtatggcttcttagatcgattttcgtacttgctgcgatggtgcttcttgcgggtgttgcttggttctacttcaagtacaggactttcaagaaagcaagagccatggagagatctaagtggactctaatgtcgttccacaaactcgggttcagtgagcatgagattcttgaaagccttggatgaaggtaatgtgattggagccggagcttcaggtaaagtttacaaggttgtactcacccaatggggaacctgtttgcggttaagcgtttatggacaggtcctgttaagggaactggagattgtgatcccngagaaaggttacaaacctggagttcaagatgaggcttttgaagctgaaagtttgngacatttngggtaanatttagggcataaggancattgttnaagctatgggtgtttcctggttcttcaaagaagncctntcaaaanctccttnggntttattagggncantgccttaaatgggtnaggttttgggggntttttcnttcaat

SEQ ID NO: 94028 - DNA, 522 bp, Arabidopsis thaliana columbia
ctacaatacgactcactttagggaaagctcgtacgcctgcaggtaccggtccggaattcccgggtcgacccacgcgttcggttgcggttaagcgtttatggacaggttctgttaaggaaactggagattgtgatccagagaaaggttacaaacctggagttcaagatgaggcttttgaagctgaagttgagacattgggtaagattaggcataagaacattgtgaagctatggtgttgctgttctacaagagactgcaagctcttggtttatgagtacatgcctaatggtagtttgggagatttgcttcatagcagtaaaggaggaatgttgggatggcaaacgaggtttaagattatcttagatgcggctgaggggctttcgtatcttcaccatgattctgttcctccgattgtgcatagagatattaagtcaaacaatattttgatcgatggagattatggtgcaagagttgctgattttggtgtggctaaagctgtcgacttgaccggaaaagctccta

SEQ ID NO: 94029 - DNA, 482 bp, Arabidopsis thaliana columbia
cggacgcgtgggcaaatacacattttaagaaagaaaaaaaaaaattgaaagttgagaaaagttcctagagtttgaagacatgaagttcacggcgcttgtgttcattgtgttcgtggtgggtgtcatggtttctccagtttcaatcagagcaactgaggtcaaactttctggaggagaagctgatgtaacgtgtgatgcagtacagcttagttcatgcgcaacaccaatgctcacaggagtaccaccgtctacagagtgttgcgggaaactgaaggagcaacagccgtgtttttgtacatatattaaagatccaagatatagtcaatatgttggttctgcaaatgctaagaaaacgttagcaacttgtggtgttccttatcctacttgttgatttttgagatattgctaaaaaaagttgttaatgataataatatttaacaaacataagcccaaattatttttttttattctttttctttttt

SEQ ID NO: 94030 - DNA, 465 bp, Arabidopsis thaliana columbia
acgcgtacgtaagctcggaattcggctcgatgtgagtgtgggatgtatctccttcaatcgttcacaggcaaaggatcgtgaaattgtagcaaaaaagttaagggaccatgtccaaggagctgacagtaatcctcttctcatatttcccgaagggacatgtgtaaataataattacacagtgatgtttaagaagggtgcttttgaattggactcgcactgtttgcccaattgcaattaaatacaacatagatttttgttgacgccttctggcatagcagaaaacaatcatttactattgcacttgctgcaatctcatgacttcatggggctgttgttttgtgaagtggggtacctaggaacccctaaccatttggcgccggtaataacagaatttgattttcccataaaaggtatttaccttactttctcttctggcgaagtatacaaaaggtgcctttggtatgg

SEQ ID NO: 94031 - DNA, 637 bp, Arabidopsis thaliana columbia
  unsure (1)..(637): unsure at all n locations
aggtcaggcgggatnacccnctgagtaaattttcaaagctgaggagaaagaaagctttttcggtctgaaattgaagtgcgaatcggggaatctagggtttcgagagagagataatgggtggaggaggacatggcggaggtataacttacaagggagtcactgtccacactcccaagacttggcacaccgtcaccggaaaaggcttgtgcgccgttatgtggttctggattctgtacagggcaaagcaagatggtcctgtagttatgggatggaggcacccttgggatggtcatggtgatcacggtcacggagatcatcactaggtctcactgaaccctttgaagatcatgacgaaaaaaggatcgtctcttgtttttttccttaatttttcagcttcatatgtcgaaataaagagaactgtgaagaagacgtgaattgtttttgtacacaactttgtaagacttgctgcttctgttttaagttactacttgtgtgttgcacttcctgatcatgttgttattttgctgtcaacaaattaatttgaaataaaacgcattgcgagattcgtgtttttnnnnnnnnnnnnnnnnnnnnnnnnnnnnnnnnnnnnnnnnnnnnnnnnnnnnnnnnnnnnnnn

SEQ ID NO: 94032 - DNA, 934 bp, Arabidopsis thaliana columbia
gcaggtaccggtctcggattcccgggtcgacccacgcgtccgcaaaaacgtcaacttcgcaattttccgaacaccgtacaaggcagtccgtgacccgttcacccgccacgtctacaccaacatgtttgatgcactcatggactcgacatactcagccatgaaagctcttggatacggtgatgttaacattgtcgttggcgagactggctggccatctgcttgtgacgcaccttggtgctcgcctgcgaatgctgcttggttcaacctcaacattatcaaacgtgcacaaggccaagggacacctctcatgcctaacagacggttcgagacatacattttcggtctcttcaacgaagaaggcaaacccggtccgaccgcagagcgtaactggggacttttccgagcagatttctccccggtttacgatgttggtcttctccgaaacggacagggcggtggaggccgcccagcattgcccccacctagtactgccggcgtaaatgggtgtgtaccgaggtccggggcgacgaatactcagctgcaagacagtattaattgggtgtgtggtcagggtgttgactgtaaaccgatccaagctggtggttcgtgctttaacccgagcagtttgaggacgcacgcatcttttgttatgaatgcttatttccagagccacggccgcactgatggtgcttgtaacttcagtggaactggtatgatcgtagggaacaacccaagcaatggtgcatgtaagtactaaggagattgtctatgtagtagtatttgtctggaaaatcctaacataatggttctgaggaactttggatttgagagatcatcagctttgtgtttaatttcggattatcctaattttaagatttttttgttaattattttttcgctgattccttttatttaaataaagtggaacttccat

SEQ ID NO: 94033 - DNA, 917 bp, Arabidopsis thaliana columbia
  unsure (1)..(917): unsure at all n locations
cccctttggttacccaaaagtcattgaattccaaccgaaaagaggctggccgttcccccccgttacccaaatgttgagccctaggactcgacaatccaccataaagtttgtaaccgggatgtaacattttgttggaggacggggccatatcctttaagcaccttgggattgcctggaaattgttggttcaccccaacataacaaaagggccaaggcaaagggcacctctcatgcttaacagacggttcgagacaacattttggttttttcaccaagaaggcaaaccgggtcgaacccaagagcgtaatgggacattttccgagcaaatttatccccggtttacgatgttggtcttctccgaaacggacaaggcggtggaggccgcccagcaatgcccgcacctagtactgccgccggtaaatggtgtgtagcgaggtccggggcgacgaatactcagctgcaagacagtattaattgggtgtgtggtcagggtgttgactgtaaaccgatccaagctggtggttcgtgctttaacccgagcagtttgaggacgcacgcatcttttgttatgaatgcttatttccagagccacggccgcactgatggtgcttgtaacttcagtggaactggtatgatcgtagggaacaacccaagcaatggtgcatgtaagtactaaggagattgtctatgtagtagtatttgtctggaaaatcctaacataatggttctgaggaactttggatttgagagatcatcagctttgtgtttaatttcggattatcctaattttaagatttttttgtttattaaaaaaaaaaaaaaaaaaaaaaaaaaaaaaagagnnnnnnnnnnnnnnnnnnnnnnnnnnnnnnnnnnnnnnnnnnnnnnnnnnnnnnnnnnnnnnnnnnngttacatt

SEQ ID NO: 94034 - DNA, 683 bp, Arabidopsis thaliana columbia
  unsure (1)..(683): unsure at all n locations
tggaaaccttttgattggaagcattctaggtttcggctttcggtacacagatcacagcaatttatctccttcatgacttcagtaagagcaagaagaagtgctgtgtttcaaagaagagactttttggaacctgaaaatattgtttggtatgcaaatgaccaaacaactccaaagtgggaagatcctgcttctaagtttttggcattggagatcaaatcagagtcagaggaataggaagctgcgtcattggcttagccaaatgagccaaagaccaatgatctgttcatcggattcaatgcgagtgatcatcctgagagtgtagtcttaccttcacttcccgatggaagcaaatggagaagattggtcgacacagctcttcctttcccggggtttttctctgtcgaaggagaaaccgttgtagcagaagaaccgttgcagcaactggttgtgtatgagatgaagccgtacagttgtaccctttttgaaaccatcaatactaccgcttagaactcaagttatgatctttgtatatgttactgttttgttacatttccagtaagaatatattcagttaaatcaatgatttccgcaaaaaaaaaaaaaaaaaaaaagggcggccgctctagaggatccaagcttacgtacgcgtgcatgcgacgtcatagctcttacagagtgnnnnn

SEQ ID NO: 94035 - DNA, 1654 bp, Arabidopsis thaliana columbia
gaagggttttacacaacacagatccagcaagttgcctagtaacgtagcagggacattttctggggtagctgagaaagttaggcatttgaaaacccttggatcctacgctgttcttttggagccaatattctctgtctccgagcaaaaaggtccttattttccatttcatttcttttcaccaatggacatatatggaccttccaatagccttgaatccgcagttaactcaatgaaagtgatggtgaagaaattgcacagtgagggaatagaggtacttttggaagtagtttttacacatactgctgattctggagctcttcgtggaattgatgacagttcctattactacaagggaagagccaatgatctagattctaaaagttacttgaactgtaactatcctgttgttcagcagttggtattggagagcttgcgttattgggtaaccgagtttcatgtagatggattttgttttataaatgcttcatctctcttgagaggcgttcacggtgaacagctctctcgtcctcctttggttgaagcaatagcttttgatccacttcttgcggagaccaaactaatagctgattgctgggatccacttgaaatgatgccaaaagaagtacggttcccacattggaagcgatgggcagaactcaacacaagatattgtcgaaatgtaagaaattttttaaggggaagaggcgttcttagtgatctggctacaagaatttgtggaagtggtgacgtatttaccgatggaagaggtccggccttctccttcaactacatttcaagaaactcaggactctcgcttgttgacatagtcagtttcagtggccctgagctagcttcagagctaagttggaattgtggggaagaaggagcaacgaataaatcagttgttcttcaaagaaggctaaaacaaatccgcaatttcttgtttatacagtacatatcacttggagttccagtgcttaatatgggagatgaatgtggaatctcgacaaggggctcgccttgtttggaatcacggaaaccttttgattggaacttgctagcttcggctttcggtacacagatcacgcaatttatctccttcatgacttcagtaagagcaagaagaagtgatgtgtttcaaaggagagactttttgaaacctgaaaatattgtttggtatgcaaatgaccaaacaactccaaagtgggaagatcctgcttctaagtttttggcattggagatcaaatcagagtcagaggaagaggaaactgcgtcattggctgagccaaatgagccaaagagcaatgatctgttcatcggattcaatgcgagtgatcatcctgagagtgtagtcttaccttcacttcccgatggaagcaaatggagaagattggtcgacacagctcttcctttcccggggtttttctctgtcgaaggagaaaccgttgtagcagaagaaccgttgcagcaactggttgtgtatgagatgaagccgtacagttgtaccctttttgaaaccatcaatactacaacttaaaactcaagttatgatctttgtatagcggccgcgaattcgatatcaagcttatcgataccgtcgacacgagggggggcccaatagccattgcatttcaaagggggggcggcggggggg

SEQ ID NO: 94036 - DNA, 569 bp, Arabidopsis thaliana columbia
  unsure (1)..(569): unsure at all n locations
ggagattttagagctgttcttcaagggaacgttgctaatttgctagagattagncttgaaagtggtgatccaaccgttgaccaattcgaagggagtcatttggtttttgtggctgctggctccgacccttttgatgtcattaccaaagctgtcaaggctgttgaacaacatcttcaaacattttcacaccgagagagaaagaaaatgccagatatgctgaactggtgtggttggtgcacttgggatgcattctacaccaatgtcacagccaaagacgtcaagcaaggtcttgagagcctcaaagctggtggggttaccccaaagtttgtcataattgatgatggatggcaatctgttggcatggatgagaccagtgtagaatttaacgctgataatgctgccaatttcgcaaaccggttaactcacatcaaggagaatcacaagtttcaaaaggatggcaaagaaggccaccgggtggatgaccctgcattgagtcttggacatgttatcacagacattaaggagtaatattcactcaagtatgtttatgtttggcatgcgataacccg

SEQ ID NO: 94037 - DNA, 532 bp, Arabidopsis thaliana columbia
  unsure (1)..(532): unsure at all n locations
ttganttcccggttggnaattcccgttnttgcgatngcngagctnangctatgataatgcagaaggattggttaagattctggccgataaggagactgataagatcttgggcgttcacattatggcgccaaacgctggagagctgattcatgaggctgttcttgcgattaactacgatgcatcaagtgaagacattgctcgagtctgccatgctcatcccactatgagcgaggctcttaaggaagctgccatggccacctatgacaagcctattcacatctaaaagggaacaaggaagaccttaaaggagtgagccacctatgacaagccaaatcgatatcttaacctggttggattttggttcggttttctgtggtttagccttcaatttgtcctttatactgtgtttttattcgttaatgttcagatacgtgttaagcctgatctttaataaaatattcaacattcactttcaacaaatcatcggtcctccctttttcatctctcttcttcttctccatcatcctcttgc

SEQ ID NO: 94038 - DNA, 1887 bp, Arabidopsis thaliana columbia
agctctctctcagaaacttcgacggaagaagaacaaaacaacaacaacaacaacaataacgatggcgatggcgagcttagctaggagaaaagcgtactttctcaccagaaacatctctaattctcccactgatgctttcagattctctttctccctcactcgcggcttcgcttcgtcaggatccgacgacaacgacgtcgtcatcatcggcggcggtcctggaggttatgtggcggcgattaaagcggcacagctcggtcttaagactacctgtatcgaaaagcgaggcgctctcggtggtacttgtcttaacgtcggctgtattccttcaaaggcccttcttcactcttctcacatgtaccatgaagcaaagcacgtttttgctaaccatggtgttaaggtctcttcggttgaggtagatcttcctgctatgttggcgcagaaagacacagccgtcaagaatttaacccgtggagtcgaaggtctgttcaagaagaacaaggtaaactatgttaagggctatggtaagtttctgtccccatcggaagtctctgtggacacaatcgatggagaaaacgtggttgtgaaaggcaaacatatcatagttgcaactggctcggatgtcaagtctttgcctggaatcaccatcgatgaaaagaagattgtctcatcaaccggggcactgtctctgacagagatcccaaagaaactcattgtcattggtgctggctatattgggctagagatgggttctgtatggggacggctaggatcagaggtcacagttgttgagtttgcagcggatatcgtaccagcaatggatggtgaaatccgcaagcagtttcaacgctcactagagaagcagaagatgaaatttatgctcaaaactaaagtcgttggggtagattcatctggagatggtgttaaactcatagtggaacctgctgaaggtggagaacagaccactctagaagctgatgtggtcctcgtctcagctggtagaactccgttcacatctggacttgatctagagaaaatcggagttgagacagacaaaggcgggagaattctggtgaacgagagattctcgacaaatgtttcaggcgtttatgcaattggagatgtgattccaggaccaatgcttgctcacaaagccgaagaagatggtgttgcatgtgttgagtttatagcaggcaaacacgggcatgtggattacgacaaagtccctggggttgtctacacgtaccctgaagttgcgtcggttggtaaaaccgaggagcagctgaagaaagaaggtgtaagctacaatgttggaaaattcccattcatggccaatagcagagccaaggccatagacacagcagagggaatggtcaagattttggctgataaagagacagacaagatcttgggagttcacattatgtcaccaaacgcaggagaattgatccatgaggcggttctagctatcaactatgatgcatcaagtgaagacattgctcgagtctgtcacgctcatcccaccatgagtgaggctatcaaggaagctgccatggctacctatgacaagcccattcacatgtagaagccctcaggagatgtggattgagagggagaaggaagtaaagccgcctacgacaagccaaatcaagatgactttggtttaaacttttgatttttaatttctggtggatatgagatgagctgaaagaaaatactttaacggttttaccactcttttttattcgttaaatcttctccagattttcagttgcgggttaggcccaactatagtaataatttgatatgctcaatgaaccaaatgtgattaatcaggtatgatcggtggttttggtgaaagaggataacccacttccatatgtcttg

SEQ ID NO: 94039 - DNA, 452 bp, Arabidopsis thaliana columbia
  unsure (1)..(452): unsure at all n locations
cacatgcgactggcctccgcgggacgggaggcattctcatccccagattatccccttcaagcaaaagtcaaaacagtgcactttntgagaagaaagtcatgtgataattgaagctggccagacactaacccaagaagctgaaaatgaaaagccaaaaaatccctcagatttgatgctttgcttcaaaccgcttgtttgaatttgcaaatctctcacacatgtattagtaatttaatcagcgagtgaaataatagagtttcagaagagtaaaatgcatgtgaatagatctgattatttatggtaatgtgagcattagagttatgacaaacccatgatgcaaagatttgtatatactgttttgtgttaaaaaaaaaaaaaaaaaaaaaagggcggccgctctagaggatccaagcttacgtacgcgtgcaggcgacgtcataactctnctatag

SEQ ID NO: 94040 - DNA, 526 bp, Arabidopsis thaliana columbia
taggtacaactatagaagattatgacgtcgcacgcacgcgtacgtaagctcggaattcggctcgagatgatttcaagggtggtgactgggtcagagtgaaggcgtcagtgtcttctcccgcaatatggatgggaagacattactcgaaatagtattggcgttatgcacagcttagatgaagatggtgatgtgggtatagctttctgtttcaggagtaaacctttttcatgttctgtgacagatgttgaaaaggttacgccctttcatgtgggacaagagattcatatgacaccatcaatcacccaaccacgacttggatggtcaaatgagactccagcaactattggtaaagtaatgagaatcgacatggtcgggactctgagtgcacaggtgactggtagacagacgtcgtggagggtctcacctggagatgcagacctgctttcaggttttgcagttggggaccgggtgcgctcataaccgaccctgggaaacagaccaggctatgattgccttaatgtaggaa

SEQ ID NO: 94041 - DNA, 470 bp, Arabidopsis thaliana columbia
  unsure (1)..(470): unsure at all n locations
gatagataagaaatcacctaatgcagggcaaaagaaacggagacaaagatggagattgggaaataaagaactctcccaactttggagatgggcagatcaaaatccgaatgctttgactgattctnaacgcgtgcgaacccctgatattgccggcttctggattccattagcagaagatatggtgccatcagctggcatagaagatgagtaccatcataaaaacaacagagtttactgctggaaaggtcttcggtttacagctcggcaagaccttgaaggattttctaggtttactgaaatgggaatcgaaggagttgtcccagttgaactattgccgcctgaggtccggtccaaataccaagctaaaccaaacggaaaagccaaccgagcggggaaagaaggacccaaaggtggttctcatgaaaccagaggggaaccagattggtgtttctaatagtgaggtnnagntt

SEQ ID NO: 94042 - DNA, 604 bp, Arabidopsis thaliana columbia
  unsure (1)..(604): unsure at all n locations
cgggaaaccaggatgtgtacggaatacatgttcgcttatagcatgtcctctngatcttggcagagggaacgagggacgtattgaatgtccgtaccatggatgggaatactcaaccgatggagaatgtaagaagatgccgtctacaaagttactgaaggtgaagatcaaatcattaccttgtcttgaacaagaaggtatgatctggatttggcccggtgatgagccacctgcacctatacttccttctttacagcctccatcagggtttttaattcatgctgagcttgtaatggacctcccggtggaacacggtttacttctagataatctcttggatcttgctcatgccccattcactcatacatccacttttgcaaaaggctggagtgtcccaagtttggtgaagtttttaacacctacctcgggtctccaaggatactgggatccatatccaatcgatatggaatttaaaccaccgtgtattgttttatcgacaatcgggatatcaaaacccgggaaactagaaggcaaaagcacacagcagtgtgcaacacatcttcatcaactccatgtctggttaccttcttctaaaaacaagacaaga

SEQ ID NO: 94043 - DNA, 517 bp, Arabidopsis thaliana columbia
  unsure (1)..(517): unsure at all n locations
ctctctcctctctctcgtttttctcatatggttcttgataataatttgaaagaaagatgtcaatgatgagcagaactcgaagcagcatcgccatgggaacaccatctttccttgaggtgaggaaacaagcttcatttttcttcaaagagaagcttaaaacggcgcgtttagctctcaccgatgttactcctcttcaactaatgactgaggaagctacggatggtgagtcatgtggaccaaatacacaaaccttagggtccatttcaaaggctgcttttgagtttgaagattacttggcgattgttgaagtcttgcacaaaagattggcaaagttcgataaggggaactggaggatggcttataactcactaatagttgttgagcatttactcactcattggaccagagagtgtttccggtgggtttcaaggggatatagggtgttatcccccaaatgcaaaccttccaccaggttncggggaaggggttaatttggggtnacctnttgaaagaaggc

SEQ ID NO: 94044 - DNA, 687 bp, Arabidopsis thaliana columbia
  unsure (1)..(687): unsure at all n locations
cacgcgtgccaaaaaccaaaattcactgccaaaaaaaacacatcaaaacgatgccgtcggaagcggagagctcagcgaattcagctccggcaactccgccaccaccaccgaatttctggggaaccatgccggaggaagagtactacacttcacaaggagtacgtaacagcaaatcatacttcgaaacaccaaacggcaagctcttcactcagagcttcttaccattagatggtgaaatcaaaggcactgtgtacatgtctcatggatacggatccgatacaagctggatgtttcagaagatctgtatgagtttctctagttggggttacgctgttttcgccgccgatcttctcggtcacggccgttccgatggtatccgctgctacatgggtgatatggagaaagttgcagcaacatcattggctttcttcaagcatgttcgttgtagtgatccatataaggatcttccggcttttctgtttggtgaatcgatgggaggtcttgtgacgcttttaatgtatttccaatcggaacctgagacttggaccggtttnatgttttcggctcctctctttgtnatccctgaggatatgaaaccaagcaaggctcatctttttgcttatggtctcctctttggtttggctgatacgtgggctgcaatgccggataataagatggttgggaagg

SEQ ID NO: 94045 - DNA, 555 bp, Arabidopsis thaliana columbia
  unsure (1)..(555): unsure at all n locations
ctttatcaccaccaaaaaccaaaattcactgccaaaaaaaacacatcaaaacgatgccgtcggaagcggagagctcagcgaattcagctccggcaactccgccaccaccaccgaatttctggggaaccatgccggaggaagagtactacacttcacaaggagtacgtaacagcaaatcatacttcgaaacaccaaacggcaagctcttcactcagagcttcttaccattagatggtgaaatcaaaggcactgtgtacatgtctcatggatacggatccgatacaagctggatgtttcagaagatctgtatgagtttctctagttggggttacgctgttttcgccgccgatcttctcggtcacggccgttccgatggtatcccctttgctacatgggctgttttggttccgtttacttcgttcctctgtttttgatangntaaaggtttccantctttggccnaatttgtaagntaatttccggtnctttnagggggttaaaaggnttggtttttaatnggtntttggggatttgggaagttcngnacacctttgc

SEQ ID NO: 94046 - DNA, 630 bp, Arabidopsis thaliana columbia
  unsure (1)..(630): unsure at all n locations
gncccnctttttccccngggttngcccancagcccccttttcntntgggccccctttggtttgctaacccggccgcaatcccggttaataaggtggttgggaaggctttccagggcccctggaaaccttaaggtcaccgcttctaccccgcaaggttatccagggaaccctagggtgggaccaatgagagggtttcctggggaagccccaattccgttcaggagaatttcgggaaagtttactattcccggtgtttacggcgcacgggacagcggatggagtaacatgtcctacatcttcgaagctactatacgaaaaagcgtcaagcgctgataaaacgttgaagatctatgaagggatgtatcactcgctgattcaaggagagcctgacgagaacgctgagatagtcttgaaggatatgagagagtggatcgatgagaaggttaagaagtatggatctaaaaccgcttgaacaaagctacatttgtgttacaagaacttgaagagaaatgtatattgatgttatgatccgtatcgtcgatttgacttgttttgttgtctgttgtaatccaagaacatgaattttctgatgtaagaacttataatatcatggattacagaaatcctttt

SEQ ID NO: 94047 - DNA, 527 bp, Arabidopsis thaliana columbia
cgtcagcgatgacgtctctattctctaaacctagagctctcacttctcatatcaccaactttaaaacttaccgtccggttatcggaaaactccacgtggcaactttaacgcttcttctcttcctaatcgccgccggtattgccgtcacttcctctctatggcttaacaagacgacaaaagcatttgatcgaccgacattagtagcaacaaaaccagaaccggagctagagccaccgcatgaaaccggagtattggtaaattgcacaagtttcttgaatcaaaaccggtccggttcttgctcaagaacacctctacttaacaagaaaaaaccatctcatcgaccgacaataacaacaataaaaccggtcccggtacgtgtatcagagaagaaatcaccggaggaaaccggaagctcggtagattgctcaagtttcttgaatcaaaaccggtctggttcttgctcaagaacactgcaatcgggttataatcaaaaccaaaccgaatctaaccggtcttgtcctgattac

SEQ ID NO: 94048 - DNA, 438 bp, Arabidopsis thaliana columbia
gcgtccgaacaaaagaaaaaatatagacatatcatctgcttctttgtttctgttagtgcgtgtgtgggtcttgggggtctcatgtttttcgtgatgcgataatgctaaagtggaggcagaagatcgtccacctgtacttgttgaatactttccgggaacatattgtagtccaattcgtgctcggggtcctcaacagtgcaaagatgaaactaaggatccttactatcctaattgcgtttgtataaatcaagcaagtggacatgattgttcatgtactcattgataagtttcctttatatgtatgcgttactgaatcttgagaactaaatctatttaataaaaattagatatttatctttgatttaaaaaaaaaaaataccaccctctaaatatttcttattttttatcctaaactccctctattttaattttggggcg

SEQ ID NO: 94049 - DNA, 692 bp, Arabidopsis thaliana columbia
  unsure (1)..(692): unsure at all n locations
cnnnnnnnnnncgactcttatagggaaaactggtccgcctgcaggtaccggtccggaattcccttgtcgacccacgcgtccgctcggctgcgagaagacgacagaagggggtgtgtgttgttgttgttggcactgtgccactttctctctcgatggaccctctcaagcaagcttcttcgatcttccgagcttagtttcgtttctaaatattcagctgttgaaatcgtgcttattgctacaaattgagaggcactaaatcagtgaggtcgtaaagaagaaggcaaccacaatgatgcagacttgttgtatccatcaatcgttttgtttccctcatagagtctttccacggtttgatgcttcgattggtattaagcccccaaagctttgtcaagttggtttcattggaaagactcaatcttatgggatttcaagtccgatacggcaaagaagattatatgtgaatttgaatgctaatgatggtcacccatccatgtctatgttggaagaagaaacctctactgaaaacaacgcacccagtcaagaagccgagcttccgttcagcaaatggtcaccttctaagtacatatggggaggtttatcagcttcctattactagcaggacaagtcgtcctccggattttaaagggtaagattcactggagaaacactcttcaacagctggagagaaccga

SEQ ID NO: 94050 - DNA, 639 bp, Arabidopsis thaliana columbia
  unsure (1)..(639): unsure at all n locations
ctattacactcgatacgactatgagaacgtagatgcaactgcagctaaagaactcatgggactttgggttaagttgcaatcttcacttcccgaagtcaacaagattataaagggaattcatccagaggtggcaaatgttgcaagcgcagatgagttcgagtacaaagatccagtagatggctctgtttcaaagcaccaagggatccgatacttattcgaggatggatcccgacttgtgttccgtctctcgggaactggctcagaaggagcaacaataaggctatacattgaacaatacgagaaggacgcctcaaagatcggccgagattctcaggatgctcttggtcccctggttgatgttgcattaaagctgtcgaaaatgcaagagttcaccgcccgatcatcaccaactgttattacataagacagctttcagaagccgctgtctccaggaggactctcattccaacttcatttcttatgaatttgggttttgcttttttcctgttatctgttatcttacncaagtatacttcaatacatataattttaatggaataacattaggtggcccaaaaaaaaaaaaaaaaaggcttaccccnaaggcgaccgctctagaggtccaagcttacgacgcgt

SEQ ID NO: 94051 - DNA, 411 bp, Arabidopsis thaliana columbia
  unsure (1)..(411): unsure at all n locations
aacatactaagagagttattagaacttgcaaaaaatggcttccaaggctttgattctgttaggtctcttctcagttcttctcgtcgtctccgaagtgtctgccgcaagaaattcgggcatggtgaagccagagagtgaggaaactgtgcaacctgaaggttatggcggtggccacggaggacatggtggtcacggagggggaggaggccacggacatggaggacacaacggaggagggggccacggacttgacggatacggaggaggtggaggacactatggaggaggtggaggacactacggaggaggtggaggacactacggaggaggtggaggacactacggaggaggttgaggacactaccggaggaggttgtttgaggccacggaggttgaggccacttcggngnt

SEQ ID NO: 94052 - DNA, 485 bp, Arabidopsis thaliana columbia
  unsure (1)..(485): unsure at all n locations
gagattagaacttgcaaaaaatggcttccaaggctttgattctgttaggtctcttctcagttcttctcgtcgtctccgaagtgtctgccgcaagnaatcgggcatggtgaagccagagagtgaggaaactgtgcaacctgaaggttatggcggtggccacggaggtcgtggtcgccccggaggtggtggaggaggatacggaggtggaggaggacaccacggaggaggaggccacgggctaaacgaacctgttcagactaagccgggtgtttaaaactatataatatcttcactaccatgcatgattgcatatatatatatacgcttatgtattatctatatgcctataaataaaccatggtgagtttgtaacgcagtgccttcagaaatgttcggaataaatttccataatattagtataatgtctctctgtttgaattataaactgcgctgtttgcataataaaatctcttgtagctaaaaaa

SEQ ID NO: 94053 - DNA, 601 bp, Arabidopsis thaliana columbia
  unsure (1)..(601): unsure at all n locations
catactaagagagttattacaacttgaaaaacatggcatccaaggctttgattcttttgggtctcttcgcaattttcctggtggtctccgaagtttctcccgcaagatactcgggcatggtgaagccagagagtgaggcaactttgcaacctgaaggttatcacggaggacatggtggtcacggagggggaggccactacggaggaggaggccacgggcatggaggacacaacggaggagggggccacggacttgacggatacggaggaggacatggaggacactacggaggaggaggaggacactacggaggaggaggaggccacggtggtggtggacactacggaggtggaggacaccatggaggaggaggccacgggcttaacgaaccttttcagacgaaaccgggtgtttaaaagttaaaactataaaataaattcaccaccagtccaccatgcattaattgcaatctttatatacaacttatgtcttataagtttngatcaaattaaaccccttggtgggtttgtaattcatttccttccnnaaattnttttggntnaatttttttttataaatacttggttnnccttcnngtttt

SEQ ID NO: 94054 - DNA, 551 bp, Arabidopsis thaliana columbia
aacatactaagagagttattacaacttgaaaaacatggcatccaaggctttgattctgttgggtctcttcgcaatttttctggtggtctccgaagtttctgccgcaagacagtcgggcatggtgaagccagagagtgaggcaactgtgcaacctgaaggttatcacggaggacatggtggtcacggagggggaggccactacggaggaggaggccacgggcatggaggacacaacggaggaggaggaggaggaggaggccacggtggtggtggacactacggaggtggaggacaccatggaggaggaggccacgggcttaacgaacctgttcagacgaaaccgggtgtttaaaagttaaaactataaaataaattcaccaccagtccaccatgcataattgcatctctatatacacttatgtcttataagtatgcatcaaaataaaccatggtgagtttgtaatgcagttccttcagaaatgtgtggaataatgttttataataataatagaatatctctcagtttgaattataatctgtgctgtttgcat

SEQ ID NO: 94055 - DNA, 519 bp, Arabidopsis thaliana columbia
  unsure (1)..(519): unsure at all n locations
gagagttattacaacttgaaaaacatggcatccaaggctttgattctgttgggtctcttcgcaattcttctggtggtctccgaagtttctgccgcaagacagtcgggcatggtgaagccagagagtgaggcaactgtgcaacctgaaggttatcacggaggacatggtggtcacggagggggaggccactacggaggaggaggccacgggcatggaggacacaacggaggagggggccacggacttnacggatacggaggaggacatggaggacactacgggcttaacggacctgttcagccgaaaccgggtgtttaaaagttaaaactataaaataaattcaccaccagtccaccatgcataattgcatctctatatacacttatgtcttataagtatgcatcaaaataaaccatggtgagtttgtaattcagttccttcagaaatgtgtggaataatgttttataataataatagaatatctctcagtttgaattaaaagaactaaatatgcccttg

SEQ ID NO: 94056 - DNA, 876 bp, Arabidopsis thaliana columbia
  unsure (1)..(876): unsure at all n locations
nnnnnnnnnnnnnnnnnnnnnnnnnnnnnnnnnnnnnnnnnnnnnnnnnnnnnnnnnnnnnnnnnnnnnnnnnnnnnnnnnnnccacgcgtccggcttcgcttctcctctctcgctctctactcaggactcgtttactctttcaaagctaagctttcaagatgcaaaacgaagagggtcaggtcactgagctttacattcctaggaaatgttctgctactaaccggttgatcacatccaaggatcatgcctctgttcagctcaacattggtcatttagatgctaatggcttgtacaccggacagttcacaacctttgctctctgcggttttgtccgtgctcagggagacgctgacagtggtgtcgacaggttgtggcagaagaagaaggttgaagccaaacaaaactaagagcttaatctgtcttgttttttgtcgaatcttgtttttttttttccgaaagattgcctcatactgaagtaatgattttggctttgggtcgtggaacttaacttaaatgcttttgtgcaccatgtcttctaatttttcaccagttcgatatagtatctccagtttctcgacctttttatcaaaaaaaaaaaaaaaaaaaaaaaaaaaaaaaaaaaaaaaaaaaaaaaaaaaaaaaaaaaaaaacaaataaaaaaaaaaaaaaataaaaaaaataacatggggggggccttttttaaaaaaaaaatttttttcccgcggttgggtgggggaatttttttttttttggggccccaatataaaatctttgggcgggcgagtttcaaatggtgggagatacaaacactcgatggcccccaccaaaaacttggtggtgggcaaccgctcttttttaacacgggttatttact

SEQ ID NO: 94057 - DNA, 323 bp, Arabidopsis thaliana columbia
cttaaccctcaatcaaaccaaccaaccaaaaaaccatgatgcagcgagtattcacctttggaaaaggaagaagcgaaggcaacaagggcatgaagtccttgttgggagggaaaggagccaacctggcggagatggctagcataggcttgtcggtgccgccggggctaaccatatcgaccgaggcttgtcagcagtatcagatcgccggcaaaaagcttccagaaggtttatgggaagagatcttagaaggtcttagcttcatcgaacgtgacattggagcttccctcgctgatccctccaagccactcctcctctctgttcgc

SEQ ID NO: 94058 - DNA, 912 bp, Arabidopsis thaliana columbia
  unsure (1)..(912): unsure at all n locations
nnnnnnnnnnnnnnnnnnnnnnnnnnnnnnnnnnnnnnnnnnnnnnnnnnnnnnnnnnnnnnnnnnnnnnnnnnnnnnnnnnnnnnnnnnnnnnnnnnnnnggggaatggacacattagccaatcataaccacatctatctttcatccactcacgtcactcgtcaaaccaaaatctataaacctcccaaaatacattaaatttaaataaaaaaatagatcacattaagtctacgttacttataagaaccaaccaaaatcaaataaattaggatcagagaagaaatttattgaaccgccatttctactctcgcaaatagcttaccatcaaacaccaatttccatatcacgtaagctatatatatttttattttatacactcctttctctcaacttctttatttttatatacaactcttaaaagtaagtatattatatttatttaagtggtttatgctttatataagaaagaaaatgacaagtatgatcgtgaagacaacgccggagctcttcaaaggaaatggagtgttccgtacggatcatctcggagaaaaccgaatggttagtcgatcaaaccggctaggtgatggatcaaaccgtttccctagaaccggtacaatccattgccaacggttaagcatagcaaagaccggtttgcatcgtgagacgaaggctcgagccatacttagccctgtgtccgatccggccgcttccatagcccaaaaggtaagcctttccatttcaatcattctggtgtattttcaccataaaattttatacacttttttattacgttttgttttccccttctgtcgtcttctcgcagccgtacggacgcgtggnnnnnnnnnnnnnnnnnnnnnnnnnnnnnnnnnnnnnnnnnnnnnnnnnnnnnnnnnnnnnnnnnnnnnnng

SEQ ID NO: 94059 - DNA, 629 bp, Arabidopsis thaliana columbia
  unsure (1)..(629): unsure at all n locations
tggaggttggggttttggtaatgggaatggatcctttttttctggnaatgggntttctttgcgctttgtagagttaacgttgcagcgagagattgattgtccaaggagatttaatctctcaccttcgatgaagtctttgttgagagagaatgttgcagcctttgctgctgggtatcgtgctagtatggagcaaaagaagcaggtgcaaatgcagtctgaaactagtggtactagcttgtcttgcacggctgctgctacacattcagagaagtgtgagcagccacatgtcttcggaagtgaagaatgtttcanttcagtgctggagaaattccgggatctgaaccttgatgacaatgttgattcggcacctgaggagctgaaggatgatgctttaataggactacttcagcaggttcaggatctcaaaaagcaattgaaggngaggaaagactgggctcagaagaaggcaatgcaagctnccccaaaggtcagcgatgaactntccgggcttaaatcattnggngttnganangggaattcancggggtgaaaaaggggacaaactcgtggggcttaccttgaaaatttcngggtggaatccnttgaaacttcggcaatttcaggaatgc

SEQ ID NO: 94060 - DNA, 456 bp, Arabidopsis thaliana columbia
gggttcagagaagatcgtttactctttcctcaatttcgaacaaagttttcgaattttccaactctctctagtgaatttagggttctgatttcgacattagtgtaaagatttgttttttatccgaggggtgcgattgtgtagtcaaaccagatcaaatgtcggcatcaacggtgtcgatcaccgctaatacggcggcagcgactagacggacgccgattcttgccggagagaaaaaatcaaactttgattaccctcaaagcgaatcgcttgcgaacggtggtgttggggaagccggtggtacgagtagagatctgagccgcggtgaagctacccttgatcgatctcagggacaagatttgggtcctgtgacgagaaggtctgtttccgctgcgacggggactaataccaccgctacgcagcgccggacgcggaaggttgcgacccctaagtctgaga

SEQ ID NO: 94061 - DNA, 529 bp, Arabidopsis thaliana columbia
  unsure (1)..(529): unsure at all n locations
cgaaaagaatcctttgtaaattctttgctcacggtgcatgcttgaaaggggagcactgtgagttttcttatgactggaaggctcctacaaataatatttgcacctactaccagaaaggaatctgctcttacggaagtcgatgcaggtacgaacatgtcaaagcttccaggcctcatccatctgcttcatcttcgtccgctgtgcctcggccatctcctgcttcagcttccaacactcttgcctgtgcttttcttcctggtgtcgcggaaagagatttgagcccagatccttcttcatctttaaaaccaacgtggaatttggattctcttcaccaggattccgtagacgaggtcaaaacttctaaccctggtacagtcaaacctgaagaactacccatttgctcatttgctgctgcttggtgattgccacgtgggaatgaatgccctaaaatcntnggacnttttccaactttngggaantttgtttnanccttttaanccccggaaagggggcccaaannttttnaaaa

SEQ ID NO: 94062 - DNA, 649 bp, Arabidopsis thaliana columbia
ctcactatagggaaagcctggtacgcctgcaggtaccggtccggaattcccggttcgacccacgcgtccgtacggctgcgagaagacgacagaaggggctccggcgacgagtaccttcgccggcaataatggtctctgtgtagatagatcgtgaagaagattagagaatcgaagaactcgtatcagataagctaaaatcaatgggtagccaacgacgaagatcggtgatagctttgattttcatctgctgcgccatttcttctacctcatctgatcaggttggaacaaattatagagattctcatgaatttttcgattccgatacaatttgtatctctgatcaatacattatggagtcttatttcactacatacacttccttagacgactcagagtttcgaaacttcttgcttcttcaacaatgttctgacaaagttcctactcaagattcaaacattgttcctgcaacttcatttatacaacatagaaacattactggtgaaggttcacatcgtaatctcatcacatccatcaagcttcttcttcatcactcagagtctcagtttcgtgagctcgtgatcgttgaacggttgcctttgggtgtttttgctgatccttttgagcttcagagtcttcaacaacgcagagc

SEQ ID NO: 94063 - DNA, 673 bp, Arabidopsis thaliana columbia
  unsure (1)..(673): unsure at all n locations
gctgtttttgagatcgatccccaccaaaggagcctagcctaaatcatgccttcaggtgctaagaaaaggaaagctgccaaggaaaaagcaagaggaagaacaacaacaacaaggatcttctactctaatcaacctcttatccaaaaaaatggattcgagaagccaaggtgacaaggagagcgatgatggtgttaatgaacgcatagagatcactgattcaagccatgatcatgacaagagctctagtagcagcagtagtagtagcagcagcagcagcagctccagctcggatgatgagtcacgggaagtcaagaagatagatgatgataagaagactggtgatgatgtttctgaagttattactgtgagttctgtgccaattcaacctgtgcctattgctgcagatgctccgtttatgggatttactgctaatgcgattgtagagaatactggtttgatggattcagctgtgccgaatgatcccgaatctggagaactggttgagatctcgcatgttgatacaatagtctcaaacgaggctgatgataattctttgcctaaagcaactgagattgctgctgaagttgctcttgcatttgatgagattaggcagacgtcttcaggtgctactgactctgatgtgaaagaaaatnagggaaaaacttcgcctctt

SEQ ID NO: 94064 - DNA, 439 bp, Arabidopsis thaliana columbia
gacccacgcgtgcgggcagatgtcagtatacatgtctgagaaccttccatttcagacccttcgttccatattggcaaggcgtgaacaggcatactggggggggatcgcatttgagtatatgcacattgcagatcgagataaatgtaactggttgagagaaaagattgagacaccagctccttggcggtacaacagggagcgccgtgaggtgattctcgatcggcttgcatggagtactcagctcgagaatttcttagctaccaagtggacaacagccaaaagatttggacttgagggaggagaatcattaattcctggaatgaaggagatgtttgacagagcagcagatcttggagtagagagtattgttattggaatgtctcacagaggaagattgaatgttctgggtaatgttgttcggaagccactccgtcagata

SEQ ID NO: 94065 - DNA, 656 bp, Arabidopsis thaliana columbia
acaataccacgttgtaaagagaagagtaggatctgatgtaccagagacttctcatgtatgccgtttcggaacagagaagatgcttataagattatctttcctcttacattgggagaaatcctgaaaacgataacttcactttcacggaatccttttcctcaccaatctctaattctggcttggtcaatccgcgcgatattcctctgctatacctccagagaaagattcaaaaagctccaatgggatcacttgaaagcaaagaagctcagaagaaattgcttgacgaaaagaatcataggaaacaaatcgatcagagcattacagacattctgcggctttcagttaaacaaaccaatgtcttaaatctcttaacttccacaagaacaacaggacagcctcttgtagacgattgggattgcttcaagactctagttaatagcttcaagaatcactgcggtgcaacggtgcattacggattgaagtatacaggagcgcttgccaatatctgcaatatgggagtggatgtgaagcaaactgtttcagccattgaacaagcttgttcgatgtaatgatttgcaaaacaatgtgatattcgactttaaaaatatcaaagttaatttcaataaaactcgatgtagagatggttggttcatgat

SEQ ID NO: 94066 - DNA, 427 bp, Arabidopsis thaliana columbia
  unsure (1)..(427): unsure at all n locations
atgttgactagatttaagaaacaaaataataagatggttagggcaaatatagtgagcatggttctgttgatgcatgccatcgttgggtttccttttcatgcgaggggattaagtatgacttactacatgatgagctgtcctttcgctgaacagattgtgaagaacagtgttaacaatgctcttcaagccgatcccactttagccgctggtcttatccgtatgttgttccacgactgtttcatcgagggatgtgatgcgtcaattctgctagattcaacggaagacaacactgcggaaaaaggattcgcctgcaaatctaagtctacgggggctacgggnttcatncggtgntgcaaangnggnaattcggggattagntttnccnggggtttntatcnatccgcagttttaggtttcccntgggctc

SEQ ID NO: 94067 - DNA, 431 bp, Arabidopsis thaliana columbia
taggctcggtatcgcggttgatgtcgcgctaggtcttgagtatttgcatactggttgcaggccgccgatcattcatagaaacgtcaagtgtacaaatgtattcttagatgaaagtttcaatgcgaagttaggcggttttggcctttcgagagcgtttgatgcagccgagggaagtcatttgaatacagctattgctgggactcctggatatgttgaccccgagtattacacatcaaacatgttaacagagaagagtgatgtgtacagtttcggtgtagttctattagagatcgttactgcgaaacccgctatcataaagaatgaggaaaggatgcatataagtcaatgggttgagtctttgctttcaagagaaaatattgtagagattcttgacccgagtctttgcggagactatgacccaaactcggcat

SEQ ID NO: 94068 - DNA, 492 bp, Arabidopsis thaliana columbia
cccgagcgtccgctttatctgatcgcaccaaaccagttttttcgcatcggcttcttccttttgctactagctctcctctcttctccgaaaatggcgttacaaaacaaagaagaagagaaaaagaaagtgaagaagttgcaaaagagttacttcgatgttctcggaatctgttgtacatcggaagttcctataatcgagaatattctcaagtcacttgacggcgttaaagaatattccgtcatcgttccctcgagaaccgtgattgttgttcacgacagtctcctcatctctcccttccaaattgctaaggcactaaacgaagctaggttagaagcaaacgtgagggtaaacggagaaactagcttcaagaacaaatggccgagccctttcgccgtagtttccggcttacttctcctcctatccttcctaaagtttgtctactcgcctttacgttggctcgccgtggcagcagttgccgccggtatctatccg

SEQ ID NO: 94069 - DNA, 470 bp, Arabidopsis thaliana columbia
  unsure (1)..(470): unsure at all n locations
gtctctctctatgtagacatctatccanggttacattgacggatcagactcttcttcaacgcgtcctagccaaacccaccgaccaaaggcttagcaacggaatcggattcaggtattattctgcggcttttctctatacttctcgtcggagcaatctctttgtgggcaaaccatgaggcttcaaaaggcttctccataagtatcatcaatgatgctaaagattctccttccggtaaaagattcgcccttttcttcgaatctgatgatacggcagtgcggatattgctcgatgcaagcttctttgtggagaggtttctctacgagggtgttcctcatcgtctccgtaagcctgtaaaccacgttaccgtccaattctgtggaaacagtaagtgatagagtagatagggttctcggtaacttcaggtgcaagtcatggngagtatgtgatcagattaaggccatcctctcac

SEQ ID NO: 94070 - DNA, 439 bp, Arabidopsis thaliana columbia
  unsure (1)..(439): unsure at all n locations
ctttaatttagagagaaaaaataagcattcttccntctctgttttcgagcgggaaattctggagatggctatacaagcgcagttgacttacaccgctccgaatgcgaatcaaatcggttttggtgggtccgagttttctttgatcaacaacaatggcgttatcggaatcggtaacgatcagtcttatcttgtcaataatctccagttgcagaaagatttcaaccaacatgctctgtttcatcatcagcatcatcaacaacaacagtttccttctcaaagctttttagctgctcagatggagaaacagaagcaagagatcgatcagttcatcaaaatacagaacgagaggttgagatatgtgttgcaagaacagaggaagcgagaaatggagatgattttacggaaaatggagaagtaagctttgcttttgatgagtcag

SEQ ID NO: 94071 - DNA, 537 bp, Arabidopsis thaliana columbia
ctgaatcttaatttcccccaaatcaaagcttttgacctaaatccgtttcccggggagaatagatcaacaaaccatcgccggaatcttcaatatctctccggtgaagaaaaaatgtcgcacaacgatacgattccgctttatcaatcatctcaatcagacattgacgagattgagaatatgatgaacgacagttttcaatcaggtcccggaaccgtgcttcctgctcgaccaccgagtccgatccgtccgtcgattcccgtttcatcctcaccgttcgttcaatccaatctcccaccgcttccaccgtcgtcttcctcctccactcagaaggtgatgcctgttccagctcctccaccacttccgtcagcaggtaacgaaggtaacaagagtattggaggtagcggattccgatctccgccaaatacattgacggagcctgtttgggatactgtgaagcgtgatctgtcacggatcgtgagtaatttgaagcttgggggggtttctaatccgtatagggaaagatctgggaaagcactt

SEQ ID NO: 94072 - DNA, 978 bp, Arabidopsis thaliana columbia
  unsure (1)..(978): unsure at all n locations
tgannnnnnnnnnnnnnnnnnnnnnnnnnnnnnnnnnnnnnnnnngcctgcatgnaccggnccggaatncccgggttgacccacgcgtccgcggctgaagacgacagaaggggtgaagcgtgatctgtcacggatcgtgagtaatttgaagcttgtggtgtttcctaatccgtatagggaagatcctgggaaagcacttagggattgggatctatggggaccttttttcttcattgtgttcttggggcttactctttcgtggtctgcttccgttaagaagtctgaagtatttgccgtggcatttgcactacttgcagctggggcagtgatcctcacactaaatgtgctgcttctgggaggacatataatctttttccaaagcctaagccttctaggctactgtctatttccgctagacgttggagcagtgatctgcatgttgaaagacaatgtgatactgaagatggtcgttgtgtctgtgactcttgcctggagctcttgggctgcttatcctttcatgagcgccgcagtgaacccgagaagaaaagctctcgcactctacccggtcttcctcatgtatgtctctgttggcttcttaatcattgccattaattgattctatccggaaaaatgggaaatcagagataggttctttgattcagtttgggaagtcatttggtacagagtagatagagaattctccagccgcgaactattctgagttctaatgagatcatatgtataatatgttctttgacgcttttttgttaaactcccctgtggattttactcttctatatggttttgctttgtgtatgaaacttacggttcttttttggaaacgtatatataatatcaagaccttgatgctcgccaaaaatagtaaaaaagcaccaaccccccgatcgaaccgctctagaggatccnagcttacgtacgcgtnnnnnnnnnnnnnnnnnnnnnnnnnnnnnnnnnnnn

SEQ ID NO: 94073 - DNA, 724 bp, Arabidopsis thaliana columbia
  unsure (1)..(724): unsure at all n locations
ttcccgcggggagacacacgtgcggctaatcattaagtttcatagctataatggcttcatcatcatcaatatcaaatcacaagattccaaacacactaatgtttttggtgatcgtaaactttttgtacctaattcaaactaattcagctgtcagtatcagttccaattccaactcccacttctcaagattctcgagacatcgaagctcaccatcatcaaaaaccaaacaagggtttcttgcaacggtccaagagagtatgaaccatgctctcttggctcgttctcttgctttcaacctcactctttctcatcgaaccgtacaaacccacacgttcgatcccatccacgactgcctcgagctgctcgacgacacacttgacatgttatctcgcatccatgcggataatgatgaagaagatgtccatacatggctaagcgcagcactcacgaaccaagacacttgtgagcagagccttcaagaaaaatccgagtcatacaaacacggacttgcgatggatttcgtcgcaagaaacctaaccggtttgttgactagctcgcttgacttgttcgtatccgtcaagtcaaaacaccggaaactcttatcggaacaagaatattttccgacgttcgtttccttccgtcagagcaaagggaggcgttcttgaagcttccggtgggggagcgcgtggtcggttggattctggttgtagcttcaantcggnaa

SEQ ID NO: 94074 - DNA, 957 bp, Arabidopsis thaliana columbia
  unsure (1)..(957): unsure at all n locations
gaggctacacactttgcggttgctttcgtggtgcctggctggaataacgagaaagaagcggtcaccgccactgttctccagatgcttatgggaggaggtggctcattctctgcgggaggtcctggaaaaggaatgcactcgtggctttatcgccgtgttctaaacgaatatcaggaggttcagtcatgcactgcattcactagcatctttaacgacaccgggttgtttggaatctatggttgctcgagtcctcaattcgctgcaaaagcaattgaattagcagctaaagaactcaaagatgttgcaggaggaaaagttaaccaggcacatcttgatcgtgccaaggcagccacaaaatctgcagttctgatgaatttggaatctcggatgattgcagcagaagacattggtagacagatacttacatacggagagaggaaaccagttgatcaattcttgaagtcagtagaccaactaaccttgaaagacattgcagacttcaccagcaaggttatttcaaagcctttgacaatgggttcctttggagatgtgttggctgttccgagctatgacacaataagcagcaaatttcgttgaagcaaaacaaacaatttgccaaatcaacaatattttgggacttgtaaaataaagaagatcttggggagaagaagacccaaccaattttaattttaatttttttttttacaattacagtttcgtatttttatgaaatggattttgtttccatcgacagatataaatgactggattttgtccggtttgtctctccaattttcaggagtatttgtattccaataaataatcttttactacgtgtaatgcaaacaacttcagtggtacagaaaaaaaaaaaaagaaaaaaaaaaaaagtataaaaaaaccaggngcagccgctctagaggatccaagcttacgtacgnnnnnnnnnngtaatcg

SEQ ID NO: 94075 - DNA, 582 bp, Arabidopsis thaliana columbia
  unsure (1)..(582): unsure at all n locations
tgaatntgcttcacagggaattgaattagtagctagtgaaatgaacgctgttgctgatggaaaagttaatcagaaacatcttgatcgcgccaaagcagcaacaaaatctgcgattctgatgaatctggaatctcggatgattgcagcagaagacattggtagacagattcttacttacggagagaggaaaccagtagaccaattcttgaagacagtagaccaacttaccttaaaggacattgcagatttcactagcaaggttatcacaaagcctttgacaatggcaactttcggagacgtgttgaatgttccaagctatgactccgtaagcaaaagatttcgctgaaagagtgaagaagtaaaaaagatctttttacatcataagatagagttgggacctgtagaataaagatagccttttttttggaggtccaaccaaattttttgttccacctatccctcaagtttctgccctaaggtaagtccatgaaaatggtgccaaattacgcccatgtctccaattccgttgttccggatttcttctcttcggttagtgaataatgattgatacgtttaccaact

SEQ ID NO: 94076 - DNA, 525 bp, Arabidopsis thaliana columbia
  unsure (1)..(525): unsure at all n locations
aaaagaacaattcgttttttcgctctctcaattttaatatcttcttcttcttcttccttcattgagcttcagcttcaactgtacaaagattggtaaaaggagaagaagaagatccattaaaccgtatctatcttttctctctccacttctatttccatggcggagggtgaagagaagaacggaattattgattcgattcctttattcgctaaggagcttattgccggcggcgtcacgggtggtatagctaaaaccgccgttgctccactcgagcgaattaagattcttttccagaccagaagggatgagtttaaaaggataggacttgttggatcaatcaacaagattggcaaaactgaaggtttgatgggtttctacagagggaatggtgcaagtgttgcccggatagttccccatgcagctcttcattacatggcttattggggcatacagggggtgggtttacctttgggttcccagacactactcgaggccattgcttgatccgaagctgggnaatttntc

SEQ ID NO: 94077 - DNA, 422 bp, Arabidopsis thaliana columbia
ggaggctatggcgacgacggcgaagattttgaagggtttctacaagcagactaaaagcaatatcaccggaggtatctccaagtccaagccttcttcccggaaagtggctcccaaacacgcggcggctcaaggttctgatgttacccagcccgccgcattgatttcacacggctccgtcgatctcaacgaggattatgacaaggaggaggagatgcttagacaatttgacatgaacatcacttatggtccgtgcctgggtatgacgagacttgatcgttgggagcgtgcagtgcgtcttgggatgaaccctcccaatgaaatcgagaagcttttgaagaccgggaaagtccagcaggattgtctgtggcaaggtcgtgtctagataggggttctttaatcctttatctatgcccttgtatgat

SEQ ID NO: 94078 - DNA, 520 bp, Arabidopsis thaliana columbia
  unsure (1)..(520): unsure at all n locations
gcaacttttgactaaaaaaagcagctcatagcagcggttatgcctttttccgccgcgagttcgagctccgtaagctcaatcgctgaagaaccgccgccaaagaaacagcatgatccatcgccgtcctgttcatcgtatctgttactacttccagacgaaatcattctgaattgcttagcacgcttgccgaaatgttactacccggtgatttcactcgtctccaagacctttaggcgtctcatagcttcaccggagatctacgttgaaaggtcattacttcgccgcaccgagcgtgtcctttatgttgtgcttagatctcacgctacagaaactccccgatggtacactctcaatttcaaaccctttggaaatgattcaaataanccataggttggttcccgattccggtcgntttccnttcgnttccttncttgggggaattgtcaaattggccgnnattggtttcnnnaaattaacggccccttggnggnttcaattgataatnnaattggcnncannt

SEQ ID NO: 94079 - DNA, 411 bp, Arabidopsis thaliana columbia
cgattctcgctttccttctctcaacgttctcgtggaattcccaaatcggcttgaaatttttggagaaattggagcttcgattcattcatttatgaggatctctgatgattagtggcgaaattcgtgaagacatcttcgtccttgctttcgaatcgctgaatcgtgttacgttttctagattcggctgaggagtgaaattggatttttgaatcgatttctgaataaagaggaagaggatcggagatggcggcgggtgtaatggtaacggccacgggagcagtggggattctgtacttactgagccgtcggatcgggtgggcgagaaatggagaagatgattcaggaggtgaattgggtaaatcagggtgatctggaaggaggaggattgttaggagacctgctcaagcaccg

SEQ ID NO: 94080 - DNA, 522 bp, Arabidopsis thaliana columbia
  unsure (1)..(522): unsure at all n locations
ctctgaagcatccatggaagctccttcaccttcaagcgatccatacaagttcctcaacattacacttaactcagatgggtctctcaccagacaccgtgatttccccaaactgcccccaacagagcaatccaaagacataccattaaaccaaaccaacaataccttcatccgaatcttcaagccacggaatattccgccggaatccaaacttccgatcctcgtttactttcacggcggtggatttatcctctacagcgccgcttcagctcctttccatgaatcttgcaccaaaatggctgatcgtcttcaaactataatcctctccgtcgaataccgtctagctcccgaacaccgtctcccggcgggcgtacgaagacgccgtcgaagctatcttattgggctccggtgatcaaagctcgtcggggccaattaacgggtgggttattggggcaangnggttaaaagnnggtttcggttttttngaaattttaggcaatggggttaaagctttgggggnaatnt

SEQ ID NO: 94081 - DNA, 686 bp, Arabidopsis thaliana columbia
ttggagagagagcttgaagagaccagagaaagtcttttttttaaggtacgaggatctcaaagacgacatcgagaccaacttgaagaggcttgcaactttcttagagcttcctttcaccgaagaagaggaacgaaagggagttgtgaaggctatcgccgagctgtgtagcttcgagaatctgaagaagttggaggtgaacaagtcaaacaagtcgatcaagaactttgagaatcgattcttgtttcggaaaggagaagtgagtgattgggttaactatttgtcaccttcacaagtggaaagattgtcagccttagtggatgacaagttaggtggatctggtctcactttcaggttgagctaaatataaggccacgtgcccccatttctactcttgttctgagggcctactatatacgttaagctaagttaaggcagttgtattgttgttacagatagacatcgaagcaacgtaacgtccataattaagttaatttgtcgtttttatttttgtcaacaccgaagtttgtcgaatttttattttattaaatatcgcttgtttttgcagttatgtttttatttttactagagtattattgttcatgtgtgaagctaaatgtattgtaaagtatgttaaaattgagtatatatatatatatatatatatatatataaaaaaataatttcat

SEQ ID NO: 94082 - DNA, 1278 bp, Arabidopsis thaliana columbia
  unsure (1)..(1278): unsure at all n locations
nnnnnnnnnnnnnnnnnnnnnnnnnnnnnnnnnnnnnnnnnnnnnnnnnnnnnnnnnnnnnnnnnnnnnnnnnnctttttttttttttttagataatgactcgtcgttactattaaaaggaaggaaaacaagatttcgattaagtgaggccgctctcttctcttcacaacgcatcatctcatgcattttgggctattatataaacacccaacttcctcacgaaatcttacaccaaacacaaatattccattaaaagaaacattttctatagtcaagcataaagagcattccaatggcgatcccaagtttctccatgtgtcacaagcccgagctccttaaggaaggcaaaagcgaaggccaagaagaagaagggctaagctacgagttccaagagatgttggactctcttcctaaggagagaggacggagaaatcgttacctttacttattccaagggtttcggtgccaagctaaggagattcaagctatcacgtctttccaaaaacattttcagtcccttccagacgacgttgtcctcgccaccatacctaaatctggcacaacctggttaaaagctttaactttcaccatccttaccggtcatcggtttgatccggtttcctcatcaagttccgaccaccctcttctcacatccaaccctcacgacctcgtacctttcttcgagtacaagctttacgccaacggaaatgttccgatctctcgggtctagccagtccaagaacattcgcaacccacgtaccgttcggtgcccttaaggattcggtcgagaatcccagtgtgaaggttgtgtacctgtgccggaacccgtttgacacattcatctccatgtggcattacatcaacaacatcacttccgagtcagtgagcgcagtcttgctagacgaagcttttgatctatattgccggggattactgatcggatttggcccgttttgggaacacatgttgggatactggagagagagcttgaagaggccagagaaagtcttatttttaaagtacgaggatctcaaagaagacatcgagaccaacttgaagaagctagcaagtttcttaggacttcctttcaccgaagaagaggaacaaaagggagttgtgaaagctatcgctgatctgtgtagctttgagaatctgaagaagttggaggtgaacccacgcgtccgcggacgcgtggactatgagaaccnnnnnnnnnnnnnnnnnnnnnnnnnnnnnnnnnnnnnnnnnnnnnnnnnnnnnnnnnnnnnnnnnnnnnnn

SEQ ID NO: 94083 - DNA, 607 bp, Arabidopsis thaliana columbia
  unsure (1)..(607): unsure at all n locations
ccgaattctccaagtctctcatcatcacacccactccaacaaactttctacgagagaaaaaaacaaaaagaaaaacaaacaatggagaatcttgtaggtcttcttcgaattcatgtgaaaagaggtgtgaatctcgccattagagacatctcaagcagtgatccttacatcgtcgttcactgcggtaaacagaagttgaaaacacgcgtggtgaaacatagtgtaaaccccgagtggaacgacgacttgacactttccgtgactgatccgaatctcccgattaaacttacggtttatgactatgacttgctctccgcggatgacaagatgggagaagccgagttccacattggtccatttattgaagctattaaatttgcccatcagctcggaccaggacttcctaatgggnccataataaagaagatagagccgagcaggaaaaattgtttgtntgaatcaagccacattngtgttganccaagggcaaagnttntccagaatattgttccttagcttccagcacgtggagttttngngnaggttnagntacagctcgnntgggtccgntttcccgggttaagggggtttttnggncaaataatat

SEQ ID NO: 94084 - DNA, 538 bp, Arabidopsis thaliana columbia
gatacccagctctatacgactcactatgggaaagctggtacgcctgcaggtaccggtccggaattcccgggtctacccacgcgtccgatgagcattaccggagaacaaaagtgtaagagttatcgcaggttgtcggataaaatgtatattcagatgacagatggagttcctccgccaccagagcaaagttcgttagaccaccggattgacgagcttgagagacagaaagagatcgatgattggcttccgataacttcatcgagaaacgcgaaatggtggtactccacgtttcacaacgtgactgccatggttggagctggcgtccttggtctccctttcttcatggcccaactcggatggggaccaggcatagcagtcctgatactatcatggataataacactttacacgttatggcaaatggtggagatgcatgagatggttcccggaaaacgctttgatcgctatcatgaacttggtcagttcgcatttggcgaacgtcttggcctttatattatcgtccctcagcaaatcattg

SEQ ID NO: 94085 - DNA, 594 bp, Arabidopsis thaliana columbia
  unsure (1)..(594): unsure at all n locations
ctactctctctctctctctcctctgttctaattctctaggaacagagtaaaagactttggctcagcttctgcctctccaatggcggttcttccgacatggcttttagcaatgatgtgtttactcttcttcgtcggagctatggagaacactacacacgacaacatctcttctctccctagatccgacgaaaccgaatggaaccaacacgcagtgacgaatccagatgaagtagcggacgaagttctcgccttgacagaaatgagtgtgagaaaccataccgagaggaggaaactaggttactttacttgcggaacaggaaaccctatcgacgattgttggcgatgtgaccccaattggcacaagaaccgtaaacgcctagcggattgcggtatcggatttggaagaaacgcgatcggtggtcgtgatggacgattctacgtagtcactgacccaagagacgacaatccggttancctagaccggggctttacgnacgccgngttcaagancgnccactatggtcggtttcaaacgtgcatggngttcagctaaacaanggtnttcgtaacagttcaaacgtcgtggggnggnga

SEQ ID NO: 94086 - DNA, 602 bp, Arabidopsis thaliana columbia
tctacgactcacttagggaaagctggtacgcctgcaggtaccggtccggaattcccgggtcgacccacgcgtccggcagtgacgaatccagatgaagtagcggacgaagttctcgccttgacagaaatgagtgtgagaaaccataccgagaggaggaaactaggttactttacttgcggaacaggaaaccctatcgacgattgttggcgatgtgaccccaattggcacaagaaccgtaaacgcctagcggattgcggtatcggatttggaagaaacgcgatcggtggtcgtgatggacgattctacgtagtcactgacccaagagacgacaatccggttaaccctagaccggggactttacgtcacgccgtgatccaagaccgaccactatggatcgttttcaaacgtgacatggtgattcagctaaaacaagagcttatcgttaacagtttcaaaacgatcgatggacgtggcgcaaacgttcacattgctaacggtggttgcatcacgattcagtttgtgacgaatgtgatcgttcacggattgcatattcatgactgtaaaccaactggtaacgctatggtgagaagctcagagacgca

SEQ ID NO: 94087 - DNA, 534 bp, Arabidopsis thaliana columbia
caactctttgcgactcatatagggaatgtctggtacgcctgcaggtaccggtccggaattcccgggtcgacccacgcgtccgcaacaatggctacttcaagaacattcattttctctaatctcttcatcttcttcctcgttatagccactacttatggtcaggctccagctccaggcccttcaggtccaacgaacataaccgcaatcctagaaaaggctggtcaattcacattgttcataagacttcttaaaagcactcaagcctcagaccaaatcaacactcagctcaattcttcctcgagtaatggcttaaccgtgtttgccccgactgataacgccttcaacagcctcaaatccggaaccttaaactcattgtctgaccaacaaaaagttcagcttgttcagttccatgtcttacctacactctataaccatgcctcagttttcaaaccgttagtaaccctttcccacgcagctggagatggccaaaacggaaattcctcttaacataactagctccggtaccaagttaca

SEQ ID NO: 94088 - DNA, 666 bp, Arabidopsis thaliana columbia
gaaaaagccaagaagcaagaaagttaacacaacagctaagaatggatttggagtttggaaggtttccaatattttcaatcctcgaagacatgcttgaagcccctgaagaacaaaccgagaagactcgtaacaacccttcaagagcttacatgcgagacgcaaaggcaatggctgctacaccagctgacgttatcgagcacccggatgcgtacgttttcgccgtggacatgcctggaatcaaaggagatgagattcaggtccagatagagaacgagaacgtgcttgtggtgagtggcaaaagacagagggacaacaaggagaatgaaggtgtgaagtttgtgaggatggagaggaggatggggaagtttatgaggaagtttcagttacctgataatgcagatttggagaagatctctccggcttgtaatggcggtgtgttgaaagtgactattccgaaacttcctcctcctgagccaagaaacccaaggcaaaacaaggtccaattcgcttgaggttgtttgtggtcgtgttttttttttttaatggattgaaccgaaaaaccaccaccccttggttttcgttttaaaatggaaaaaaaaaaaatttctctggtcaaaattttccttgtggtcaaacttcaaatcaatggagttttttctttccccc

SEQ ID NO: 94089 - DNA, 449 bp, Arabidopsis thaliana columbia
agggaacactggtacgcctgcaggtaccggtccggaattcccgggtggaccacgcgtgcgcccacgcgttcgcaatgatgctgttaatggttttgtggatgatggatggtcaccaatgggtagcgatggtgcagaggatgttactgtaatgataaacttgtcccctgggaagtttggtgggtctcactacggtaacttcattccttccaggctttggtagtggcgtgctttgtgccaaggcatctatgttgcttcagaacgttccacccgctgtgctggttcgattccttagtgaacaccgatctgaatgggctgattatggcgtggatgcttatgctgctgcatcgctcagagcaagtccttttgctgttccttgtgctagagctggggggttcccaagtaaccaagtcattcttcctcttgcgcagacagttgaacatgaagagtca

SEQ ID NO: 94090 - DNA, 498 bp, Arabidopsis thaliana columbia
  unsure (1)..(498): unsure at all n locations
tgggtggatgggattggacatcggtccagactcggtgaaaacattcaacgaagctctggataccacgcagacagtcatttggaatggaccaatgggagttttcgagtttgaaaagtttgcaaaaggaactgaggcggtagcgaataaactagcagagctaagcaaaaagggagtgacaacgataataggaggaggagactcggtggcagcagtggagaaagtgggagtagcaggagtcatgagtcacatctccacaggtggtggtgccagtttggagctcttggaaggcaaagtgcttcccggtgtcgtcgctcttgatgaagcaacgccagtcactgtttaacaacatctctttattacacctgaagggacccccctaaatgagtttcttcttcttattctgttgtaaatcaaagtctttgttggaccatcaaatccatagagaccgggcactctttttgtctccgggggaaaagataggaagagngggaaaaggaa

SEQ ID NO: 94091 - DNA, 443 bp, Arabidopsis thaliana columbia
cttttcgatcaaaagacatgatctttgtgaatgtgggcaacgattgtaagcagagggaacgcgaagaattatgatagcctcgcatcaacgataagacaaaatccataaactactctttcgatcatcaaatccaccggtggcgccgccgttacacgctcctcccgcgcctcctttggacacattccctccacatctgtctccgcacgtcgccttggcttctccgccgtcgttgactctcgtttctcggtccacgtggcgtccaaggtccactccgtgcgcggaaggggcgccaggggagtgattacgagggcgaatgaagagtgttggagatctgaattctgtagatttgaaggggaagaagggggttgttagagctgatcctcattgtacctctcgatgacaacctaaattttacttgctacacttgtattcagagccgtcat

SEQ ID NO: 94092 - DNA, 711 bp, Arabidopsis thaliana columbia
  unsure (1)..(711): unsure at all n locations
caccattcttacaaggcacaaggggtctttcaagttggttcgtcccttgtttaaagaagccaggcttgaatgggctccaaaactccttgccaaagttaaggccaagggagtctttttttggttgcaacagatgttgtagttgctgacaagtttgctcctgatgccaacagcaagattgtgcctgcatcaggcattgaggacggatggatgggactggacattggtccagactctatcaaaactttcaacgaagctctggacacaacacaaacagtcatttggaatggacctatgggagttttcgagatggaaaagtttgcggctggaacagaggcgatagcgaataaactagcagagctaagtgaaaaaggagtgacaacgataataggaggaggagactcagtggctgcagtggagaaagtaggagtagccaggagtcatgagtcacaatctccactggtggtggagccagcttggagctgttggaaggaaaagtacttcccggtgtgatcgcccttgatgaagcaatcccagtcactgtttagaaactcttaccatctataaggcaaacgctgtatacttaaaagagtttctttcgctttaaatctacctatgcaaaactttactatgtatcagagtcgcggcccccngaaangaaaactcacatattaaaattnnnnnnnnnnnnnnnnnnnnnnnnnnnnnnnnnnn

SEQ ID NO: 94093 - DNA, 663 bp, Arabidopsis thaliana columbia
  unsure (1)..(663): unsure at all n locations
gaaatattccaaactcataaaatctcaaatggctaataaataagaacattgtgagtcactctcgctgtttctcatctcctcatctttttatcttctttgattgatccacatggcttccgctgccgcaagttccgccttttcactccttaagtccaccggcgctgttgcttcctccgccggaactcgcgcacgtgcctcccttctgccaattccctctacctctgtttccgcgcgtcctctaggcttctccgccactctagattcccgtcgtttctctctccacgttgcttccaaagttgaatcggtgcgtgggaagggaagcagaggagtggtttctatggcgaagaagagcgtcggagatctgacctcagctgatttgaaggggaagaaggttttcgtgagagctgatctcaatgtacctctcgatgataatcagactatcactgacgataccagaatccgtgccgccattccaacgatcaagtatttgattgaaaattggtgctaaagttatcctctccactcatttgggaaggccaaagggggtaaccccaaagtttagtttgggcccttttgcccccaggggttcccngggtttttggaatttggggcaaggaagctgttcctttatttggccccaaggngaaanttggggggtttttc

SEQ ID NO: 94094 - DNA, 1815 bp, Arabidopsis thaliana columbia
  unsure (1)..(1815): unsure at all n locations
cagctctccnnnnnnnnnnnnnnnnnnnnnnnnnnnnnnnnnnncttttcgatcaaaagacatgatctttgtgaatgtgggcaacgattgtaagcagagggaaggcgaagaattatgataacctctcatcaacgataagacaaaatccataaactagtaatatcatccaatcctctcacttcttccttattccctcactttcactctcactatctgttgacttcacatggcttccaccgccgcaactgcagctctttcgatcatcaaatccaccggtggcgccgccgttacacgctcctcccgcgcctcctttggacacattccctccacatctgtctccgcacgtcgccttggcttctccgccgtcgttgactctcgtttctcggtccacgtggcgtccaaggtccactccgtgcgcggaaagggcgccaggggagtgattacgatggcgaagaagagtgttggagatctgaattctgtagatttgaaggggaagaaggtgtttgttagagctgatctcaatgtacctctcgatgacaaccagaatatcactgacgacactagaatcagagccgccattcccaccatcaagtttttgattgaaaatggtgctaaggtcatcctctccactcatttgggaaggccaaagggagtcaccccaaagtttagtttggctcctcttgtccccagattatcagagcttcttggtattgaggtcgtgaaagctgatgattgtattggcccagaagtggaaaccttggtggcttcccttcctgaaggtggagttttgcttcttgagaacgtcaggttttacaaggaggaagagaagaacgatcctgagtttgctaagaagcttgcttctctagctgacctttatgtcaatgatgctttcggaactgctcacagagctcatgcttctaccgaaggagtcactaagttcttgaagccttcagttgctggtttccttttgcaaaaggaactggactacctagttggtgctgtttcaaacccaaagagaccatttgcagccatagtgggtggttccaaagtctcatccaagattggagttattgaatcgcttctggagaagtgtgatattcttcttcttggtggtggaatgatcttcacattctacaaggcacagggtctttcagttggttcgtcccttgttgaagaagacaagcttgaattggctacagaactccttgccaaagctaaggccaaaggagtctctcttttgttgccaacagatgttgtagttgctgacaagtttgctcctgatgccaacagcaagattgtgcctgcatcaggcattgaggacggatggatgggactggacattggtccagactctatcaaaactttcaacgaagctctggacacaacacaaacagtcatttggaatggacctatgggagttttcgagatggaaaagtttgcggctggaacagaggcgatagcgaataaactagcagagctaagtgaaaaaggagtgacaacgataataggaggaggagactcagtggctgcagtggagaaagtaggagtagcaggagtcatgagtcacatctccactggtggtggagccagcttggagctgttggaaggaaaagtacttcccggtgtgatcgcccttgatgaagcaatcccagtcactgtttagaaactcttaccatctataaggcaaacgctgtatacttaaaagagtttctttcgctttaaatctacctatgcaaaacttaagggcggccgctctagaggatccaagcttacgtacgcgtgcatacgacgtcaagctgttatataagaacgtta

SEQ ID NO: 94095 - DNA, 414 bp, Arabidopsis thaliana columbia
gaagaagaagaatggagttattcaataatggaacggccgttagattacggagctgtcacgatacatacatctacgccgtcgaggatgaaaaaaccgtccgtcaaagctctgacggaacctcacggcaatcgctatggacggtggagatggttccacgtaaaccaaaattcatacgtctcaagagctgctacggcaagtatttaacggcgagcgagtcgtcgtttcttctgggaatgaccggcgcgaaagtcatccaaacgccgccgtttcgtcaagcggagcatgaaagcgactgggaaccaatcaaagaagagtcaacggttaaactcatgtcgtggaacgagaaatatttacgtgggaacggatgagctccgccgcggaggaactctgtgacgtgtgatcgtgagccgcaca

SEQ ID NO: 94096 - DNA, 481 bp, Arabidopsis thaliana columbia
cttaaaacgaaaccagaaatcacgagaagcattgttgtttctcacctctacagttacggcgcgaatatgacgagactacccctcttcgtcgtcctcctcctcttctccgcaagttgcatcactcgcacggcggcggagatcaaatctctcacaatctccgacgattctaggccgatgattctcttcgaaaagttcggattcactcagtccggccatgttagcgtctctatttcctctgtagcagtagtatcttcttcgtctgatccgatcccggatccatcgaggttagggttcttccttatgtcagaggaatcgcttctccaggtagtcttagagatcgagcaaaaccccaacttctgtgtactcgattccaattacgtcctccatctcttcacatttcacgatctctctcctccccctggttccaaatacgagcacttgtatccggtgatgtctccgaacgaatactctctcttcttcg

SEQ ID NO: 94097 - DNA, 585 bp, Arabidopsis thaliana columbia
  unsure (1)..(585): unsure at all n locations
ctgtcccaaaaccaaaagacttgagagtgtgtctttagagagagatcttctctcttttatcttacgactctcacttcttatctcaaatctacttcaactctatttccagtctccacattttcccacaaatttcaactcttgttctcttcctccaaagtaaaaaacaaaacactgcaagtgaggtttggttttggtgttatagaattatgaagagcgggaagcaatcttcgcaacctgaaaagggtacttccaggatcttgtcactgactgtcctgtttatcgcattttgcggtttctccttctacctcggtggtatattttgctctgagagagacaagattgtagccaaggatgtcacaaggacgactacaaaggctgtagcttcccctaaagaacctacagctactcctattcaaatcaaatcccgtttctttcccggagtgcgggtcagagttccaagattacacccggngaacggtccaaagaggtggagaagatggngncancgctaagttcttgggngcatggccncgggaatgaaagatgagggttgtcncacagagggntaacgcaaaagaggccntc

SEQ ID NO: 94098 - DNA, 845 bp, Arabidopsis thaliana columbia
  unsure (1)..(845): unsure at all n locations
tatcttcttccccatttctctgaaaaccctaatttctccatctctcaatctctctgtgtttgtatctctcatctctgtttgagagatgataaggtaacttcaaagcatcctcgtgaattcatcttgtaatttcaggattttaattcgagataaatggcgacaaatgcgtgccttgagtccgattcgcttctacctccacggaagcgtttactcgccggattcaagaaccagaactcgagaatcagcaatgaatctccgagtcctcctttcgcttcttcgtcctcgtctactacaacttcaaatggttcctctgcttcagcagttgtgcacactcatcatctcgaccatctactcaatgaccagactcggtccccggaagagcttgctcaggcgtcgaaagcaaccgctgctttagcggttaaggttgcaaaggcggcgagagctactgctaatgagaaggccatcattgcttctaaagcagtggctgcagccaagaatgcgttggaattgtttgcttcttttcccgcagctgagacggtttcttgtaaagagcctaggttgattcgagctataaacaattctcctaggaggtctttgacggnattgttcttggtcacagaaacaaggaagcaaaaagnacttctgactaggtacctnttgaaccggttggggaatnaattgtttncttgggtgtttgttggnttccanaattgaccggganccccggngtnaaacngggnaaggcttgcttctnattcncggttaaacccggctnaaagggggaaaacaaggggganggggngtagcccctttnnggggaaaaaaaaggggganggggttaaacc

SEQ ID NO: 94099 - DNA, 417 bp, Arabidopsis thaliana columbia
cactaccttctcttccaaaagtcgcctttttgaaaacacaaaaagacgaaaatgaccctattcaagaggccatgtctttacgtcagggatggacaaggaagatccagaagaggtacttagccgacgagccaagttcttgatttacaaaacacttcaagaagccgacttgatttctcggcgtgatcctcattcggcgtttatacggctgaagctgtatctgttgaaggtcaagatcggaaagaggttggctaagctacgccggagtgtggtatccgccgttaagatttggcggaattcgaaagcattctcataatggcgtgagagcgttgaagaagatgttccaaggtggtgcaacaactggactacctaggcctattttctcccttgaagtttgaaatttcatttatttatatttct

SEQ ID NO: 94100 - DNA, 782 bp, Arabidopsis thaliana columbia
gacacacactctctctctgatcattcaacttttcgaaattttgcttcatcgtcttcgtcatcgtctctctgttgaattcctcaaacaatgcctctttctctccgtctttctccttcgccgacggctttatctccgactaccggaggatttggtccatcgaggaaacagtgccggattccttactccggcgtcccgacgacgaagattggtttctgttctttggattctaggaaaagaggagattcctctgttgttaggtgtagcttagaaaccgttaatgtcagtgttggtcaggtgacggaggtcgataaggacacgttctggcccatcgttaaagccgccggtgaaaagcttgtcgtacttgacatgtacactcaatggtgtggtccatgtaaagtgattgcccctaaatacaaagctttatcagagaagtacgacgacgttgtgtttctaaagcttgactgcaatccagataaccggccattggcaaaagagctaggaataagagtggttccaactttcaagattttgaaggataacaaggttgtcaaggaagtgaccggtgcaaaatacgatgatctggttgcagcgattgaaacagcgaggtctgctgcttccggatgaaccagtctctcatgtctttatccataattgtttgtatgtaatgtgaaatctggtgttatccctatatataggtgatgaggaaacgtcagcaaaagattatcttgtatgtgtaaaagtttcaagaaatatgatcatgaaaataattatctttaggtttc

SEQ ID NO: 94101 - DNA, 1103 bp, Arabidopsis thaliana columbia
  unsure (1)..(1103): unsure at all n locations
gttcttgaagctccattccggtttgaaaaacgtccaagtaataacagagtcattgtccaaattgctctctttgatgtcctccccagggaatgaagaaacagatccgaggaagctataaaagcggcatcggaaaagcagaaattggcagcctcatgggtccaagctgcgttagtcactaacttatcgcccttctctgtctactccagcaaacaagccaaacttgctgcctccaggagcaaacccgtgatcatactcgagagcccgggtaataattcctctagtaaaacccgtgggaatattcaaaacaagccaacgattggatctaaactcgtagcacaaggaatgatccgtaaacacagggagaacagtagcagccagaaagccacctcggtagcagggtcagagtctccaccgtttaactgggtgaaaggggaatggtctaaacgaggcaactgatctggcagagaagttgcaaatggtttcacaagattggtttttgggtttcgtagagagattcttagacgctgacgtgattacatcatccagtctcagtctgtctgataatgggcagattgcggggatgctgtctcagctgaagagtgtgaatgattggttagacgagattggatcgaaagaggatgaagaagggttacaagaagtctctaaggaaacaatcgatcgattacggaagaagatctacgagtatctgctcacacatgtggagtcagcagctgcagcacttggtggtggtggtggctcagtctcttctcctagacctaaaccaatcgaaaccaaagcaaagagataaatgatgatgaagaagcttctacttgtttttttttctttcttgtatatatgaaaattggcggtcaatttcttctgtataattcaggcatcactaagaagcctaccgacgtgaaatgttggtattttttattcagtcagatactcactaaagagaacctattggtgcggccgatttcaacatattttttatccattaaaaaaaaaaaaaaaagnnnnnnnnnnnnnnnnnnnnnnnnnnnnnnnnnnnnnnnnnnnnnnntttnnnnnnnnnnnnnnnnnnnnnnnnnnnnnnnnnn

SEQ ID NO: 94102 - DNA, 444 bp, Arabidopsis thaliana columbia
attacaaccacggtgaactgaaacccttcctggcttaaatcttgggtagttgggttaaatctttgcttcaccgggaaagtatcttagaaattatatctctggatgatgaagacgagatttctggattggtatttgaagatcgcgattggatcggctattatcggcggaggcatggaattcttcatgatcaagactggtttctacgacaaggttactgtaatagaagcagagagacgggcgttggaaaattctcctgaagctcaagccatcagagaagctcttaatccttggaggaacaaggacgcagaaacaagcaaaaccccataaatcattcaaggagctctttaattctcgtttaagttcatttcactctcaaaactttcgcaaatgctgcttcagtttcttactgcttgaaagttcaatatttcattttagtattttttg

SEQ ID NO: 94103 - DNA, 973 bp, Arabidopsis thaliana columbia
  unsure (1)..(973): unsure at all n locations
caggctacnnnnnnnnnnnnnnnnnnnnnnnnnnnnnnnnnnnnnnnnnnnnnnnnnnnnnnnnnnnnnnnnccacgcgtccgcccacgcgtccgcccacgcgtccgatgcaccagtgcctggatggcaagctggtccacctcatgctatgcactatggcatgcagcagtataataaccccgtgccgtatcagaatgttccgcagccaggcaagtcaatgaacccttttgacttcagccctgggccgccatcacaaacacaaacggaaaatatgttcccttccatggctcctctgcaaggtgcattacctccttcaggcatgatgccttctcaaggagtacacaatcaattcaatataccttctcaaggctcagcccatccatctgcaatgccaccaaggtacatgccttctcaaataccaggaagcatgccacctagcaatgtaaacccaattggcgacataaacacgtcatatgacactcaacaaacatatcaaaattttggaagctcgtttgctgctgcagttcctttgaacccaccttctttccaatcaggaggaaacccatttgggtaagaaagagcgagaatattagctcacgagagctatgttatgcatgaggattgcgtttgtgttctaaggtgtagtataagactataaggaggtattaaatcgaatacaaacatgggttaaatagggtgaacgagggaaggtacgggccatgaacctgaagaagaattgggtttgtgagagtgttagattactgtattttttataagcatcaaaatgatttgaaataggtttgatatttattctttggtgtttctatattccatttccattttgttgtttgtccttcagaaaatcttcaggctcctcctgtgttgtatgattttgtataacagtttacacattgaccaaaaaaaaacccaaagggcggcacgctctagaggatccaagcttacgtacgcgtgc

SEQ ID NO: 94104 - DNA, 620 bp, Arabidopsis thaliana columbia
cacgcgtaacgctttcagtcttcactccaatacatatttcaggaaatactgtctcgtatcttgtctgggactagtacatcctgtgaaacatcttaactaaaacagaggttgcttacaagaacattacctttacagcaagttattcagaactctggacattatcacccgagtcgatcgacgtcagggccgcctaacagaaaatggtaggctctctcgaagtatccaagcctccagagcacaaggttgagtccaagatcgtcatagccgatgaagaagaagaggatgaaaacgacagtccaatcgaagaggtccgtttaaccgtaccgattaccgacgatccatctctaccagttttgacattccgtacatggttcttaggaatggtttcttgcgtggtactcgcgttcgtgaacaatttcttcggttaccggtcgaacccgctcacggtatcttcagtcgtggctcagatcatcactctccctctaggaaagctcatggccacgactctaccaacaacaaaactccgtttacctggtacaaattggtcgtgttcgttgaaccctggaccattcaacatgaaagaacatgtactgatcactatattcgctaataccggagct

SEQ ID NO: 94105 - DNA, 586 bp, Arabidopsis thaliana columbia
acccgcgcgacccgcacagtcggatgtctatcttttccaattttcccaccagaaagaaagcttctctctggttcgatatgaattcgactgagaattaattcttcaacaagcttgagagcaaagttatgctgcgtttaacttgttttacaccttctttttctcgagcgtgttgtcctttatttgcaatgatgctcaaagtcccatctgttcatctccaccatcctagattttctccatttcgtttctaccatacttccttacttgtgaaaggcaccagagatagacgtcttattcttgttgagcgtagcagacatctatgtacattgcctctcgctgctgctaaacaatcagcagcttctccttctgaaaacttatcgaggaaagcgaagaagaaagctattcaacagtctcctgaagcattgctgaaacaaaagctagatatgtgctctaagaaaggtgatgtcttggaagctcttcgcttgtatgatgaggcaagacgcaatggcgtgcagcttagccagtaccattataatgtgttgctttatgtatgctcgttggctgaggcagcaacagagtcgtctccaaa

SEQ ID NO: 94106 - DNA, 515 bp, Arabidopsis thaliana columbia
atacgactcactttagggaaagctcgtacgcctgcaggtaccggtccggaattcccgggtcgacccacgcgtccgcattaatcctcacaactctctatctctctctcgccccattctctatcataatgacaggtgccacaccggaaaaccgaacggccccgtcgccaccaccggtgaaacatgtgccggagtcagttctgccggctaaaccaccaaagaggaacaattatgcattcgcgtgtgctatcttagcttccatgacttctatcctccttggttatgatataggagtgatgagtggagcaatgatttatataaagagagatttgaagattaatgatttacaaatcgggattctcgctggaagcctcaacatctattcacttataggatcttgcgccgccggaagaacctctgactggattggtcggcgttacactatcgtgttggctggagccatattcttcgccggagctatccttatgggatgtcccctaactacgctttcctcatgt

SEQ ID NO: 94107 - DNA, 1618 bp, Arabidopsis thaliana columbia
  unsure (1)..(1618): unsure at all n locations
atacgactcactttagggaaagcacgtacgcctgcaggtaccggtccggaattcccggttcgacccacgcgtccggccggctggcaacctttctgccttctatgaagtatgcaaaggattagaacttgcaaggaatttccagtttcctgttttaagagagcctccacaatcttttcttacaacaatggaggaatatatgagagacgcacctcagatggtcgacgtcacatctgggccactgcttctgacctatacgcctgatgatggtcttacttctgaagatgttggaccttcacatgaagaacatgaaacatcatcgccttcagatagtgccgttgttccctctgaagaaacgcaactttcttcccagtctcctccttcagtagaaactccacagaacttcattgatactgatgatctattgggtctgcatgatgatacacctgatccgttagcaatcctggaccaaaatgcactagctttggccttagtttccaatgatgttgattcttcgccgtttagttttgggcaagcaagagatttggatccgtcaggatgggagcttgcgttggtcacaacacctagcaatgatatatctgcagccacagagagacagctggcgggtggattagacacgctcaccctgaacagtctatatgacgatggagccttgagagcagcccaacagcctgcctatggcgtcccagcttccaatccgtttgaggtccaagacctgtttgcattttcagacagtgtttcaccgccttcagccgtaaacaacccattcggtctctatgagccaacctatcatcaacaagagcagcagccacagctacaggttgcacccagccctgcaaatccttttggtgattttggggagtttccaatagttccggtttcagaaccacaaagcaccaccagttttggggcatttccagtaccggtttcagagccgtcaaacaccaccggctttggggagattccagtagtcccggttacagaaccgccaaacaccaccgcgtttggggaatttccagtggtgccggtttcagaaccacaaaacatcactgggtttggggcattaccagtaaccccggcttcagaaccatcaaacaccaccggttttggggaatttccagtagtgtcggtttcagcaccacaaaacaccactgggtttggggcattaccagtaatcccggtatcagaaccgtcaaagaccaccggtttgggggaatttccagtagtcccggtttcagaaccgcaaaacaccacgggttttggggagttcccggtaaacgcaggtgctcatgagcaacataacagcaacaaccccttcggcagcacgggcttcttgtgatcccatcttcgtatatttctcaaaatgctttatttgtctcatatgattctattgtttgtgagtagtaataaaatcacatcatcttctagtcttgcaaatcttgttctgctaatagagaaagactcctcgggattgattatataaatgaattttcattggtggaaaaaaaatgaaagatatatataactcattgtgttacattaacaaaataatttgaaaaaaaaaaaaaaaannnnnnnnnnnnnnnnnnnnnnnnnnnnt

SEQ ID NO: 94108 - DNA, 833 bp, Arabidopsis thaliana columbia
  unsure (1)..(833): unsure at all n locations
tgatacgctnnnnnnnnnnnnnnnnnnnnnnnnnnnnnnnnnnnnnnnnnnnnnnnnnnnnnnnnnnnnnnnnnnnnnnccacgcgtccgcccacgcgtccgaaaacagctacagaggttaccattgtgattgaagcctacagaactctaagagatcgtggtccgtattcagctgaacaagttgttagagattttcaaggcaaattcgggtttatgctctatgactgctccacacaaaatgtcttcgttgccggggnatgtagatgggagtgttcctctctactggggaaccgatgctgaaggacatcttgttgtttctgatgatgttgagactgtcaagaagggttgtggtaaatcctttgcgccattccctaaaggatgtttctttacctcatctggaggtttgaggagctatgagcatccatcaaatgagttaaagccgggtccaagggtagacagttcgggtgaggtttgcggtgtaacgtttaaagtggattctgaggccaagaaagaagcgatgcctagggttgggagtgttcagaattggtctaaacaaatctgaactagctgaaaaaggcctgttttattttttacttgttggactcctgtggctgtgttccacaaaattactcctttcccgaaaatctccccggaacccatttaaggactaaagggggttctaatggtaatggacctggacctgggaaccaagaaacttagaaataaaaaatttaataacgtctaaaaaaaaaaaaaaaaaaggcgcgccgctctagagggatcccaagcttacgtacgcgtgcatgcgacgtcatagctcttctatagtgtca

SEQ ID NO: 94109 - DNA, 1085 bp, Arabidopsis thaliana columbia
  unsure (1)..(1085): unsure at all n locations
tccgggtcgacccacgcgttcctggtgctctgtttcactgtgcgtgatcgggaagaagaagaaaatgttggcgattttcgacaagaacgtggcgaaaacacccgaggctcttcagggtcaagagggtggatcggtttgtgctcttaaagataggttcttgccgaaccatttctcctctgtttatcctggtgctgtcaccatcaatctcggatcttctggtttcattgcttgctctctcgagaaacagaaccctcttcttcccagattgtttgctgtggtggatgatatgttctgcatattccaaggacatatagagaacgttccaattcttaagcaacaatatggactaaccaaaacagctacagaggttaccattgtgattgaagcctacagaactctaagagatcgtggtccgtattcagctgaacaagttgttagagattttcaaggcaaattcgggtttatgctctatgactgctccacacaaaatgtcttccttgccggggatgtagatgggagtgttcctctctactggggaaccgatgctgaaggacatcttgttgtttctgatgatgttgagactgtcaagaagggttgtggtaaatcctttgcgccattccctaaaggatgtttctttacctcatctggaggtttgaggagctatgagcatccatcaaatgagttaaagccggtaccaagggtagacagttcgggtgaggtttgcggtgtaacgtttaaagtggattctgaggccaagaaagaagcgatgcctagggttgggagtgttcagaattggtctaaacaaatctgaactagctgaaaaaggcttgttttattttttacttgttggactcctgtggctgtgttccacagatttactcttttcctgatattctcactgtagccattctaaggactaatggtgctcttattgctattgtacctgtacttggtaacaaggaagctaagaataaaatattttataaacgtctaaaaaaaaaaaaaagcaaaagnnnnnnnnnnnnnnnnnnnnnnnnnnnnnnnnnnnnnnnnnnnnnnnnnnnnnnnnnnnnnnnnnnntcann

SEQ ID NO: 94110 - DNA, 518 bp, Arabidopsis thaliana columbia
  unsure (1)..(518): unsure at all n locations
nnnnnnnnnnnnnnnnnnnnnnnnnnnnnnnnnnnnnnnnnnnnnnnnnnnnnnnnnnnnnnnnnnnnnnnnnnnnccacgcgtccgcggacgcgtgggcgaagccgacttcacgtcacgattacttacttccacgttacattttgtcgtgttttcttccttccgtttccttctctggcaagtctgcttcgtacgtacgctctcgtcattcccacttcacactttctactttttaccaaatcctatcctcaactctaattcccaccatttctgatccacgatttcaaattgggtggttggaagcagtgtttgtgctgtaattggatctgatctgatcggattcgattgaaatttggatcccatggagaagcacgacgaggaaaacggtctttgcaaggcggaatctgttgatggtagccttgatgtttggagttgtcagaattctgattcttcttccgctgatcaccttgtcgttatggtccatgggatcttgggaagtacggatgattggaagtttg

SEQ ID NO: 94111 - DNA, 405 bp, Arabidopsis thaliana columbia
ggctccaaagattccaatcattgcagatgcagatactggtggaggaaatgctctcaatgttcaaagaaccgtcaaggacttaatcgcagcaggtgctgctggttgcttccttgaggaccaggcatggccaaagaggtgtggacatatgcgtggcaaagaggtcatacctgcggaggaacacgctgctaaaatagcatcagcaagagacgctattggagatgctgacttttttctaatcgctaggactgatgctcgtgcactttccgcaaaaacaggactttcagacgccattgaccgtgctaatctttatatggaggcaggagctgatgcttcctttgttgaggcaccgagggacgatgacgagcttaaggaaatcggaaggcgcacaaaaggttacagactgtg

SEQ ID NO: 94112 - DNA, 470 bp, Arabidopsis thaliana columbia
  unsure (1)..(470): unsure at all n locations
gattcaggtcggtgtcgccaccgcccttcttcgtgcttctcttccttctttgtcggatcgtcaggtttacagatcagctcttgtggaggatatgggtgaagaagacaccgcgacggtggatcagaacagtttcggtggtggcaaagattcattgcttcgtaatcgtcattcgtcgccattgccttcaccgacacagctttcttctaaagtgattacattgcctaccgtattaacccttggccgtgtagctgccgttccgattctcgtcgccaccttttacgttgattgctggtggggaagaactgctacgacaagtattttcattgcagcagccattacagattggcttgatgggtatattgcacggaagatgagatttgggttctgaatttgggtgcaatttttggatccagtggcagataagcttatggtagcagctacaatgatattgttttgcnctaaaccaatgg

SEQ ID NO: 94113 - DNA, 477 bp, Arabidopsis thaliana columbia
aaaatcaagatttgttgtgttggcgaagccacagagactgagtaatcgattcgattttgtttgcgtaatgatgatgacgatgccatgtgcatcgtgctcatcttagctttctcctctttctgggtttatctgtgcttaaggcaaaaaaagagtgctccttttttcatatcttcttcaaagtttcgtttttttttggtgtttattagaatctagaagttaacaattggagaatttggaattgggaaaataggggttagatatatctgtaagtgggttggttcttcttagcaagtgtttaactttgggagaggaagatgagaattacaagtgttgttatggttattggctatgagacttgtctctggtgtgagctgagatggtggtagatactttgatttaacgtcttggctatggagaatcatcatccttctactctattgtctatggattcaagtgcttcttctcatgaggagcttg

SEQ ID NO: 94114 - DNA, 651 bp, Arabidopsis thaliana columbia
acgcctgcaggtaccggtccggaattcccgggtcgacccacgcggccgagtcggctgcgagaagacgacagaaggggattcaccggttgttatatcgtcgattcatcgtcgtcgacggcgagtacttgtgacctccacacccagattaatcttctataactgattttatcgcttagacgatcacgatctcatcgattaatctgacaaatgaagcatgtagtaaagatcttgagcctgttggtggctatctctgccttctggattggtcttttgcaggctgcaattattcctcgaagccatacatggttgctaccgatctactttgttgtatccctcggatgctatggcctattaatggttggagtcgggctcatgcagtttcctacttgcccccaagaagcagttctgctgcagaaggatattgcagaggctaagggcttcttcaagcacaaaggggtagatgttggatcgaattgacacaaaggcttttatcagaccattcatcagagatatttttcgttattgacaaaagacttaactgtactgtttggaatttttgaatttaccagtgtcactgaggtaaaactcgtaaaaaaaaaaagataaaaaaaaaaagagcaaccgctctagaggatccaagcttacgtacgc

SEQ ID NO: 94115 - DNA, 533 bp, Arabidopsis thaliana columbia
tctcggacgcgtgggcggacgcgtgggctgtggaggaattgggtgagctcggtggggtttcatggttgctgaagataactcgagagaccgagtgcaagcgaaacaaagagaatgcgatagtgatactgcatactatatgtttcagcgacaggacaaagtggaaggagatcaaagaagaggagaatgctcatggaacgataacaaagctttcgcgtgaaggaacttcaagggcgcagaggaaagcaaacgggatattggacagactgagaaaagctatgaatctcactcatacagcctgagaaaagccttgaaatctgcaatgtaaattacctaaaatcttgtttcttttttttactttatttggctgtaagaatttttgtaaattattcatatctttaggatctgaatggttattggttttcgtatgtgagatgtaagtagagatctgtgtgaatagtttttgcgtttgatgtttctggagaaatcaatcaataaaatcaatgttggtggctttattcacaaaaaaaaaataa

SEQ ID NO: 94116 - DNA, 408 bp, Arabidopsis thaliana columbia
gtcacgacgaccctcacactacacactacacataaaattgaaagccccactgcgaatccaccacaaagcaaaagaaatttgtttgttattcgaatggagctcctgagcacgatcaatctcttagcaatagctctagtgcttcttgtagttccgaagatatatggagcttgtcggatccttgtttggcggccatggatgctatcgagaagattcaagaagcaaggaatctctggtccaaaatacaggatcttgtatgggaacctccgagagattaggaagatgaagaacgaagctaagcttatggttcttgatccaaactccaacgatatcgtccctcgcgtcttacctcatcttcagcaatggaagtctcaatatggagagacctttctttactggcaaggaacagat

SEQ ID NO: 94117 - DNA, 340 bp, Arabidopsis thaliana columbia
caaacatcttcgtctcttgaagattccaaaaaaaacaaatcaaaagctatgcaagatccatcacgacccgctacaggttacccatacccatacccatacccgaatccacaacaacaacaaccacccaccaacgggtacccaaaccccgccgccggaaccgcttacccctaccaaaaccacaacccatactacgcgccacaaccaaacccacgcgccgtcataatccgccgtctcttcatcgtcttcacaacattcctcctactcctaggtctaatcctcttcatcttcttcctaatcgttcgtcctcaactaccagacgttaacctaaactcactcttcg

SEQ ID NO: 94118 - DNA, 813 bp, Arabidopsis thaliana columbia
acgcgtccgatagaaagcaaacataaattctctgacaatcagaaaacaaaaaaaaatcagaacaactcttatcttcttcacgagactgactaaacaatcatagatttttccgttttttgggtttcgtctggtgttactctctccttctgagttatggtgaaataatggcagcagctgaagcaagagcagtgtggcaaagaacagttaatcgttgctttgtccaagaagacgctaaaagagctcccaagttaacttattgccaatcatcttcatcctcaactgcttcttcaactaagcaagtggaagtttctggttcttctcctcgagtttctgttgaaccacggactcaatcatcttgtgcaggtttcatgcctcttcctcgaaacccgaatttccctgatctgttaccccacaacaccagactgtggagtcatcctcatcatcagtttcaggtgaataagaagcagccattggaggatgaggttaacaatcaaggtgtatctgagaagaagtctgaattgggagctggagagaaacaaggaaagtcttttaattccgaaagctttcaagagtttatagagttgatggagacaagggagagttatggttcaactgggtatgatgagtcctctgagaaaaagttaagtgagctctcttttgatcctagctcgccgtggaatcttctctcgagtgagaaagctgcaccgtggtggcgaactacggataaagacgagttagcttccttggttgcacaaagatctctagactatgttgagaattgtgatttaccaacaccgcaaaagatgaaacgat

SEQ ID NO: 94119 - DNA, 496 bp, Arabidopsis thaliana columbia
aggggaatttctctctcctaaaaaacgctatcaaaaagaaaaacaaaagctatttgttctgttttgtaagaaaaaaagtagttagaggagaaaaaaaactcagtgccgagtcttgtgatactctgagccacaagaagtgtttttggtggaaggatctactgaactggtttgtaatatgggggaagatacaaaggcaaccattgagccaaccgcaaacaagactacttctcttgaaaagccatcagaggctatggctggaaaggagaatgctgggggtaaggaaacacaagaactggcgaaagatgaggatatggctgagccagacaatatggagatagatgctcagattaagaaagatgatgaaaaagctgagacggaagataaagagtcagaggttaagaaaaatgaagacaatgctgagactcaaaaaatggaagagaaggttgaggtcaccaaagatgagggacaagcagaggctaccaacatggatgaagat

SEQ ID NO: 94120 - DNA, 577 bp, Arabidopsis thaliana columbia
  unsure (1)..(577): unsure at all n locations
aaaggaattcactgtctctctttaagactaaccgatgaatattcctccaatgctcatgcccggagacagcttccttccccggagcttctccctgttctctcagacaatgcttaccaccattttgttctagctacagataatatcttagctgcatcggttgtggtctcatctgctgttcaatcatcttcaaaacccgagaaaattgtcttccatgttatcacagacaagaaaacctatgcgggtatgcattcttggtttgcactcaattctgttgctcctgcgattgttgaagtgaaaagcgttcatcagtttgattggttaacaagagagaatgttccagttcttgaagctgtggaaagccataacagtatcagaaattattaccatgggaatcatattgctggtgcaaacctcagcgaaacaacccntcgaacatttgcttcgaaactgcagtcaagaagtcccaaatacatatctttgctcaaccatcttagnatatatcttcccagagcttttttccggactttagncaagntagtngttcctnaggntggnnggtntaggtgttacaggnaag

SEQ ID NO: 94121 - DNA, 638 bp, Arabidopsis thaliana columbia
  unsure (1)..(638): unsure at all n locations
ctttatctctcatctctntttagacgtacaaaaaaatcagttttttaagtttcactctaatggcgtcaatttcgtcctttggctgcttccctcaatccacagcgctcgccggaacttcctccaccaccagatgccggacgactgtggctgctcgattagctgaccaatcagatgacttcgctcctcttcgttcttctggtgggaattgtggatgtgttaataattctggagagtttgatcgcagaaagttgttggtttcttctgttggtttgttgattggagcattgtcatacgattctaaagatggagactttgcatcaagcttctcaatttgctgacatgccagcgcttaaagggaaggattatggcaaaacaaaaatgaaggatccagattatacagaaacacagtctggtcttcagtataaggatttccgggtaggacctgggcctttagcaaaaaaggggggcaaagttgtggttgactggggcggttacacaatagggtactatggacgcatatttgaagctcgcaataaaacaaaagggggttcttttgagggcgatgataaggaatttttcaaatttaccttaggatccaatgaggtgatacctgcttttgaggaggctgtctctgggat

SEQ ID NO: 94122 - DNA, 463 bp, Arabidopsis thaliana columbia
atacttataaagtccaaatcttgaagtgcgtgcacggtgcaccacgaatccacgatccagtgagcagcagcaactccatctccggagctctagattcagataagaacaatggcgattccgatgcctactcgccagctattcatcgacggcgaatggagagaacccatcttgaagaagcgaatcccgatcgttaatccagctactgaagaggtcattggtgatattcctgcagctacaacggaggacgtggatgttgctgtcaacgctgctcgaagagcattatcaaggaataaagggaaagattgggccaaagcacctggagctgttcgtgctaagtatttacgtgctattgctgctaaggtaaatgaaagaaagacggatctggcaaagctcgaggcgcttgattgtggtaaaccattggatgaagcagtatgggatatggatgatgttgctggatgttttg

SEQ ID NO: 94123 - DNA, 719 bp, Arabidopsis thaliana columbia
  unsure (1)..(719): unsure at all n locations
ccgcgaaaagagagcccggagctcaggataggtctaacctaaaaacagggtgcaacattctgtattcacccgggaggaagagcgattatgaagagttgggaaagcttagggctcacggaattcgacatcgagccagcgagaatggcgcttcataggttcgggaacacatcttctggtggtatatggtatgttcttggctacatggaagctaagaacagactaaagaaaggtgagaagatactaatgatgagtatgggagctggattcgagtctaataattgtgtttgggaggttctaaaggatcttgatgataagaatgtttgggaagattcagttgatcgatatccggaattgtcgagaatccctaatccattcgttgagaagtatgattggatcaacgacgataccatgagcttcgttcgtgttgattgatcacaagtaagcagaaaataacaagatcgattctttttaatatatttgtcaatcaattattatatgaaatgtttctttatcaggcaatatttcgaactttggattatttggaatgtttagacggctatagtcgacgattgatttttattttttaaaatttgaaataaataattaaagcatgtttaattggcgttgttttgtaaaaaaaaaaaaaaagnnnnnnnnnnnnnnnnnnnnnnnnnnnnnnnnnnnnnnnnnnnnnnnnnnnnnnnnnnnnnnnngtgacc

SEQ ID NO: 94124 - DNA, 520 bp, Arabidopsis thaliana columbia
  unsure (1)..(520): unsure at all n locations
aggcgtccgggctagccaaaacaatctttttgagttgtcaaatcatcgacttgtacgaccaaatctcaaagctcaagagcttaaaaccttccaaaaatgtcgacactttgttcggacaactcgtgtccacgtgcttacccacggatacaaacatcgatgtcacaaatatgtgtgaagaagtcaaagacatgagagctaatctcatcaagctttgtggtgaagccgaagggtatttagagcaacacttctccacaattttgggatccttacaagaggacccaatcccactcgaccatttacacatctttccttactactccaactacctcaagctcggcacgcgcgagttcgatctcctgagccaacactcaagccatgtccccaccaagattgcnttcgtgggttcgggtccgatggctttnacancccatcggtattgggccaagttttacctccccaaaaaggnggttncacancttttgtnaatngnctttannngggnaacaaaatttggtttaaa

SEQ ID NO: 94125 - DNA, 1045 bp, Arabidopsis thaliana columbia
gggaaaccaatggtggaggagatgtacatggaggaaatgaaggagcaggcaaagaacatgggatccatggaaaagactcctttggatcaaagcaacgaagattctgcttcaaagtcaacaagtaaccaagaaaagagcccaatggcggacactaattaccatatgaatcccaatcacaacggtgacctagaaggcgtcactggaatgcaaggaagccccaagagactaagaaccagcgacgagacaatgatgcagccaataaatgcggatttcagctccaacgagaagctcacgatgaagattctagaagaacggcaagggataagatcagatggtggctaccctttcatgggtaatttcgggcaataccaaatggatgagatgtcaagatttgatgtagtctcagaccaggagctcatggcgcaaaggtactcaggaaacaacaatggcgtgtccctcacgttaggtttacctcattgtgatagcttgtcgtccacggaccatcagggtttcatgcagacccaccatgggattcctatagggagaagagtgaaaataggagaaacagaggaatatggacccgccaccatcaatggtggtagctcgaccacaaccgcacattcatcagcggcagctgccgcggcttacaatgggatgaacatacagaaccagaagagatatgtggctcagttattgcccgacttcgttgcataaacccatctctctagaaggagaaaccgaaacaggttattatatacgtttctagtttttaattagtatatagtttctcataccattgaaccaaaacaaagaacaaaatttaattttagtctttggttatatatggccgccggttgtatatcgattttgtaatttttttttttcgtttctattgggggatggatagggttatatatgtatatggattagttacgtgtaatagcttgcattgggtgtataccaaaatataaaataaaaaaaaaaaaaaaaagggcggccgctctagaggatccaagcttacgtacgcgtgcatgcgaagtaatag

SEQ ID NO: 94126 - DNA, 432 bp, Arabidopsis thaliana columbia
tttttatattttatatcaagtatgctcaagactaattcacatcttttaaaattaatcatagtcgacgtaagaaattccaacacggtttatagcacaataatcgtcgatttgtagatcaattgacatattaaccttatataatgtaaacataaataatattccgcagccagagacaatccttgccttttcagttctgtggaagatccttatgaattcagtttgtattgagaatatcataaaagattgcaggtttcttggtaactggagccagttcctcgactgcggcagctaaaccaaggacggtagcttcggcccaaggtcttcccattatttgtaatcctataggaagcccctctttatcataaccaaccgggactgatatggcagggaagccgaggagatttgcagctagaacgaagcgcattaaatcag

SEQ ID NO: 94127 - DNA, 470 bp, Arabidopsis thaliana columbia
tgcggcactaccacactgagtaggaccatactcgtattcagacaccagggtcagcgaagtctaatcaatgttctcagaaatgaaaccaaagtcttgatatctttagatctggctatcgaaaaacacactagcttcttctaatcagaatacctatggagactgtctctgttttgctcttcttcttcctcttccttctagcggcagaagcaaggtgcaccaagcggacaggttgcaaggatttcacctgcggagaacatgacttcaagttccctttctttaggacagacatgccatctcgatgcggtcttttcaagctgtactgcagtgcacatattccagagatacagcttgcaatagatgggaaatggtatacagtcaagagcgtctctcaagccaacacgataaccatcatcgacccgaggcttaaccaaaagctgacaacccgaagctgcagtgacttgtcaagcttc

SEQ ID NO: 94128 - DNA, 1466 bp, Arabidopsis thaliana columbia
ccacgcgtccgaagcaagatggagtcaagtgatcgttcaagtcaagcaaaagctttcgacgagacaaaaaccggcgtgaaagggcttgtggcttcgggaatcaaagagattccagccatgttccatacacctccggatactctaacaagcctgaaacaaacagcaccaccttcgcagcagctgacgatccccacggtggatctgaaaggaggaagcatggatttgatatcgcggcggagcgtggtggagaagattggagacgctgcggagagatggggattcttccaggtggtgaatcatgggatctcggtggaggtgatggagaggatgaaagaagggattcgcaggtttcacgagcaggacccggaagtgaagaaacggttctactctagggatcacactagagatgtgctttactacagcaacatcgatctccacacttgtaataaggctgcaaattggagagatacgctcgcctgttacatggcccccgatcctcccaagttacaggacttgcccgcggtttgcggggagattatgatggagtactcaaagcaactaatgactttaggtgaatttctctttgagcttctatctgaggctttgggattaaaccctaatcacctcaaggacatgggctgtgccaagtctcatatcatgtttggccaatactatccaccttgccctcagcctgaccttactttaggcataagcaagcacaccgatttctcgtttatcaccattcttcttcaggacaatatcggagggcttcaagttatccatgaccaatgctgggttgatgtttctcctgtccctggcgcccttgtcattaacatcggagatcttctccagcttataagcaatgacaaattcattagcgcggagcatagggtgatagcaaatggatcttctgaaccgcggatttcaatgccatgtttcgtcagcacgttcatgaagccgaatccacgaatatatggacccatcaaagaacttttgtcagaacaaaaccctgccaagtatagagacttaaccatcaccgagttttcaaacaccttcaggtcccaaacgatcagtcaccctgcgttacaccatttcaggatctgaagcaattatattggtggctctgctcggtcttcatctcaaagtaactttcgtgaaaccagcttcttttttctttctcaaaaggcataaggatatttgtaacattcaaataaggtacacaatgaaaactactactacttacttacttcatcttccagccgtgatgtaataaaatttgcgaggaactttcttgttttaagtcctcgtgttaccattttcatctacgaactttggggattagattccccctcttttgaaccttgttttatgttgtatcacgaaaaaagcttattggcctcatttatcatcatcatccaccgatgatatatcgtttaattatatgttcatcaaaaaaaaaaaaaaag

SEQ ID NO: 94129 - DNA, 436 bp, Arabidopsis thaliana columbia
cgtctttccgtcgtccactgtctctctctctctctcgcgacgcagatggcgattcgtcgaatattttagctaatcctctctcttaatctctttgaacatttttccccaaattcgccgcagtgaatactttctcttcccgtaaatctccaaaaatcgagttttttttattacttctcaattgaatttgcttcttccgattgatctcttaattgattcgcttgtgggttggatttgaatcctctcttactttccaaaggtcataccttttcacagatctatctttgaaattgtgaagaagaagaagaagaagacgatgattcgactaagaacatacgcaggccttagttttatggcaactttggctgtaatttatcatgcattcagcagcagaggccaattttaccctgcgactgtttatctatcaacctcaaagatc

SEQ ID NO: 94130 - DNA, 811 bp, Arabidopsis thaliana columbia
  unsure (1)..(811): unsure at all n locations
ttttttaagccaagccaggccccaaatagggaaaagggcccgttttttttaaggtaacctacccaatggtccaaaggggggttgaaataactccaaaaggttggtttaaactaaatgcaactttcagcttttgatccccaagaaatgttaaaccaggtttgtttcgggaaatgtaagtggtgttttaaaatgggtcaatggttgtagtcacccactcggatctagaggggctataatgatgatgactcacggtcacggaggtcagtgaaagttaatgggaatgagctatgggcggcagctgcagatttgagcatggtgtacagggtgaaagtggtggggcaggctgcgatggcgaggatatcgtgtctgtggctgggcttgcgtaaggaccaaaagctttctgggaaaaatctttccatgggaggcataagcgtcgacatttctgtctactgatgatgatggcgaagaatgaatgcaggtgagtctgctggcgagtgagtgaatataccttattcactgtttctccccagtagaaaaaaaaagtctctaaataaaaaaatgggtcaaattaggtatagaagtaagcaagggtttgtaaatttgaaaaaaaaaaaacttggttttgtcgtctgggtattgtaattaaatactaccttgtccctcatttgcctttgatgaggataaacatgaattagtctctccttctcaagtaaaaaaaaaaaaaaaaaaaaaaaagaaaaaaaagggcggccgctnnnnnnnnnnnnnnnnnnnnnnnnnnnnnnnnnnnnnnnnnnnnnnnnaacggaat

SEQ ID NO: 94131 - DNA, 712 bp, Arabidopsis thaliana columbia
  unsure (1)..(712): unsure at all n locations
caacactcttgaaaacagagccatggaacattctctcatcatcctcctcttcaccgtcctcctcctcctcaccaccactcccggaatcctatctcagccctctccagccgtcgctccggccccaccaggacccacaaacgttaccaaaatcctagagaaagctggtcaattcaccgtcttcatccgactcctcaaatccactggagtcgctaaccaactctacggccaactaaacaactccgacaatggaatcactatattcgcaccgagtgattcctcgttcaccggtctcaaagccgggaccctaaattcgttaaccgatgagcaacaagtagagcttattcagtttcatgtcataccaagttacgtctcttcctcaaacttccaaacaataagtaaccctctccggactcaggccggtgactccgccgatggacattttcctctcaacgttaccatcagtggcaataccgtaaatatcacgtccggcgtaaccaacaccaccgtctccggcaatgtctacagcgatggacagctcgctgtttatnaggtcgntaaggttttgcttccacaacaagttttcgntcctngtcctcttgttncgggtccggttccgtctgtatcggaatnaagntggnggagggtnanagtntnngtnccgttntgtttttcagggggtgttttggttgntttggggaaatnntggttnttt

SEQ ID NO: 94132 - DNA, 401 bp, Arabidopsis thaliana columbia
acttttcattgcaacgaagtgggctcttttcttactcttaactgccattgaaccagggcttgtcagttcttgacagagaacctcttttcattggcatatctgtcagctccactgaaaaggcttatagaacagttgatattgggccagatgctgaaaacaagatagagattccggaagttttggggtgagaagtctgatctaaggaggtttaaagatggaagaatatctgaaagcacagtttgggagactcagcagtggaccaaacatcttatcatgaaacaaattgttgaatatatccttaagcggcatctttcacttgacgtccgatgacattgtacaattagtggatcaacttgatttctctctaaactatgggggcaaagacccaatatctttatctg

SEQ ID NO: 94133 - DNA, 625 bp, Arabidopsis thaliana columbia
  unsure (1)..(625): unsure at all n locations
nnnnnnnnnnnnnnnnnnnnnnnnnnnnnnnnnnnnnnnnnnnnnnnnnnnnnnnnnnnnnnnnnnnnnnccacgcgtccgtttaatccgtgggatggcttcatcctctaaggatctacggagttacatgattcagttaccgcctttaggggaccctgtagtgcccgaaatgctgttgaagatactagaaccttatcggaaagaaggttgcttgctggacgatgaaagagcaaaactttacgctgatgtggtcaagaaaggttatgctgcaagatttgcttttgcagcttctgtttttggtgaaacctcagaagcacttttctggttgcaacttcctcaagccattcgccatctgatgaacaagctaacgagaaggtctccgcagaaaatctcttcccctactttagactcaggagctgatgaagtagctatgccgagtaaaataccatctactggattatcgtcacctgaagccaggaagatagactctatgtgtgatggttcacttagattgatggccttttgagcgagaagaattacggacgcgtgccaatgaacgtcttccttggcatgaaaaattagacggagaagattgcattcagaaacaagtacacgagctgatatc

SEQ ID NO: 94134 - DNA, 580 bp, Arabidopsis thaliana columbia
  unsure (1)..(580): unsure at all n locations
gggtaaaactgtaaagacagagagaagagcactccccagtctcagtggtgcggtgaggagagcttcgttgtcttccccattgcaattagggttttcaaaacgggtaatcgaattcggtggtgctcggctttgaaattgaggatgagatcctttccacttccttctacctgctgacaatgggcaactgcggtactagagacgaggctgccgtcttcactcctcaagctcaagcccaacagctccagaagaagcactcccgatccgtctcagatctgagcgatccatccactcctcgcttccgagacgactctcgcactcctatttcgtatgcccaagtcatcccctttactttgtttgagcttgagaccatcaccaagagcttccgcccagattatatactcggagaaggtggtttcggtaccgtctacaagggttacattgatgacaatctccgcgttcggcctcaagtctctccctgttgccgtcaaggtccttaacaaggagggactccagggtcaccgtgaatggcttacagaggtcaacttcctcggccaactccgtcatcncaacctcgtcaagc

SEQ ID NO: 94135 - DNA, 392 bp, Arabidopsis thaliana columbia
ggaggatttctaatgcgagatctaaaaacatatctttccgtagcaccggtactaagtactctatggttcggttcgttagcaggtttattaatagagattaatcgtttatttccagatgcattaacatttccctttttttcattctagttattaacatcagaaaggggtgaaaaatttagagatacaatcaacaatcggggactaacccccccaccttttctaattagtagaataaattagaaaaggtgggggggggggggaaaggtcgttaattcgtgggttcaggatccaatgaaattaggtatagaacgaatataagtgttgctagggaacctttcagatacttaaaaaaactacggtacaaagattttaaatatagttttcacaaaatc

SEQ ID NO: 94136 - DNA, 749 bp, Arabidopsis thaliana columbia
ggaaaaaaaaacttttccatggggctcgtaattttcttggcactaattgtcttaatccttattattgggctcaggatattcaaagcttggatgattcttgtttggcatccatttgtgttgaccagaagactcaaaaaccaaggaatctcaggcccaaattacagaatcttttacggaaacctcagcgagataaagaagatgaagagagaatctcatctttcgattcttgatcctagctccaatgatattttccctcgtattcttcctcattatcaaaagcgtgggatattattaggagagacttttctttactggaacggaacagagccaaggatatgcatctcagatcctgaacttgcaaaaactatgttgtcgaacaagttaggtttctttgtcaaatcaaaggcaagacctgaggctgttaaacttgtcggctccaaaggacttgtctttatcgaaggtgctgattgggttcgccatagaagaatcttgaaccctgctttctccatcgataggctcaagatcatgacgaccgtgatggttgattgtacgctcaagatgttagaggagtggagaaaagagagcactaaggaagaaacagagcacccgaagattaaaaaggaaatgaacgaagagttccaaagactaacagctgatataatagcaacctctgcgtttggaagcagttacgtcgaaggaatcgaagtgtttagatcacatatggagcttaaaaggtgttatacaacttc

SEQ ID NO: 94137 - DNA, 558 bp, Arabidopsis thaliana columbia
tatggggacagctggtacgcctgcaggtaccggtccggaattcccgggtcgacccacgcgtccgattttagttttatattaccaaaagaaaaaaaccttatcccttctctctctctttcttctttcctctattggctgccatggcgatttctactattctctgagtctgtgatcttaaagatttgatgagacagaaacccagaaactgaaaaacaaaaacccaactcgtgatatttcgttccgaccaaatctgtctgatttgtgatctgaacaaagtacggtaatggagttgatggctaaaccaaccttctccatcgaagtctctcaatacggaaccaccgatctaccggcgacggagaaagcctcctcttcctcttcctctttcgagacaacaaacgaagaaggagtagaggaatctggtctaagtcggatctggtcaggacaaacggcggattactcatcggatagttcatcattcggaactcccggggattgcgaagaagacgaaaaagaaagcgaaaacgaaaacgatgacgtttcatcctaggaggctaggct

SEQ ID NO: 94138 - DNA, 381 bp, Arabidopsis thaliana columbia
tcggtttcttcaccaaacgtatcaaaccaaagcaaagttctttcttcttcttctcttgcaccaatacagacgaaaaaaaactcacgaattagtgtctgatgatgctagtggcctaattcgagcttgagctgaggattttgattcaggttttggggtcatgcttttgtctcaagagcacaaaattctcttcaatgggggacgtaaatatgtaatcatggagaagaaatatgtattttcatttgatatcacatctcttgtctgcgttggtctgcttgcaacttccttcaacattgagttaatgtcttcacttcgaccaccgattaatggaactttatcaagttttcccaaaaatgattcgaacgttgtaggaaaacaacctcg

SEQ ID NO: 94139 - DNA, 420 bp, Arabidopsis thaliana columbia
agattattcagtctcttggtccagatccgaccttggaccgtcgtgattctgaatctacacccgctggtctgactaatttgggtgctacttgttatgccaacagtatacttcagtgtttgtacatgaatactgctttccgagaaggagttttttctgttgaggttcatgtcttgaagcagaatccagtcttggatcagattgctcggctttttgcacagttgcatgctagccaaaagtcctttgttgattctgatgcttttgtcaagacgttggagttggataatggggttcaacaggatacccatgagttcttgacattgcttctttccttgcttgagcgttgcttactccattctggagtcaaagccaaaacaatagttcaagatcttttcagtggtagtgtctcgcatgtcaccacgt

SEQ ID NO: 94140 - DNA, 547 bp, Arabidopsis thaliana columbia
  unsure (1)..(547): unsure at all n locations
tcagaaaatggctatggctacgcgagcgattcgataccagttaccgtcaccgagatttagagctcctagatgcgaatcatcggaaccgattaagcagattcagatccagcaacgaccaagaggtggcgatttagccgagaacgggaagatcgtgctccaaccaaggctttgcacgctgagatcttatggatctgatatggtcatcgctaaaaaggacggcggagatggtggaggaggaggatctgatgttgagttagcgtctccgttttttgagacgcttacggattacatagagagttcgaagaagagtcaggatttcgaaaccatctccggtagactcgccatgattgtatttgcggcgacggtgacggaggagattgttacggggaactcgttgtttaagaaactagatgtgggaaggatttaagttaagctatttgagcttgtntcccccncgattggatccccgngnntntttctttgtnacggnttntcggaccaagtcgacgggntttacaattagttnaactgtcattacccgtggggc

SEQ ID NO: 94141 - DNA, 1151 bp, Arabidopsis thaliana columbia
  unsure (1)..(1151): unsure at all n locations
cactgtcacagcgagagactcatacaacttccttgtcaactggttcaagagatttccccagtacaagtcacacgacttctacattgccggagaaagctacgccggccattacgtcccacaactttcggagctcatctacaaagaaaacaagattgcgtcgaagaaagatttcattaatctcaagggtttaatgataggaaacgcgttattggatgacgaaacggatcaaaaggggatgatagaatatgcatgggatcacgcggtgatatcagatgcattgtacgagaaagttaataaaaactgcgatttcaaacaaaaacttgtgaccaaggaatgcaacgacgctttagatgagtattttgatgtatacaagatccttgacatgtacagtctgtacgctccaaagtgtgtccccacctccacgaactcctctacttctcattcagtcgccggaaaccgccccctacccgcattccgaagcattctacgaccccgtctcatctctcacaatgaaggatggaggaggatggccgccgggtacgatccatgtgcatcagagtatacagaaaaatatatgaacagaaaagatgttcaggaggcacttcacgctaatgtcaccaacatctcttacccttggactcattgcagtgacactgtctcattctggtctgacgctcccgcttctatgcttccaaccttaagaacacttgtttcagcgggattacgcgtatgggttttcagttgggatacaggcgggcggatccccgtgccgcgcaccaaaaaatcccttaaaaaggtaagttttaaaaaaagtccaagctgggccccctgggaccaccaactacaaggccgaaggttgaccgttgaagtataccgtttaaaggttggtacgggtaaaagaaccggaccaccaggttctgcctttaaaaccaaaagaagttcttaagctcattcttcatttttaggccattaagaaactccgaccttttcccttttgaaattttccctacccccagatttaaggttcttaaaataatcctaaaaccaataataaccggatttgaccaaaaaaaaaaaaaaaaggcggcccgctctaaaggatccaagcttacgtacgcgtgcatgcgacgtcatagctctnctataggtca

SEQ ID NO: 94142 - DNA, 1211 bp, Arabidopsis thaliana columbia
  unsure (1)..(1211): unsure at all n locations
cgctctatacgactcactttanggaaagctggtacgcctgcaggtaccggtccggaattcccgggtcgtacccacgcgtccgttcgattccccattgtaccggatttgatagaggatgaagaagaagaagatgatgagggtaagaagctcgttgaagaagaaatcgaagatggagagcagaagacgatgaaggagttaatagatctggaatcgagaaatcaacaactgaagaacaacggcaaagattcggtttttagcagaacactcaggaagttttcactcaaacatcatcgaaaaattccagattccgggaacagtcttggtcgtcgttcatgtgatgtagatcctaggttgtctcttgacgcaggtcgagtctctttcgacgagcctagagcttcatgggatggatgtttgattggaaagacatatccaaagctgatacctttgtcctctgtgactgaagacgttaaagcctcgccggagaagataaccggtgagaaggtagaggaagatgagaagaacaatccaggtgggacagctcaaacgagggattactacttggattcacgaaggagaagaagctttgatcgatcatcgagacatggtttgcttgaagttgatgaattgaaagctatttctaatgctaaggtatcacctgaaactgttggtttgtttcatggagcgaagttgcttgttactgagagggaacttagggattcgaattggtattctattaagaattacaaaccggagagcttggagttaggttctaaaggtgttggttgcgttgctgctggtgaggtgaagaagcatgatggttttgggttgaagaagagcggaaagaactggtctaaaggatggaacttttggggattgattcagaggaaaactgatgtggcgaagaacgaaatgaaaaccgagcaaagtttgaaacttggaggaaatactatggagggttctcttgctgagtctttgttgaagcttaagagagtggcttaaggagaaaccaatggtgatgtcagtgagaaactcataagaagttacagcgttagtgcgagaaagtcttgtgatggtatgttacgtggtgcttctattgataatggctttgaaggtggaagaagctcttgggatgggctatttcatggctctattactggtgtcgagactggcagaagaagcttgtgtgaagacagaatgtttcatggcgttgt

SEQ ID NO: 94143 - DNA, 598 bp, Arabidopsis thaliana columbia
tcttgtgatggtatgttacgtggtgcttctattgttaatggcttgaaggtggaagaagctcttgtgatggtctatttcatggctctataactggtgttgagactggaagaagaagcttgtgtgaagacggaatgtttcatggcgttgaaggcaaacggaatcatcttctccagagtgatgacaagcttggtacttactcgcctgacaacctcagaaatggtatggttagattctacttgacgccattaaacagccatatgacaagcaagtccggtaaaagtaggctgatgaattagtctgatctctgattgttcagttcatgatggactatattcaaactgtgttgtaattagcaattacccttgtgtgttacttatttctcccactgttctatagatatatgaactaaaatcatatgaccatgttgttctctcttctttttccttttctactttttatgtgtattaatgctcttaaagagttcaatacaatagtgattttgtttaaaaaaaaaaaaaaaaaaagggcggcccgctctagaggatcccaagcttacgtacgcgtgcatgcgacgtcatagctctgctcatagttgtcc

SEQ ID NO: 94144 - DNA, 1765 bp, Arabidopsis thaliana columbia
ctctccagagaagttcttaatttctcctgccaagctgattaagagctctaggaaatggccgaacaacaactaggagtgctaaaggcactcgatgttgcgaagacgcaactttatcatttcacggcgattgtcatcgccggtatgggtttctttaccgatgcctacgatcttttttgcgtgtccttggtgacgaaactccttggccgcatctactatttcaatccggagtcagcgaagcctggctcacttccccctcatgttgcggccgcggtcaacggtgtggccctttgtggaaccctttctggtcaactcttcttcggttggctcggtgacaaactcggacggaaaaaagtgtacggtctcactttggtaatgatgatcttgtgctctgtcgcttctggtctctcttttggccacgaagccaagggtgtcatgaccaccctttgcttcttcaggttttggttgggatttggtattggaggtgactacccactttctgccaccatcatgtctgaatacgcaaacaagaagacccgtggggctttcatcgcagctgtcttcgccatgcaaggtgtcggtatcttggctggaggtttcgtggcactcgcagtatcttctatattcgacaaaaagttcccagctccaacatatgcagtaaacagggccctctcaacgcctcctcaagttgactacatttggcgaatcatcgtcatgtttggtgctttacccgcagctttgacttactactggcgtatgaagatgcctgaaactgcccgttacaccgctttggttgccaagaacatcaaacaagccacagccgacatgtccaaggtcttacaaacagatatcgagcttgaggaaagggtggaggatgacgtcaaagaccccaaacaaaactatggcttgttctccaaggaattccttagacgccatgggcttcatctccttggaactacctccacatggtttttgcttgacattgccttctacagccaaaacttgttccagaaggatattttctcggccatcggatggatcccaaaggcagccaccatgaacgccacccatgaggttttcaggattgctagggctcagactcttatcgccctttgcagtacagtcccaggctactggttcacagttgcgtttattgataccattggaaggtttaagatccaactaaatggatttttcatgatgaccgtgtttatgtttgccattgccttcccttacaaccactggatcaaaccagaaaaccgtatcggatttgtggttatgtactctcttactttcttcttcgccaattttggtccaaatgcaaccacttttattgtccctgctgagatattcccggccaggctaaggtctacatgtcatggaatatcagccgcggctggtaaggctggagccattgttggagcctttgggttcctatatgcggctcaatcacaagacaaggccaaggtagacgcaggatacccaccaggcatcggagttaagaactcattgatcatgcttggtgttcttaactttatcggtatgctcttcaccttccttgtcccagagcccaaaggcaagtcccttgaagaactctctggtgaggctgaggttagccatgacgagaaataattatgtatgtttattttgttatttggagtgcgatgtttggttttgttttcattttattggctcgttgaccttaagttatgatgttataagaatatttatgatatcatttaaatctaaaaaaaaaaaaaaaaatccg

SEQ ID NO: 94145 - DNA, 1146 bp, Arabidopsis thaliana columbia
  unsure (1)..(1146): unsure at all n locations
cgactcactatttggaaagctggaccgcctgcaggtaccggtccggaattcccgggtcgtcccacgcgtgcgcggacgcgtccgcccacgcgtccgcccacgcgtccgcccacgcgtccgcccacgcgtccgcagactcagagagtcacaaagtgtgtgtagcagcaatggcgtctgttgcttcttcaactactctcatctcttctccctcttctagggtttttccagcaaagtcttcactttcctctccatctgtttctttccttcgaaccctttcttctccttccgcatctgcttctctccgctccggatttgctcgacgctcttccctcagctccacttctcgtcggagctttgctgtcaaagcccaggccgatgatcttccactggttggaaacaaggcgcctgattttgaggcagaggctgtgtttgatcaagagttcatcaaggttaagctctctgattacattggaaagaagtatgtgattctctttttctacccattggactttactttcgtctgcccaacagagattactgccttcagtgaccggcattcagaatttgagaagttgaacaccgaagtattaggtgtttctgtcgatagtgtgttctctcaccttgcatgggtccaaacagacaggaaatctggagggcttggtgatctgaactatccccttatttcagatgtcactaaatcaatctcaaagtcgttcggagtgctcatccatgatcagggaatagcactgagaggacttttcataatcgacaaggaaggagtgatccaacattccaccatcaacaatcttggtattggccgaagcgttgatgagacaatgagaaccctccaggcattacagtacatccaggaaaacccggatgaagtctgcccagcaggatggaagccgggtgagaagtcaatgaaacccgacccaaaactcagcaaagagtacttctcagctatttagaaactctactatgatagcaaaaaggtacaatctttgttatatgtgagcagagttttttttcttgtacgctaaaacaatcctttgtttgattctcactttgtccccaaaattataataaaaaactttttccgttgaannnnnnnnnnnnnnnnnnnnnnnnnnnnnnnnnnnnnnnnnn

SEQ ID NO: 94146 - DNA, 640 bp, Arabidopsis thaliana columbia
ctgttcgagttgtcaggtctcacaaggagaagcgttctgcatacgcccctgaggaaggagtgagatatgatggggtttacaggattgagaagtgctggcgcaaagttggagtacagggttcttttaaggtctgtcgttacctgttcgttagatgtgacaatgagccagctccatggaccagtgatgagaatggagatcgtccaagacctatccctaatattccagagcttaatatggccaccgacctgtttgagagaaaagaaactccatcatgggattttgatgaaggtgagggttgtcggaaatggatgaagccgccacctgcaagtaaaaagtcagtgaatgttttggctcctgaggagaggaaaaatttgaggaaagccataaaggcggcacactcgaataccatgagggcaagacttctgaaagaatttaagtgccagatctgtcagcaagtgttgactcttcctgtgacaacaccctgtgctcataacttctgcaaggcttgcttagaagcgaaatttgctgggaaaactcttgtgagagagagaagcacaggtggacggacactacacttaagaagaatgctctgaactgtccttgttgccaacagacatatttgttttttgcagaacccctc

SEQ ID NO: 94147 - DNA, 963 bp, Arabidopsis thaliana columbia
  unsure (1)..(963): unsure at all n locations
gaaaaggagtctttggctaaaccgcagaagaggaaaagtcaaaaagaagtggacctaggtggtcagagtgcaactgtaccagcaacaaaaaacgttaaagcagagaatggaaaaacagctgattcagataaagaagagacagaagatgccaaaccactgaagccgaaagtttatagagacgagtgtacagcttttatttcgaatctcagtgtcaaggcacaagaggaagatatacgtaaattctttggtgatgatggtggggttgattccattcgcattctccatcacaaagacactggaaaaccaaggggactggcatatgctgattttgtggatgatgaacaccttgcagcagctatagcaaagaacagaaagatgttttttggtaagaagatcagcatagcacggtcanatccaaagaagggtaaaaaagaattcactcggcgtggaaatgatggttctgggaattcaaaggacccttcccctgatatctgagaaggcgaaagcaccacttggtggagaaactgagggtgaaaggaaaggaaatgaagtggaagtgaggggtaagaacacgtttgctgtcccaagaaatgttaaaccactcggctacacgacacctaaacccagcgcagatgagacaccaaaatcaaatgatgagttcaggaatatgttccttaaaaagtgagacttttgcttggtccctatcttccttcccttagatacttgtcttgttctacttttcggaagtaatcttatgttgtagaccagcaacatcggatctgctactctcttttgtcaagataactagttgagcttctatataactaatatataaatttaagtcttgctagacgacccatgttaataaaaaaaaaaaaaaaagnnnnnnnnnnnnnnnnnnnnnnnnnnnnnnnnnnnnnnnnnnnnnnnnnnnnnnnnnnnnnnnnntgtcctaaaacaatc

SEQ ID NO: 94148 - DNA, 436 bp, Arabidopsis thaliana columbia
tctttctcttctcattcatttgttctttcttcagagaaaaacaaaaaacagagcatttttttttggtcaagagcaagaaaaaacagagcatacttttgcaaaaagcagagcttggagcgctttcttgtcatctaaaattcaaaggcagagacgatgggagatgtagttttgttcatagatgaaacatatttgaaatcgagttttaatcgctgtagaatctgtcacgaagaagaagctgagagctactttgaagctccttgttcttgttcaggaaccatcaagttcgctcacagagattgcatacaacgatggtgtgatgagaaaggaaacacaatttgtgaaatttgtctccaggagtataaacctggatacaccacaacttcaaaaccatctcgatttattgaaacagcagtcacaatcagagataatttacaca

SEQ ID NO: 94149 - DNA, 551 bp, Arabidopsis thaliana columbia
  unsure (1)..(551): unsure at all n locations
nnnnnnnnnnnnnnnnnnnnnnnnnnnnnnnnnnnnnnnnnnnnnnnnnnnnnnnnnnnnnnnnnnnnnccacgcgtccgctttaaacctcttagagaagcacttaaagatccaggcgactttcttctaagtgacttttcaaagtttgaccgaccacctcttctccacttagcattccaagcacttgataggttttcgtctcaagcaggccgatttccgtttgctggttcagaagaagatgctcagaaactagtggaaattgcagttgacattaatgagggtttgggtgatgcaaggttggaagatgtcaactctaaactgttgcggcatttggcctttggatccagggctgttctgaatcctatggctgcaatgtttggtggcattgttgggcaggaggttgtcaaggcatgctctgggaaattccatcctatctttcagttcttttactttgattcggtggagtcactccccaaggaacctcttgatgcatcagagtttagaccacaaaatagccgttacgatgcacagatctctgtatttgggtctac

SEQ ID NO: 94150 - DNA, 599 bp, Arabidopsis thaliana columbia
  unsure (1)..(599): unsure at all n locations
cgtccgggcaactttatttttaacaatcctctttgtccactgtcctcttcctcatcctccgtgtcttctttcaccgtcgcaaccgcagccacaacaaccgtcttccaccggggccaaacccatggcccatcatcggaaacctccctcacatgggcactaagcctcatcgaaccctttccgccatggttactacttacggccctatcctccaccgtccgactagggttcgtagacgtcgtggtcgccgcttctaaatccgtggccgagcagttcttgaaaatacacgacgccaatttcgctagccgaccaccaaactcaggagctaaacacatggcatataactatcaagatcttgtctttgcaccttacggacaccgatggagactgttgagaaagattagttctgttcatctattttcagctaaagctctcgaagatttcaaacatgttcgacaggaagaggttggaacgctaacgcgggagctagtgcgtgttggcacgaaacccgtgaatntaggccagttggtgaacatgtgtgtagtcaacgctctaggacgagagatgatcggacggcgattgttcggcgccgacgccgatca

SEQ ID NO: 94151 - DNA, 616 bp, Arabidopsis thaliana columbia
  unsure (1)..(616): unsure at all n locations
aaccgggggttttggccccccttgcnaagggntcccnaagggtttnngggaaantcccccggnnttttcccccgggggttcctttttcccggatcccacccgcggaggggcttccccggatccgccgggggagaccccggggtatggccccggcggggaccgttgccgtctgatgtggaggccgaggatcgtggatccgaattcggggtcggttcatgggaattacccaaacgggagagctctggctccaagggcccttctatttctaaaggtgcctccagctgaactagaagctcttctgattactcatccggacattctcgatgccgccgttattccgtaaaatatttcataactttttttttcctccaatttaaacgccatgatttttgccttataaacgtaaaacacaacatgttcatgtatgtatgcttttgtgtacgtactgcaaagttttccggacaaagaagcaggacaatatccaatggcttacgtggttcgnnnnnnnnnnnnnnnnnnnnnnnnnnnnnnnnnnnnnnnnnnnnnnnnnnnnnnnnnnnnnnnnnnnnnnnnnnnnnnnnnnnnnnnnnnnnnnnnnnnnnnnnnnnnnnnnnnn

SEQ ID NO: 94152 - DNA, 549 bp, Arabidopsis thaliana columbia
taggtgcactatagaagagctatgacgtcgcatgcacgcgtacgtaagctcggaattcggctcgagcgaacgatccgagcttttttttccggcggcaattgggagattttgtggaagatcatagttggttctcttctcgattcttaggggttttagagacttggtgctcttgatttcgagtgatcatacagtattacaaggcatggacaaatcgagtggtttggatttcatcaaccagatgttcccagtagaagcttctctatcttgtgttgagtcttttatgcaaaagatttgtgacgagattcggcgagttgatgctaccattttagctgttgttagtcaacagggtaactccggaactagagctaaagaaaatcttaatgatgccatatgtgctgcggaggaactctctcataagatacaagagataaaatcaaaagccgaacaaaccgaagcaatggtccaagacatatgcagcgacattaaaaagttagattttgcaaagaaaacataaccacggcggtcactgctcttagtcgcctcacaatg

SEQ ID NO: 94153 - DNA, 470 bp, Arabidopsis thaliana columbia
gttgcaagaaaaggaaaacaaacccaacgatgatatattttctgcatgagagcccaaacatgactgcttccagtttttgtgcacctgataccttggatttcctgcaagataacaccgcaagttctgctccaaaaataaatgatgatacaagttgcatgaaaaaggaagaattgacacatgctaacatggtagttggtgaagggattttagctgaaccaaatgcagaggatttagctgactctactttgaatctgacttctaaaaaaagtgattctgatttagttgatcaggaaactgccaaaacaatgatgtcattactacttcctcaagcaattccactgctcaagaagacctcaagcaagaagcccccaagaaatgatatgtcagacaactgcaaaacgagccaacttaatgatgcgtcaggaactgctgtgtcactggcgataagagaatctagtggagatgatgag

SEQ ID NO: 94154 - DNA, 453 bp, Arabidopsis thaliana columbia
gattttgagacaatttgccgattcctcgatcatttcatctgctgaataacaacagtgattggctcttctgattagcaagcttcttcttttcgaaatcgcatcactttggctgatcggtggattctacgaaccatgttcaatttctggggatcaaaagaacagcaacaaggacaatctcgtccttctccagaagcttctgcaacaccgtggtattcgccgtctcttgtcacctctcctagctcatcccggcctcaaacctcagggcagattccatcacatgtttcacccaggtgaaggccgccggctttattcgccattttaaaaggccaaaaggtgtggttgggcttgggaacgcttctctctgacaaggatgcgtatcaacagtttctgcactcgcttgaccaggtcactattcaaaacaatatcagagaagagcttcgcaagaaacgttac

SEQ ID NO: 94155 - DNA, 694 bp, Arabidopsis thaliana columbia
  unsure (1)..(694): unsure at all n locations
gcggcccggtctcggattcccgggtcgacccacgcgtccgtgattctttagtagatggaatgttgaaggatggactatgggatgtctataacgactgtgggatgggaagctgtgcagaattatgcgctgagaagtttcagattacaagggagcagcaagatgactatgcagttcagagttttgagcgtggtattgctgcccaggaagctggcgccttcacatgggaaatcgtcccggttgaagtttctggaggaagaggtaggccatcaaccattgttgacaaggacgaaggtcttgggaagtttgatgctgcaaaattgaggaaactccgtcctagtttcaaagagaatggagggactgttacagctggaaatgcgtctagcataagtgatggtgcagctgcccttgtcctagtgagcggagagaaggctcttcagctaggacttctagtattagcaaaaattaaagggtatggtgacgcagctcaggaaccagagtttttcactactgctcctgctcttgctattaccaaaagccattgcacatgcttggtttngaatctcctcaaaggtggattactttggaggtcaatgaggcatttgcagttgttagcacttccaaatcaaaaagctactcggggattnctcccagaggaangtgaccgtaaattggaggngctgactccttngggcca

SEQ ID NO: 94156 - DNA, 538 bp, Arabidopsis thaliana columbia
  unsure (1)..(538): unsure at all n locations
aaaaccgggccgacccacgcgnccgaagaggaaggccnnaaaacnaccgaagaacattaacttttttaacagtgagagagatagaaagggcgagtcttaactagtaataggcctcccacactttggtgcgtatagtcactacgctactccctgcactcgcacgcaccagattggagctctttttctcgtcgtctctaccttcttcgtcactaggcttttcgatcagtggttctcggaatccaattccgttactccggtgattgatctccgtcgtacttcttcttcttacggaatcaaaactgataacggtattatacggtggccggagcgaggttatgggtctcacctctcgctgaagatctacgtttatgatgagaatgagatcgacggtcttaaagagctggtgtacggcagggatggtagtgttaagaccaccgcatgcttgaaaggtcaatggggatctcaggttaaaattcacaagttgcttttggagtccaaatttaagacgattaagaaagatgaagcggatttgttcttt

SEQ ID NO: 94157 - DNA, 741 bp, Arabidopsis thaliana columbia
  unsure (1)..(741): unsure at all n locations
gctctatactgactcactctagggaaagctggcacgcctgcaggtaccggtccggaattcccgggtcgacccacgcgtccggagaaagagagagagagagacgaataaagacagagagagagagagagagtagagagagagagagagtgagagagatagctctctggctgatctgtttttttttccgatcagatcgaagagtttttatctcgtaattcgaactttttatttggtttctctgacttagagatctccaagcttcacgtaatttgctgtcgaagaagatctatcgattccacgaatttggtgacttctgccgattctcccgtttgaattctgtggaattcgctgagaaaagttgcggcggaggctgatttaggttaaatcgagcagaatttgaccaaattcgaggatttttatcggtaaaaagatacagagaaagcataattcagcaacttcagagctcaattccgcttcttcaaccatcgaaaaccacaatatctcttgaatcagctgctacaagtcgcagatctgagctgctagccaatttttgcgataattcccgcgcacagattagtaatagaataatttaaaaaganttcaaaaaccgtcgaagctctgtcgttcatggagcttcctnaaacctcgtncccttcaaaaccccaaganttttcgcaccaggggnggaaacccacanatgnttttttaattcgnttctngaagtcanttcaaccngntcca

SEQ ID NO: 94158 - DNA, 843 bp, Arabidopsis thaliana columbia
gttagggggccttaagggggattcattttcgaagccacccaaattcaggttaaagccgggtgagcccaagttttctttctttgccaaaatgtttaaagccaatttcaattaaggtaatgttttccccaaaaagtccaaattgccgctttttggccagtgggtgtgccagcaggaaagcttgaatatgggtttaatcaaggatgggccgaagatccactaaaacccgttagaaagttctgtcagagactccaaatacaggccacccgtaaaaaagagtcctccaccagcatcgttgaacaagaaccgggtcactcgtagtagtgtatccgaaactgttgataaactcgcaaacatgaccattggagcaactggatctcgaagacactctgtgtctgtggttggacagcatcaacagctgaaaccacctccgatgaaggcaggttgggtagtagaaacacgtgacatgttccttagaccaacacaacccaccaccaatgcctactctaggaaagtcgccggatgacccctaaaccaatagtaactcaagcatgcctcttctgagcaaatattttactttataaactctctaataatcttatacatcatcagaaaaaacaagtctccttttttctttttttttcgacggcgcgtctttgcctcgtcaatggttctgcttttgttttcttttcttaatttctgtattgttaaggtttgtttttcacagtgtggcacaatttggtttgcaatgtaggtcgaatatccgagacatagggcagcccggggtatccactagttctagagcggccgccgccgcggtggagctcaagcttttgttgccttttt

SEQ ID NO: 94159 - DNA, 546 bp, Arabidopsis thaliana columbia
  unsure (1)..(546): unsure at all n locations
cnnnnnnnnnnnnnnnnnnnnnnnnnnnnnnnnnnnnnnnnnnnnnnnnnnnnnnnnnnnnnnnccacgcgtccggagaacggtacagtccgttgccggtgtgagaactctgcgatgctcggtgagagaaagaacgttaatctcccaggtgttgttgtggatctcccaactctaactgagaaagacaaagaagacatcatgcaatggggagtcccgaatcaaatcgacatgattgctctgtcttttgtcaggaaaggttcagacttggttcaagtccggaaacttctaggaaagcacgccaaaaacattcttctcatgtctaagggtcgagaaccaagaaggtggtggcaaattttgatggacattttggtcaattcagacgctttcatgattgctagaggagatctgggcatggaaatcccgattgagaagatcttcttagctcagaaggtgatgatctacaaatgcaacatccagggaaaacctgtggtcacagcaactcagatgctcgagtccatgatcaaatctcctagacccacaagagcc

SEQ ID NO: 94160 - DNA, 525 bp, Arabidopsis thaliana columbia
  unsure (1)..(525): unsure at all n locations
gtcgattctttgcatgntgatgtctggtccttgtcttactggctatacacagacaatcaacgactggtatgatagagatatcgacgcaattaatgagccatatcgtccaattccatctggagcaatatcagagccagaggttattacacaagtctgggtgctattattgggaggtcttggtattgctggaatattagatgtgtgggcagggcataccactcccactgtcttctatcttgctttgggaggatcattgctatcttatatatactctgctccacctcttaagctaaaacaaaatggatgggttggaaattttgcacttggagcaagctatattagtttgccatggtgggctggccaagcattgtttggcactcttacgccagatgttgttgttctaacactcttgtacagcatagctgggttaggaatagccattgttaacgacttcaaaagtgttgaaggagatagagcattaagacttcagtctctcccagtagcttttggcaccgaaactgcaaa

SEQ ID NO: 94161 - DNA, 596 bp, Arabidopsis thaliana columbia
  unsure (1)..(596): unsure at all n locations
cgcgtttaccggcgaatcggctctttactctctagccggagacgagatctacaattttaacgactctgcctaagatatagcaattattgggagctgcacgaagaagattttatttggtcgacggagctggaatcagctattctttcttcttctccctaatcgtttcttttagcagctctttctctctcacccgaaggttggtgttaagctggaaaggttggtcttttagaagatatggttcttgatgggattgtatcatcaccattacggaggccacatgctcttaagaagcaatgggatgacttgggtagctgctctactgttgtccagaggcatcgtttccttttgactgctatgcttcttttggcattcctctgcaccatttatatctactttgccgtcacactaggcgctaggcacttgttgtgctcagggatgactggaaaagacaaggcaatgtgtcaaatggaacacatccaagccagtttctccaacggaaaactgaaattcttccagggtgtcagcctaagctgattgcattatataaccattggctccccngttgaanngggggngaaacgccnnaanatggcttt

SEQ ID NO: 94162 - DNA, 487 bp, Arabidopsis thaliana columbia
  unsure (1)..(487): unsure at all n locations
ctggctctggaagaaggttttaactctatttctatcattcgtcttctctgcagacgatttcnctctgcaagctcccaaagtcgaaaactttatcagcaatggcggttttgttgtcatctttctctccactaggaatcaacattgacatgaataagaatctgggtgtttcgtattcttctttccctcaaattcatctctttaagggttctactccactgcgtgttcgaacattcgtcgtctcgagtcgtaaaaattcaggaactggtttggcaagtgaggataagaaatttgttgctggaacgatatggttatgatgctaattgatggactttcgggtctcaatcctaggcgagacggaaagaagagaaaatgagtggaaggaatagtcaacaagtagaagaagttgttgttgtacagccaagaacaactcataggttactgcaggttcttgcaggaacggcgaaactaaagaaattgctttctctta

SEQ ID NO: 94163 - DNA, 445 bp, Arabidopsis thaliana columbia
tttcgggtcaaaatttccgaaccctaactttagccccaaattagagagagatgcagaaacgggagcttgggaaatccggcggtaattccggtggatcttcgggtccaccagcgaagagaggccgtcccttcggtagtacaagtgctaactcagctgctgctgctgcagcggcggcagcagcggacgcgatgtcaccgtcagctttacttggtccttctcttctagttcacaattccttcgtcgagcagaacaatagaagaatagttcttgcgttgcagagtggtttgaagagtgaggtgacatgggcattgaacacacttacgttgctttccttcaaggaaaaagaagatattcgaagagatgtcatgcctcttgctaagatagctggcttgcttgatgcccttctcttaattatagatgattggcgtgacatagctctcccaaa

SEQ ID NO: 94164 - DNA, 521 bp, Arabidopsis thaliana columbia
ctcaggcacttgtagcacgtcgtctctcctttggtttctctccttatattcgacgagtgactccgattggatcgctatttcgtcatttctcactttccaaaaagaaaaaaacgaatctctctccaccatcatcacctttctccttcacttgcctcagatctggctgcgatttcaaatcttccttagtttctctcgcatcgctcggccgttgacggtcccgtcctttccgtggatctgattctggccccggattctctcgccgcgatctgaggtcaaacatggcggctgctaacgcgcccatcattatgaaggaggtcctaacgcttccgagcgttgggatcggtcaacagttcatcacctttacaaatgttactatggagtctgataagtacatatgtgtacgagagacggcaccgcagaacagtgttgtaattatcgatatgaatatgccgatgcagctcttaaggaggcctataactgctgattctgctcttatgaacccaaacttcgggttccttgcc

SEQ ID NO: 94165 - DNA, 533 bp, Arabidopsis thaliana columbia
  unsure (1)..(533): unsure at all n locations
atcatattatttcttaaaatgtcaggagctctctttcttctctcttacatatctttcagagagacaacttcttatctttaatcgctgtccgaattatattgtcggtttttgtgcccagacgagatctgattttcctatcaacacggcttttccgttgccgtgttcttgccgttaacacgaagtagttgttggattttccatagagaggtggaggacgtcaaacaagagacctacagatcttcaaaggagaagagaaaccaccagatctgcaaacaacaagacacatcggaaggaaacgaagaggacaaacggaagactttatacgtgaggcgaaaccagtttggattctgcgggagaggagcggagaacaaagagaaggcaaaattcgacgccggggagacatagcttcaccggcgccagaagacggtgaatcttttggagtctcgtgtatttcgatggcagagtttttaaccctttttttagnncttgataaacatttaacgtaatcttnatntaggncaaagntcctttga

SEQ ID NO: 94166 - DNA, 621 bp, Arabidopsis thaliana columbia
  unsure (1)..(621): unsure at all n locations
gttcccgannccccantttcccnacccccggccccaaccttctnaaanaacccccaantgngnaccnngggnaccccgtagcccccggttttcnccacncancaaaggcccaccttgctcaaaagnngnaggccccctttncaccatcagaaatcngtagccaatccaaggaaaccttgtttgccaaaagcttagaanccagaggaaagtgggccgttgattcaaagttcacctctttaacgaccgagtctgtcagagcttctcaaggaggncgtcacaggcttacgaagagtatcacgaggcggtgcattaaggcaaaggacgagcaagcggctgaggaatttgcggtggagacgacaaagagagcagaacatatttgggttgagtttcttagttcacttaattgaactaatgagattcttgattgtggttaaagcacatgttcaattagttgtggttcttgtgttttattttcttgtgttgttttgtttgagactttgtttgttgcttatatcaggggagagaggttgaaaaacctttgagagagatagataaatgagagatttgtggcggccgcgaattcgatatcaagcttatcgatacaattgaccaagggggggt

SEQ ID NO: 94167 - DNA, 961 bp, Arabidopsis thaliana columbia
  unsure (1)..(961): unsure at all n locations
tcnnnnnnnnnnnnnnnnnnnnnnnnnnnnnnnnnnnnnnnnnnnnnnnnnnnnnnnnnnnnnnnnnnnnnnnccacgcgtccgcccacgcgtccggtttttagctctgggtttgtctctgtgtcttgttctctcaagcttctatcaagtttcttgccaggatgaaggaactggaagtttgagtactttagatctaattgagcatgaatatcaaactagtgtcaattctctccaaggcaatgaagcagtagatcaaaaacctgcattggaaactcttaaagaatctgttgatacatcagctgagttaggagctgttactgatgaagtcgataaaccttcaagtatgttggaccatattgaacttgagttcgaagcacatatcaatgaacttaaagaagctggatctgatggtatcaacaaagttgaggaatctaaagatgatgaagaagctgcaaggagacataaaatgttggaagccattgaacgtgaatttgaagctgctcatgctggatttgaacaactaaagactgatgattccgcccaaggattagatgatgaacaatctgcaaagagacaaagcatgttggacgagattgaacgtgattttgaagctgctacaaaaggtcttgagcaactaaaggctgatgatttaactggaatcaacgatgaagaacacgctgcaaagagacaaaagatgcttgaagagatcgaaagagagtttgaagaagctacaaaaggtcttgaagaactaaggcattctacctcaagcacagatgatgangcaccaatcttcaaagnggcagnatatgctagatgagntccgancgggngtttaangcttctcaagtngtcttaaagngctnanggttaattctcnactgtcaaagttgttntnntnntaangccaggtnccaaaggcaagtttcttgtcaattaccgggttttgcctacccggtttttc

SEQ ID NO: 94168 - DNA, 2666 bp, Arabidopsis thaliana columbia
  unsure (1)..(2666): unsure at all n locations
tgatctttgtgataacaatcttccaccatgggaacaaagtttttagctctgggtttgtctctgtgtcttgttctctcaagcttctatcaagtttcttgccaggatgaaggaactggaagtttgagtactttagatctaattgagcatgaatatcaaactagtgtcaattctctccaaggcaatgaagcagtagatcaaactgagaccagtggtcagaaaaacagtacagtgtctgataacaacactatttctttgtctctatctgaagaacctgcattggaaactcttaaagaatctgttgatacatcagctgagttaggagctgttactgatgaagtcgataaaccttcaagtatgttggaccatattgaacttgagttcgaagcacatatcaatgaacttaaagaagctggatctgatggtatcaacaaagttgaggaatctaaagatgatgaagaagctgcaaggagacataaaatgttggaagccattgaacgtgaatttgaagctgctcatgctggatttgaacaactaaagactgatgattccgcccaaggattagatgatgaacaatctgcaaagagacaaagcatgttggacgagattgaacgtgattttgaagctgctacaaaaggtcttgagcaactaaaggctgatgatttaactggaatcaacgatgaagaacacgctgcaaagagacaaaagatgcttgaagagatcgaaagagagtttgaagaagctacaaaaggtcttgaagaactaaggcattctacctcaagcacagatgatgaagcacaatcttgcagagagacagaatatgctagatgagatcgaacgggagttttaagctgctacaagtggtcttaaagagctaaagattaatgctcacactgtcaaagatgatgttgatgataaagaacaagatgccaaaagacaaagtatgctagatgcaattgaacgtgagtttgaagccgttaccgagagttttaaacaacttgaagatatcgccgataacaaagctgaaggagacgacgaatctgcaaagaggcaaagtatgttggatgagattgaacgtgaatttgaagctgctacaaatagtcttaagcaactaaaccttgacgatttcagtgaaggagatgacagtgcagaatctgcaaggagaaatagtatgcttgaagctatcgaacgcgagtttgaagctgctacaaaaggtcttgaagagctaaaggctaatgattcaaccggcgacaaggatgatgatgaacacgttgcaaggagaaaaattatgcttgaagctattgaacgcgagtttgaagccgcgacaaaaggccttgaagagttaaagaatgaatcagaacaagctgaaaacaagagaaacagtatgttggaagcattcgaacgcgaatttgaagctgctacaaatgcaaaggctaatggagaaaactctgcaaagaatccatcaaccataagtactacagtgcagaaatcttctggcggatacaatgctggtttagaaggtcttctaaagcctgcagatggtgtatgtggttgtttcaacaaggagtaaagatggtcttcaggcagacactgattcttcgattaacatagcggggatactcgcagaagnatccaattnncagggctcaggggccttttggctcaccacatcattgaacaatcttgtttgatactcatagaaaagaaacgtcctcaaaggtaggctcagtccttggctcatcttcatcagttacttctaccacaagcgaatcagcggctacatcagagagcatagagagcttaaagcaaacactaaggaagctacgcggtctaagcgcacgtgatctcgtaaaccacccgaatttcgatgcgattatagcagccggtacacgttacgaggtactcagctcagcttctattggttacatctctttgctagccaaatacaaaaccgtcattaaagaaggactcgaggcttctcagagagtccagattgctcaaacccgagccaaactgctaaaagaaaccgcaatggagaagcagagaaccgtagactcggttttcgcagcagcaaagaccactgctcaaagaggagacgcgttgcacatcagaatcgtagcgatcaagaaactgttggcaaagctagaagcagagaaagtggacgttgattcaaagttcacctctttaacgacgagtctgtcagagcttctcaaggaggcgtcacaggcttacgaagagtatcacgaggcggtgcataaggcaaaggacgagcaagcggctgaggaatttgcggtggagacgacaaagagagcagaacatatttgggttgagtttcttagttcacttaattgaactaatgagattcttgattgtggttaaagcacatgttcaattagttgtggttcttgtgttttattttcttgtgttgttttgtttgagactttgtttgttgcttatatcaggggagagaggttgaaaaacctttgagagagatagataaatgagagatttgtgaaacacaaataatgttttagtcgtcttataataaaactttttttttttttataaaaaaaaaaaagggccgcacccgtagnnnnnnnnnnnnnnnnnnnnnnnnnnnnnnnnnnnnnnnnnnnnnnnnnnnnnnnnnnnnnnnnnnnnnnnnnnna

SEQ ID NO: 94169 - DNA, 482 bp, Arabidopsis thaliana columbia
caaaaaaatggcatggcttgctagatccattgcgaatgctctgaagatcgatgaggaagaatatgatcaaaaggaaacgattaagaccaattcgattgaaaattccggctcagatcaaccgtcttcgccatcggtgttgcaaacacagtctccacgaggcgtgaaggaagacatctctgaactcaccaagaccttaagaagtcagctatggggcgttgcttctttcctcgcgccacctccttccttcttccgatacggcggatcatgtggatgaggagactcggaagtcatcggatctcgcggaaggtgatgaggatctgattgctggaatcaggaacgatttcgttgagatcggaggtagatttaagactgggatctcgaaactctctggaaacttaccggtattgaagtttacaaatatggcttcgaatttcttgcaattgggatcggaaggtgtggattcgaagaaccctgatgttgcg

SEQ ID NO: 94170 - DNA, 1041 bp, Arabidopsis thaliana columbia
  unsure (1)..(1041): unsure at all n locations
ccaattaccaaaatcctcggcgacaaagaggagagatagagagagagaaagaggcgaaaataatggcgtcgatccctccgccggagcttgacaacgactcactggcgtcatcgccgagatcggagtacgatagtcagccacgcgtacggttcatgtgtacttttggaggaaggatcttgccacgtccgccggataatcagctctgttacgtcggcggcgataatcgcatggtcgctgttcatcgtcacactactttcgcctctctccttagtaaacttgctaaactctccggtaaaagcaacataagcgtgaagtaccagctaccaaacgaagatcttgacgcgttgatttccgtatcaacggacgaagatgtagagaacatgatggacgaatacgaccgcgtcgcacagaatcaaaacccacgcgcctctcgtcttcgtctttttctcttcaccaaaaacgtcgccggagaagaagataacgatagtcgagctagcagtatcagctctctcctcgatagctctgttaatcgggagcaatggttcctcgacgctcttaacctcggttcttccgccgccgcaaccgcggtatctaacggtgggtccggtagagtctttgagcgagttagatctgaagtctcgtcgattgtttctgaagttcctgattatctctttggattggataatttcgatgaaactgctccgccgcatgagcttcgtgatcgtgatccgagagctaagatccaacgagaagtctcgacgctttcggatcctggttcgcctcgtcgcgatgttccttcgccgtatggttcgacgtcttcggctcctgtnatgcgaatatctacaacggaacttccaccaccagtttttattaaancggaaagtccagaaccggttttgnctccgaaatcaatcctcaaccggacaagtaaatgaacaggtaatctcccggtaaactcggaatgnaatatgccctggccaggccaanaggtttattaccagggtanaccattaccaattaccggttttnangtctnggggc

SEQ ID NO: 94171 - DNA, 489 bp, Arabidopsis thaliana columbia
cgtccgttctcttccttccttggaatccaccacactccatttgcttcttctgagatctgatctctctcctagccgatgcgctgcggagatggcgaatcttgtccccggcgttttactcaagcttctccagcacatgaacaccgacgtcaaaatcgccggcgaacacaggtcctctcttttacaagtcatcagtattgttcccgctttagccggaggtgagctattcccgaatcaaggcttttatctcaaagtctctgattcctctcacgccacttatgtctctttacctgatgaacacgatgatttgattcttagcgacaagatccaattaggtcagtatattcatgttgatagagtcgaatcttcttcccctgttcctattcttcgtggtgttagacctgttcctggtagacatccttgtgttggtgatcctgaagatattgtagctactcattcactagggtttctcagtgatgacaaggttaaaaa

SEQ ID NO: 94172 - DNA, 469 bp, Arabidopsis thaliana columbia
ggatcattcaagaaacacacatattcaaacttcttcaaagaaaagaaatatagcaaaaactagaatgaagaagacagtggaggatccaagcaagatcatgagaaggtcaattcacactttcctccaaaactaccaccgtgtcaccaccgcagccgccgtggccctccctttctccgccggtctcctcctctctcagcctttcttctcttcttcctcttccacccttcacatgaggcttaacatgctcttccgcggagcgggtttctcttcttctcatgacttcttcaacatcttaagccttaaactctcacaaaccctatcttcctctttattcactcttcctttctccctcacattcctccttttatccaaagcttacgtcatcaaacttctatcaaacaatcactctgcaaattcctcctctgttttctacctccggcttctcaaaacttacgtttgcaacttcttc

SEQ ID NO: 94173 - DNA, 964 bp, Arabidopsis thaliana columbia
gaaggagaagaatatatttgactcagagagagattcattcagtaatggcagcctcaggcacctctgctactttcagagcctccgtttcttcagctccttcctcttcttcccaattgacccatttgaaatcacccttcaaagctgtcaaatatacgcctctgccatcgtctcgctccaagtcatcatccttctccgtctcctgcaccatcgccaaggacccgcctgttctcatggccgccggatctgacccggccctgtggcaacgacccgattcgttcggtcggtttgggaagtttggtgggaagtatgtacctgaaacccttatgcacgctctatctgagcttgaatccgctttctatgctcttgccaccgacgatgatttccagagagagttggctggaatcttgaaggactatgtgggtagagaaagtcctctgtattttgcagagaggcttacggagcattacaggcgcgagaatggcgaagggcctcttatatacttgaagagagaagacttgaatcacacaggagctcacaagattaacaacgctgtggctcaggctcttcttgctaagcggttggggaagaagaggattattgctgagacaggagcgggtcaacatggtgtggctacagctactgtgtgtgcccgttttggtttggagtgtattatctatatgggtgctcaagatatggagagacaagcactcaatgtgttcagaatgcgacttcttggtgccgaggtgagaggagtccactctggaacagcggcattgaaggttgcggcatctgaagcgataagagattgggtgacaaatgtggagactacccattacatattgggatctgtggcgggtcctcatccttaccccatgatggtcagagactttcacgctgtgattggtaaagaaacaaggaaacaagcgttggagaaatggggcgggaagccggatgtcttggtggc

SEQ ID NO: 94174 - DNA, 475 bp, Arabidopsis thaliana columbia
cattcatccatcttttaatcattactcgagattctgtttccatggccatatcctcaaatcttctcctttgtctctctcttttcattttcatcatcaccaaatccgccttggctcagaaatgttccaactacaaattctccaccaaccgtctctttgagtcttgcaacgacctacctgttcttgattccttcctccactacacttacgattcttcttcaggcaatctccaaatcgcgtatcgccacacaaagctcacccccgggaaatgggtggcatgggccgtgaatcccacatctactggcatggtcggagctcaagccattgtggcttatccacaatcagacggcaccgttagggcttatacgtcacccatcagtagctaccaaacgagtctcctagaagctgagctgagtttcaacgtctctcagttgtctgccacttaccaaaacaacgagatggtcatctacgcaattct

SEQ ID NO: 94175 - DNA, 818 bp, Arabidopsis thaliana columbia
  unsure (1)..(818): unsure at all n locations
gaaaacccgggccggccgacgcgtacgggcgatttcttcttcttcctcctctatatgtttcaaccccactcgatttcacacagctcgacatatttcatctccgtcgcgtctcttcccagtcaccagcttctcccctcgctctctccgtttctccgacagacgatctctcctatcttcctccgcctctcgcctccgtctttctcctctatgcgttcgtgattctcgagcagctgaagttacacaacgatcatgggaagactcagttctaaaaagcgaaaccccggtgttagtagaattctacacgagttggtgcggtccatgtcggatggtccacaggataatagacgaaatagcaggggactatgctggaaaactaaactgctatctccttaatgcagacaatgacttgccggtggctgaagagtacgagataaaggctgtgccggtagttctgctcttcaagaacggggagaaacgggagtcaatcatggggacaatgcctaaagggttctatatttccgccattgaaagagtcttgaactcatgaagaaggtaacaatcgttgatgagaactctcactaccactttgattaaaaatattgttggaagattatcatcatcgctccattgcgatatggttgatgtctttgtttcttcttttattctctgtgaatataactgttgggnttgtggaaagatagctcaggaagtattgtgaatacataaatattccttcttcttattgatgnttttagtgttctatattttctcttctttgaacttgtttttataggttactactgttgttgcctttaaaa

SEQ ID NO: 94176 - DNA, 536 bp, Arabidopsis thaliana columbia
  unsure (1)..(536): unsure at all n locations
atcaactatgctactgactgctgatcacgatgacagagttgtgccacttcactctttgaagttgcttgctacgttgcagcacgtgctgtgcacaagcttagacaatagtcctcagatgaaccccataattggtcgtattgaagtcaaggctggccatggtgctggtcgcccaacccaaaagatgattgatgaagcggctgatcggtattcgttcatggcaaagatggtgaatgcttcatggacggagtaaaaaaaattcctttatctacaggcaccaaatatcttttctcaatatcttctgtccaaacaaggacgttgtatgagttagtgacaattacatgtaaacacatgtttcagttttttctcaggctttatgttccagttcattgacacccaaaaaggattttcttcaatgcattttgcttcatccggcaaaaaaaaaaaaaaaaaaaagggcggccgctctagaggatccaagcttacgtacgcgtgcaggcgacgtcaagatcttctagagtgcacctannnnacaatcg

SEQ ID NO: 94177 - DNA, 444 bp, Arabidopsis thaliana columbia
gagaaaagagagttcgcgtgctgtttgagtatcatatctaatcccagattctttcttccttctctgtatatttccacgacggttgacctaattttcgtcaccatccaattggatttgagaagagagaaaagtattctcatcatctgaagaagaagaaagatagattgatagatagagagagaaatgggtaattcatttgggtgttctgcctccggcgagagattagtgtcggcggcgagagatggggatttcgtggaagccaagatgcttctcgattgcaatccatgtctcgccaagtattcaactttcggtggtcttaattctcctttgcatttcgctgcagctaaaggccataacgagatcgtcggattgttgctcgagaacggagctgatgtgaattccagaaattattgcggccagacagcattgatgcaagcttgtaga

SEQ ID NO: 94178 - DNA, 633 bp, Arabidopsis thaliana columbia
  unsure (1)..(633): unsure at all n locations
cttattataaaaaaaaaaaacaggattcactgctagctacagaagctttgatcacatggaagatcgaaaagagaacaagaactcgccatggctatcagtaccacagtttggagattgggatcaaaaaggaggatcaattgattactcaatggatttctcaaagatcagagagatgaggaaactcaacaagagagatgcttctcgagccagtcttggcaacgaggaagaactcattaacccttttcatgatcagcctcctgttgatactgccaagcctaagaagctaactacggttcacagtgacaacaacaaccgcaatgagttctctcaccatcacccacactctccttctaggaggagaagaatcttcagctgcttcaactgttgcgttaaagcttaaaggtgtttacttttatttatgataataacaacaaggggtgatatttgaagacagaaatgagaaatggtagtgccaccttgttttccacatgtgtttcttcggctgcatcacaattaaaatttgtctgttggtgtttactgtgtatctaactatgtttgctaaatgtcaagtgtagtaatatatattttttgtaatttttgtttggtgtatntagacacttgatattttcatta

SEQ ID NO: 94179 - DNA, 839 bp, Arabidopsis thaliana columbia
atgatattggtcgggaacaagcagcaaataaacctcttttaaagactgtgttccaggttatgatgcggttgtttagtccgcggaagacaactttgatgtttgttataagagataaaacacggacgccactggaaaatttagaaccagtgctgagggaagacattcaaaagatatgggattcagttcccaagcctcaggcccacaaagaaactccacttagcgatttcttcaatgttgaagtagttgctctctcgagttatgaagaaaaagaagagcaattcaaagagcaggtctacaatttgagacaacggttcttccaatctgtcgcacctggcgggcttgctggtgatcgacgaggagttgtccctgccaatgcttttgcttttagtgcaaaacagatgtggcaagtcatcaaagacaacaaagacttggatcttccagcacacaaggtcatggtagcaactgtgcgatgtgaggaaattgccaatgaaaaattctctagttttatcgcgaatgagaattggcgcgagttggaagaggctgtacagtctggtcctgtttccggatttggaagaaagctgagctcaattctccaagcaagcttatcagagtatgacacagaagcgacatactttgaagaaagtgttagatcatccaagaggcaacagctgcaagaaaagttattgcaacttgttcaaccaactttccaagacgtgcttggacatttgagggctggagcacttgaaaacttcaagaatgcttttgagaaggccttggatgctggagaagggttttcatcatctgcgaaatcctgcgctcagtcatgcatatctaagttt

SEQ ID NO: 94180 - DNA, 493 bp, Arabidopsis thaliana columbia
gtaaaatagtacaccaagccatttataaatttcttcactctcagattcaaaataatataaattagaaatgggaacagagatggtcatggttcacgaggttccttttcctccacagatcatcacttccaagccactctctcttctgggccaagggatcacagacattgagatccactttcttcaagtgaagttcactgcgatcggagtttacttagatccttcagatgttaaaacacatcttgataactggaaaggcaaaaccggaaaagaactcgccggcgatgatgacttcttcgacgcccttgcctccgcggagatggagaaggttataagagtggtggtgataaaggagataaaaggagctcagtacggagtgcagctagagaatacggtgagagatcggttggctgaggaggataagtacgaggaagaagaagaaactgagctcgagaaggtcgttggctttttccagtccaagtactttaaagctaac

SEQ ID NO: 94181 - DNA, 682 bp, Arabidopsis thaliana columbia
  unsure (1)..(682): unsure at all n locations
gannnnnnnnnnnnnnnnnnnnnnnnnnnnnnnnnnnnnnnnnnnnnnnnnnnnnnnnnnnnnnnnnnnnnnnnnnnnnnccacgggtccggacaatttttatttttcatcaagtttcttagatcatcagaaatggcgtctaattcttctaacgggacgacgacgacaaagccaccacctatgccgtctcctctgcgtaattccaagttttttcagtcgaatatgaggatcttggtgaccggaggagctggattcattggttcacatctcgttgataaattgatgcaaaacgaaaagaatgaagtaatcgttgcggataattacttcacaggatcaaaagacaatctcaagaaatggattggtcatccaagatttgagctaattcgtcatgatgtgactgaacctcttttcgtcgaggttgatcaaatctaccatttagcatgtcccgcttctccaattttctacaaatacaaccccgttaagacgataaaaacaaatgtgattggcacacttaacatgttaggactagctaagcgagttggagcaagaattttacttacttccacatctgaagtgtatggtgatcctttggttcaccctcaaaccgagagctattggggaaatgtaaacccgatcggtgttagaagctgttatgatgaaggaaaacgtgttgccgagactc

SEQ ID NO: 94182 - DNA, 1218 bp, Arabidopsis thaliana columbia
  unsure (1)..(1218): unsure at all n locations
taggtacaactatagcaagagctatgacgtcgcatgcacgcgtacgtaagctcggaattcggctcgagctgggctcagcttggagctggagagagacgccaggctgaagggcctgagcacacagtttttgttggagacttggcacctgatgttaccgaccacatgcttactgaaacgtttaaagctgtgtattcctctgtcaagggagctaaagttgtgaatgataggactactggacggtccaagggttatggatttgtcaggtttgcggatgaaagtgagcagattcgtgccatgactgaaatgaatggtcaatactgctcatcaaggcctatgcgtactggtcctgctgccaacaagaagcctcttacaatgcaaccagcttcatatcagaacactcaaggaaattcaggagaaagtgatccaactaacacaacaatttttgttggagctgtggatcaaagtgtaacagaagatgatttgaagtcagtttttggtcaatttggggaactagttcatgtgaaaatacccgcaggaaaacgttgcggatttgttcaatacgccaatagggcatgtgctgagcaagcactttctgtgttgaacggaacacaacttgggggacaaagcattcgtctttcatggggtcgcagtccttccaacaaacagactcaacctgatcaagcccagtatggtggtggtggaggatactatgggtatcctcctcaaggatatgaagcatacggatatgcacctcctcctcaggaccctaacgcctactacggtggttatgctgggggcggctatggaaactaccagcagcctggtggataccagcagcaacagcagtgaagcatgatgtgtaagtcgtgatcgagctgaagttgtagaaagctgtaaccgtttgacaatggtgaatgaattattgaagtggatgtgtattagctcttcttgtctcagattctctcttcaactcttttttttttcttttggattatttttctttcgcgtggctattgttgagtgtccttgcaagtcataacaaaaagcttaaacccaagtgttttttgtcatgactaatatgaccattatgttttcttaaaaaaaaaaaaaaaaaaaaanaaaggnnnnnnnnnnnnnnnnnnnnnnnnnnnnnnnnnnnnnnnnnnnnnnnnnnnnnnnnnnnnnnnnnnnnnnnnnnnnnnnnnnnnnnnnngtagc

SEQ ID NO: 94183 - DNA, 1270 bp, Arabidopsis thaliana columbia
  unsure (1)..(1270): unsure at all n locations
ttgcccttacgtcctcgagctcaaccctttaattgcatctacgacagtcgtaccttttgctaggttatcgtcgtcatgatgcagcagccacctccagcttccaacggtgctgcaacagggccagggcagattccttccgaccaacaagcttacctccagcagcagcagtcgtggatgatgcagcaccagcagcaacaacaaggtcagccgcctgcaggatggaatcagcagtctgcaccgtcttctggtcaaccacagcagcagcagtatggtggtggtggatctcagaatccaggatcagctggtgagatccggtccctgtggatcggtgacttgcagccatggatggatgagaactatctcatgaacgtctttggtcttactggcgaggctacagcagctaaagttattcgcaataaacagaacggatattcagaaggttatggctttattgagtttgtgaaccatgctacagctgagaggaatttacagacttacaatggtgctccgatgccgagcagtgagcaggccttcaggttgaactgggctcagcttggagctggagagagacgccaggctgaagggcctgagcacacagtttttgttggagacttggcacctgatgttaccgaccacatgcttactgaaacgtttaaagctgtgtattcctctgtcaagggagctaaagttgtgaatgataggactactggacggtccaagggttatggatttgtcaggtttgcggatgaaagtgagcagattcgtgccatgactgaaatgaatggtcaatactgctcatcaaggcctatgcgtactggtcctgctgccaacaagaagcctcttacaatgcaaccagcttcatatcagaacactcaaggaaattcaggagaaagtgatccaactaacacaacaattttttttggagctgtggatcaaagtgtaacagaagatgatttgaagtcagtttttggtcaatttggtgaactagttcatgtgaaaatacccgcaggaaaacgttgcggatttcttcaatacgccaatagggcatgtcctgagcaagcactttctgtgttgaccggaccacaacttgggggccagagcattcgtctttcatggggtcgcagtccttccaacaaacagnctcaacctgatcaagcccngtatggtggtggntggnggggacnntgggggatncccccnccaaggtttttttggcttccnggttttcccccccccccctngggcccctnannggctttttcgggggntt

SEQ ID NO: 94184 - DNA, 896 bp, Arabidopsis thaliana columbia
  unsure (1)..(896): unsure at all n locations
cccaggttttatccaattactcttagggaaggctggtcccccgtgcggtcccggcccggatttcccgggtcgacccacccgtccggttaaattctataacatatatgggaccaatctagaaacccctcatagtgtttgctatgggaatgagaagatgcccgttaaagatctaacgaatctaagatacttccagccgacatatatatgcgtggatggtgatggcacagtcccgatggaatctgccatggcggatgggcttgaagcagtagcaagagttggagtccctggtgagcaccgaggaatcctcaacgatcaccgtgtcttccgaatgctcaaaaaatggctaaatgtaggcgaaccagacccgttctacaacccagtaaacgattatgtcatccttcccaccacatatgaatttgagaaattccatgagaatggactcgaggttgcttccgtgaaagaatcgtgggacatcatatcagatgacaccaatatcggcacaaccgggtcaaccgtgaactccatatcagtctctcaacctggagatgatcaaaaccctcaagctgaagctcgtgcaaccttaaccgtccaaccccaaagcgatggtagcccccatgtagagcccaatcctgtaagtgtctctgttgatgcataaaaacgcatcttccctttgtaatgtgtcgccaagtgtgtctttgtgtctgtatatagcaaataaatctcatccctcggggccataagtcatcatcataataaatttcgtgttctttttcnnnnnnnnnnnnnnnnnnnnnnnnnnnnnnnnnnnnnnnnnnnnnnnnnnnnnnnnnnnnnnnnnnnnnnnnnnnnnnnnnnnnnnnnnnnnnnnnnnnnnnnnnnnnnnnnnnnnnnnnnnn

SEQ ID NO: 94185 - DNA, 564 bp, Arabidopsis thaliana columbia
aattcattgacgaggatattaaaccgggtccggtttaggagacgatacgtactccccacgttgcatgttaacctctccaccaactccatcaatgtacgaggcgagacatgaatccgaattagttatcttcggagctcttaactcactattcaagaaaaccggaatcgaaccgagagaagtcggaatcttcattgtaaactgcagcttgtttaaccctaacccatctctctcgtccatgatcgtaaaccggtacaagcttaaaaccgacgtcaaaacttacaatctctccggtatgggatgcagcgccggcgcaatctccgtcgacctcgccacaaatctactaaaggcaaaccctaatacctacgcagttattgttagtacggagaacatgaccctaagcatgtatcgaggcaacgaccggtcaatgttagtccctaactgtctattccgagtaggtggcgctgcggttatgctcttaaaccggagtcaagaccgagtccggtctaagtacgaattgactcatattgtaaggactcacaaaagctctagcgataaacactacac

SEQ ID NO: 94186 - DNA, 596 bp, Arabidopsis thaliana columbia
  unsure (1)..(596): unsure at all n locations
aacaaaaccaagaatcatacaaaacaagcatcctccaatatgatgaaacaatcaccattctcacttttaacatcaatctttctcatagctgctctttttactgcaactaccgcactcgatcctgcacccgaagacccgattttcgaattgtacatgcacgatatacttgggggaagcagtcccacagcaagacccattacgggtttgcttggaaacatctacaacggtcaagtaccgtttgctaagcagatcggttttgttccaccgcaaaacggtgtagccatacccaacgcaaatggggcaatgccaacggttaacggtatcaacgggtattccattaggtactggtttgtcttggaacaagcgttttctggtcagaatctaaatggggttcaggctcagttggggtcctgatggtctgaggcttngggtttgaacaatcacggtgatttncggcataananatcgggcctncttggggnacaaccctttggtaagnccaaggggtttttgtnccanctannagatggagccggagtnntgggtttnantttnttaaggngggggcaatgnantaatttttgggcttggtgggg

SEQ ID NO: 94187 - DNA, 808 bp, Arabidopsis thaliana columbia
  unsure (1)..(808): unsure at all n locations
nnnnnnnnnnnnnnnnnnnnnnnnnnnnnnnnnnnnnnnnnnnnnnnnnnnnnnnnnnnnnnnnnnccacgcgtccgtacggaagacgacagaagggggcgccgggagagatcctttgatctttttccgatggaggagcaattcggcgggagcgatgagagatggaaaggatcgttggagaatataacggagatggcatcgaatctcgattcgcctcagaaacttctcctcaaaaaagcagtcttcgttgaagaagacactttctctagagcttctctcgtctccgagcaagcccgaacaatcaaggttcttgagcaaagagtacaaacactagaaagagaactagatgctgccattacagctgctgctcatgctcggtctgagaaacgccaagctgagtcctctcaaaaggctgctgaatcacgtgcccaagatgtcacaaaagagcttgaaaacaccacaaaggttttcaagctgcatatggaagagcttcgaggaatgcaagaacagatatccaaacgcgataacgagatcaaactcttagaagctataatccaaacgctcggcggcaaagagcggttgggaaaaagcgacgtgaatggatgatgatgatgcgttttttcacttgtaaaggtttgtactcctgagtttgtggagatgtatcacttcgaagataaatgtatttttgtctgtctatttgggacgnnnnnnnnnnnnnnnnnnnnnnnnnnnnnnnnnnnnnnnnnnnnnnnnnnnnnnnnnnnnnnnnnnnnnnnnnnnnnnnnnnnnnnnnnnnnnnnnnnnnnnn

SEQ ID NO: 94188 - DNA, 412 bp, Arabidopsis thaliana columbia
gaagaattggaaggcgaaaatgaagaaaatgtaccaatggagcctggaattcgttcaagaaaagcaaaacgtgtagtggtttttactgataaagagccacatggcgagatttatactaatctcaaagataatcaaaattctgatcaaaacgatgaaatggctttgatccgttattcgcaacaatctgattttcgtcgagagataattaaaggatccatgcgttcccaaaggcgtaaaactgttatttgggaattttttcaagcaaaagtacattccccccttttttttgatagaatagataaacttttttttttttcgtttgatatatgggggctaaaaaaaaaaattattaaaaatttcatttggaaaaaaaaaattgataaaaaagaagaagaacaatcaaaaagagaag

SEQ ID NO: 94189 - DNA, 524 bp, Arabidopsis thaliana columbia
gctgggacgcctgcaggtaccggtccggatttcccgggtcgacccacgcgtccgtacggctgcgagaagacgacagaaggggatctaactcctatgaatgcttatggttattggcttggacttggtgtttttcattctggtgttgaagttcatggagttgaatatgcatttggagcacatgaatcatcaagtacaggtatttttgaagtggaaccaaagaagtgtcctggtttcacgtttaggaaatcgattcttgtggggaaaaccgacttggttgcgaaagaagttcgtgtttttatggagaaattagctgaagagtatcaaggaaacaagtaccatctcatcacaaggaactgcaaccatttttgcaatgaagtttgtcttaaacttgctcagaaatcaatccctagatgggtgaatcgacttgctcgctttaggggttctctgcaactgtgtgttaccacctcgtttgaacgaggcaaaagtgagacgagtaggaaaaggagagccttccggaagggaga

SEQ ID NO: 94190 - DNA, 565 bp, Arabidopsis thaliana columbia
  unsure (1)..(565): unsure at all n locations
tgatactctcnnnnnnnnnnnnnnnnnnnnnnnnnnnnnnnnnnnnnnnnnnnnnnncgccctcgcgtccgctccttctccaaacaacaaaccaaagcttctctcttttcttgcttcagagagacctagaagagttatcaacatgagtcttcttctacatctctttgctctgtctctgctcatctctgtttcaggagcaaagttctccggccggccaggaatcaactatggccagctcggaaacaacctcccgtcaccgtccgactcagtcaacctcatcaagtccctaaacgcgaaacgcgtcaaactctacgacgctaacccaaaaatcctcgccgcgttaaacggcaccgacattaccgtctccgtcatggtcccaaacgagctcctcgtcaacatctccaaatccgcatcactctccgacgactggatccgatccaacatcctcccgttttacccaaccaccaagatccgttacctcctcgtcggcaacgagatcctctctttaccagactctgagctcaaatctttactccttcccgcaatgcgcaagatccaacgctcc

SEQ ID NO: 94191 - DNA, 424 bp, Arabidopsis thaliana columbia
cggacgcgtgggcgttgactccgattttgtatatgataaggagattttgacgagcatagctgttacagttgcaacaacgatcttcatcgttttgtgtttcactatctatcttatgatcagaatctttaccgggaaatcaagaaacgacaagagatatgctccagtgcatgccacggtctttgatcttctcttccacagcgacgagttatacgattacgagacagagatcgcgagagagaagccgacttacaggtttttgagtccaggacagagcgagatattaactgcagatcctcgtaacgtggagcatattctcaagacaagattcgataactatagtaaaggacccagtagtagagagaatatggcggatcttctaggacatgggatctttgctgttgatggagagaaatggagacaacag

SEQ ID NO: 94192 - DNA, 1203 bp, Arabidopsis thaliana columbia
  unsure (1)..(1203): unsure at all n locations
nnnnnnnnnnnnnnnnnnnnnnnnnnnnnnnnnnnnnnnnnnnnnnnnnnnnnnnnnnnnnnnnnnnttggtttttttttttttttttttacaaggacatacacataaaatcagaatgatcattagatacaatagtgttacacataactcatacggacatataaaataaaataacacttgtagaacatatcccattcataagaaacgtaattagcctcttaaacaaaaaacgtaagaagctaatcttcatttttttttttctcattccacacaaattttcccattaaacacacaaaaacgagttacaattacttaacacggcaacgaggttgctttctccttctgttcgtctcactgtacagttaaaaatggctctatggactgtgcaagttctttagctgctcaaccacatcaagagtattgcttagctgatgataatcggagcgatgaagagcgtttatttgtcccgaggttttggttccatcattgaaatggttctttgcaggtccaccacgagggcagtgacgcacacggattctatgctttcttgtctcagtcgagaaccttccgtggaccacgaggaccaatatgacttccttgtctcttgtgtcttcacaccaagagttctgagcaacaccgtccacaaactcttctactgttgggaagtcttccagatgcactgaaacctcggctatttggtttggtttgattgtgccagttcctggagacacctccagccactggggaaacccgaaagagcctcttgctcggtggtcgtgtgcctgaccgtcctccccgaattttagaattgaccttcaacaaattattttgaagaaaccgatggtcttctcactcttatttgtgatacgcaggatagttgaatcctgattttggagaataatattattggtgctgacaattgtttctggaaccttgcttaactctccaagcaagaccttgattttcttattcgagtttatgatgttcccatattcttgtctcctgactgactcatcaacccgggcaatcttgacactaaatacacagcgtacgggcttgtggtcactgtctgtcacttccatgcaggcatcatactgtgatatagaagacaccactggacaatccaaactgcactcagctcccaaatgtttcttattatcgcgatatagaatcctgtcacaccaggcaggaatccgcttcttt

SEQ ID NO: 94193 - DNA, 652 bp, Arabidopsis thaliana columbia
  unsure (1)..(652): unsure at all n locations
cccacgcgtccgcggacgcgtgggccaccatacacacttcaatttcaaataagagcttttcttcagttgttgctcagagacttaaccaatcaaccatggcgaagatgatgatgttgcaacagcatcagccttctttctctctccttacttcttctctgtctgacttcaatggcgctaagctccatttacaagtccagtacaagaggaaggttcatcagccaaaaggagcactctatgtttcagcgtcgagcgaaaagaagattctgataatgggtggtactcgattcattggtctgttcttgtccaggatccttgtcaaagagggacatcaggttacattgttcacaaggggtaaatctcctattgccaaacaattgcccggtgaatctgaccaagactttgctgatttctcttctaagattcttcacttgaaaggnggcaggaagggcctatgactttgtgaaggcaagtntttcagcagaaggcttcgatgtttgtttatggtatcaccgggnggnggccnaagaagttggggccatactngnggncctncccaaacttgggnaggacatttctgntctcagtggngttttnntnaatctgntttttccccattgggggggtnaattttncgagggagccnaaggggggc

SEQ ID NO: 94194 - DNA, 1442 bp, Arabidopsis thaliana columbia
  unsure (1)..(1442): unsure at all n locations
acgactcactatangggaagctggcacgcctgcaggtaccggtccggaattcggctttcccgggccgccacggcgaagatgatgatgttgcaacagcatcagccttctttctctctccttacttcttctctgtctgacttcaatggcgctaagctccatttacaagtccagtacaagaggaaggttcatcagccaaaaggagcactctatgtttcagcgtcgagcgaaaagaagattctgataatgggtggtactcgattcattggtctgttcttgtccaggatccttgtcaaagagggacatcaggttacattgttcacaaggggtaaatctcctattgccaaacaattgcccggtgaatctgaccaagactttgctgatttctcttctaagattcttcacttgaaaggagacagaaaggactatgactttgtgaagtcaagtctttcagcagaaggcttcgatgttgtttatgatatcaacgggagggaggccgaagaagttgagcccatactagaagcactacccaaactagagcagtacatctactgttcttcagctggtgtttatctgaaatctgatatcttgccacattgtgaggaggatgcagttgatccgaagagcaggcacaaggggaagctggagactgagagcttactgcaatcaaaaggtgtaaactggacttctatacgtcctgtctacatctacggtccattgaattacaaccccgtcgaagaatggtttttccaccgtctaaaggcaggtcgcccaatcccggttccaaactctgggatacagatctcacaactcggtcacgttaaggacttggcaacagcctttctcaacgtgcttggtaacgagaaagccagcagagagatattcaacatctcgggggagaaatatgttacctttgatgggttagcaaaagcttgcgcaaaggccggtgggtttccggagccagagattgttcattacaacccgaaagagttcgactttgggaagaagaaggcattccctttccgtgatcagcatttctttgcatcggtggagaaagcaaagcatgtcctcggatggaaaccggagttcgacttagtggagggtctcactgactcatacaaccttgatttcggtcgcggaacattccggaaagaagcggatttcaccactgacgacatgattctgagcaagaaacttgttcttcaataatcgaaatcctaagagttgctcattcttggcttgtatgattctgatcacccggttctcttaaagttctgaactttattgtcatctcacgtatgttatggtccggattttgttcgacttttctctaaaaaaaaaaaaaaagggacgatgaagaaaccgagaaagtaaaaaaaaaaaaaaaaaaaaaaagggcggccgctctagaggatccaagcttacgtacgcgtgcatgcgacgtc

SEQ ID NO: 94195 - DNA, 437 bp, Arabidopsis thaliana columbia
ttgcaattcaattcctgatctgatccgttcctgcttagatcggagcaaaacaatggcggagatggcggataaggcgaaagtggaggagatggattgggaaggtattgatggagttcgtatgacttggaacctttggcctcgcactaaggttgaagcaagcaagtgtgtgattcctctcgccgcttcaatttcaccgatccgtcgtcacccccttatccttgatctcccttatgctcctctcgattgcaagacttgtaaagctcttctcaacgccttcgctcgtgttgatttcgccgctatgaactgggtctgtcctttttgctatcataggaatcatttcccttctcattaccattcgatctctgagattaatctccctggtgagctttatccccagtacactactgttgagtacacgttgcctcctgatccgtctc

SEQ ID NO: 94196 - DNA, 653 bp, Arabidopsis thaliana columbia
ctctttcaatcgtgcaagcaagattgtttggattagctcacttttctgtaggttatatattcacttatgcggctttcttgattgcctccacatcgggcaaattcggttaattatttatgtattctacccgcaatcatatattttttttaataaaaaaaatataggtatgcactcttatatttatttctacatctaggatccgatttgtatcattatcattgataataacaggaactgaagcattatggcaaagaaaagtttgatttatagggagaagaagaggcaaaaattggaaaaaaaatatcatttgattcgtcgatcctcaaaaaaggaaataagtaagattccgtcgctaagtgagaaatggaaaattcatggaaaattacaatccccaccgcgtaatagtgcacctacacgtcttcatcgacgttgcttttcgaccggaagaccgagagctaactatcgagactttggactatctggacacatccttcgggaaatggttcaggcatgtttgttgccaggggcaacaagatcaagctggtaaggatttaagtatcccttaatttttctatttttttctatgatcgatgaggcccctttaccattctgtctaaataggctattctatttgtacagatatggaagagggg

SEQ ID NO: 94197 - DNA, 586 bp, Arabidopsis thaliana columbia
  unsure (1)..(586): unsure at all n locations
cgccccccctcgaggtcgacggtatcgctaagcttgatatcctcctcgccttacttttaagcttactctttctcttcactactctcgcgtcaagttccaagaccccccgattcaagtattcgttagagaagcctcaccacccacttgacccactaacgacacctgaaataaagagagtccaaaccatcctctcgggtcatgatccgggtttcgggtccgggtcaaccatcattcacgccatggctctcgacgagccggataagcaacgtgtcatccggtggaagaaaggtgatcgtctcccgccgcgaagagcggagattcttgctatgtctaacggcgagagtcacgtgctcacggtggatcttaaatccggtcgggttgtttctgatttggtcaacccgacttttggatacccgattcttactatgaaggatatcatcgcagtctcacaggttccttacaagagcgtggagttcaatcggtcaatcgaagcgcgtgggattccgttttcggtttaatttattaaaccgttgccggttggantgccnnccgggnaggncgcgggtataaancccattttttaagc

SEQ ID NO: 94198 - DNA, 480 bp, Arabidopsis thaliana columbia
caaagggtttcgagtccttttgagttctttgggcttcctcccaaatttctccacgagctcgacccctttcgtatcttccttctcatttttttgccaaatttattcgatccgtctttcactatgtatccgatggattctgattaccatcgccgtggtctggtggcaaacgatcgttcaccagctcagtttgttaggctggataaaccgagagccgtagacgatctctatataggcaagagagaaaagatgcgtaggtggttgtgctgtgcttgccacgttgaagaaccttaccattcttctgaaaatgaacacctcagaagccctaagcaccacaatgattttgggcatcacactagaaaaccacaggcggctgtgaagcctgatgctttgaaggagcctccatctattgatgtgcctgcattgtcattggatgagttgaaagaaaagaccgattactttggtcaaagtcattgattggtg

SEQ ID NO: 94199 - DNA, 965 bp, Arabidopsis thaliana columbia
taggtgacttatagaagagctttgacgtcgcatgcacgcgtacgtaagctcggaattcggctcgagattctccacgtctgtcttatccacaataaaaccgaccttagcttagcttagactcattactcatttcacaaaaacagagagagaaatagagagacatactttacaggcaaacgatcgttcaccagctcagtttgttaggctggataaaccgagagccgtagacgatctctatataggcaagagagaaaagatgcgtaggtggttgtgctgtgcttgccacgttgaagaaccttaccattcttctgaaaatgaacacctcagaagccctaagcaccacaatgattttgggcatcacactagaaaaccacaggcggctgtgaagcctgatgctttgaaggagcctccatctattgatgtgcctgcattgtcattggatgagttgaaagaaaagaccgataactttggatcaaagtcattgattggtgaaggatcttacggcagagcctattatgcaaccttgaaagatggaaaggctgtcgcggtgaagaagcttgacaatgcagcggaacctgaatcaaatgttgagttcttgactcaggtctctagggtttccaagctgaagcacgataattttgttgagctcttcggttattgtgttgaagggaatttccgcattcttgcgtatgagtttgctactatgggatctttacatgacatcttacacgggaggaaaggagtccaaggagcacaaccaggtcctacgcttgactggatccaacgggtcagaatagcagttgatgcagctagaggacttgagtatttgcatgagaaagttcaacctgcagtaatacacagagatattcgatctagcaatgtgcttctctttgaagattttaaagccaagatcgctgattttaatctatcgaaccaatctcctgatatggctgctcgtcttcatt

SEQ ID NO: 94200 - DNA, 434 bp, Arabidopsis thaliana columbia
caagagtacaagagagaaagaaaggaacctcgaactcagagaaattgagagaagagagaagaatcatgggacaaggaccatcgggaggattgaatcggcaaggagatcggaaacctgatggtggagataagaaagagaagaagtttgagccggcggcaccaccggctcgtgtagggaggaagcaaaggaagcagaaagggccagaggcggcggcgagacttccgacggtgactccgtctactaagtgtaagctccggttactgaaattggaacggatcaaggattatttgttgatggaggaagagtttgtggcgaatcaagagaggttgaaacctcaggaagagaaagctgaggaagatagatctaaggttgatgatcttcgtggtacacctatgagtgttgggaatttggaagagttgattgatgagaatcac

SEQ ID NO: 94201 - DNA, 629 bp, Arabidopsis thaliana columbia
  unsure (1)..(629): unsure at all n locations
ctcccacntcagnggttcttgccaccgtccccccggggncntgaccaagccttntggctntgnccnctgtgnttgtcaggggnttttaggcaccttnaacaacngatcgnggnttgccccacatgctcgacctggacggttgntggaaatcgngtcccnntcccngtntcaaaccaggagacgatcttcccagatacncacatcgaagatgactctctcggaagatgtaaaccctcgaaggagtttgtgatgacgaaagacgagttctcaggagctgatataaaggctatatgcactgaggctggtctactagctctcagggagcgtcgtatgaaggtgacacatcctgatttcaagaaagcaaaggagaaggttatgttcaagaagaaagaaggcgtccctgaaggcctctacatgtaaaattataatcatatcgtcatcatcggctttcctcctccacactttgttataatacttttgcttctgcttaggatctttctggtcatataaattgatcatgttttctgatctcctccggtaaaacaattcctcatttccatttaggatgtctatttcgcattaaacttaaccaactgaaaccaagcccaaataaaaaaactgatcttgtc

SEQ ID NO: 94202 - DNA, 1148 bp, Arabidopsis thaliana columbia
gggtcggaaattccgggggggagccacgcgtccaagaatcatgggacaaggaccatcgggaggattgaatcggcaaggagatcggaaacctgatggtggagataagaaagagaagaagtttgagccggcggcaccaccggctcgtgtagggaggaagcaaaggaagcagaaagggccagaggcggcggcgagacttccgacggtgactccgtctactaagtgtaagctccggttactgaaattggaacggatcaaggattatttgttgatggaggaagagtttgtggcgaatcaagagaggttgaaacctcaggaagagaaagctgaggaagatagatctaaggttgatgatcttcgtggtacacctatgagtgttgggaatttggaagagttgattgatgagaatcacgctattgtttcttcttctgttggacctgagtactacgttgggattttgtccttcgttgataaagatcagcttgaaccggcccgcgcgtccgtgatgcataataaggttctctctgttgttgggattctacaagatgaagtggatccaatggtgtctgtgatgaaagttgagaaagctcctttggagtcatatgctgatattggaggtttagaagctcagattcaggagattaaggaagctgttgagcttcctttgactcatcctgagttgtatgaagatattggtattaaaccaccaaagggtgtaattttgcatggtgagcctggaactgggaagacattgcttgctaaggcggttgcgaattcaacatcagctactttcttgagagttgttggtagtgacgctgattcacaagtatttgggagagggtcctaagcttgtgagagaacttttcagagttgctgatgaccttttcaccatcaatcgtcttcatagatgagattgatgctggtggtaccaagcggtatgacgctcactcaggaggtgaacgtgagatccaaagaactatgttggaacttctggaccagcttgatggatttgattcatgaggagatgtttaagtcatccttgcaaccaacataaatcgagaattttggaccccagcacttgcttcgacccttggacgggattggataaggaaaaattctgagtttccccttcttccccagatgttcaaaaa

SEQ ID NO: 94203 - DNA, 771 bp, Arabidopsis thaliana columbia
  unsure (1)..(771): unsure at all n locations
aagctggtacgcctgcaggtaccggtccggaattcccgggtcgacccacgcgtccgatagatgagattgatgctgttggtaccaagcggtatgacgctcactcaggaggtgaacgtgagatccaaagaactatgttggaacttctgaaccagcttgatggatttgattcaagaggagatgttaaggtcatccttgcaacaaacagaatcgagagtcttgacccagcactgcttcgacctggacggattgataggaaaatcgagttccctctcccagatatcaaaacaagaagacgtatcttccagatacacacatcgaagatgactctctcggaagatgtaaacctcgaagagtttgtgatgacgaaagacgagttctcaggagctgatataaaggctatatgcactgaggctggtctactagctctcagggagcgtcgtatgaaggtgacacatcctgatttcaagaaagcaaaggagaaggttatgttcaagaagaaagaaggcgtccctgaaggcctctacatgtaaaattataatcatatcgtcatcatcggctttcctcctccacactttgttataatacttttgcttctgcttaggatctttctggtcatataaattgatcatgttttctgatctcctccggtaaaacaattcctcatttccaaaaaaaaaaaaaaaaaaagnnnnnnnnnnnnnnnnnnnnnnnnnnnnnnnnnnnnnnnnnnnnnnnnnnnnnnnnnnnnnnnnnngaannnnnnnnnnnnnn

SEQ ID NO: 94204 - DNA, 498 bp, Arabidopsis thaliana columbia
gcggtcttcttctttttccgtaagaatctctctctccttcattttcttggctgtgctaatctcaccggctgtgtcacaaacatgtaagtcacagactttttccggcgataaaacttaccctcactgccttgacctccctcaactcaaagccttccttcactattcctatgatgcctccaacacaactctcgccgtcgtcttctctgctccaccggctaagcctggcggatggatcgcgtgggcgattaatccaaaagctaccggtatggtcggatctcaaacccttgtcgcttacaaggatccaggtaatggtgttgccgtggtgaagacgctaaacattagctcctatagctcgctgattccgtcgaagctggcgtttgatgtttgggatatgaaagccgaggaggcagcaagagacggaggaactttgagaatctttgctagggttaaggtcccggctgatttggtggcaaagggaaaggttaatcaggtttggca

SEQ ID NO: 94205 - DNA, 659 bp, Arabidopsis thaliana columbia
  unsure (1)..(659): unsure at all n locations
nnnnnnnnnnnnnatacgactcactatagggaaagctggtacgcctgcaggtaccggtcccgaattcccggggtcgacccacgcgttccgcgttaatggcgactcagatctgaagataatctcttcttcatttctggtgggcaaaatctaaaagcttttcgaattccggagctagagaatttaaaggaatccaatggatgatttcacaggattgttagcgagagacttcggattgaaacctcagggaaaatcagctcccatggcgtctcaatcgaactcttctgccgctgatttcaacactttcgcttcttcttatagcttcgccaccgccgccggtaaaaagtccgattctttgccggtgtttgacgatcctggtcgagatggtgatgatcttctcttcaaagatgtgtttagtggaccaccaccaccaaagtacggatcttcttctggtgattcacgttctccatctgctcctgcttttgactatgatgctatgttcaaggaacccaatccaaatcagcgtcgtctatgccggtttatgacaagcctgtgtatgatgatgaggatgtgtttgagtctattcctgagctcaaaatcccttccacttcttctcagtcagctaggtttgagaatgttttctcttctatctcatcttctcc

SEQ ID NO: 94206 - DNA, 784 bp, Arabidopsis thaliana columbia
atttttattcagggttttgctacttcaggtcttttaaacaaaatgcctcagtctgcaatattagtaccagctctccaggcccagtggttaatgatgcacgtaagtatgatgatattaggctatggcgctctgttatgcggatcattattatcaatagctcttctagtgattacatttcgcaaagtcggacctactttttggaaaaagaatataaaaaaaaattttttattaaatgaattattttcttttgatgtactttactacataaatgaaagaaattctattttactacaacaaaacattaattttagtttttctagaaattattataggtatcaactgattcaacaattagatttttggagttttcgtattattagtcttgcgatttatcgtttggtaaccgtcggcacttctttcaggagcctgtctgggctaatgagacatggggttcatattggaactgggacccaaaagaaacttgggcatttattacttggactatattcgcaatttatttacatattaaaacaaataggaatgttaggggtataaattctgcaattgtggctttgatcggttttattttaatttggatatgctattttggcgtcaatcttttaggaataggtttacatagttatggttcatttacatcgaattaaagtaacaaataagaaggaatcgaaatctaaataaaaaaataaaaaaatagcatctatatctaacttcatataagttaagaaatctcatttagttttagtagtaaatcataaagaacctt

SEQ ID NO: 94207 - DNA, 430 bp, Arabidopsis thaliana columbia
gtaaaatctttcttattcgtaacaaagttattgtaaacttatagaatggttgtgaaactatatggacaggtaacagcagcttgtccacaaagagtcttgctttgttttctcgagaaaggaattgaatttgagattattcatatcgatcttgatacatttgagcaaaaaaaaccagaacatcttcttcgtcagccatttggtcaagttccagccatagaagatggagatttcaagctttttgaatcacgagccatcgcgagatactacgctaccaagttcgcggaccaaggcacgaacctttttgggcaagtcttctagagcaccgggcccccgtggaccagtgggctgacgtggagacctattacttcaacgttctggcccaacccctcgtgattaacctaatcatcaagcctaggttaggcgagaaatg

SEQ ID NO: 94208 - DNA, 423 bp, Arabidopsis thaliana columbia
gcggacggtacttttgtcggccggcgcaaaaacctgatctcttcttcacgagtaaaaacctgcgctgcatcagtttatataagcagccacccttttgctctgtttctaacaaaccagaagaagaaaaaagtttcaatttttcttgaagatgacggagtatgagaatgggaagaagaggaaagtacgaaacaaacaacaagtaaaagtacagttcttgtctcaaaggtatctaatcttatgcttttgttgtttcttcgtcttgctcttcttcttatcttccgaccgaatctccacactctctgtgcggtccgattctctgagaccgtctcttcgtgttcctactctctccgttttatcatcatccatggattcgtttcaccgtggtagattccctcccttgagtgttgaagacagagttcaatt

SEQ ID NO: 94209 - DNA, 333 bp, Arabidopsis thaliana columbia
ctttctctctcattctctttttagcttttccctggatatagtacacgttcgaagaagaccgttcgtgtgcaaaaacatgaggtgtagagcacttaacattcgtagaagaaagagagtaatggttaatgtgagctcaaggaagctcatgacccgtctacggcgaatggttgctccggagacgagtttttccggcgaggttgacggtgctacactttatcgactcacggctgatcacattttcttacttcaagcaagaatccaacttcttcgtcgtatttcttctgtttgtggtctctagatcgaagatacacgtggctaaaaaaagacgaagaa

SEQ ID NO: 94210 - DNA, 871 bp, Arabidopsis thaliana columbia
  unsure (1)..(871): unsure at all n locations
cgacccacgcgtcccgcttaaaaagatatcatttgtagcttcttacaatgtcgcgaccaatccccattgaagaaatggtgaggctgttcaaaatacgtcacacaacatctcacttgttcaagatagacaacttctctttactcaaaaagcatggaatcgaaaaggtcgaatcctctgttttcgatctcgctggtcacaaatggaaactctctgtgtacccaaatgggcataagaatgctaaggggactcatgtctccatgttcttagtgaatcaagttccggtaaatgatatgcctacatatgagctcctagtcgtcagtcaactagagcgaaaatggcacacccatggacgagatgagtttgatataaatccagaaccagctagtgaggggtttttaaggttcatatctcttgctgatcttgagagaaaaggtttccttattggagattgttgtatgtttggtgtcaagttccatgggattgaacctgctaatcccggaacagcggagtgttttagcttaatagagaagcctcttaaccacagagtcacttggatgatgaccatgttctcgtccttcaaccctggaaacgttcatcagtctaatgaatttgtcgttggaacccggaaatggagaattaaagttcatccaagagggtctatgggtgaaaaagacaaatcattttctgtgtatctatcggcactagggtttgtcaataatgcaccaatgccaaaaaacttacgccaagttcaagctncgggtattggntcaaggtagctggatcatgtttnnggntcaggtttagnctggtttattcagaacctttggcccaaagnggntttcgggttttnaatnccnctggggaaacattg

SEQ ID NO: 94211 - DNA, 783 bp, Arabidopsis thaliana columbia
  unsure (1)..(783): unsure at all n locations
acgcctgcaggtaccggtcgggaattcccgggtcgacccacgcgtccgtgtatgtttggtgtcaagtttcatgggattgaacctgctaatcccggaacagcagagtgttttagcttaatagagaagcctcttaaccacaaagtcacttggatgatgagcaagttctcgtccttcaaccctggaaaggctcatcagtctaatgaatttgtcgttggaaccaggaaatggagacttgaagttcatccaagagggtatatggatgaaaaagacaaatcattttctgtgtatctatcagtagaagggtttgtcaacaatgcaccaatgacaaaaacttacgccaagttcaagctgcgggtattggatcaagttagctggaatcatgttgaggaatcaggtttgagctggtttgatgcagaaccttcggaccaaagtggctttgcggatttcatgcctctggggaaactaaatgaaccttatttggtaaaggataagctttatgtgggagttgagtttgaagtcgtttctaccacttattactgttagcttctaggctgtaataagtcttattgtgagctaaaaataacaagaaatgttataatgtattgaataaaatgttggagaatgtacctactgagacttggaggtggaactacattgacctagtcttagccaaagtccaaaaaaaaaaaaaaaaaaaaaaaagnnnnnnnnnnnnnnnnnnnnnnnnnnnnnnnnnnnnnnnnnnnnnnnnnnnnnnnnnnnnnnnnnnnnnngaaatgatac

SEQ ID NO: 94212 - DNA, 597 bp, Arabidopsis thaliana columbia
aaacccacacaacattcaattgaaattgcgactttcgatttaaaactctctttaactacaatcgctatccacgaacaatctgattgattctctctctgagatctctctatctatctatctttctctcttctcttaccttttcaatacgatttcggattctgagctgcgatgcttctttgattcacttgagagtgttttggagttttgactacgacttgtgatggcatctagacaaggatcaaaatcgagaaaagcagggttaaagggtgctgattctactgcatcttcgacaacctcgtcttcgaagctttatcaagagacttctatagatggccatagctcccctgcttcttcatctgctcaaagcaagcagcagttcttctcaccagatcccttaccacaaactgctcagcggtctaaagaaaacgtcacagtgacagttcgctttcgcccactcagtccaagggaaattcgccaaggggaggaggttgcatggtatgcaaatggagaaactatcgtgcgaaatgagcataatccgacaatagcttatgcctatgaccgtgtctttggacctacaaccacaacacgcaatgtcta

SEQ ID NO: 94213 - DNA, 452 bp, Arabidopsis thaliana columbia
gtggcgtcacaggaggaaatggcaaagttgtgaaaagtggtcctaatgataatatcttcatctattatgctgaccatggagctcctggcttaatagcgatgcccactggtgatgaagttatggcaaaagatttcaatgaagtcttggagaagatgcataagagaaaaaaatacaacaagatggtgatctatgttgaagcatgtgaatcaggaagtatgtttgaagggattttaaagaaaaatctcaacatatacgcagtgactgctgctaattctaaagagagcagctggggagtttactgtcctgagtcatatcctcctcctccttctgagattggaacttgtctcggcgatacatttagcatctcttggcttgaggacagtgaccttcatgacatgagcaaagagactttggagcaacaataccacgttgtaaagagaagagtaggatct

SEQ ID NO: 94214 - DNA, 633 bp, Arabidopsis thaliana columbia
aaaaacattcttctcacaagaatcagattcaagatagaagtttttcaaacaatgtctagtcctcttggtcactttcagattcttgtttttcttcatgctttgcttatcttctcagctgagtcccgcaaaacccaattgctgaacgataatgatgttgaatctagcgacaagagtgcaaaaggcacacgatgggctgttttagttgctggatcaaatgaatattataactacaggcatcaggctgacatatgccacgcgtatcagatactccgaaaaggcggtttaaaagatgaaaacatcattgtgtttatgtatgatgatatcgcgttttcctcggagaatcctaggcctggagttatcattaataaaccagatggagaagatgtttataaaggagttcctaaggactacactaaagaagctgttaatgttcaaaacttctacaatgtgttacttggaaatgaaagtggcgtcacaggaggaaatggcaaagttgtgaaaagtggtcctaatgataatatcttcatctattatgctgaccatggagctcctggcttaatagcgatgccaactggaactggaagtcttctggttcaaacaacgacatgggtttaggattcggacctgtgggtt

SEQ ID NO: 94215 - DNA, 876 bp, Arabidopsis thaliana columbia
  unsure (1)..(876): unsure at all n locations
cgcctgcaggtaccggtccggaattcccgggttgacccacgcgtccgtaccgctgcgagaagacgacagaacaatggttgggacaagaggtttaagactcttcctccagcagaagctttgccaagaaacgaaaccattggtggttacatctttgtctgcaacaacgataccatggaagagaatctcaaacgccctcctttgggattgccaccaagatacagggactcggttagagcgataactccaggacttgctctgtttctttacaactactccactcaccaacttgatggaatctacgaggcagctagcttcggaagaacaacattgagttgaatgcttttgaagacaaaaatggtcctggcgattctcgtttccctggctcaggtgagggccctcaacgaggaaaagtttgtttgcccccgggaagaagattcttttccgaccctattttgcgcccacttccacgggtcctaagtttccgactccacactcagtgtcccagagggggctttcttctattggccatttttgctgcccaaaacccttaaattgggtaaacccaatgaagaacccaaagcagtggtttgttacttcaaatccaggaagagagagatacccctttatccatatttgnttatacgccggagggaggataattattgtctgaagaaatggtattttactagtttaaacagtttcttttttaagtatattcccaggagatatgggataaatagaagatgtgctatttttgtgtgggtggatgatgaactcttatccaaaaaaaaaaaaaggttttaacccccccagcagccgctctagaggatccaagcttacgtacgcgtgggtaccatctatacgaacttctatagg

SEQ ID NO: 94216 - DNA, 1606 bp, Arabidopsis thaliana columbia
  unsure (1)..(1606): unsure at all n locations
acggcacccatttttcaccaatttctctccacttaaaaccaaccccaattctcaccaaaaatcgcaaaaaaagatttcaactttcgataaacccagatcgaaaaatcagatttttccagatcaatcagagagttagagatggagtataataacaacaatcagcaatctttttggcagttcagcgaccagctgagagttcagacaccgaatctagcgaatctgtctctcaacgactcgatctggagcacaaactctgtcttcaaagagcgtcgaaacttagacatagccgccaccaccgacaagaacaacaaccagatcgactattatcagaagaagacaacttccgacaacatcaattccaactggaactggaagtcttctggttcaaacaacgacatgggtttaggattcggacctgtgggttcaaaatccaccgtcgatttaaacccaatcgacaaattcaactcaccgttcaacgacacgtggaaattcaactcagtcaacgttaacgttaacggttactcaccgtcaagcgccgttaacggagatttcaacaaaggggtttacacgtcgatgaagaagtatgggtacaacgtcaatctaaagaacaacaacaagaacaaaggaatcgatgaagatcatcagattcagaaaggtgggaagaagaacagaaagaatcagcagaacaataataaccagaggaacgaagacgacaagaacaatggtttggacaagaggtttaagactcttcctccagcagaagctttgccaagaaacgaaaccattggtggttacatctttgtctgcaacaacgataccatggaagagaatctcaaacgccagcttttcggattgccaccaagatacagggactcggttagagcgataactccaggacttcctctgtttctttacaactactccactcaccaacttcatggaatctacgaggcagctagcttcggaggaacaaacattgagttgaatgcttttgaagacaagaaatgtcctggcgaatctcgtttccctgctcaggtgagggccataacgaggaaagtatgtttgccactggaagaagattctttccgacccattttgcaccactacgacggtcctaagttccgactcgaactcagtgtccctgaggtgctttctctattggacatttttgctgaccaaaacccttgaattgggtaataccaatgaagaacacaaaacagtggtttgttacttcaaatccagaaagagagagataccccattatacatatatgattataaggaggagtattaataataattgtctgaagaaatggtattttactagtttatacagtttctttcttaagtatattcccaggagatatgggataaatagaagatgtgctatttttgtgtgggtggatgaagaatagatctcatctccgcgcttttttctttttgtaaattatataaaataacatatgtacaaccccaaaaatagggagaaatgagatgatgaactcttatcaaaaaaaaaaaaaaaagttnnnnnnnnnnnnnnnnnnnnnnnnnnnnnnnnnnnnnnnnnnnnnnnnnnnnnnnnnnnnnnnnnnnnnnnnnnnnnc

SEQ ID NO: 94217 - DNA, 641 bp, Arabidopsis thaliana columbia
  unsure (1)..(641): unsure at all n locations
tatacgactcatatagggaaagctggtacgcctgcaggtaccggtccggaattcccgggtcgacccacgcgtccgcccacgcgtccgttgattagctttaagcaaagaggaaactgttttgcttctagatccgatccaatccaatcaaacaaaggatccgattgatcagaaaaaatccaccaaatttctcaagatcgaaacatataattgaagatgagcgacgtatttgaagggtacgagcgtcaatactgcgagctctcaaccaatctctctagaaaatgtcactctgcatcggttctctccaacggagaggagaagaaggggaagattgctgagatcaagtctggaatagacgaagctgatgtcttgatccggaaaatggatcttgaggcaagaagtttgcagccgagtgctaaagctgtgtgtctttctaaactaagagagtataaatctgatctgaaccaattgaagaaggaattcaaacgagtctcttccgcagatgctaagccgtcttcccgtgaagagttgatggaatccggaatggcggatcttcatgcagtatctcctgaccaaaggggtaaggtttggaaatttcccgggggggggttttccccattaagntgcacaantncgggggggnt

SEQ ID NO: 94218 - DNA, 908 bp, Arabidopsis thaliana columbia
  unsure (1)..(908): unsure at all n locations
gggaaagctggtccgcctgcaggtaccggtccggaatcccgggtcgacccacgcgtcggttctctcaacggagaggagaagaaggggaagattgctgagatcaagtctggaatagacgaagctgatgtcttgatccggaaaatggatcttgaggcaagaagtttgcagccgagtgctaaagctgtgtgtctttctaaactaagagagtataaatctgatctgaaccaattgaagaaggaattcaaacgagtctcttccgcagatgctaagccgtcttcccgtgaagagttgatggaatccggaatggcggatctgcatgcagtatctgctgatcaaagaggaagattggcaatgtccgtggagaggcttgaccaatcaagtgacagaatcagggagagtagaagactaatgctggagacagaagaggttggcatctcaattgtccaagatttgagtcagcaacgccaaaccctccttcatgcgcacaacaagcttcatggtgtggatgacgccattgacaagagcaagaaggtgttgacggctatgtcaaggagaatgactaggaacaaatggatcattacatcggtaatcgtggctctcgttctcgccatcatcttgatcatctcatacaagctttctcattaatatactcaaaaaacattattcatcgtgattgtgtatatatatatgatggttgatttactttgtaatggcccaagtggttacttgtatttttaagtacgatgtttgtattgaagtggcaacacttttaacattcataaggtttcccaagtcttttcttttttgtcttaaaaaaagaaaaaaaaaaaagnnnnnnnnnnnnnnnnnnnnnnnnnnnnnnnnnnnnnnnnnnnnnnnnnnnnnnnnnnnnnnnnnnnnnnnnnnna

SEQ ID NO: 94219 - DNA, 528 bp, Arabidopsis thaliana columbia
aaaacttaggccgcgcctggccccctgccgaagcctgggattccggttatcaaacacataaagttctttctcttactcatctccgccgccggcagtaaaaatatcacatcgttagggtttcacggcggagattcaagttctttgacctaggaagctttcactatcaccggagactatttcaatggcaaccatggctaggtcgtttctgcaggcgatatcgaaggatgaggcggtggctcctccgcttagagttgttcagatcgaaggactggctgtactaaagataatcaaacactgcaaggagttttcaccgacccttgtcactggacagcttcttggacttgatgttggtagcgtcctcgaagttaccaattgttttcctttcccggtcagggatgatgatgaagaaattgaagctgatggtgctaattatcagcttgagatgatgagatgtctgagggaggttaatgttgacaacaacactgttggctggtatcaatctaacagtcttggttcgtatcagactgt

SEQ ID NO: 94220 - DNA, 445 bp, Arabidopsis thaliana columbia
ggggccacccacgcgtccgcacacgcgtccgcaaaaaaaatctccaccgctctgagagaaaaaagttggaagaggagagagagagagagcgacaacgcaccaactgttgcggctcaaagagatctcgatcgggatccacaagacggagatagatagagagagagtgagagctaacggaaatgggatctcagctacttgagtgttgcttccgtttcgtcttctactgtcactcccacagctccaactgttttccttgattgtttttcttttatctcggcgttttactcggaagcttacaacacactctctcagggatttgaaatcctcacgtttcagcacattctttgtggttcccatctattctctagccagttcggagtttgcctgaagaaatcaaatgggttcgagatacgcatctcaccagctcagcaatgggctttttgtg

SEQ ID NO: 94221 - DNA, 449 bp, Arabidopsis thaliana columbia
gagagcagctctagaagcttctgataaaaatgtccttgatggtaatgtagaggcttcttctcggttacggatacttgctgaactccagtctgaattaaagattgctaaatctgagatagacgagctaaaggcgaggttgatggacaaagaaacagaattacagtttatttcagaggaaagagataactttagcatgaaactgatgaagaaccagaaagaaatagatgttgaagctgagctgaagaaactaagggaggcgatcgagaatttaaaggcggatttgatggataaagaaacagaactccagatcgtttcagatgagaacgagacattgaagtcagatatccacaagagcgagacagatgtacaagacgcgttcctgaagctagggattgcaatggaagaggctgacaagagtagcaagaaaagcgttagagtcaccgagcaac

SEQ ID NO: 94222 - DNA, 374 bp, Arabidopsis thaliana columbia
cggacgcgtggggtgaaatcaaagcaaaaaagagagaaggagaggtcgtgttagataattagagcgcacttgcgagcaacaacgaacgacgacccactgattcaatctcctcctctctgcatattccttggcatcttttctggtaccgaagctgagtctctggagagtttctagatcttcttcaattctgcaattcagagcgaagatttattagtgattgattattcactctggagctcgagttctggatccgtgtggctggagggaatgttctgttaagctgattgtttaggcttgttggatcagtatagaaattgtcagattgagaaagacaacatatgaagaacggtatagctgagtgccctgcatgtcat

SEQ ID NO: 94223 - DNA, 991 bp, Arabidopsis thaliana columbia
caccattgtatttattaatgagaagttgaataagaaaataggagcgtctcatctctttttgaagggctgttttaaaaaacaaatactagtgtgttttctctttataaaacaaacctcactcttttgtttctttcattcatcatctccacacaaaaaaaataaaaaaaaatgaacaacttaattagctctctcgaactcacatctcttacacttgaagacccatggcctgctttctagcctaaatttcctcgagaaaacaagcaaaaaaacacaagaaagctagaatcttattttcttcttggtctttcttggtttcttcaactttttcttaaaaacgttttcaaaaaatcatgggcaccggagaaaaaaccctgaagagcttccagttacatcgcaaacaatcagtcaaagtcaaagatgttccaaaagggtgtttagcgatcaaagtgggatcgcaaggagaagagcaacagagatttatcgttcctgttttgtattttaaccatccattgttcatgcagctcctgaaagaagcaggagacgagtatgggttcgatcaaaagggcaccatcacaattccttgtcacgtggaggagtttcgttacgttcaagctttgatagatggagagagatcagtttacaatggtaacaaccatcatcatagacatggtggccgtgaccagtatcatcatcttgttggatgcttcagagcttgatgaataatgatgaaatgaaatgatgggtggtgattgtatgtgttcaaattttaatgttttttctggtttaatcttgtggagttgtggagccaaaactggcctaacccacaaaagaagtgaatcttctaaattctatcgatttgtagtatctttttctgtaattttaatggaattttaagatttaagagtgttgttgtttctaaaaaaaaaaaaaaaaaaaagggcggccgctctagaggatccaagcttacgtacgcgtgcatgcgacgtcatag

SEQ ID NO: 94224 - DNA, 392 bp, Arabidopsis thaliana columbia
tgctttggctgcaatggaggaaattctaaaatagtttgatgaggaagggaagaacaaccaacgagcagtgtacagtcgtatcgctctacgaagaatgggaaaagagatcaaaagccacgagtagacatatggtgctaaacgatcttcagagcaagaaagactcaaagctactaaggaggaatctaatgtctcagtagtagtagatgatacaactacacaatcaaagctctctgatgatgatgatcatgcagtgaatgactcttcagagaaaactgagaaggaagagactataaatggcttggcttgtgatgatgaagatgaggaggagaaggaagaaagccaaaaattagatgctataactcacgagaagacagattctgtatcttcttctg

SEQ ID NO: 94225 - DNA, 489 bp, Arabidopsis thaliana columbia
cccagcaatggtttccaaggaagatggtatgggatcgatagccccacagattcctttctgcggctgtgaagttggatagaaaaccccgccgaaatgtgttgtggtttgaggactgacccctagggggtataacccgcggctcacaactgtcacaattgatgccagttggaatttaaatcggctgctcatcgggccgtatgatctgggttcaggctgatcttgcaggttggaaactttttacgagctatctgtgataaacctcaggagattatttgccaacaaaggctctacatttatggatcacgagaaacagatcatagaaaaatcgccgcccaaaagaaagcttaccattgataccatattctaagcacattggatcgcagcatatagtagttaggttaggttcatgatctcttaaagctcttgtctttatgggtatacatatgtttgatactagacgcaaaccggatctatcgagtgaaatatgaa

SEQ ID NO: 94226 - DNA, 448 bp, Arabidopsis thaliana columbia
  unsure (1)..(448): unsure at all n locations
gataattggcaaaggaggtgaaacactcatatctatgcaggctaagactggagctagaattcaggttattcctttacatttgccccctggagacccaacgccagaacggactttgcagattgatgggataaccgaacagattgaacatgctaaacaattagttaatgaaatcatcagtggcgagaaccgtatgagaaactcagcaatgggtggaggctatccacaacaaggtggttatcaagcccgcccaccctcaagctgggcaccacctggtggtccgccagcacaacctggttatggtggttacatgcaaccaggagcatatccaggtccacctcagtatgggtcaatcacccttacgggaagtttcccctcaacaaacttcagcttggttactttgatcagtcctctgtgcccccccattaccagcaaaggggnnaaagttggt

SEQ ID NO: 94227 - DNA, 888 bp, Arabidopsis thaliana columbia
  unsure (1)..(888): unsure at all n locations
agcttggaatttcggttcaagctaaaaccataattggcttttcggcggcaagggcttctgaaggttataattctcgaaacaggggggtggggaagacgtccttgatgaatcagtttgtgattcgaaattccagtaatcagaataaagctaccattggagctgatttcttgaccaaagaggtccattttgatgacagaatcttcactttgcagatttgggatactgcagggcaagagaggttccaaagtttgggtgttgctttctaccgaggagcggactgttgtgttcttgtgaatgatgtcaatgttatgaaatcctttgaaaatcttaacaactggagggaagagttcctgatccaggctagtccttcagatcctgaaaacttccccttcgttgtcttggggaacaagacagatgttgacggtggaaagagtcgagtggttactgagaagaaagcaaaatcttggtgtgcatccaagggaaacattccttacttcgagacttcggccaaagatggagtcaatgttgatgcagctttcgaatgcattgccaaaaatgctctcaagaatgaacctgaagaagaagtgtaccttccggacaccattgatgtagctggggctcggcaacaaagatcaactgggtgcgaatgctaaccaactttgttgcatggtttattagaaaaaacatgtgttttaaggagagacctttttagtttctttggcattattgtgatgtgtatcaattagcatacgcacctttgttttggattacagaatcaaaaacgaattttggtcaaaaaaaaaaaaaaaaaaggnnnnnnnnnnnnnnnnnnnnnnnnnnnnnnnnnnnnnnnnnnnnnnnnnnnnnnnnnnnnnnnnnnnnnnnnnn

SEQ ID NO: 94228 - DNA, 571 bp, Arabidopsis thaliana columbia
  unsure (1)..(571): unsure at all n locations
cnnnnnnnnnnnnnnnnnnnnnnnnnnnnnnnnnnnnnnnnnnnnnnnnnnnnnnnnnnnnnnnnnnnnnnnccacgcgtccgcccacgcgtccgtacggtgcgagaagacgacagaagggggaaccaaaagagagagattgtgaaagaagaaaacagagacagtttcttcgctgaaaagaaaaaccaaatcagctaaatccctaaaagtttccgtcaatgtcttctcgccggagagttcttctcaaggttatcattctcggtgatagcggtgttgggaagacttcgttgatgaatcagtttgtgaatcgaaagtttagtaatcagtataaagctacgattggagcagattttttgactaaagaggttcaaatagatgacagaatcttcactttacagatttgggatactgctggacaagaaagatttcaaagtttgggagttgcgttttaccgaggagcggattgttgtgttcttgtctatgatgtcaatgttatgaaatccttttgataatcttaataactggagggaagagttcttgattcaggctagtccttcagatcctgaaaact

SEQ ID NO: 94229 - DNA, 254 bp, Arabidopsis thaliana columbia
ggaaaggtcattcgcctgagaacaaacctttcgttgtgaaggctaagcttatctctaagactgctgagaagaagattaaggaagctggtggtgctgttgttctcactgcttagttttttttttcaattcagtctctttttaatttatttcatgttattgaactcagctttgttggattttggaatcagagatcttttaatctatggtattggattatataatttgcttcgcattatttggaaattttggggatt

SEQ ID NO: 94230 - DNA, 491 bp, Arabidopsis thaliana columbia
  unsure (1)..(491): unsure at all n locations
gaaagttggtattaggtatttccccaagctttgtaccaaggttctttgcccccatcgtgaacctggccaagctatggtcacttgttccttaagacgtgaaggcgaaatcgagcaaggataatggtccgttgatcgaatgtgacccagcatggtttcttcaaggttttggggaaaggtcatttccctgagaacaaacctttcgttgtgaaggctaagcttatctctaagactgctgagaagaagattaaggaagctggtggtgctgttgttctcactgcttagttttttttttcaattcagtctctttttaatttatttcatgttattgaactcagctttgttggattttggaatcagagatcttttaatctatggtattggattatataaaaaaaaaaaaaaaaaaaaagnnnnnnnnnnnnnnnnnnnnnnnnnnnnnnnnnnnnnnnnnnnnnnnnnnnnnnnnnnnnnnnnnnnnnnnnnnnnnnnnt

SEQ ID NO: 94231 - DNA, 617 bp, Arabidopsis thaliana columbia
  unsure (1)..(617): unsure at all n locations
agaaagggagggaggagagtgtagcagatcggcgaaaatnacaaccagattcaagaagaacaggaagaagagaggtcacgtcagcnccggacatggacgtatcggtaagcaccgtaagcatcccggaggtcgtggtaacgctggaggtatgcatcaccacaggcatcctcttcgacaagtaccatccaggttacttcggtaaagttggtatgaggtatttccacaagctgaggaacaagttctttctgcccaatcgttaacctcgacaagctttttggtcactcgtccctgaagatgtnaaggcggaattcaaccaaggacaatgttccgtttgatcgatgtgactcaacatgggtttctttcaaaggtttttggggtaaagggtcaatttgcccttagaaccaagccggttcgtttttgaaggcggagtttattttcggagacttctttggaggagggtttgggggaccgtggtccttgttgtcctacctgcttaagntagggaanttantttncttaaccctgttttnaacctctatnggggttnacanctttggtgccttttgnttttggaagggangnttttaaagtggagnttttnccctttntggttanaa

SEQ ID NO: 94232 - DNA, 713 bp, Arabidopsis thaliana columbia
accacaacgtccgcccacgcgtccgcccacgcgtgaaagggagggaggagagtgtagcagatcggcgaaaatgacaaccagattcaagaagaacaggaagaagagaggtcacgtcagcgccggacatggacgtatcggtaagcaccgtaagcatcccggaggtcgtggtaacgctggaggtatgcatcaccacaggatcctcttcgacaagtaccatccaggttacttcggtaaagttggtatgaggtatttccacaagctgaggaacaagttcttctgcccaatcgttaacctcgacaagctttggtcactcgtccctgaagatgtgaaggcgaaatcaaccaaggacaatgttccgttgatcgatgtgactcaacatggtttcttcaaggttttgggtaaaggtcatttgcctgagaacaagccgttcgttgtgaaggcgaagcttatttcgaagactgctgagaagaagattaaggaagctggtggtgctgttgtgcttactgccttaagttaggtgaatttatttgcttaactctgtttttgaatcttctatggagttttatcatcttttgttgttcttttggattttggaaagagcgagatctctttaaagttagtagttttatgaaccttttgttggattttgataaatgtttggtactccgaattcagaacttataaattgcgtactgctaggtttaaaaaaaaaa

SEQ ID NO: 94233 - DNA, 623 bp, Arabidopsis thaliana columbia
  unsure (1)..(623): unsure at all n locations
taggtgacactatagaagagctatgacgtcgcatgcacgcgtacgtaagctcggaattcggctcgagctaaaatggcgacggcgttgaagaagaacagaaagaagagaggtcacgtcagcgccggacatggacgtatcggtaagcaccgtaagcatcccggaggtcgtggaaacgcaggaggtatgcatcaccacaggatcctcttcgacaagtaccatccaggttacttcgggaaagttggtatgaggtatttccacaagcttcgtaacaagttcttttgcccaatcgtgaacctggacaagctatggtcacttgttcctgaagacgtgaaggcgaaatcgagcaaggataatgttccgttgatcgatgtgacgcagcatggtttcttcaaggttttggggaaaggtcatttgcctgagaacaaacctttcgttgtgaaggctaagcttatctctaagactgctgagaagaagattaaggaagctggtggtgctgttttctcacttgcttaagtttttttttttcaaatnaagccnctttttaaattnaattccaaggnnattgaccnaaccttttttggnttttggaacaaagggnttttaanccntgggattnggttttt

SEQ ID NO: 94234 - DNA, 476 bp, Arabidopsis thaliana columbia
  unsure (1)..(476): unsure at all n locations
cgtncgaattaacaaagaacgagttaatcggattatttacatcgattgccgtcctcatatacgttacatggctctgctacaccaaacgatgtcgtacgagactacctccgggaccaaatccatggccggtgattggaaacattttccagctcgctggtttaccgccacacgactcattgactaaactttcacggcgtcacgggccaatcatgactttacggatcgggtcgatgctgacggttgtgatctcttcgagtgaagtggctcgggagatcttcaagaagcatgacgcagctttggctggccggaagatttacgaggcgatgaaaggagggaagagtagtgacggctcgctcatcacggctcagtatggtgcgtattggcggatgctgcggaggctttgcaccactcagttctttgtcacgcgccgtcttgatgctatgagtgatgtacgctctaggtgtgttgatcagatg

SEQ ID NO: 94235 - DNA, 574 bp, Arabidopsis thaliana columbia
  unsure (1)..(574): unsure at all n locations
nnnnnnnnnnnnnatgatcttgccggcannnnnnnnnnnnnnnnnnnnnnnnnnnnnnnnnnnnnnnnnnnnnnnnnnnnnnnccacgcgtccgcccacgcgtccgctctctctcaatccaacaaagaaaaaaaaagtcttcttctttttttacaagtctgagaattttctacagaaacaaaaatctgattgtttttcccactttgcatctgttttgaggatgccagctacggattttcaaggatcatttggaaggtcgttgctaagtttacggcgagaccaagttgactcatcaacagtcgtctccggaagtagtagccaccacgagccaagcaccatggaggttgagctagattcgtttcaaagacaagtcgctgagaaattcatcgatctcaacgcttcttcaaacgaccttctctctctcgaatggatcggaaagcttcttgattctttcctctgttgtcaagaagagtttcgagctatcgtattcaaccaccgatctcagatctctaaatctccgatggaccgtttgatttcagattacttcgaacggagcatcaaagctctagatgtc

SEQ ID NO: 94236 - DNA, 1318 bp, Arabidopsis thaliana columbia
  unsure (1)..(1318): unsure at all n locations
tctctacgactcactatttggaaagctggtcacgcctgcaggtaccggtccggaattcccgggtcgacccacgcgtgcgagagtttcgagctatcgtattcaaccaccgatctcagatctctaaatctccgatggaccgtttgatttcagattacttcgaacggagcatcaaagctctagatgtctgtaacgccatccgcgacggtatcgaacagatccgtcaatgggagaaacttgccgatattgtgatctctgctttagatagtcaccgtccgatcggagaaggtcagctccggcgagctaagaaagctctgattgatttagcaatcggaatgcttgacgagaaagatcatccttctggaaccaatctagctcatcgtaaccgttcattcggaagagtcaaagacagtcaccaccgttcgattggtcatttcagattcttcttgagtgttcaagatcaggtcagctttaaccagttcaagcttagcgagtaacttgcaacgcctcgaccaaacgatgtcgttgctagcaatggtttagctgtaccggttacacaatgacttcggttttgctttttgtcatgtgggttttggtagctgcgattccttgtcaagaccgtggattgcaagttaacttctttgtgcctaggcatttccaatgggcagctccggttatgtcgttgcacgataagattgttgaggaatctaagagaagagataggaagaattgttgtggtttgcttaaggagattgataggattgagaagagttcgaggttgatgaatgaattgatcgattcgattcatttcccgttgaatgatgacaaggaagttgaggtgaaacagagagttgatgagcttgttcaagttcgtgaagctttgagaaatggtttggatccgtttgagaggaaagtaagagaagttttccatcggattgtgagaagcagaactgagagtcttgattctctttgatcttgcacatgtttgtctgaatatgatgaatgattcatgtttggattttttgttttgtttttgtttttctctatttatcctttttgatcacttgtaaaaaagaaactcaaagagtgtagaagtgtcatcttctctttgtgatgctgatagtgattctgttcttctttgtgtagctacttgcttagattgaagttattttttcaatgaacagttgtatcaaatacttcattgaatttgaaagattacattcaagaaaagaaaaaaacacagaaaagnnnnnnnnnnnnnnnnnnnnnnnnnnnnnnnnnnnnnnnnnnnnnnnnnnnnnnnnnnnnnnnagtccaccta

SEQ ID NO: 94237 - DNA, 593 bp, Arabidopsis thaliana columbia
  unsure (1)..(593): unsure at all n locations
cgatgatgtaagcttacgggaagctccacaagattcttcttcttcttcaggtatctgaagtcactaggcacgtcaatcacaaatggcttttacttttcctctctgacaatctttctacacttcatctctctatatatatatatcgaatcttgaaactgatttgaaagaagaagaagaagaaacctaacgaagaacattcgaaaaaacctaaactgttttttactttgagcttgaatctgtaaaaatggaaggcattgaatctgggtctaaacaaggaaagagagtggttgtgatcggcggcggaatcgccggctcactcgccgcgaaattgcttcagttcgatgctgaagtcacactcatcgatccgaagagtattttgagattacatgggcaagtttgagatccatggtggagcctaagtttgctgagagaacagtgattaaccacaagagttacttgaaacaaggccgtcttgtaacttcttccggcgntcaataatcacagagagtgatgttatgactgaagatgggtcctttgattggntatgnattatnttntgattnctacagggnancaataaattgtttcctcaa

SEQ ID NO: 94238 - DNA, 434 bp, Arabidopsis thaliana columbia
ctcaggaagaatctagttgcggttatcttcagcccaaagagtaaagacccatccatccgttgctgaagctgctgctttgatcgaaaatgacgtcgtcctctccaacacagcgtactcacgtctcaattcctcctgaaccaggaggaaagtcactaacacaagaagctaatgagccaccagttccgatatcagtttcctcgccgtgcgggaaacgaaccagagatcccgaagacgaggtctatctcgataaccttcgctctcagaaacgttatcttagcgagataatggcttgtagtttaaacggactaacagtaggagactcacttcctgtcaacatgttagagtctccagcacggtctgagagctttctttatcacagggatgatttatcattacaatactctcccatgtcagaagactcggacgaagcgaga

SEQ ID NO: 94239 - DNA, 533 bp, Arabidopsis thaliana columbia
  unsure (1)..(533): unsure at all n locations
tctctctgcggagacgcgtcttgaaaacncgacggcctgtgctgggtttagaacagctgaatgggcagaagatancgaagaagagggattcgtcgatggagggttagaccagggagatttagttgttgtgtatttaaagctgtgtgagaagcatccgggtccatggaggatgattcgatctcacgttcataagatgttgggagaatggtttagaattcatccgcaagttagagagcatcttaatgctcaaagcatattgacgtctgagtgtctatacggacttgtggatcagcttagagagcttggacgtagagttccactcttcaaganaaagaagatagatactctgactccacaagactctctacaaagggtttagagagttgaaactatacgttcttgattcagtgggttttatcatgtatgttgtaacaccaagatcatcatgtatccacaatagctatacgtggtattttaaacggcggccgcgaattcgatatctagcttagttataccgtcgtatcagagggggg

SEQ ID NO: 94240 - DNA, 479 bp, Arabidopsis thaliana columbia
cagatgaaacaattccatatcagtctacctataatgctagtccaacgcgacaccatgatgtgggagttcaagcctgagagattcaaagacggcctctcaaaggcaacaaagagccacgtctccttctttccatttgcatggggaccgaagatatgcatcggccagaattttgccatgttggaggcaaagatggcaatggcgttgattctacagagattctccttcgagctttctccttcctatgttcatgcgcctcaaatagttcgtcaccattcacccacagttcggtgcacatcttatcctgcgcaagctgtaattctagaatcccatgtgctcctgtcagattaacagaggaaaattaacccggtcataggattaacccccaatctttttattaattgaaatcagaaccttggggtccaaaaaaaaaaaaaaaaaaagggcggccgctttaaaggattccagcctaaggaaggggg

SEQ ID NO: 94241 - DNA, 840 bp, Arabidopsis thaliana columbia
  unsure (1)..(840): unsure at all n locations
gaacattcttgtacgagacttagctagtgtgttcaaagtgggattctcgctcttgctctgtgggagagaccaactggccctgatgcatttcgactgcttggagaactaaattatgaacttaacaactatgtaggcagcatcgctgcatacaaaatttctgtaaagggtgctaaagggattgatcttgaagttacacgaggcctcatgggtgcgtatttagctgcgaagaaaccagacgaggccgtcaaatttcttctagccactcgtgaacgtctgaattcaaagaaaacaagcccaactgccagtgttacagatgaaacaaatctagacccaattcaggttgagttacttctcggaaaagcgtattcagactggggacatatcagcgacgcgatagctgtttatgaccagttaatcagtgctcatcctgaagacttccgaggctacttggctaagggaattatattgagagaaaatggaagcagaggagatgcagagagaatgttcatccaggcgcgcttttttgcaccaaacaaagctaaggcccttgtggatagatactccaaactatgatcactatctgattctgtgtatataaatatacatgcacatgggcctgtgagttactaatatgagtcagattcatctgtgagacaactgtacaatacaaatattcccaatatgaagccccagaaccaagaagttcaggaactgttatttaataaaaaaaaaaaaaaaaaaaaaaaaaaaaaaaaaaaaaaaagggcggccgctctagaggatccaagcttacgtacgcgtgcatgcgacgtcatagtactctantagtgcgtcctaaat

SEQ ID NO: 94242 - DNA, 524 bp, Arabidopsis thaliana columbia
ccgctctcttcgcacctactcttggggcggtcccgcctgggagaaacgcgtccgatcctccgctcgtgtccgcacccgcaacggcgtctccgttctcgtcaccggggccgccggtttcgtcgggactcacgtctctgccgctcttaaacgacgcggcgacggcgttctaggcctcgacaacttcaacgattactacgacacctctctcaagagatctcgacaagccctcctcgagagaagcggagtgttcatcgttgaaggagacatcaacgatctgtctctcctcaagaagctcttcgaggtcgtccctttcactcacgtcatgcatcttgccgctcaagctggtgtcagatacgccatggagaaccccggcttctacgttcacagcaacatcgctggtttcgttaacctcctcgaggtctgtaaatccgctaatcctcagccggcgttcgtgtgggcatcgtctagctccgtctacggtttaaacaccaaagtccccttctctgagaaagacagaacagatc

SEQ ID NO: 94243 - DNA, 417 bp, Arabidopsis thaliana columbia
agaaaaagagagagagagagagagaggtttgaattttggagatgaagttcgacttcatcaggggagctcttgtaatggtatctggtgtagctcttttaatggtgtccggtgagatttcaactgaagaaatttcaccggcgattgagcattcgtcgtctctgccgcaatcagaaaccgaaatgtctccatctccgacgatgtctaatgattacgattatccgtcatcgtctcaacttacggaatccaatgatctcaactacactgatagtaccagaccgggaggcgaagaagcatccgtaggtggtgaaaatggcggaggaggaggaaagaaaaccggaatcgctgttgttggatcgattgcagccgcgagtatggttggattcggtggttatgtgttgaagaaacggcgagagaaca

SEQ ID NO: 94244 - DNA, 541 bp, Arabidopsis thaliana columbia
  unsure (1)..(541): unsure at all n locations
cnnnnnnnnnnnnnnnnnnnnnnnnnnnnnnnnnnnnnnnnnnnnnnnnnnnnnnnnnnnnnnnnccacgcgtccggacaggtaactgtgcatataaagggaaaaacagaatgttatgagtgccaaaccaaacctgctccaaagacttatcctgtgtgtacaataaccagcacgccaactaagtttgtgcactgtattgtatgggcaaaagacctgctctttgcaaagttgtttggcgacaagaatcaagataatgatcttaatgtgcgatccaacaattctgcaagctcatccaaagaaacagaagatgtatttgaacgttcagaagatgaagatattgagcagtatggtaggaagatatatgatcatgtgtttggttctaacattgaagcggctttgtccaatgaagagacatggaaaaatcgcagacgaccaaggcctatatacagtaaggatgtcttgcctgaaagtctgactcaacaaaatggaagcactcagaattgttctgttactgatggtgatttaatggtctctgccatgc

SEQ ID NO: 94245 - DNA, 1669 bp, Arabidopsis thaliana columbia
gggaaactcatccggcttctggaaatttccgtttatccgattcgttctcacgagatgatggctcgttaccacaggagatcgatgatcttgtgcttagttctgctctcattaagcatatcgccgagccaaggcttcctagggacagaggaaaagatcaaatccgctgtcttttactcaccaaaacttgtgatgaatccaggatcagttgcaaatccttacttattcgacatcgatttcccaagaggtcatatcggcctcaaagctttcgatgctgaagtggttgacgaagcgggcaaacccgttcctctacacgagacctatctccaccattggattgtcgagccatactatgtacgtaaaggttccaagcttccacagagagaaatgttcaggaatcatggattttccagggaagatcctgaaagcaatcttgattccaagtcagatattattcttgtgaaaaatggagggttgtgcaggagtttaacactcagcatttctttggtttgggatcagaaccccgcgaaacctcgacgtatgttcctgatccctacgctattgaaatcggtaatcctgaggaaacacctgatggttatgaattcaaatggcttcttaacattcacgcgatagacaccagaggttgcgaagataagaaaggatgcatagaatgtttgtgtgatctgtataatgttaccattgatgagtatggtcgagctataaggcctggatacaaaggaggtttatactgctgctatgataagactcaatgtcgggtgaaaagcggttttgacaatcggggagaaaacaagaactctgtatttgaagtataccgtgagatgggttgattgggacagctcggttttgcccgctaaggtttatattttcgatgttacagattcttgggaaagatcaaaaggagatagccaagaacatatttgccatgtggaatacgaggtgaaaccgtgcaaaaccaatggcgatggatgcgttgacgttaagaaaaagagcttagtgatgccatttgatgggtatattgtctacggggtagctcaccaccacgctggtggtatcggtggtgctctataccgagagaacggtgaagggatatgcgcttcaatgccgaagtatggcaatggagatgaacctggaaacgaagctggttacattgttggaatgtcgtcttgttatccagctgatccagtgaaagtgagctatggagagacattgactttggaatctaattacagtaatgccgttggtcataccggagttatgggactcttttacatcctcgttgctcagcagctgccggaaccagatagctccttgcctaataaacaacattttgaggcacctgcgagaagcttgagctttttagccatttttgcagtgacggtagttgtggctgttgtggttttaatagccgccgtgatataccggagacagaaacgggaagatggttaccaatcacttagtacttaaaaaagagcaaaaaccatgtcgactctatatatgtcttcaaagtgaattctgtttgtatacatagaataaaagattattttgttgtcatcttcctctgatgtgatatctctgtaatagttacgtgtaagaagaacttttctttctcaaatacatcacattcacacaataaactaacattattttcgtt

SEQ ID NO: 94246 - DNA, 861 bp, Arabidopsis thaliana columbia
  unsure (1)..(861): unsure at all n locations
ccgctccnnnnnnnnnnnnnnnnnnnnnnnnnnnnnnnnnnnnnnnnnnnnnnnnnnnnnnnnnnnnnnncccacgcgtccgaaacaaacagagagcgagtcacgcgccgagttttcctcacttgttctcaataaatctctctctctttcttctctatcgctttcatttttctcctccagatctcgattccaatctctctccctctctacttccttcaacagaaatggaaacgttcctatttacctctgaatccgtcaatgaaggacacccagacaagctttgtgaccagatttctgatgcgatccttgatgcttgcttagagcaagatcctgaaagcaaagtggcgtgtgagacatgcaccaagaccaacatggtgatggtgtttggtgagatcactaccgctgcgaaagttgactatgagaagattgttagatccacttgcagggagattggttttatctctgctgatgttggtcttgacgctgacaaatgcaatgttttggttaacattgagcaacagagccctgacattgctcagggtgttcatggtcatttgaccaagaagcctgaagatattggtgctggtgatcagggacatatgtttgggtatgctactgatgagactcctgagctcatgccgttgactcatgtcctagccaccaagcttggtgctaagcttactgaagtgaggaagaacaagacttgcccatggttgaggcctgatggtaagacacatgtcacagtggagtacaagaacgatggtggagctatgattccgattagagtccacactgttcttatttcaactcaacatgacgaaactgtcaccaatgatgagattgctgctgacctgaaggagc

SEQ ID NO: 94247 - DNA, 931 bp, Arabidopsis thaliana columbia
  unsure (1)..(931): unsure at all n locations
ccgttaccctaaacctcaagccgtcgtctccaaagttccccctcagagacgaaaaaatgaagaccattttgtcctcggagactatggacatccccgacggcgtcgccattaaggtaaacgccaaggtgattgaggtcgaaggtccacgaggtaaactcactcgtgacttcaagcatctgaatctcgatttccagttgattaaagaccaagtcactggaaaacgtcagcttaagattgattcttggtttggttctcgtaagacaagtgcttcgattagaactgctttaagccatgttgataatctcattgctggtgttactcaaggttttctttatagaatgagatttgtgtatgctcattttcctatcaatgcttctattgatggtaacaataagagtattgagattcgtaacttccttggtgagaaaaaggtgaggaaggttgagatgttggatggtgttaagattgttcgatctgagaaggttaaggatgagattattcttgagggaaatgatattgagcttgtttcacggtcttgtgctttgatcaatcagaaatgtcatgtgaagaagaaggatatcaggaagtttcttgatggtatctatgtgagcgagaaaggcaagatcgcagtcgaggaatgaagttcgctattgaaagttctatattagattttatatggtgaagcagtgatattatcgtagctttttgttttacatctttcttatggatttgtagttttgtttttccttttgaatcattgatgaatgcaaattcattatccggtcatgtttggtcttttatttactctcttcttacagaagttttggaggcctcaaaaaaaaaaaaaaaaaaaaaaaaaaagnnnnnnnnnnnnnnnnnnnnnnnnnnnnnnnnnnnnnnnnnnnnnnnnnnnnnnnnnnnnnggagtgtc

SEQ ID NO: 94248 - DNA, 753 bp, Arabidopsis thaliana columbia
  unsure (1)..(753): unsure at all n locations
gggattttcaagcttctcaccctggatttccagctgatcaaggtcccaaagacggaaaagaaaaagcttaagatcgtttcgggtttggaacacgcaaaaccagcgcctccatcagaaccgcttttagccacgtcgataacttgatctccggtgttaccagaggtttccgttacaaaatgaggtttgtgtacgcccattttcccatcaacgcctccatcggcggtgacggaaagtctatcgagatccgtaacttccttggcgagaagaaggtgaggaaggtacagatgttggatggtgtaaccattgttcgatctgagaaggtgaaggatgagattgttcttgacggtaacgatatcgagcttgtttcaaggtcgtgcgctctgatcaaccagaaatgtcacgtgaagaagaaggatatcaggaagttccttgacggtatctatgttagcgagaaaagcaagatcgtagaggaagaatgaatactcatattcccctcttagctcatatttcttgtgtttggaatgttgttagttttgttttatggaccaaatccaccggtgatgtaaaccttgccttttttttgttcgagaatttattaacttatgcaacaagttttggagacaattagagacccattccctctcccacttttgccaaattacatcttctcggatgaattttgaattctgaagnnnnnnnnnnnnnnnnnnnnnnnnnnnnnnnnnnnnnnnnnnnnnnnnnnnnnnnnnnnnn

SEQ ID NO: 94249 - DNA, 971 bp, Arabidopsis thaliana columbia
  unsure (1)..(971): unsure at all n locations
nnnnnnnnnnnnnnnnnnnnnnnnnnnnnnnnnnnnnnnnnnnnnnnnnnnnnnnnnnnnnnngagaaatctccctctagggtttctttgatcaaaccagagagccgtcagggagagcaaaacaaagatcggagaagatgaagacgattctttcttccgaaacgatggacatccccgacagtgttaccatcaaggttcacgctaaagtgatcgaagtcgaaggacctcgcgggaagcttgttcgcgatttcaagcatctcaacctcgatttccagctgatcaaggatccagagactggaaagaagaagcttaagatcgattcgtggtttggaacacgcaaaaccagcgcctccatcagaaccgctcttagccacgtcgataacttgatctccggtgttaccagaggtttccgttacaagatgaggttcgtgtacgcccattttcccatcaacgcctccatcggcggtgacggaaagtctatcgagatccgtaacttccttggcgagaagaaggtgaggaaggtagagatgttggatggtgtaaccattgttcgatctgagaaggtgaaggatgagattgttcttgacggtaacgacatcgagcttgtttcaaggtcatgcgctttgatcaaccagaaatgtcacgtgaagaagaaggatatcaggaagtttcttgatggtatctatgttagcgagaaaagcaagatcgtagaggaagaatgaatgcccatatcatcgtcttagctcctatttcttgtcttttgaatgttagtttcgttttatggaccaaatccaccggtgttgcaaaactctggctatcccttgttccctttttgtgttcgagattttatttacttatgcacaagttttggagacgagctatcatttctcacctttgcttaataaaatcataaaatgtgaatttgggattgtnnnnnnnnnnnnnnnnnnnnnnnnnnnnnnntacaatcg

SEQ ID NO: 94250 - DNA, 553 bp, Arabidopsis thaliana columbia
gcaagtacatggaccgaacacaatctccaaagacagctctgttcgccgtgttggcaacactccttgtcttaaccgtgaacggccagtcactttgtaacacacacaggttcaccaataacctcgccttcgcagattgctctgacctctcggccttaggctctttccttcactggacctacaatgaacaaaacggtaccgtctcaatcgcctatcgccaccctggaacctctgcttcttcttgggttgcttggggacttaacccaagtagtactcagatggttgggacgcaagctctcgtagccttcacaaacacaacaactaaccaattccaggcctatacctcttccgtgagttcctatggtacgcggcttgaacgtagtagcctaagtttcggtgtgagtggcctctccgcgactctggtcagtggcgaggttacgatctttgcaactcttgagttgtctccgaatctgatcacggccaaccagctttggcaggtgggacctgttgtcaacggtgttcctgcgagtcatcaaacctcaggagataatatgag

SEQ ID NO: 94251 - DNA, 605 bp, Arabidopsis thaliana columbia
gcaaagcatttattaagaaaaatagagaagcttaatacaaaggcggaaaaagaaatcataataacttggtcccgggcatccaccattatacccacaatgattggccatacgatcgctattcataatggaagggaacacttacccgtttatataatagatcttatggtaggacataaattaggagaattttcacctactataaattttcgaggacatgccaaaaatgataatagatctcgtcgttaattaaataaattaaaaaaaatgaatatagattttttttgagtgagaggtaaaccttatgataaagaagagcaaaaaagacaatcactatacggaagtatatgcttttagggcaatatatatctatgtctgccccctaaagcacggagagtaattgatcaaatacgtggacgttcctatgaagaagcacttatgatattagaacttatgccttatcgaggatgttatcccatttttaaattggtttattctgctgcagcgaacgctagtcacaataagggtttcaaagaaaccaatttagtcattagtaaagctgaggtgaaccaagggaatactgtgaaaaaattaaaacctcgtgcccg

SEQ ID NO: 94252 - DNA, 789 bp, Arabidopsis thaliana columbia
  unsure (1)..(789): unsure at all n locations
cgattgacctttcggaccggacctcccgggtcgacccacgcgtccgggtgaaccttatgataaagaagagaaaaaagaaatcatatacggaagtatatgctttagggcaatatatatctatgtctgcccataaagcacggagagtaattgatcaaatacgtggacgttcctatgaagaagcacttatgatattagaacttatgccttatcgaggatgttatcccatttttaaattggtttattctgctgcagcgaacgctagtcacaataagggtttcaaagaaaccaatttagtcattagtaaagctgaggtgaaccaagggaatactgtgaaaaaattaaaacctcgtgcccgaggacgaagttacccaataaaacgatccacttgtcatataactatcgtattggaagatatatccttctatcaacaatatgaagaatatttaatgtatttaaaaaaacctggatgcagcaatgaaaacagaaatctaacatgttatgatacatatagtagtgcaggcctatggggcaaaaaaataaatccacttggtttcagacttggtacaccccaaagtcatcattttctttggcttgcacaaccaaaaaagtattctgaaggtttagaagaagaaaaaaaaagnnnnnnnnnnnnnnnnnnnnnnnnnnnnnnnnnnnnnnnnnnnnnnnnnnnnnnnnnnnnnnnnnnnnnnnnnnnnnnnnnnnnnnnnnnnnnnnnnnnnnnnnnnnnnnnnnnnnnnnnnnnnnnnnnnnnnnnnnnnnnnnnnnnca

SEQ ID NO: 94253 - DNA, 540 bp, Arabidopsis thaliana columbia
  unsure (1)..(540): unsure at all n locations
gccacccagaaaaaaccctcaagtcttcttcttcttcctcaatctctccacctcttttcaaaccttcttcacactctctctcaatcaatcctttttcttctcaaatctttcagttttgatctctaaatttccagaaaatgagcaacgataaggacagtttcaatgtcagcgatctcacttctgctcttaaagatgaggatcgagctggtcttgtcaacgctcttaagaacaagctccagaatctagctggacaacattctgatgtgctcgagaatctgactcctaaaattagaaggcgtgttgaggttttgcgggagattcagggcaaacatgatgaaatagagacaaaattccgcgaggagagagctgctcttgaagccaagtatcaaaagttattttcaggcctttgtattaaccaggggnttatggngnttttnaatgggggcnccttaagttnaagggggtcccanngggtnctaaggtggcccnnggggcggggaaacnttcagnngggnangggnccctaggttttgggtgnct

SEQ ID NO: 94254 - DNA, 537 bp, Arabidopsis thaliana columbia
cccttaggcactttctacagagcagctaatcaaaaaaaaaaaaaaaaaaccttgttcttcgcttcttcttcctctctcacaaatttgactttcatagaagaaaaaaatggtgactacatcgtcacgaaccaagtcaaacggaccggtgcttcgttcacaatcaccgtcaggtcgattttgcggtggttactcaagagccgttccgtcatcttcttcatcagctttcgcttcatcaacgagttctagcttttcatctccgtcgtcagcttttttcagcaatcaccgtcatcacgagagcaatcacagtcaccaccgatctgcgtcaccgactcgtgtgaatctctacacagcgcaaccgatgtctcagtcgtttcgttactctctcgatagcagatctatatctccgactaacaaatcgatctccgttcgaagaatcagccaccgagccataatcacaagatctcaaggagacgtatgtgttctccgacgacgcatcaggatcttctcgatgcagtctacatagacgtagcgatcaca

SEQ ID NO: 94255 - DNA, 637 bp, Arabidopsis thaliana columbia
  unsure (1)..(637): unsure at all n locations
acgaggtatatgtgcgttgcacacgtacggctccacctttcttagtagatccttctgagaccatcgggccaccaccaccaccgcatacgaaactgcattccacaccacaaatcttactaaaacacgagaaaagtccattacctccatctgtgtgacggcggttatgctttttcgtcgtcggagttttccgtcttgaactcattcctcccccggcagttgcagctggaacgctcgcgccatcgtaatcagtgctacttatatggcttgatcctatgtcggacaacggtggaagctctgttcgccatctctcgagttttgatcgcaatccttcgatgctagattcatcgatgctccattcgctgagtattgaaccttccgtgtcgtgcgatctatctttcgccaatttgtcagccacttcagatggcgatggtcctaactccgattcaagttaagattcgtcttccagctaaaantcctcaactggtgtaccaaaatcgttgatgagttctcatcgggtgtaggcaatgnaagtttgnatcggatcggggggttatccgacgantgtttgatntnattggggttggacccaaccattnnagncccgaananggggttngnatttggnggnngtncnacc

SEQ ID NO: 94256 - DNA, 439 bp, Arabidopsis thaliana columbia
actttgctgcggccgagatatacaacgcattccgtatctttattgctgcttatgttgggatggctggttttggaaacttctcttactactatgtcagaaaggatttctctgttgcacgttttgcgcagatgatgtggaggctgaacttctttgtagcgttttgctgtattgttctcaacaacgactatatgttatactacatctgcccaatgcacactcttttcaccctaatggtatatggagctctgggtatcttcagcaagtacaaatgtgataggatcggtgatggctctgaagatattttcatgcttcctcgttgtctttttgttgtgggaaattcctggagcttttgaaatattttggggtcccttaacatttttgcttggttacaatgaccctgccaagcccgatcttaatcggctgcatgaatggcacttta

SEQ ID NO: 94257 - DNA, 790 bp, Arabidopsis thaliana columbia
  unsure (1)..(790): unsure at all n locations
nnnnnnnnnnnnnnnnnnnnnnnnnnnnnnnnnnnnnnnnnnnnnnnnnnnnnnnnnnnnnnnnnnnnnnnnnnnnnnnnnnnnnnnnnnnnntcgcggccgcattaatttctcgcaataaaaaaagttcagatttcgaggtattcttgcaatctcgatcgagtttcagatctggggattcaataattagggcttttgattctgcattgtcaatgacgaattcgggtttcaatgtaaagatctgaggaaaaagtttcgatctttagattttgacttggaggtttcttcgattggtggatttgaagaagatggggaaaagacttgtgggtcttgtgtcaatgatgtaattttagcagaaagttgtttgcttttgagaagaagatgggatctggccggagcaaatcatgtctaggctcgtcggcgatggcgagagaagcttctgacgtggctcaacctcctccgtcgtcttctactggtggtggaaggagaagaagatcaaagagtcttttttgtgggcttcactcttcttgtcttgcttcatcttctacttctcattccagggatgatgaatatgaagaaaccggtgtttatggatggatgaagaacaagtcttgggaagtggttaccccggggtataaatgggaaatctcagaaaaaaaaaggccttcccaatttgccttttgaataaaagaaaatttgggaatggatggatttaccaaaatttctggaaaaaaccccaaaaagaacatttggtggatggaaccctttgtaccccttgaatgaattaaga

SEQ ID NO: 94258 - DNA, 521 bp, Arabidopsis thaliana columbia
tttgagttacaacaacattttctttatttttctcttccattgaagaatcgtcaaagccatggttaggaaaccgtcgtcgaagatttattcggtggcagcagctgcgttggtgatcgttatatatgttgttttctgctccgtgtttgatcgtcaattgttacaatcgtcaagtgtagttctaggtacgttacaacaaccatgggaatctagaagaatcaagcaggccccacacccaccgcaagagactacttcggcatcaatcacatgcgaccgatcccacactaattacgatctctgctcaatcaacggctcatgtaatctggaccttaaaaccggaactttgactctaatggacccaacatcagcaccacttgtcgaaaagatcaggccttacccaaaaaaggctgacaactggatcatgcctaggatcaaagagctaacactaacctcaggcccattgggtctgccccgatcatgtgacataacacatgatttgccggcgattgtgttcagtgccggag

SEQ ID NO: 94259 - DNA, 442 bp, Arabidopsis thaliana columbia
cccacgcgtccggcaaatccaagagaacatggcggataaatcagaaaccactccaccgtcaattgatggcaacgttctcgtggccaagtcactctctcatctcggcgtaacccacatgttcggcgtcgttggaatccccgtcacgtctctagctagccgagctatggctttaggtatacgtttcatcgccttccacaacgaacaatccgctggttacgccgcttcagcttacggttacctcacgggtaaaccgggtatccttttaacggtttcgggtccgggttgtgttcatgggctcgcgggtctttccaacgcttgggttaatacatggccgatggtgatgatctctggttcttgtgatcagagagatgttggtcgtggagatttccaggagcttgatcagatcgaagcggttaaagctttctcgaaattatcagagaaa

SEQ ID NO: 94260 - DNA, 530 bp, Arabidopsis thaliana columbia
  unsure (1)..(530): unsure at all n locations
nnnnnnnnnnnnnnnnnnnnnnnnnnnnnnnnnnnnnnnnnnnnnnnnnnnnnnnnnnnnnnnnnnnnnnnnnnnnnnnnnnnnnnnnnnnnnnnnnnnnnnnnnnnnnnnnnnnnnnnnnnnnnctgcgcagattatctcatattaacaggtaataatgttgggaccaatggagcaataacacttttattgctcacaccttctcatatcgagttatcaatgtgatattttcctctgacccaggacttaattcaccgaacttgttcaaggccgaaggagatagaaagttgattcaacaattggtttctgcttacaatcaaggttgcaagatttcttttcgactcttatggcctcatggagaaattgtcatttaattgaatcacttggttggcagatcctagggcgtcaataccctgggggggtgaatccagtggatgccgctgcactcttaaaatactatcttggtagccttccaacaccactaactacttttgagctttaaaaggaaaaaaagatgcgcgggcgggcat

SEQ ID NO: 94261 - DNA, 769 bp, Arabidopsis thaliana columbia
  unsure (1)..(769): unsure at all n locations
gcgattatcatttgagttcgaggattcgtccgatgcagctctagcatcaggaggggaacaacgaatggcacttgttataggtcactggagcgaagatcaacaaacaagacgcggccaaaaagactgcacaaaagagcaagaccattttgacggatatcgaaaggtggcaaaagggagttgccagctcagatgtgtttggtgttgcgattgagatcactgtccagcggcaggagtcaagcaggcctattcctctgatactagttaaatgcgcagattatctcatattaacaggacttaattcaccgaacttgttcaaggccgaaggagatagaaagttgattcaacaattggtttctgcttacaatcaagatcctagggcgtcaatacctgagggtgtgaatccagttgatgtcgctgcactcttgaaatactatcttgctagccttccgacaccactaactacttttgagctttataatgaaatcaaagatgcacggtcgagcatacacagaatgagncagtcactccagaagctttccaatgtgnattataatacattggggttcataacagcgctattgcttcgtgtgagccagaaacaacttntttaacaaaatgggttcggatggcctngctttgggaatggntccagtggncatttggngggaggcaacaggcctgattttttcggggatcttggggcgccntaaaggggnctnggaaagnncgcnttnantctntcntggnctttttagtngggnggccgngc

SEQ ID NO: 94262 - DNA, 576 bp, Arabidopsis thaliana columbia
  unsure (1)..(576): unsure at all n locations
cagctccnnnnnnnnnnnnnnnnnnnnnnnnnnnnnnnnnnnnnnnnnnnnnnnnnnnnnnnnnnnnnnnnccacgcgtccgcccacgcgtccgcggacgcgtgggtttcagacaattttggttctttttcttttgtatttatacattcttaatcttctacaaaacaaaagaagaaagacacatttcgttagtagaaatggcgggaaacggaaacgaaagtaccggtggagacttcagtttctcggctgcggcggcccgtgatgcgcttccgaggatcacgactgagaagggcggcaaatctccagggccggcagacgtctgccaggatgacatcgcaccgcgggtcaactttcagaccatcgacgagcttcacagtctccagaagaaacgatctgcccctaccactcctcttagagatggcagcgccagcggagtcagcggaactagtggtccgactactcctgtctccagcgagaccatgcttcaatccgtcagtgcatcgttggcttcgttgacgagagagacaggaccgaagttaataagaggagatccgacttcggcagctaaagtagcac

SEQ ID NO: 94263 - DNA, 534 bp, Arabidopsis thaliana columbia
ggtacggaatcgcagttccgggctaggcccacgcgtccgattattattaaggtatggcgacacttgaaattaccgatatagccctggttcaaccttctcaccaaccactctccaacgaccaaactctctctctttcccatctcgacaatgataacaacctccacgtcagcttccgttacctccgcgtctactcctcctcctcttccaccgtcgccggagaaagcccctctgccgtcgtatccgcctctcttgccaccgctctcgttcactactaccctcttgctggctctctccgtcgctctgcctccgataaccgatttgaactactctgctccgctggtcaaagcgtgcctttagtcaacgctacagtgaactgtacgcttgagtcagtcgggtatttggatggacccgatccaggtttcgtcgagagattggtaccggatccgacccgggaggaaggaatggtcaatccttgtatcctccaggtcactatggtttaagggtgtgggtggggtctaggtgcatcgattcatc

SEQ ID NO: 94264 - DNA, 385 bp, Arabidopsis thaliana columbia
accacacaaataagaaactaacaaaaacctttttgtcttctacaaatcgtctccatacatacatgtgacgataaatagtctctcttttcttgcggctctatctctctttgctttgacacttccattagtaattgcttccgatccaagcccccttcaagacttttgtgttggtgtcaacacaccagcagatggcgtgtttgtgaatggaaagttttgcaaggatccaaggatagttttcgcggatgatttctttttctcgagcctcaacagacctggaaatacatataacgcggttgggtccaacgtgacaaccgtcaatgttaacaaccttggtggactaaacactcttggtatctcacttgttcgtatagactatgcacccaac

SEQ ID NO: 94265 - DNA, 781 bp, Arabidopsis thaliana columbia
gtgtgcccgtcccgattttagtttcgggctcgccccacgcgtgcgaagactctcttttcttgcggctctatctctctttgctttgtctcttccattagtaattgcttccgatccaagcccccttcaagacttttgtgttggtgtcaacacaccagcagatggcgtgtttgtgaatggaaagttttgcaaggatccaaggatagttttcgcggatgatttctttttctcgagcctcaacagacctggaaatacaaataacgcggttgggtccaacgtgacaaccgtcaatgttaacaaccttggaggactaaacactcttggtatctcacttgttcgtatagactatgcacccaacggtcagaacccacctcacacccacccacggtgccaccgagatcttggttgttcaacaaaggaactctactttgtaggggtttattctcatcaaaccaaggcgggaaacccgtcttttcgcccaaacactcaacgtgggtgacgggtttgctgtttccagaaagactcatccatttccagttcaacctacgaggaacttcagcagttgcaatcgctgctttgagcacccaaaacgcaggtgttatcacaattgctaacacaatatttgggtctaaccagatgtatacccgattgttcttgccagagcattccaaatggatgttaatgccggtcaggaattttaacaagccaaggtttttaataattgtgtaataggaaaatattagttcttttggagaattaacttttaatttaattacaaagcctt

SEQ ID NO: 94266 - DNA, 2133 bp, Arabidopsis thaliana columbia
  unsure (1)..(2133): unsure at all n locations
gcgaaagacgagctccggtctcatttctcgttcttctgattgatagatcgctcggaacttggaaagcagcgtaatcggtagggagtgatttgagttttggtgaggatgtctatggttgatgagcctttatacccgattgctgtgcttatcgacgagctaaaaaacgatgatattcagcgtagattgaactctattaaacggctttctatcattgctcgtgctcttggagaggagaggacaagaaaagagttgattccatttcttagtgagaacaatgacgatgacgatgaggtgcttttggctatggcggaagagttggggggttttattctgtatgtaggaggggttgagtatgcatatgttctgcttccacctttggagactctatccactgttgaggaaacttgcgtgagggagaaggctgtggattcactttgtagaattggtgctcagatgagggagagtgacttggttgagcatttcactcctctggctaagcgactttcagctggtgaatggttcacagccagagtatcagcatgtgggattttccatattgcatacccaagtgccccagatgtgctaaagacggagctaagatcaatatatggtcagctttgtcaagatgacatgccaatggtgcgcagagctgcagcaactaatttggggaagtttgctgctacaattgaatcagctcatttgaagacagacattatgtccatgtttgaggatcttacgcaagatgatcaagattcggttagattattggctgttgagggttgtgctgctcttgggaaattgttggagccccaggactgtgttgcacacattcttcctgtgattgtcaatttctcgcaggataagtcctggcgtgtgcgttatatggttgcaaatcagctctatgaactttgtgaagctgtaggaccggagccaactaggacggatctggtgcctgcatatgctcgtctacttcgtgataatgaggcagaagttcggatagcagctgctggaaaagttaccaagttttgtcgcattttaaaccctgaactcgctatccagcacattcttccctgtgtaaaggaattatcatcagactcttctcagcacgtcagatctgcattggcatcagttataatgggaatggctccagtcttgggtaaggatgcaacaattgagcatcttcttccaatctttctttctctattgaaagacgaatttcctgatgtacgcttaaacattatcagcaaacttgaccaagtgaaccaggttattgggattgatctactatcacaatcgttactgccagccattgtagaacttgctgaagacaggcactggagagtacgtctggctataatcgagtatattcccttgttggccagtcaattaggtgtaggcttctttgatgagaagcttggtgctctttgcatgcaatggttacaagacaaggttcactcaatccgtgaagctgctgcaaacaatctgaagcgtcttgctgaagagtttggtcctgaatgggcaatgcagcatatagttcctcaggttctagagatgattaacaacccacactatctatatcggatgacgattcttcgtgcagtatcgcttctcgctccagtaatgggatccgagatcacatgttccaaactcttacctgcggtaataactgcatctaaagacagagttccaaacatcaaatttaacgtggccaaaatgatgcaatctctcattccgatagtcgaccaagcggttgtggagaacatgatacggccatgcttggtggagctaagtgaagacccagatgttgatgttcggtatttcgcaaatcaagctctccaatctattgacaatgtgatgatgtctagctaaaaaaaggtaaagaagacagcaacgaattgtgtttggttctcatgagattttgtaaacgatactttgtcgtgtgttgtcttttactttacacgtacgtgaccattgtttctctctgctactaatgttaatgttggcttcatgttttctgtgatttaaaggttgggcgtaaaaaaaaaaaaaaaaaaaagcnnnnnnnnnnnnnnnnnnnnnnnnnnnnnnnnnnnnnnnnnnnnnnnnnnnnnnnnnnnnnnnnnnnnnnnnnna

SEQ ID NO: 94267 - DNA, 1901 bp, Arabidopsis thaliana columbia
atacgactcatatagggaaagctggtacgcctgcaggtaccggtccggaattcccgggtcgacccacgcgtttgagccgtgtttgtgttgagatgtctatgatcgatgagccgttgtacccaatcgccgtacttatagacgagttaaaaaacgatgatattcagctaagattgaattccatcagaaggctttctacgatcgctcgtgctcttggggaagagaggactagaaaggaattgatccctttccttagcgaaaacaatgacgatgatgatgaggttttattagcaatggctgaagaattgggtgtgtttattccttatgttggtggtgttgagtatgcacatgttcttcttccacctttggaaactctttcgactgtcgaagaaacttgtgttagggagaaagctgttgagtcgctttgtagagttggctctcagatgagggagagtgacttggttgatcatttcatttcgttagttaagcgacttgccgctggtgagtggttcacagctagagtatcggcttgcggtgttttccatattgcatacccgagcgcgccggatatgttgaagactgagttaagatcgttgtatactcagctttgtcaggatgatatgccgatggtaaggagagctgcagcaactaatcttgggaaatttgctgctacggttgaatcagcgcatttgaagaccgacgttatgtccatgtttgaggatcttactcaagatgatcaagattctgttagattattggccgttgagggttgtgctgctcttgggaaattgttggagcctcaggattgtgtccaacacattcttcccgtgattgttaatttctcgcaggataagtcttggcgtgtgcgctatatggttgcaaatcaactctacgagctttgtgaagccgtgggacctgagcctactaggacggagctggtgcctgcatatgtgcgcctacttcgtgataatgaagctgaagtacgcatagcagctgccggaaaagttacaaagttttgtcggattctaaaccctgaaattgctatccaggacattctcccctgtgtgaaggagctatcatcagactcttctcagcatgtcagatctgcattggcctcagttataatgggaatggctccagtcttgggtaaggatgcaacaattgagcatctccttccaatctttctttctctattgaaagatgagttcccggatgtacggctgaacattatcagcaaacttgaccaagtgaatcaggttattgggattgatctactatcacaatccttgttgccagctattgtagaacttgctgaagatagacactggagagtaagacttgctataatcgagtatatccctttgttggcaagtcagttaggtgttggcttctttgacgataagcttggtgctctttgcatgcaatggttacaagacaaggttcactcaatccgcgatgctgctgctaacaatctcaagcggcttgctgaggaatttggtcctgaatgggcaatgcaacatatagttcctcaggttcttgagatggttaacaaccctcactatctctaccgaatgaccattttgcgtgcggtgtctcttcttgcacctgtaatgggctcagagattacatgctctaagctcttacctgtagtaatgactgcatctaaagacagagttccaaacatcaaattcaacgtcgctaaagtacttcaatccctcattccaatagttgatcaatcggttgtggagaagacgattcgtcctgggcttgtggagctaagcgaggatccagatgttgatgtcaggtttttcgcaaaccaagctctacaatctattgacaatgtgatgatgtctagctaaaaacattagatcttgtctctctgcttataatcgttttctatttgg

SEQ ID NO: 94268 - DNA, 964 bp, Arabidopsis thaliana columbia
  unsure (1)..(964): unsure at all n locations
cccangaagaagatttgtattgatggaatnnngttgatgttgttntgaacagtgagaaatcaataagatnttggagaaagagtttttcacggagtatggtgaagcaagtcaatatcagatccaagaagttnttggcaaaggaagctacggagttgttgcttctgcggaatgtccacacacgggaggcaaagtagccatcaggaagatgacaaatgtgtttgaacatgtctcagatgctattcgtatccctcagagagntcaagcttctcaaggcttctccgacatcctgaatatcgtggagatcaagcatatcatgcttcctccttgtcgcaaaggaattcaaaggtatatatgttgtttttgaggtgatgggggctgttcttcaccacgttcttaaggtaaatgacgacctcactcctcagcatcatcaattcttcttgtaccaacttcttcgtggcttaaaattcatgcactcagctcatgtgttccatagagatctgaagcctaagaacatcctcgctaatgctgattgcaaaatcaagatctgtgatttaggacttgctcgtgtctcctttactgattccccttctgctgtgttttggactgactacgttgctacaagatggtaccgtgcgccagagctctgtggttccttctattctaactacacgccggcgattgacatgtggagtgttgggtgcatatttgcagagatgctaactggaaaacctttgtttcctggcaaaaacgttgtgcaccagctagaactcgtgactgatctgcttggaactccgtcgccgataactctatccagggtttgttttgtttttatttttcccggaagctaaactaactctcccaatacagaggcttctctctctctatctccgagagatagacttgctttgaacgcaagtgtgtttttattagctttgtgtgtcatgaagttgtttataatgaatct

SEQ ID NO: 94269 - DNA, 1169 bp, Arabidopsis thaliana columbia
  unsure (1)..(1169): unsure at all n locations
tgatttgccggcannnnnnnnnnnnnnnnnnnnnnnnnnnnnnnnnnnnnnnnnnnnnnnnnnnnnncccacgcgtccgcccacgcgtccggcttcgtggaaattattttctctttctcttccattattatcttaaagtgagaaatcaataagatgttggagaaagagtttttcacggagtatggtgaagcaagtcaatatcagatccaagaagttgttggcaaaggaagctacggagttgttgcttctgcggaatgtccacacacgggaggcaaagtagccatcaagaagatgacaaatgtgtttgaacatgtctcagatgctattcgtatcctcagagagatcaagcttctcaggcttcttcgacatcctgatatcgtggagatcaagcatatcatgcttcctccttgtcgcaaggaattcaaagatatatatgttgtttttgagttgatggagtctgatcttcaccacgttcttaaggtaaatgacgacctcactcctcagcatcatcaattcttcttgtaccaacttcttcgtggcttaaatttcatgcactcaggtaagggttctttgtccccttggtgttttctcggcctcttacattttcatctgaagatatattgggtgtttttctttaaatcttgcttcttatcatattttggtccttgattatagctcatgtgtttcctagagatctcgaagcctaagaacatcctcgctaatgctgattgcaaaatcaagatctgtgatttaggacttgctcgtgtctcctttactgattccccttctgctgtgttttggactgactacgttgctacaagatggtaccgtgcgccagagctctgtggttccttctattctaactacacgccggcgattgacatgtggagtgttgggtgcatatttgcagagatgctaactggaaaacctttgtttcctggcaaaaacgttgtgcaccagctagaactcgtgactgatctgcttggaactccgtcgccgataactctatccaggattcggaatgagaaggctagaaagtatttgggaaacatgaggcgaaaggatcctgtacctttcacccataaattccccaatatcgatcctgtggcgctgaagttacttcagcgtttgatcgcttttgacccaaaggaccgtccctctgcagaaga

SEQ ID NO: 94270 - DNA, 900 bp, Arabidopsis thaliana columbia
  unsure (1)..(900): unsure at all n locations
nnnnnnnnnnnnnnnnnnnnnnnnnnnnnnnnnnnnnnnnnnnnnnnnnnnnnnnnnnnnnnnnnnnnnnnnnnnnnnacaatccacgcgtgcgcaaaatcacaacaccaacaaaacaaaaaaaaggttttgatcaaagagatcactgttaaaccctcacaaaatttcctcaggactaataatctgcgatcgatcgtcgttatgataagtctctaaagaagattgatgattctggattacattatcatgggaggagcttgttcaaggaagagagatcaacaagttgaggatattttaaacagaggtgtctctggaaaatatagcaagagttcaagttcgaaatggttagctacttcgctctctaggtctggctccgatgttaaacggaagaatggagaatgcccgtcgcttatggagctctgtgtccgcaagatacaggaggacattgatagatataccaagttctctgacctacctagagatatcagtcagcagatttttgatgaattggtttattcccagaggttaactttaaagtctcttgaggcatttcgggactgtgcaatccaggatctttacttgggggaataccctggagttaatgatgactggatggatgtcatctcctcgcaagtacatcgttgctttctggtggattttcggggtctgatatcacagactctggactggttctttaaaaggttgacaaacctggaattttaacttaatttcttgaccagaatccaaccgtggcttgtgctctagcggctctcaatttgacagcctgacttagaagatgctgcatcctgacaggcatgcggcttatcaacttggttaacttgaagaagctagatcttgagaagtgtcctgggattgacggtgggcttgttcacctgcgag

SEQ ID NO: 94271 - DNA, 392 bp, Arabidopsis thaliana columbia
cattttctcgggaaaattctccaacgaagcttttttttgcttcttctctgaattaaattttggactgaagcaaaaaaagaaaattaagggcgttcatactctacgacgaagcttaccacacaatgcttcttctactaccttctctttccaaatccatctccgtcttgttctagggtttatcccaatcgatttcagatcatgcacggccttagccgtctaggtaacggcagtagcaacggtagaatcaatattccgtcaccgtcaccaccttcttcgcctcggattcgtcataccagaggaaaatctctcgccggaggtgtttataagcaaggattaggagagagacttgtgtttttactcttttcgatagtttttagaaagaaaggtgtctt

SEQ ID NO: 94272 - DNA, 532 bp, Arabidopsis thaliana columbia
  unsure (1)..(532): unsure at all n locations
ggtacgnacggtnatacgttnaagncttgcatcatacgcaattacgccggccgccgcttgttcacctctcgtcatcgcatttgttgccttgctcgcattggtgaatgagttgcgggttgaaatctcggatgcggaaaagttgtcgacggtgactcgaagtgattcagtcccgccaaagctcatccgtccttcgggcaaaagatgacggtcaagacctcgtcctttctctctttccattgcgtttgagaggatgtggcggggaattgccgtgatcgatgaatgctacctggttgatcctgccagtagtcatatgcttgtctcaaagattaaggccatgcaatgtgtaagtatgaaccgaattcagactgtgaaactgccggaatggctcatttaaatcagttataggtttgttttaatgggaacctactaccncgggtaaccctaggaatttctgggggctaatacggggaaaaaaaccccggcttttttgnggggnngtttttttggtaaaggttagcgggggcttcccttt

SEQ ID NO: 94273 - DNA, 615 bp, Arabidopsis thaliana columbia
  unsure (1)..(615): unsure at all n locations
acggacgcgtgggcggacgcgtggctttggctcggattcgtccgtcttctttcttcttagccgagtacttcggtagattagttggaacgattgatgattttgagttaattgaacgttcggcgtatgagtggtgatcggatagctagtgttcgtaggctccatgctcgcgcatcgaactacctaccacctatccttctcagttaattcacgggcgatgttacgctcgatgatgagttccggggcctgtgtttcgtacctaatttgaaggaattgttgagtttggtttacacctttgcccgcggcttctccttcgtggggaagtcgtgggcacaaacatcggcgcttgttcacctctcgtcatcgcatttgttgccttgctcgcattggtgaatgagttgcgggttgaaatctcggatgcggaaaagttgtcgacggtgactcgaagtgattcagtcccgccaaagctcactcccgtccttcgggcaaaagatgacgggcaagacctcggccttcccctctttccattgcggtttgaaagcatgtgccgggatttccccctatgatgcaccggtaaccgcagaggaatgctgccaaagtaagcatgatgnaagaatc

SEQ ID NO: 94274 - DNA, 909 bp, Arabidopsis thaliana columbia
ttcacctctctctctctttcttctccactgtaacctcccaattcaaaaacaattataaaccaaacttgattaatatatatttctttatcatcatctcttcgaaatgcaagatattcatgatttctccatgaacggagttggtggtgggggaggaggaggagggaggtttttcggtggaggaattggcggcggaggaggtggtgatcgaaggatgagagctcatcagaacaatatacttaaccatcatcaatctctcaagtgtcctcgttgtaattctcttaacacaaagttctgttactacaacaattacaatctttctcagcctcgtcacttttgcaagaactgtcgtcgttactggactaaaggtggtgttctccgtaacgttcccgtcggaggtggttgccggaaagctaaacgttcgaaaacaaaacaggttccgtcgtcgtcatcagccgacaaaccaacgacgacgcaagatgatcatcacgtggaggagaaatcgagtacaggatctcactctagcagcgagagctcttctctcaccgcttctaactctaccaccgtcgccgccgtctccgtcaccgcggcggcggaagttgcttcgtcggttattccaggttttgatatgcctaatatgaaaatttacggtaacgggatcgagtggtcgacgttacttggacaaggctcatcggccggtggtgttttctcggagatcggtggttttccggcgggttcagctattgaaactacaccggtttggattcgggggtaaattcctaaatcaagatgatcatctgaagttagaaggggggactggacagacaaaacagtttggagatccaacggctcagggtgagtttcaagggagatctttcgatccgaatatgggatttgaacccttgatttggg

SEQ ID NO: 94275 - DNA, 865 bp, Arabidopsis thaliana columbia
  unsure (1)..(865): unsure at all n locations
ttaggtacacactatagaagagttatgacgtcgcatgcacgcgtacgtaagctcggaattcggctcgagggcggaagttgcttcgtcggttattccaggttttgatatgcctaatatgaaaatttacggtaacgggatcgagtggtcgacgttacttggacaaggctcatcggccggtggtgttttctcggagatcggtggttttccggcggtttcagctattgaaactacaccgtttggattcgggggtaaattcgtaaatcaagatgatcatctgaagttagaaggtgaaactgtacagcagcaacagtttggagatcgaacggctcaggttgagtttcaaggaagatcttcggatccgaatatgggatttgaaccgttggattggggaagtggcggtggagatcaaacactgtttgatttaaccagtaccgttgatcatgcatactggagtcaaagtcaatggacgtcgtctgaccaagatcagagtggtctctaccttccttgattctgatcatagcttcttcttcttaacccaaaaatatatattttatacacataaggtaaagttcgatgaagtggttttttttaatttttatttgatgggtttaaaacgggatttattatataattatatgactgcttgtaaatttttttcccaaatatcaaatttaccccccctttttttttaagtttttggnatatccccagggggcaaatttatggggcatgggtttaagtttggcttcgggtcnagttttnggacngggccggtttaccttaccgggngganccaaanttgggaaagggtttnaaantnncngggggttttttttggggtnnnaatgggggncccaaaaaattt

SEQ ID NO: 94276 - DNA, 456 bp, Arabidopsis thaliana columbia
  unsure (1)..(456): unsure at all n locations
atggaaaccaaaatccctaagtcaatgatcgccggagtacagactgtcatgccggtggaagtgacgcaacaccgggaaatccgctccgtatccgtcgtagatcccgtcggagtaggaatattccggcgaacggttaacatagttacgtattacaaagaagcaggtgatagtggtggtgagagagggtggttagtcgccgggtggatcaaggaatctttagggagagccttgacggagcagccgatgctttccggtaggctacggaggaggaagacggccggggaatgatggtttggagttagtggccaatgatagtggtgtaaggattgtggaggctaaagttttccggcgagtctttccggagtttcttgaaatggcggaagagagaccaaaagcaagacnttaagcaaganancttttttttnttgaaanacaattnatgaagataaccncaat

SEQ ID NO: 94277 - DNA, 569 bp, Arabidopsis thaliana columbia
cggacccgtgggcttctctgctactgctccttcgcgaagaagcatagactaaggtttagggtagaatataatggcgggttggcagaagaatttacagattgttattcgtcaagttggtaaaagagttaaggacagtcacatttccacggcaaattactcttcttctactcggaatttggaatcccctttctcacaaggttacttgcagagtctcctgagaccatcctactcctccagaccactgtatcatctttctacaacaactggggatctctacctcgagacaattgcaggcgggtgaggagcctgtatcatcacctttgtcatctccagctcttgctgggtaagtggcaaaagaagaagaggcagtagattatcccaaagcgtcagaaagttcagggctgtcctcaagtccataaacgcagagtcctaagaagggtcaaccttggttccagcacttagtcccgtgggcatgcgctgttgaagatgctttgttccaattgcagggcccggtcaaacgggctgcacaaactgagtaccgggttattcacccctgccgggcaaatgct

SEQ ID NO: 94278 - DNA, 408 bp, Arabidopsis thaliana columbia
ttgagaggttgaaggaagtaggtactgatcggcaattgactctggaggagtttgagatttgtgttggtacgtcaccgattgtgcttgagttgatgaggaggcaaaatgttgaagatgtttgtaaagactctgtggatttggatactaatgttagtggaagcagggtgactaaacatagaaggagagggagttggttaaagagtattaagaatgttgctagtagtgtgactgggtataaagagcgacggagcaccgatgatagggattcaccgtctgagagaggtggtcagaggtttagctctgcaactgatgatagtcgagatatgtcttttcatgaccctgagagagttaaggttaggcagttggggaagtcgtgtaaagagcttactgcacttttcaagagtcaag

SEQ ID NO: 94279 - DNA, 802 bp, Arabidopsis thaliana columbia
aatcgactcacttagggaaagctcgtacgcctgcaggtaccggtccggaattcccgggtcgacccacgcgtccgctttggtttttcttcactgacaaaacccctaaaaatggccgactcattcgagctaattgtaacccgaaaagaacctgttctcgtctctccagcctccgaaactccaaaaggtctccattatctctcaaatctcgatcaaaacatcgccatcattgtcaaaacattctactacttcaaatcaaactcaagatccaacgaagaatcctatgaagtcatcaagaagtcactctccgaggttctcgttcactactatcctgccgcagggagactcacgatcagtcctgaaggaaagatcgctgtggattgcaccggagaaggagttgtagtggtggaagctgaggccaattgtgggatagagaagataaagaaggctatatcggagattgatcaaccagagactcttgaaaagttggtttacgacgttcccggtgctcggaatattctcgagattcctccagtggttgttcaggtgaggggttgatcgattgatattatgttttgcttgctgttttgtgtgagtgaacgaacatgacctatactggatttggtccgatattggtttcaaataactatattatatagtagaattagattaatattgattttttaattatgcatgtacgtataaatacgctaattagtaagaaagaaaaagatccatactattattcactacaaaatacataaatttcataacttttaattcaaaagtatttatattggaacat

SEQ ID NO: 94280 - DNA, 874 bp, Arabidopsis thaliana columbia
  unsure (1)..(874): unsure at all n locations
gctggtttcgatgggattgagatccacggggcgcatggttaccttattgatcagtttttgaaagatgggatcaatgaccgtactgaccaatacggaggatccattgcaaaccgttgtagattcttgaaacaagtagtggaaggtgtagtttcacccataggagctagtaaagttggtgtgagggtatccccggctatagatcacttggacgcaactgattctgacccactatcactcgggctagccgtggttggcatgcccaataagttaccaggtgttaatggctcaaaagctcgcttaccttcacgttacacaacctcgctaccacgcctacgggcaaacagagtctggaaggcaagggagtgatgaggaagaagctaagctaatgaagagcttgaggatggcttataatggaacctttatgtctagtggaggattcaataaggaactaggtatgcaagctgttcaacaaggtgatgctgatttggtttcatatggcagactgtttatcgcaaacccggatttggtttcgcggttcaagattgatggagagttgaataaatataatcggaagacgttttacactcaagatccagttgttggctacacggattatcctttcttggctcctttttcccgcctctgagtttgataatcgaggagaaaatgtattgacaatacattgatatgtaaaatgacaatgttattgttatccacttaatatttagtcatgtatcttgttgtttatctagttaaaatcttcatggcattactccnnnnnnnnnnnnnnnnnnnnnnnnnnnnnnnnnnnnnnnnnnnnnnnnnnnnnnnnnnnnnnnnnnnnnnnnnnnnnnnnnnnnnnnnnnnnnnnnnn

SEQ ID NO: 94281 - DNA, 387 bp, Arabidopsis thaliana columbia
tgacaatggcgacgaagctgatttctccgccgttgtcttgtccgtgggttacttcaagagaggtgataatcaaagggcttccacggcggagaagagaatggatggtcacgaagagaaacagagtctctgctgtcacggccatgattgtggagccactttctgttgtttcttcttcagcaattcagattcatcaatggtgggaacaaaaccctaattcggtactgttaatgacggaggctactggtggttattcgttggctagctattatacgtctttgggtttgtttgttaaatccctgttccccggggcctttggtctctaatcaaacgctctgttaaatcaaagatagtgagaaagacgtttgttggtaatgacgtcaagaagga

SEQ ID NO: 94282 - DNA, 1032 bp, Arabidopsis thaliana columbia
  unsure (1)..(1032): unsure at all n locations
nnnnnnnnnnnnnnnnnnnnnnnnnnnnnnnnnnnnnnnnnnnnnnnnnnnnnnnnnnnnnnnnnnnnnncccacgcgtccgaacaaacccttcactgcgccagtgttgtgcggctctgcgaatcttcgaaaatgggtgcgtacaagtatgtatctgagctatggaggaagaaacagtccgatgtgatgagattcctccagagggttaggtgctgggagtacagacagcaaccttcgattgttcgtctcgtcaggcctactcgtcctgataaggctcgtcgtttgggttacaaggccaagcagggctttgttgtgtaccgtgtacgtgtgagacgtggtggacgcaagaggccagtgcctaagggtattgtgtatggtaagccaacaaaccagggagtgacacaactcaagttccagcgtagcaagcgttctgttgctgaggagcgtgctggcaggaaattgggtggtctcagagttgtcaactcttactggctcaatgaggattcgacctacaagtactacgagatcatcttggttgacccagcacacaatgctgtgcgtaatgacccgagaatcaactggatctgcaacccagttcacaagcaccgtgagctcagaggacttacctcagagggaaagaagaacagaggtctccgcggaaagggtcacaacaaccacaagaaccgtccatctcgcagggctacatggaagaaaaacaactctctcagccttcgtcgttaccgttgattgccttttgcttttattattactgttatcatcttctaggttccatgttgttgcacttttatctctctcaggatgacttgtttttgcaaattttggagactatacaattatgctttgaacctaaattttatatttgctttgcttttttgttgatctcagtctggctttggaatatatcgaggcccctttgcaatnnnnnnnnnnnnnnnnnnnnnnnnnnnnnnnnnnnnnnnnnnnnnnnnnnnnnnnnnnnnnnnnnnnnnnnnnnnnnnnnnnnnnnnnnnn

SEQ ID NO: 94283 - DNA, 441 bp, Arabidopsis thaliana columbia
ccaaatcaatccttctttaatttacttattcttagtataacgttcacaccttttcttacacatttacaactatatatggagtcgtcacggagcctcgagcacgtgctctccatgcaaggtggcgaggatgacgcgagctacgtcaaaaactgttacggtccagcggcagctttagccttgagcaaaccaatgctgacgacagccatcaactccataaagctcaccgaaggttgctcctctcacctgaaaatagccgatttaggttgcgcaatcggagacaacacgttttccacggtggaaacggtggttgaggtgttagggaagaagctagccgtgattgacggtggaaccgagccggagatggagttcgaggtcttcttctctgacttgtcttccaacgatttcaacgcgttgtttcggtcgttggatgagaaagtgaac

SEQ ID NO: 94284 - DNA, 569 bp, Arabidopsis thaliana columbia
  unsure (1)..(569): unsure at all n locations
cnnnnnnnnnnnnnnnnnnnnnnnnnnnnnnnnnnnnnnnnnnnnnnnnnnnnnnnnnnnnnnnnnnnnnnnccacgcgtccgttcttcctcagagaaattctgtgttgttgtatacagagagatgttctcatcttctacactcgtttattctctatctctcttcctctctctttctcttctcttcttcctcttcatcctctcaccacacatccttctctcttcctctaccctcatttccaccgccgatgacctagacgacctctctctcttccaccgcgccgtcgtctcttcctccaccaacaacaaccgtcgtctcatctccctctctccaaatccacccccaaagatcgctttcctcttcctaacaaactccgatctaaccttcttacctctctgggaaagcttcttccaaggtcaccaagatctctacaacgtttacatccacgcagatccaacctcctccggctctcctcttctcgattcttcatcaatcaacgctaagttcatcccggcgagaagaaccgcacgagcttctccgacgttaatctccgcccgacgacgattact

SEQ ID NO: 94285 - DNA, 937 bp, Arabidopsis thaliana columbia
  unsure (1)..(937): unsure at all n locations
nnnnnnnnnnnnnnnnnnnnnnnnnnnnnnnnnnnnnnnnnnnnnnnnnnnnnnnnnnnnnnnnccacgcgtccggaaaggaatatttgaaggaggacttgagagtgcagacagaggaggtactgttgatgaagaagatgttgaaggggattggggtgaggaacttgacattaatgttgatggaatggagaacatccttctctcttcctctaccctcatttcctccgccgatgacctagacgacctctctctcttccaccgcgccgtcgtctcttcctccaccaacaacaaccgtcgtctcatctccctctctccaaatccacccccaaagatcgctttcctcttcctaacaaactccgatctaaccttcttacctctctgggaaagcttcttccaaggtcaccaagatctctacaacgtttacatccacgcagatccaacctcctccgtctctcctcttctcgattcttcatcaatcaacgcttagttcatcccggcgagaagaaccgcacgagcttctccgacgttaatctccgccgaacgacgattactagcaaacgcaatcctcgacgatcctaacaatctctatttcgctttaatctcacaacactgtatccctctccattccttctcttacatccacaaccacctcttctccgatcatcatcaacaaagcttcatcgagatcctctccgatgaaccgttccttctgaaacgatacaacgcaagaggagacgacgcgatgcttcctgagatccagtaccaagaactccgtgttggatctcagttcttcgtattagcgaaacgtcatgctctaatggtgatcaaagngagaaagctatggnggaaattnaaattaccatgccttgatgttgaatctggtnaccctgaagnacattatttccngncttttttgnctcttgagggatcctcaagg

SEQ ID NO: 94286 - DNA, 651 bp, Arabidopsis thaliana columbia
  unsure (1)..(651): unsure at all n locations
nnnnnnnnnnnnnnnnnnnnnnnnnnnnnnnnnnnnnnnnnnnnnnnnnnnnnnnnnnnnnnnnnnccacgcgtccgcaactgtgtcgattgtcccaaataattttaaaaataatttcacgtgtccccattttgctgacgtcattattcccctttttcctttttattgtcacatcagaattttttctaactcattcatttcaatcaatcttcttcttcttcttcttcttcttcctcagagaaattctgtgttgttgtatacagagagatgttctcatcttctacactcgtttattctctatctctcttcctctctctttctcttctcttcttcctcttcatcctctcaccacacatccttctctcttcctctaccctcatttccaccgccgatgacctagacgacctctctctcttccaccgcgccgtcgtctcttcctccaccaacaacaaccgtcgtctcatctccctctctccaaatccacccccaaagatcgctttcctcttcctaacaaactccgatctaaccttcttacctctcttgggaaagcttctttcccaagggcaaccaggatctcttacaaagggttaaaatccagggnngtccaaacntctttgggttttcncnttttggnttttaaataattaaagg

SEQ ID NO: 94287 - DNA, 986 bp, Arabidopsis thaliana columbia
atctccagcacaatacgactcaccttagggaaagctcgtacgcctgcaggtaccggtccggaattcccgggtcgacccacccggctgcggccacgtgggcaaacacattcaaatctcataaacacattgataagtaaaaatcctctcgagagacaagaatgagaatgacacttgttcacttgtctctctccctcttctcatgtctcctccttgtcctttctccgaccttcattgcctccactcccgtctccgaacccgaactcgtagttcaagaagttaacgaaaagattaatgcgtctaggaggaatctaggcgtgctctcatgtgggaccggaaatccaattgacgactgttggagatgcgacccgaaatgggagaaaaaccgacaacggttagccgattgcgcgatcgggtttggcaaacacgcaatcggtggtcgtgacggtaaaatctacgtggtgactgactcgagtgacaaagacgtggttaaccctaaacccggaacccttagacacgcggtgatccaagacgagccactatggatcatcttcgcgcgtgacatggtcataaaactaaaagaagagctgattatgaactctttcaagactatagacggccgtggagcgagcgtccacattgctggtggcgcgtgtatcaccgtccagtacgtgaccaacatcatcatccacggtgttaacatccatgactgtaaaagaaaggggaatgcttacgttagagactctccgtcgcattatgggtggaggacagcgtctgacggtgacgccgtctcgatttttggtggctcccacgtgtgggtagaccattgctcgttgtccaactgcgctgacggtctgattgactccattcatggatcaacggccattactatctttaataactatttgagtcactctcattaagttatgcttttgtttcacattgatatttcctctatagacaataatattttattttttctttttttt

SEQ ID NO: 94288 - DNA, 564 bp, Arabidopsis thaliana columbia
  unsure (1)..(564): unsure at all n locations
gcttgtagtatacttcnnnnnnnnnnnnnnnnnnnnnnnnnnnnnnnnnnnnnnnnnnnnnnnnnnnnnnnnnnnnnnnnnnnnnnnccacgcgtccgggagactctctggtcagagacggcgatgattctaggccgatgggtttccttcagttgcggaaacacgccggtgactaattgttccgaacgacgacgacatacggagtttcgtcgtctctcctctgctagtacttgtcgaccttctctcatatgctcttgtctcaaaagcaaatcctcccaagaaactactcagattgaacagttggggaatggagaagggttctcagttttggcatcagagattccatgggaggatgataacatatggagcacatttgctctttacatgttctctctgcatattcctctcagttttgggggtttatccattgttgccaacatactccaccggcaggttcttgatcctcagacccaagtgctatcacttgtggttctccaaatggtagaacttgcagggacagtcttgctgctgaggaccacagcgaagcctcagtgcaaatcaatc

SEQ ID NO: 94289 - DNA, 455 bp, Arabidopsis thaliana columbia
cagagatggggcagactttgttcgtggataccctttcagtatgcgcgaaggtgccataacgcgcggtctctcatggcctctggctcaacattcctgactatgatgctcccactcagcttgtgaaacctcttgagaaaaattccaggtatgttgatgcagtcatgaccattcccaaaggaactctttttcctatgtgtggtatgaaccttgcttttgaccgtgagctgattggtccggctatgtactttgggcttatgggtgatggacagccaattggacgctatgacgacatgtgggctggttggtgtgtcaaggtgatatgtgaccacatgggatggggagtgaagacgggtttgcctttcatatggcacagcaaagccagcaacccattcgtgaacctgaaaaaggaatacaacggtatattttggcaggaagaggcgattcccgtcttcaat

SEQ ID NO: 94290 - DNA, 524 bp, Arabidopsis thaliana columbia
  unsure (1)..(524): unsure at all n locations
agatttgccggcactnnnnnnnnnnnnnnnnnnnnnnnnnnnnnnnnnnnnnnnnnnnnnnnnnnnnnnnnnnnnnnnnnccacgcgtccgcccggttcttgaagatggagatctcaaacttttcggtactataatcttgtttcttattctggaattttatttgaagtcttggatttgaatgtggaggttttgcaaaaggttacataattattaccttttcataagtttctttgttaccatatttttgcgaaatttttatagtgttttgattatgcatatagaaccaaaggcgatcacgcgatacctagccgagcaatacaaagacgttggaacaaatctattaccagatgatcccaaaaagagagcaatcatgtcgatgtggatggaagtagatagcaatcaatttcttcctatagcatcaacactcatcaaagaactcatcatcaatccatatcaaggtttagccacagacgatacagcagttcaagagaacaaagaaaagttatcagaggttctgaacatc

SEQ ID NO: 94291 - DNA, 524 bp, Arabidopsis thaliana columbia
caactctatgcgactcatatagggaaagtctggtacgcctgaaggtaccggtccggaattcccgggtcgacccacgcgtccgctatctagtaaatagacaaagaaaacaacatggctgattctaagatgaagctccactgtggctttatctggggtaattcggcagctctcttttgtatcaatgagaaaggtcttgactttgagcttgtcttcgtagattggcttgctggtgaagccaaaaccaaaacttttctctctactctcaacccatttggtgaagtcccggttcttgaagatggagatctcaaacttttcgaaccaaaggcgatcacgcgatacctagccgagcaatacaaagacgttggaacaaatctattaccagatgatcccaaaaagagagcaatcatgtcgatgtggatggaagtagatagcaatcaatttcttcctatagcatcaacactcatcaaagaactcatcatcaatccatatcaaggtttagccacagacgatacagcagttcaaga

SEQ ID NO: 94292 - DNA, 712 bp, Arabidopsis thaliana columbia
  unsure (1)..(712): unsure at all n locations
atgatactccnnnnnnnnnnnnnnnnnnnnnnnnnnnnnnnnnnnnnnnnnnnnnnnnnnnnnnnnnnnnnnnnnnnngnnnccacgcgtccggaaggagacaacacaacacacacacacacagagagcaagcaaaagaggcggctagggatcagagagtggttccttcactgaaagtttcttctttttcattctcttcttctccttcagattccttgcctcttcttcaagattctcctctcttccatgtgcgtttctgtgcttttgaagacgacgatgatgatgatgatgtctttatattgaaaccaaattcgtctccacgattgtttcttctgagttttgatttttcagatctcgcttcttttccgatttgttcaatcatcatggcttacctgatgtagtaattgggatcaaattcattcacaaagctcgagtttttattattagtggctactgttatctgtgtatagaagaagcttgtgtgtgtggttctctacgtttcatgatcggtttacggtatctgttatatccggctccggtgggttcagatttaggcactggtctagaaggctttcttcggctactgcttcttctggtcaccaaaagaagccctttttggtttcttcttctggttcatggcgaggaacttaaaccagcctgttcagacacaaagggccggggccggtttcaagacttctcttactggagctag

SEQ ID NO: 94293 - DNA, 440 bp, Arabidopsis thaliana columbia
gtcttataatttattcatttctctcttcttcatcgatcttcggcttttagaaaacctgggcggaaatggcaacggcgtcggttaacatgcagtcagtgttcgctgctccttccggtgtattgactacacgcaacatcagaaacacaaaccaactcttcttcaagaggattgctccggataggcgtcagatgcatggctcagggcgatcctatcaaggaagatccttctgtgccctcgacctcgacttcggccactccaccacaaatgccacagtctcctcctccaccagttagcaagcctaaggtgagtacgaagtttggagatttgctagcgtttagcggtccagcacccgagaggatcaacgggagactagcaatggttggattcgtggcggccatcgccatggagttatcaaagggagaaaaacgtgttgctcagat

SEQ ID NO: 94294 - DNA, 484 bp, Arabidopsis thaliana columbia
gcgtttgcttccatcgttctctcgattgtttcctctcaagcgaagcttcttcttcttcgatcttcttcctcgtgtgtggattcgtttctgaaataggatcgaagtaatggccagcaaatctggaagcggtggcctaagagaaccgccgaatgagcaagctgttttgaacatgtatgaaggcaagagatcagagctaagccaaatctactccaacataaccgacctcgagatgcaagtgagcgaacattctctggtcattaacgccattcagcctctcgaccaatcgaggaaatgcttccgcatgataggaggcgttcttgtcgaaagaaccatcaaaagaggtactcccagctgtccaacgtaacagggacggacttgaagaggttttgaggaagcttttacgggacattggggagaaaaagaaggaagatcctttcagacgtttgaagcttaagtataagatcaggataacgaaacaagaaga

SEQ ID NO: 94295 - DNA, 1237 bp, Arabidopsis thaliana columbia
  unsure (1)..(1237): unsure at all n locations
cttgaaaccatgctcaaagagtttgagcggttgaaaaaagagtatcctgatcggattctgattgcttcagtcatggaggaatataacaaaactgcttgggaagagcttatcgaccgtgttgagcaaactggtgttgatgctttagaaatcaacttctcgtgtcctcatggtatgccagagcgcagaatgggtgccgctgttggacaagattgtgcgcttctcgacgaggtttgcggatggattaatgctaaagctacagttcctgtatgggctaagatgactcctaatattactgacataactgagcctgctagggtgtcactaaaatccggatgtgaaggaattgcagcgatcaatacaatcatgagtgtaatgggaattgatatgaagacgttgcgtcctgagccatgcgttgaaggttactccactccagggggatactcttataaggccgttcgcccaattgcactggcaaaagttatgaacattgccaaaatgatgaaatctgagtttagtgaggatcgctcgctttcgggtattggaggagttgaaactggctatgatgccgctgaattcattctccttggatcaaatactgtacaggtatgcaccggtgtgatgatgcacggctatggtcatgtgaaaaccctttgcgctgagctgaaagatttcatgaaacaacacaacttctctacaatagaagagttcagagggcattcgctgcagtactttacaacacacacagatttagttaagagacagaaagaagcagttgagcagagaaaagctgagaagagaggcttgaaatctgataaagattggaccggggatgggttcgtgaaggagactgagagtatggtttctaactaagttagtagcctgatgaagttatgaccacccaaatatttcaataaaggttcagcaacttcattcacaactcacatgcaaattacgaaggctctttctttcaaatgtttaaaatcaacttcttaaatctcacttgaaaagaaataactaaattttatgtttcttaattttcttctcgttgtgtattattcatcttgtatccatccatagcaaccatttctttgttacttcaagttggcttaaattttggccaataataataccatagaccttctccaaaaaaaaaaaaaaaaaaaagnnnnnnnnnnnnnnnnnnnnnnnnnnnnnnnnnnnnnnnnnnnnnnnnnnnnnnnnnnnnnnnnnnnnnnnn

SEQ ID NO: 94296 - DNA, 600 bp, Arabidopsis thaliana columbia
attcagactactattcagagcttacctccagctttaaaacactattactgcatctcaaagcgtcaacacaaagtcgacacgttaaggagatgcgttcacgccctcgatgcccaatcggttatagctttcatgaaccactcaaggcagctcaaagatgtggtctacaaactcgaagctcgtggtatgaattcagctgagatgcacggagatctcgggaagctagggagatcaacagttctaaagaagttcaagaacggggaaatcaaggtacttgtgacaaacgagctctctgcccggggtctggatgttgcggaatgtgatctggtggtgaatcttgagcttccaactgatgcggttcactatgctcatcgagctgggagaacagggaggctgggaaggaaagggacggtggtaacagtgtgcgaggaatcacaagtgtttatagtgaagaagatggagaagcagcttggtttgcctttcttgtattgtgagtttgttgatggagagcttgttgtcactgaggaagataaagctattataaggtgaaaatctaaagatgtaattttcagatactattaaaactattgaaaattcagagtc

SEQ ID NO: 94297 - DNA, 629 bp, Arabidopsis thaliana columbia
cgcctgcagggcccggtccggatttcccgggtcgacccacccgtccggcctgcttcacattggaaagctacatctttttcgttttttgtggtggcgatttctattctccggctgaaacctaccttcaggattcagcctttctcaggttttcagttggattcagatagcagcttgtacttcttctagataatcggcgacacatatggatgattgggaggccgaggactttcaaccacttccctcaaaagttgaactgaaaagtaactgggatgatgaggatgtggatgagaatgatatcaaggactcgtgggaggaggaagatgtatctgctccgccacctatagtaaagcctgcttctgagaaggctccaaagaaaccagcagtaaaagctgttgaaaagaaggttaaaactgttgaagctccgaaaggaacatcaagggaagaacctctagatcctattgctgagaaacttcgcatgcagaggcttgtagaggaagctgattaccaatcaactgctgaactctttggagtaaagactgaagagaaaagcgtcgatatgttaattccgaagtctgaaagcgatttcttggattatgctgagttgatatctcagagacttgtaccatttg

SEQ ID NO: 94298 - DNA, 726 bp, Arabidopsis thaliana columbia
gcttcttgtacaacagccgaaacaattataccatgacattaaaatccagatttttttcagtcattttcgtattatttgtttaaaagtaaagtttttcttccatcaaaatggaaaatgtgatctggtttttttcttagaagatattaaaacaatcggagagaggattgcaaattttttatttttgttaatttgctgtgtgatgggtctggttgattctttgttaggaaaagatgcaagaaaatttctcaaaaggaaagatagtgatgctgcagaagcaggacgagctttggaagaactcagaagttctttgtacaatgagcttaaaacagcagaaggagctaaaaggcaacaacagagattttgtggccctgttgttgcaatgtcctttaatttcgttgttgctgttggaatcatccttgccaataaattagtaatttggtttcttcaatctcaaattcttctttctcttttttttatttaccatgtgaatgtaattgtaaggttgaattgtgcaagtgatgggaagagttggattcaatttcccaatctttctaacattgattcattataccgtggcttggattcttttagctttcttcaagtctctctctttgcttccaatgtctcctccatcaaagacaacacctttctcatctcttttctctcttggagctgtcatggcctttgcttctggactcgctaataccagtctcaaacacaatagcg

SEQ ID NO: 94299 - DNA, 513 bp, Arabidopsis thaliana columbia
tctatgcgactcatatagggaattctggtacgccagaaggtaccggtccggaattcccgggtcgacccacgcgtccgatttcctcatcttcttgttgaaagtaatggcaagactcacgagctttctccttcttctttctctcatctgctttgtccctctctgtctctgcgacaagagctatggaggcaaacttttcccgggttattacgcccattcatgcccacaagtcaatgagatcgtgagatcagttgtagctaaagctgttgctagagagacacgtatggctgcttccttgttgagacttcatttccacgactgtttcgttcagggttgtgatggctctttgcttctagacagcagtggaagggtagcgactgagaaaaactcaaaccctaacagcaaatcagctcgtgggtttgacgtagttgacccaaaatcaaagctgaactgggggaaacaatgccctgggacttgtttcttgcggtgatgttctttaccctagccgtagggact

SEQ ID NO: 94300 - DNA, 537 bp, Arabidopsis thaliana columbia
  unsure (1)..(537): unsure at all n locations
gctancctcgatcncnggcgggaagnatccccgcgaaggacngggacctgtaaggacggntactggatcagacctggaccgngtatccgccctgaaggcttgcaagngttaatccncttttaaacttnccaaggattgngcctggaaagtgaataggggaaagaagagtggaagtgaagaagttggagaggtgattaatgttatctaataaatcaccccaagacaaggggcggtgtctttttgttcttttgtttttccttttcaactttcttcattgatctctattctttttttgagtcataattcattggttttggaacctaaatttttgtcagttttgtctttggtttatgtctttctctcttgttaatgtttatgttgttttttggtcttgtcagtaaagaagagtgaaaaaacatcacatcatgtaataatggcttgtgtctgtaattctgtgaatcccctcaggctgaattttgtcagtcatgttgggacaatttcctgtttctgtcttttcaaaaagctccaattccagtt

SEQ ID NO: 94301 - DNA, 528 bp, Arabidopsis thaliana columbia
cccacgcgtccgcaacaaagacttttgtgcaataaagcatggaatccaacagaggtcaaggttcgatccaacagttgcttgctgctgaggtagaagctcaacacattgtcaatgctgcaaggaccgcaaaaatggcaagactgaagcaagctaaggaagaggcagagaaagagattgccgaatacaaagctcaaacagagcaagacttccagaggaaacttgaggagacaagcggagactctggtgcgaatgtgaagaggctggagcaagagactgataccaaaatcgagcagttgaagaacgaagcatcgaggatttccaaagatgttgtcgaaatgcttctgaaacatgtgaccacagtgaagaactgagagatatttttataagaaagtaaaaaaaaagtttatgaaaaaagtgggagtcatttttgagtgatctgctctctttctcttttgtgggtatttctggatttgagagactcatcttatattattgttgctacttaaaaaaaaaaaaaaagggcggccg

SEQ ID NO: 94302 - DNA, 460 bp, Arabidopsis thaliana columbia
tgcagatgcttgcctcaggggtctacgaggtgatgcaaacatcgttgagtgcgcatatgtggcatcccatgtgactgagcttcccttcttcgcatcgaaggtgcgtctgggacgatgtgggatcgatgaagtgtacggccttggaccattgaacgaatataagaggctggcattagcgaacgcaattctcgtgcggcttactttgctccgttgactactacaactccgttgactcctgccaagcagctaaccgcagttggtagtgatgacggaactgtatgggatgatggtgcttacgttgggggtgtcataatatactgtttataatattataatttgtgttatctcatatagtttcatagctaacaagttttccttacactgtctttgactaattttaatttttattattttaatttattttttttttatatatatcatatattttatatattattta

SEQ ID NO: 94303 - DNA, 364 bp, Arabidopsis thaliana columbia
aaagaggaaggccacaagatcgttggtttccatggaagagccgatgttctgctccacaaaattggagtccatgttcgtcctttatccaactgatgatggagctctttatccttgattccatgcatctaataagttatcaaatctatcttctaaatttctcatatgaggtctcttcatgcctctggtgaatggtgatctttgataagtgttttacgcgttgtctcttgcgatgttggtttttctttggtcttcttgggctctattttaataaaggaaggttgttccaatctgatctttagtttccctatatgttctataatacttacttttgccaaagactaaaatacaatgcggttctaattca

SEQ ID NO: 94304 - DNA, 554 bp, Arabidopsis thaliana columbia
atcgaaggtgcgtctgggacgatgtgggatcgatgaagtgtacggccttggaccattgaccgaatatgagaggatgggattagagaaggcaaagaaagagctttcagtaagtattcataaaggtgttacctttgcgaagaaataaagagactcgatcgtgatttaactcacttaagcgatggttttggaatagtcagagttttggaataagaataatgcctcccaataaaagctcttgcggtcttcttggatccaatcttaaaggttcaagaaactcatctcctttaggtaaaatcttcgattgttttatcgttccatcgaaccactttgttcttagatccaagaacgtttatgatttatgtagttgggctataaaagtgagaacagagcaataatcttgcaacattttttctcatcttcttggtgtgtgttttttttgttggttttcatctttttgttcttgctcatgagagcatccttagaaggctattgttgggaagtaaataagtttgcatcgccggaaatatgatcaaggtcattcggtatacctcata

SEQ ID NO: 94305 - DNA, 709 bp, Arabidopsis thaliana columbia
  unsure (1)..(709): unsure at all n locations
atcataatctactctctttaaaagaaattcgtaagtactatcaagaagcagaagatggcccaaaaggtggaagcacaaggagggaaaggagccaacctatgggacgatggatcgacacatgacgccgtgaccaagattcagctcgcagcaggcatagacggaattcaatatgttcagtttgattatgtcaagaacggacaacccgaacaagctcctcttcgtggtaccaaaggccgtgttctcccagctgatccgtttgtnattaaccatccagacgnacatctagtttctntagaaggttggtatagccctgaagggtatcattcaagggggttaaggttcatcttccaaccaaggaaggccttcttgattgtcattgggtccccgttgaggggtacctcactttcaatttctcccagggttaaggcccaggnggggtcctttggggtttcaattgggctttcccggggggaattttttaatttttttttggggnttanttttncncccgtgggttcttaaacttccggtggcttcctgccaagcagctaacggcattttggtagtgttgacggaactgtatgggatgatggtgcttacgttggggttaataaggtgtacgttggacatgcccaaaatggaattttagttgttatgtttgtgatcttctaaattatttgtaatatgttttaaattgttattataattt

SEQ ID NO: 94306 - DNA, 1015 bp, Arabidopsis thaliana columbia
  unsure (1)..(1015): unsure at all n locations
atgatctgnccnnnnnnnnnncggacgcgtggggtctgataatagttttgtagagtttggttaataaaactaatcgtgtacgctactaatccgctcaggtaactaattaatattcaaaaagatggctcaaaaagtggaagcagggggtggcgccggaggagcttcatgggatgatggtgtccacgatggcgttagaaaggtgcatgtagggcaaggccaagatggtgtgtcatctatcaacgtcgtgtatgcgaaggactctcaggatgttgaaggaggtgaacacggaaagaaaacgttacttggatttgaaacgtttgaggttgatgcagacgactacatagtagcagtgcaagtgacctacgacaacgtgtttggccaagactctgacatcatcacatctattaccttcaatacattcaagggaaaaacatctccaccctatggattggaaacgcaaaagaagtttgtactcaaggacaaaaacggtggtaaacttgttggcttccatggacgcgctggtgaagctttatatgctcttggagcatattttgctacaaccacaactcctgtgactcctgccaaaaaactatctgcaattggtggtgatgaaggaactgcatgggacgacggtgcgtacgatggtgtcaagaaggtgtacgtaggacaaggccaagatgggatatcagccgttaagtttgagtacaacaaaggcgcggagaatatcgtaggaggtgaacatggaaagcctactttactcggattcgaggagtttgagattgactatccaagtgaatacatcaccgcagttgaaggcacctatgataaaatctttgggagtgatggcctaatcataactatgcttaggttcaagactaataaacaaacgtctgctccctttggacttgaagctggcacagccttcgaacttaaagaggaagggcacatgatcgttggcttccatggaaaagccagtgagttgctttatcagtttggagtccattgtttgccactc

SEQ ID NO: 94307 - DNA, 1557 bp, Arabidopsis thaliana columbia
tccgtcgcagtaccgcaccggaattcccgggtcgacccacgcgtccgcaatttcgttgttaaagaacaaagctttaagcagccatggatccaaaccaacgtatcgcgagaatctctgctcatctcaatcctcctaatcttcataatcagattgctgacgggtcaggtttgaatcgggtggcttgtcgggcaaaaggtggatcacccggattcaaagtggcgatacttggagcagctggtggaattggacaacctcttgcgatgttgatgaagatgaatcctttggtttcggttcttcatctctatgatgttgctaatgctcctggtgttactgctgatattagtcatatggatactagtgccgttgttcgtggatttctcgggcagccgcagttagaggaagcacttacgggtatggatttagtgatcatacctgctggtgttccgaggaaaccagggatgacgagggatgatctgtttaacattaatgctgggattgtgaggacactctctgaagctatagctaaatgttgtcctaaagcaattgtgaatataatcagtaatccggtgaacttcacggtgccaatcgcagctgaagttttcaagaaagctggaacctttgatcccaagaaactcatgggtgtcactatgcttgatgttgttagagctaatccctttgtggcggaagtaatgagtcttgatcccccgtgaagttgaagttccggttggttggaggacacgccaggaagttacgattttaccactgcctttcccaggtgaaacctccttgctcgttcactcaaaaagagattgaatattttacagacccgcatccaaaacgggggcactgaagttgttgaggctaaagctggagcaggttctgcaacactatccatggcatatgcagcagtggagtttgcagatgcttgcctcaggggtctacgaggtgatgcaaacatcgttgagtgcgcatatgtggcatcccatgtgactgagcttcccttcttcgcatcgaaggtgcgtctgggacgatgtgggatcgatgaagtgtacggccttggaccattgaacgaatatgagaggatgggattagagaaggcaaagaaagagctttcagtaagtattcataaaggtgttacctttgcgaagaaataaagagactcgatcgtgaataaacacacttaagcgatggttttggaatagtcagagttttggaataagaataatgcctcccaataaaagctcttgcggtcttcttggatccaatcttaaaggttcaagaaactcatctcctttaggtaaaatcttcgattgttttatcgttccatcgaacccctttgttcttagatacaaaaacgtttatgatttatgtagttgggctataaaagtgagaacagagcaataatcttgcaacattttttttcatcttcttggggggttttttttttgttggttaaaaaaaaaaaaaaaaaaaaaaaaaaaaaaaaaaaaaaaaaaaaaaaaagggcggccgctctagaggatccaagcttacgtacgcgtgcatgcgacgtcatag

SEQ ID NO: 94308 - DNA, 1312 bp, Arabidopsis thaliana columbia
  unsure (1)..(1312): unsure at all n locations
caaatttgatttgccttgcctcttgcggtaccggtccggaattcccgggtcgacccacgcgtccgatcacaatctactctctttaaaagaaattcgtaagtactatcaagaagcagaagatggcccaaaaggtggaagcacaaggagggaaaggagccaacctatgggacgatggatcgacacatgacgccgtgaccaagattcagctcgcagcaggcatagacggaattcaatatgttcagtttgattatgtcaagaacggacaacccgaacaagctcctcttcgtggtaccaaaggccgtgttctcccagctgatccgtttgtgattaaccatccagacgaacatctagtttctgtagaaggttggtatagccctgaaggtatcattcaaggaattaagttcatctccaacaagaagacttctgatgtcattggatccgatgagggtactcacttcactctacaagttaaagacaagaagatcattggctttcatgggtctgccgggggcaatcttaattctcttggggcttactttgctccgttgactactacaactccgttgactcctgccaagcagctaacggcatttggtagtgatgacggaactgtatgggatgatggtgcttacgttggggttaagaaggtgtacgttggacaagcccaagatggaatctcagctgttaagtttgtgtacgacaaaagccctgaggaggtcacaggagaagaacatggaaagagtactctactcggattcgaagagttcgtacttgactatccaagtgaatacatcaccgcagtcgatggcacttatgataaaatctttgggagtgatggctcagtcataactatgctcaggttcaagactaataagcaaacgtctcctccctttggacttgaagctggcacagtcttcgaactcaaagaggaaggccacaagatcgttggtttccatggaagagccgatgttctgctccacaaaattggagtccatgttcgtcctttatccaactgatgatggagctctttatccttgattccatgcatctaataagttatcaaatctatcttctaaatttctcatatgaggtctcttcatgcctctggtgaatggtgatctttgataagtgttttacgcgttgtctcttgcgatgttgttttttctttgttcttcttgtgctctattttaataaaggaagtttgttcccaaataaaaaaaaaaaaaaaaaaacaaagggcggccgctctagaggatccaagcttacgtacgcgtgcgtgcgacgtcataaatcttctatagtgcacctannn

SEQ ID NO: 94309 - DNA, 561 bp, Arabidopsis thaliana columbia
  unsure (1)..(561): unsure at all n locations
gattggcatgcagtgaagtgcgtganttcgagtataaggttgccgagtctcaagtttttgatagagaagcagatgatgtgtctactattgacattcttgaggcaagatgtgggaatctgttgtgctcgaaatctgaaaatacaagccctgtttctgggaatgacagtgatttgtcacaattgagcgagaagattagtttactacttttcgagaacgatgaccagttggatcagatgctcatgaatgaaatctcccaagaaaatatgaaaaacaaccttttgcaggaatttctgaaagaaagcttacactcatggcttttacaaaaggtagcagaaggtggaaaaggtccaagtgttttggatgaaggtggccaaggtgtatttacattttgcaagcttctcttgggtacaaactgggccttaggacccaccaataatcgcttggtgtaagcggtggtttccgggttgaaatggttggcccncncttnatttggnaanttttcttttgcaagggggggggtnatttggtcnccccaaagcntttgggnctncccnggggctt

SEQ ID NO: 94310 - DNA, 683 bp, Arabidopsis thaliana columbia
ctctaatacgactcactatagggaaagctgggacgcctgcaagtacccgtcccgaatttccgggtcgacccacgcgtcccgtcttttatctttttttcttttccacggttgcttaattccaatgccatcgtgatcgattcatctctctctctctcttccaattttcccaattcttttttaaaaccctaatttttcagatatctgattatctcttgtatttcttctactcgatttgctcccataaaaacccttactttcttcaagttctggttttcaccgattgatgggtcgtggctcagtgacgtcgcttgctcctgggttccgttttcacccgacggatgaggaacttgttcgctactaccttaagcgtaaggtctgcaacaaaccctttaagttcgatgctatttccgtcaccgacatatacaagtctgagccttgggatctaccagataagtcgaagctgaaaagtagagacttggaatggtacttctttagtatgctggataagaagtacagtaatggttccaagacgaatcgtgctacggagaaagggtattggaagacgactgggaaagatcgggagattcgtaatggttcaagagtcgttgggatgaagaagacacttgttccatcacaagggtcgagctcctcgtggtgaaaggaccaattgggttatgcatgag

SEQ ID NO: 94311 - DNA, 635 bp, Arabidopsis thaliana columbia
  unsure (1)..(635): unsure at all n locations
gagtacaaaagacttatcagtcgattgcctgaggtttacgtcgggaaaaccgagaggcttcgatctctgataaagatattgtgcatagcgggaaagaaatgcttgagagacaagaaaatgcatatggctccttggagaaaacacaagtacatgcaagccaagtggcttggcacatgtgatcgatctagctccttggaagcttcggtttccgaggccatggagccagaaaattgggtgccggtggcgaagcctagggtttctatgttgaactatgatggtctcttaggtggtttctctgccggtccggcccctgtagtggtcgtgtgatatttttgtactatgtttttttgatgacttgtaattattaagtgattagggtgagtcatgagtgttaattatggtttctgatttgaacttagcaagaaatggtctcagcggctgtgattcgagcctctacattgtgtagtaagggacgaagatgctgttttgtgtcattggtgctggaagaaattagacatttgtgatttttttttatattgactgtatacgagtgattaacattaaaatttaacagaaataatatacattttgagtttcgaaanaaaaaaaaaaaataaaaaaaaattaggggcggc

SEQ ID NO: 94312 - DNA, 567 bp, Arabidopsis thaliana columbia
  unsure (1)..(567): unsure at all n locations
cccgggnanccaaaggccnacttnngttggccctaaaaacncnctcccctntggangggccnatttggaaggncntnaacccgtcggaanaaacaaggttgntcccaaaaaccaaagatagntttaaggaaaaagatangaaaanaaaagagttaaagcatcgagaatggggggaccgagacaaggatagatatgtccgtcgagtatctgtgcttgttggtagtgtcatgagtgaacccaaagagattggaagagaagaaagggaatccgataggtgggaacgggagaggatggagcagaaagatcgagaaagaaataaagagaaagataaagatcatatcaaaagagagccaaggactggtgctgagaaagagatctcgcagaacgagaaagagctgggagaagcatctgccaaaccctcagagcaggaatatgtggcaccagagcagaagaagcagaacgaaccggataattgtgaaaaagacgaaagagaaacaaaggaaaaaaggagagagagggatggtgattcagaggcagaaagagctgaaaagcgcaacagaatcagtg

SEQ ID NO: 94313 - DNA, 416 bp, Arabidopsis thaliana columbia
aataaagctagattataagtggtttctttgtttttatacatcggatcggtagcagaataaataagcttctttttaacgagttagtgaggccactctgaagacaaccacacctgccattatctatatcagtctccgttacttcgatcccaccgattcgaatcattctctctctctttcttgatctgaaaattgagtcccaattccagcaaaattatcaatcgcatttctgatcaactgagcgcgacggtggtggcgtcggtggtggcgacggtgacagcgatcgacggttatggcttcgaagactaagtaagactctttactcagtttcactctgttctagttttatcctattttctctgggaaattttttagtagatcgtagtagatctgatccaagttactattttgagaaattg

SEQ ID NO: 94314 - DNA, 752 bp, Arabidopsis thaliana columbia
gggtgcggaccccccctggaggccgccggttcggttagcctggttttcgattccggggccgcgattcgaatcattctttttctctttcttgatcggaaaatggagtcccatttccagcaaaattatcattcgattttctgatcaactgagcgcgacggtggtggcgacggtggtggcgacggtgacagcgatcgacggttatggcttcgaagactaaaactagtttgtccgaaacaacaactactactactcctaccgggaaatcatctccagcaactccaagaatagcaaaaagaacagttaataaatccgaaactagtaataataattctccatctactactactccacattcacgtctttctcttgatcgttcttctccaaattccaaatcttctgttgagagacgatcaccaaagcttccaactcctcctgagaaatctcaagcgcgagtagcagcggtgaaaggaacagaatcaccgcagacgaccacacggttgagtcagatcaaggaagatttgaagaaagctaatgagcgggtatcttcattggggagggataaagctaaagcacttgatgaactcaaacaagctaaaaaagaagctgaacaagtgactctgaagcttgatgatgctttaaaagctcagaagcatgtggaggagaattctgagattgaaaaatttcaggctgttgaggcagggatcgaggcagttcagaacaatgaagaagaattgaagaaagaacttgagact

SEQ ID NO: 94315 - DNA, 817 bp, Arabidopsis thaliana columbia
  unsure (1)..(817): unsure at all n locations
nnnnnnnnnnnnnnnnnnnnnnnnnnnnnnnnnnnnnnnnnnnnnnnnnnnnnnnnnnnnnnnnnnnnnnnnnnnnccacgcgtccgcgctcttgcttctggccctcgctgtttcgagctctcctcaaagccctaattttctcctcttcttcttcattctctcaccatgaagctcgtcaggtttttgatgaaattgaacaacgaaacagtttcaatcgagcttaagaacggaaccattgttcatggaaccattactggtgtagatgttagcatgaacactcatttaaaagctgtgaaactcactctgaaagggaagaatccagttacattagaccacttaagtgtcaggggaaacaacattcgctattatattcttccggacagtttgaatctggagactttgctggttgaagacactccaagaatcaaacccaaaaagccaactgcaggtaagattccagcaggtcggggacgtggtcgtggaagaggtcgtggacgtggccgtggtggtcgttaagcattttgcagtaatcaaaagtctggtcctttttggtttgtaacagcaggattgtaaaagatctatcttgtagtgagatttggtgtcactaagacaaattcttgttatctcttttagtttttcatgaatttgaaaatttgaaaacgttattggccaaacattaccatcacttcaatattggttttaattaattggacgttggaatcaccttttatttcatacacacatataaatatatttttcgtatagggggcgggcccggttttttagaaggaatatccaaaagcttttacggtaacc

SEQ ID NO: 94316 - DNA, 453 bp, Arabidopsis thaliana columbia
gtttggcttttcccatgagcttttccagcacatacatctttattgattaaataaaaaacttggttagtctgtgatttaattcttacattcaaatacttatgcgtgaacttgctcttattatatagcctcctactacctattaagtcttttaacggttcataatcctcttagtcggtgagccttggatgactgcttctggtgggaccaatgagctcaatccatgttgcttcaatgatccttctcttgtttctcttcttgcatcattctgattctcgtcacctcgacaatgtccacattacagcgtctcggttttcactcgtcaaggttcttgatccacatttcaattcatcaacttttcatttactttcatgttcttcgtatttgcgggatctggttatcaccttctcaaaactaaggcttctttttgtttttctgtggcttaggatcaaaatg

SEQ ID NO: 94317 - DNA, 481 bp, Arabidopsis thaliana columbia
  unsure (1)..(481): unsure at all n locations
taaattgcggccatacaatgctacgatccacttgctgcactccactttgccctttcacggcgaaacaaccttctttccttaggaaacagcaacgtattacctctgatcgcttcacctttcgcggtggtggtggtggcgatgccgccgccgtcgtctcctcctccggcctccgtgatctcgttttcgtcgtaaaccctcaaggtgctaatggtagaacagctaaagaatggaagaagttgcttcctcaccttcgatctcgtcttggtaaagactgtaatgtaagtgaattattaacatcgggtccttctcatgccattgacattacaagagaggctataaagggcatggtgcagatgctgtcattgccggttggaggtgatggaacacttcatgagggttgttaatggcttcttttttgggaggggaaaccttgtcgggttatctctggctggggaagctagtcgttcggctnaanttnggc

SEQ ID NO: 94318 - DNA, 423 bp, Arabidopsis thaliana columbia
aggaaatatacttcgcataatgacgataatgatcaagtttctcctgttagctctgctcgtgatctctccgatttgcgccgagaaggacctgatgaaagaggaatgccataatgcacaagttccgaccatttgcatgcaatgtcttgaatccgacccaacctccgttcatgcagaccgtgttggcatcgccgagatcatcatacactgtctcgactctcgtctcgatatcatcaccaataacattacaaatatattgtcactgggaggaggaacgaaagaagtgagaaaaatcttggaggattgcagaaatgacacgtcgacggtggcacctaaactactgtcggaagccaaaacaggtctgaaaaccggtgattacgacaaagccgccaaatcgatagagtatgctagcattcctcatagctg

SEQ ID NO: 94319 - DNA, 414 bp, Arabidopsis thaliana columbia
aaaatattttggatactcttaataatcaatcgattgatgattgctcgttttgtgctcagcgttctaatcgtagcggcgatagtttctggtagtgagttttctgatactcgtgatgcaaaagtagaaaaaatcttaaagaaactcaacaaacctgctcttaaatctatcaagagtccagatggagatataatagactgcgttcatatgaataatcatccaatttatgagcatcctttattcaaaaactacacgattcagatgaaaccaagttcttaccctaaaggtaaaaataatgaatcttcagacaaagagaaacaaagtgttgtgactcaactatggacagttaacgggaaatgccccaaaaacagtattccgatcagatgaacgagaagaaaagaaattttgcgaaccgaa

SEQ ID NO: 94320 - DNA, 802 bp, Arabidopsis thaliana columbia
tccaggaccggtccggaaattcccggggtcgatccacgcctctctgtccattttcgtggcgaagaagattttttaaggtcttttcaagaaattatggaatctgcagggatccagcaactgcttgctgctgaacgtgaagctcagcaaattgtcaatgccgctaggaccgcaaaaatgactagactgaagcaagccaaggaagaagctgaaacagaggttgctgagcacaaaaccagtacagagcaggggttccagaggaaactcgaagcgacaagtggagattcaggtgcaaacgtgaagaggcttgagcaagagactgatgccaaaatcgagcaattgaagaacgaagctacgagaatttccaaagatgttgtggatatgcttctgaaaaatgtgaccacagtgaacaactgagtataatatctcaaggaaaccatcaactgtaaaatggtgtgatattttcagtggatacgttcattcctttctttatattgttttgtggaatccagactcgtctgttgctattgattttgaaattgtgtcttgaagcattgtattcatttctacagaaagtcgcttaggacttttgtgtgttgtaataaaattgagaacaaaggagcccattggattttgtttcatcaagaagattgaaaatattcgaacaagaaccgtcggttgttttgccaaaaaaaaaaaaaaaaaaaaaaagggcggccgctttaaaggattccaggttaaggtaggggtgaatgcgacgtcagagctcttctatagtgcacgtacacaaaccgggccgggggcg

SEQ ID NO: 94321 - DNA, 761 bp, Arabidopsis thaliana columbia
  unsure (1)..(761): unsure at all n locations
nnnnnnnnnnnnnnnnnnnnnnnnnnnnnnnnnnnnnnnnnnnnnnnnnnnnnnnnnnnnnnnnnnnnnnnnnnnnnnnnnnnccacgcgtccgcggacgcgtgggcggacgcgtggggttcaagttatgcggtcacagttttattttggacttcttgcacatgcaaagactagacatggaaacaggagcaaaaacccctcttgcatggattgacaatgcaggaaagtgctttttccctgaaatttatgagagtgatgaaaggaccaattactgccatcataaatgtgtggaagacccaaaacagaatgctcctcatgatatcaaacttcgcctagagattgatgttaatggtggcgagacaccgaggttaaatttggaggagtgcagtgatgagtctggtgataatatgatggacgatgttccccttgctcaacgatcttcaaatgagcactatgacgaggctacggaggatagctgcagccgcaagctcgaagctgcttgtttcgaaatgggttgagactgatgctatagtcgtctctggtgccaagcttacggggaagcgaagtacttgataaagattgcagtaaaaaaaatgtttgctgtaggcacagcttctctaggacatgtaccagtgctggatgtgggccgtttttccagtgagattgctgaagctcgtctagcacttttccagaagcaggttgagatcactaagaaacatcgaggggatgcanacgttaggtatgcctggcttcctgcaaag

SEQ ID NO: 94322 - DNA, 683 bp, Arabidopsis thaliana columbia
  unsure (1)..(683): unsure at all n locations
cggaaacctaggccgagtgttcctctgtaacctccgggactcttccgcaagattcggttgaaaggtcatcgaccgtaactgtctcacgacggagaagaagctctctcaggtcgagacggaggcagagatcctctccttgctggaccacccttttcttcctacgctctatgctcgtatcgacgagtctcactacacgtgtctcctcattgattatgctcccaatggagacttacattccttggtacgcaagcaacctggtaaccgtttaccgattcagccggttagattctttgccgccgaagttctcgttgcattagagtaccttcacgcaatgggaatcgtataccgcgatcttaaacctgaaaacgttttgcttcgtgaagacggacacgtcatgttgtcggattttaatctttgtttcaaatccgacgttgtccctacttttaaatctcgtcgctaccggagatcttcttcatctccgtcgcttcgtcgtagaagnaagcggttgcttctccgttgcttcgggngaaaaaagtacgngagganagggagattnttttcaaangtttncgggcaagagcctgtaacggggttttcaannntcttnttttgggancanatgggnttttttncgccnggnntagtttcccggaaacggccacggaagcggttagcctnttggg

SEQ ID NO: 94323 - DNA, 744 bp, Arabidopsis thaliana columbia
gtaccctattcactatagggaaagctggtacgcctgcaggtaccggtccggaattcccgggtcgacccacgcgtccgtctcaaaatcccaacttggcctctgtttttgctttcttttatgttctcttcttctctaaaaaccatctcatacttccaagaatttctctcacaaagaccaagaactcaaaatgtatcaagattctggattaatgctccgttacatgcaaaactgtcccccagatattcaacaattcgaagacctcttcaaatcatacaaactctccgatgaaatgaacaacacttttgttgagtcatcaaacatatctgagtatgatattggagaagaaagtgatctttttagagctcctgatccaattcttgaagaaccaatcttaaccgttgatccactctctgctgctttgactatgatctcttgtggtgaagacacttcacaaggtctttgtgagcttcctgatcttggttcattgcagagtggtcaacagcttcttgacaaagctttttatgaatgtgagcaagatcttatgatgaaatcagctatggagtctccattctctgatgttttagaccatcaagaacatctctggtgtgacgaccatccatgagaacccggatttgccaaagagaggttaccccggggaatttgacccccattggattgggccccctgcccccaccaagagaactgggaaggaattcaaaaatttttcccccgaatttccaattt

SEQ ID NO: 94324 - DNA, 752 bp, Arabidopsis thaliana columbia
gaagcaacaagtgaagaaagaaagaaaaaaatggagaagagtggaggaagaattgtaatggatgagataagaagctttgagaaggcacacttgttcgatcttggtcatcctcttcttaaccgtatcgcagattccttcgttaaagccgccggagtgggagctttacaagccgtgtcaagggaagcttactttaccgtggttgacggggcaggttttgactcgaacaacgtggctccaccggcggagattacagggcaacaagaaacataggttccctaatctcagaggggaaagcagcaaatctcttgatgcattggtgaagaacacaggaaaagaatctctccaatgggggctagcggcagggttatactcaggtatcacttacggtatgacagaggttcgtggaggagctcatgattggcggaacagcgcggtagctggagcattgacaggagcggcaatggctatgacgacgtctgagaggacaagccatgagcaagtggttcagtctgctctcactggagcagctatttccaccgctgctaatctcctttctagcgttttctagatgatttgtattagaagctttaatgcataagggttgtttcatgtatcagttatgtttctttttgtgaaaacgaattcgctaaaggtctactaagatcttttcctgaaactctcgaagctggagagagatcgttttgttatctgtttggaaaatatttgcactatatatatcttgagtagtacct

SEQ ID NO: 94325 - DNA, 391 bp, Arabidopsis thaliana columbia
  unsure (1)..(391): unsure at all n locations
ctttttccttggtaaggagcatcttttcatgccgattgcatcantgcagagttgcttatttactctgtggcttgtcaaatttccatttttttcttaatctctcccactcccactcataaaattagttttgtctttctttccccaaaaatctttacttaaaatctttttcacccttttgctttaacttttgtttgctcctcctctggatcgtatcggtgggctggaagaagaaattgtgagaaaaaatggagaaaaccaagatgattacgtctatgacctgttgaagaaaccctactcagaataagagtaaaactctgtgatttttctgactaacagagagagagacacctaaatgggctcagagcaggatcagaggaaaaggtggggaggt

SEQ ID NO: 94326 - DNA, 683 bp, Arabidopsis thaliana columbia
aaatctagtaaaacagatgctgagagcaaaatctgcgatcttctgctatttccccatttgaaactccaccgttcaagccggtcactgctccaacggaccggcggaacaaggagacaaaaagatgggtgaatctccagatttcataagcgatctacctcaaagcattattgagaatatccttactcggctttcgattagagatgcaataagaacaagtgtattatctagcaaatggagatataaatggtctacactcactgatcttgtctttgatgagaaatgtgtttctccttctaatgaccgttgtgttgttgagactaatcttgtgagattcattactggagtgcttctccttcaccaaggacctatccacaagtttcagctctctacttctttcaaacaatgtcgtccagatattgatcagtggttgctttttctttcgaggaacgggattaaggagcttgttcttaagttaggtgaaggagaattcagggttcctgcatgtctctttaactgtttgaaattgacctgtttggagttatgtcattgtgagtttgatccgcctcagtatttcaaagggttttcgtatctgaagagtttaaaccttcaccagatccttgttgctcctgaggttattgaaagtctgatctcaggatgtccgcttctcgagttcctgtctttgt

SEQ ID NO: 94327 - DNA, 463 bp, Arabidopsis thaliana columbia
gcagcggaggcggtggtggatactcaggaggcgtgtggcggttgagttactcctcctgtgaaatcggctcctgctccatattattaccactccccacctcctccggtgaaatccccaccaccaccatgacccttacatgctctccaccaccaccggtataatctcccccacctcctgtctacatctacgcttctcccccacctcccacacattactaggctcatcaaattcaacaaattttccccattattcaagttttcttttaaaaaatgaaattaaggaaggggcaaagtcaaagagaagaagaagtgaaccaaattaggatcgtggcgtggttatcagttacaatacatttctaactacgatccacattacttccttttttttaattgcgcttatctttcacttgtgcatcattttttattgcgtctttttcaagtctaattgttttcaagcacccttt

SEQ ID NO: 94328 - DNA, 558 bp, Arabidopsis thaliana columbia
aattcaacaaaatttccccattattcaagtaagtcctatacttatacctttacctcataatccgttttaataattgtgccctaaataaaatcggaatttcttctttcacaggttttcttttaaaaaatgaaataaaggaagggtcaaagtcaaagagaagaagaagtgaaccaaataaggatcgtggcgtggaaatcagaaacaaaacatctctaacaacgatccacatcacttcctcttcttcaatgtcgctcatcttccacttgtgcatcattatctttgcgtcttcgtcaagtcaaattgtttccaagacccttttagatcgtatcatacgcctctttgttcccttttgttgttaagtgaaaaaatgggttttgggaatttaattgttgggcaaacattttctattttggtattcttccgttaatgtaacgaaagagttgttagcaaattaaacaaagttcagtttaaaaaccaaaaacaaaaaaggcggccggtttaaaggattccaggttaacgaagggtgccatgcgacgtcatagctcttctatagtgtca

SEQ ID NO: 94329 - DNA, 959 bp, Arabidopsis thaliana columbia
  unsure (1)..(959): unsure at all n locations
cccctcccttaaagtcttctcctcctccatactactatcactccccagggcctccggagaagtccccaccaccaccatactactaccactcccctcctcctccggtgaagtcccctcctcctccatactactaccactccccgccccctcccgtaaagtctcctcctcctccatactactaccactccccacctcctccggtgaagtccccaccaccaccatactactaccattcacctcctcctccggtgaagtctcctcctcctccatattactaccattcaccacctcctccggtgaaatccccaccaccaccatattactaccattcaccacctcctccggtgaaatccccaccaccaccatactactaccattcacctcctcctcctgtgaaatctcctcctcctccatattattaccactccccacctcctccggtgaaatccccaccaccaccatacctttacagctctccaccaccaccggtaaaatctcccccacctcctgtctacatctacgcttctcccccacctcccacacattactaggctcatcaaattcaacaaaatttccccattattcaagttttcttttaaaaaatgaaataaaggaagggtcaaagtcaaagagaagaagaagtgaaccaaataaggatcgtggcgtggaaatcagaaacaaaacatctctaacaacgatccacatcacttcctcttcttcaatgtcgctcatcttccacttgtgcatcattatctttgcgtcttcgtcaagtcaaattgtttccaagacccttttagatcgtatcatactcctctttgttcccttttgttgttaagtgaaaaaatgggttttggtaatttaattgttgtgcatacattttctattttgttattcttccgttaatgtaatgaaagagttgttagcatataaaacaaagttcagtttcttcaaaaaanana

SEQ ID NO: 94330 - DNA, 399 bp, Arabidopsis thaliana columbia
caattcaccaattcctaagcattcttcagaaatccgagctgctttttgccacatctattcgcttcgaatctcttttcaccagctcaaaaactgtcgctttcaattccgctcgtttcgtcccaccgctccgtgtattgctgaacttcttcatagcaactcaataccatggatgttactgaagttccatggcgtcgtcttcctcaattttccggttcttcacgcgcctcgtggctcggttcttctgggtttccgctttcttcatatatgttctctcatgttgagcgtggaaagacgtttaggcttaccttgtgctttggggtctctcgtttacgtccaaggtctgctattgtaagtgcacaacaagaacagccacctagtcgtctcaaaggattatgcgag

SEQ ID NO: 94331 - DNA, 404 bp, Arabidopsis thaliana columbia
cgcaaaatccgcgtccggttctacgcaactccataatttcaattcctctcgacgtttcacggcgaagcttcagatctacttttccccagctcagtatggagacggttgattctcggaacaaattgcattcccggttacgtttatgggaattccccgatcagtacatcatcgagccagctgatggctcaggctcttcatgtttggatattagtcgtgttgatgcttccatgaagctcatcgatcaagtcccagaaagcaattccgtgcgtgtccctaaaatccgttccatttttggtgtggttgggatgttgaagctccttgcaggatcatacttggtggttgtaactgagagtgaacgtgttggatcgtttctggggcatcctatattcagagttacaacgctt

SEQ ID NO: 94332 - DNA, 444 bp, Arabidopsis thaliana columbia
  unsure (1)..(444): unsure at all n locations
gacccacgcgtncgctttgtaccaattagaaaccctagcgagcggaggatggtgacaaagaacgagacttttgagggagtggagatttcaattttgagatcaaatcttgaaatcaacaaataggagaaagatttagtgatgggtaagaagaagaagagagctacagagaaggtgtggtgttattactgcgatagagagtttgatgatgagaagattcttgtgcagcatcagaaagctaagcactttaagtgtcatgtctgtcataagaagctttctacagctagtggcatggtgattcatgttcttcaggttcataaagagaatgttacaaaagttcctaatgctaaagacggtcgagattcaactgatattgaaatatatggaatgcaaggaattccaccccatgtcttgactgctcattatggagaagaagaggatgagcct

SEQ ID NO: 94333 - DNA, 764 bp, Arabidopsis thaliana columbia
  unsure (1)..(764): unsure at all n locations
cccccctttgattgaccttcccatctgcagtaccggtccggaattcccgggtcgacccacgcgtccgaaagagaatgttacaaaagttcctaatgctaaagacggtcgatattcaactgatattgaaatatatggaatgcaaggaattccaccccatgtcttgactgctcattatggagaagaagaggatgagcctccagccaaagttgcaaaagttgagattccttctgcccctcttggtggtgtagttcctagaccatatggaatggtatatccgcctcaacaagtacctggtgctgtacctgcacgaccaatgtattatccgggtcctcctatgcgtcatcctgctcctgtatggcaaatgccacctcctcgtccgcaacaatggtatcctcaaaatccagctctttctgtacctccagctgcccatttagggtatcgaccacaaccactttttcctgttcaaaatatggggatgactccaactccaacctcagctcctgccatacaaccatcaccagtcactggagtaactcctcctggaattcctacatcatcacctgcaatgccagttcctcaacctctgttccctgttgtgaataacagcattccttctcaagctccaccattttctgctcctctgcctgttggtggggctcagcaaccatctcattgcagatgctttagggtcagcaggtgctttcgcctaaaattttttcagggggctaatgnnatntnngntttgncaaaattggggcntntac

SEQ ID NO: 94334 - DNA, 469 bp, Arabidopsis thaliana columbia
gttcaaagatcaagatctgcagacatggcggacgaagcaaccagagctgcttttatggagattcaagctagcatgattgaactcactgggaagctcaaacaggtgcagaatcagatgcgcaacaaagagggagatagaaagcgagctttcttaaccttggaggagctgaggccattgcctgaagagacaaacacctacaagtcaataggaagaacgtttgttctagagcccaagacagtgctggagggtgaacaagagcaaaaactcaaggacagtgaagctgccgttgcttctctacagacatccaaggaatacttggagaagcaggtagcagaggttgagaacaacttgagggagctgttgcagcaagaaccgggcattgctcaacagattatgtccatgtctatgtaacttttgtattatcccaaacctttgagtttggagagcttttgggattgaaaccataaca

SEQ ID NO: 94335 - DNA, 418 bp, Arabidopsis thaliana columbia
ctctccttatcgctctctaaaatccactataagagattcgtaaccgtaagtgatggccctcaaggtggaagctaaaggtggaaaggtagggatccagtgggatgatggatctgactatcatgatgtaacaaagatatatgtacgaggtggtcttgaaggtattcagttcatcaagtttgagtatgtcaaggctgggaaaaaggttattggaccaatccatggtgcttctggtcgtggtttcacagagacgtttgagatcaacaatttggaaaaagaatatttgttatctattgagggttactacaacgcatctaccggtgtgatacaatgtcttcagttcataacttacaagaagacttatgatccaatcggatacaatgagggtgctaggtttacacttagcgctagcaggagcaag

SEQ ID NO: 94336 - DNA, 425 bp, Arabidopsis thaliana columbia
gaaaaattaaatatccatccaactgtgtgaattagatattttctcttatctcttctctttgttcgatcaaaaattcaattttcccgagatttttgtttctctcgatcgattcaacacctaaagattgaagcttttgctcgtgggttatgtaaagtttccacctttcgtcttctttctgatctgtgagcaaaaatgggacaacagcaatcaaaaggggaattgctgtatcagcaagttagttatggtaactctgaaggaattcgagctcttcatcgagatggtggagaccttgagtggatggatagagaaggaaaaactccgttgatcttggcttgtatgaactccgagctatttgatgttgctaagactttgattgaggtgggttctaatgttaatgcttatcgtcctggtcgtcatgctgggac

SEQ ID NO: 94337 - DNA, 415 bp, Arabidopsis thaliana columbia
ctcctcgatttcgatgacgatagagccgacgcaatcgccgtcttcggagccggaggttcactctggagaggacttcgttcacatcgatgaccctaggcctaccggcgatatctctttaagcgacagcatagttaatgtggagaaggatgaactgctcgacgaagcggcggaggaagaatttagaggctccgattctgtgtttagcggcggcgatggcggtggagcggatgatgatggcggcgagtgttcatcggaggctactaaagtggagctaccggaggaattggcgaaaagtgttgtgattctgacgtgcgagtcaacagcggatggtggatcttgcgatgtgtacttggttggtactgctcatgtatcaaagcaatcctgtcttgaagttgaagcaataatcagcatcttg

SEQ ID NO: 94338 - DNA, 550 bp, Arabidopsis thaliana columbia
cggacgcgtgggaattcgattcattttctattaggccttgctctagcctccggaggagttattacttccttggtagctcaacacatgtactctttacctgcttatccgctcatagcgcaagattttacgactcaagctgcgttatatacccatcaccaatatattgcaggattcatcatgacaggagcttttgctcatggagctatcttttttattagagatcacgttccagaacagattggggagtacgtattagcaagaatgttagaccataaagaagctatcatatcccatttaagttgggccagcctctttctagggttccatactttgggactttatgttcataacgacgtcatgcttgcttttggtactcccgaaaaacaaatcttgatcgaacctatatttgcccaatggatacaatctgctcatgggaaaactttatatggatttgatgtacttttatcttcgacaagtggcccagcatttaatgcgggtcgcagcatatggttgcctggctggttaaatgctattaatgagaatagttatt

SEQ ID NO: 94339 - DNA, 609 bp, Arabidopsis thaliana columbia
gggggagaagcatattttcctttttcactaagaagaaaaaaatggcgatggcgagaagcatctcttacatcacctctactcagcttctccctcttcatcgtcgtcccaacatcgccatcatcgatgtcagggatgaagagaggaattatgacgggcatatagctggatcgctacactatgcgagtggctcgtttgatgacaagatctcacatcttgttcaaaatgtcaaggacaaagacacacttgtcttccattgtgccttgagccaggttcgtggccctacttgtgcgagaaggctcgtgaattatcttgatgagaagaaagaagatactggaatcaaaaacatcatgatcttggaacgcggctttaacggttgggaagcttctggaaaaccggtctgccgctgtgcagaggttccttgcaagggcgattgcgcctaaaccctactaaaccatatttgggacctaaattgatgttccacattgtcactgtcctaaagttgaattgaaggttatcataaataatctcttatcagtatgtttggtttacatggagcacaaacaccaaacttgcaacaacaatactaaaagggcttttatggtaaaaaaa

SEQ ID NO: 94340 - DNA, 896 bp, Arabidopsis thaliana columbia
  unsure (1)..(896): unsure at all n locations
agcccacgcgtccgatcagaaaaaaaaaaaaaaaaaatccaaattcaacactctcacacttcgatatctccgccttcattctcctcagagccaactgtcctgagatttcgatttcgatttctccgatctctcttcctccgtcgccggcgaaaccatgtctcagtctattcaattctccactccttcacacactcctcaccttctccatctccctcactcacaattcaaccgtcctctctcctctatctccttccgtcgcttccctctaacaaccatcaaatacacttccatcagagcctcctcgtcatcatctccttcaccggatctcgattcatcgtcctcatcatcatcctcgcaagtacttctctcacctaacggtactggtgctgtgaagtctgatgagagatccgttgtcgctacggcggttacgactgatacgtctgggattgaggttgatactgtgacggaagctgagcttaaggagaatggatttagaagtacgaggaggacgaagctgatctgtacgatcggaccggcgacttgtggatttgagcagcttgaggcgcttgctgtgggaggtatgaatgtggcgaggcttaatatgtgtcacggtacgcgtgattggcatcgcggtgtgattcgtagtgttcggaggcttaatgaggagaaaggctttgcggttgctattatgatggatactgaaggtagtgaggttcatatgggagatcttggtggtgaagcttcagctaaagcagaggattggtgaggtttggactttcactgttaagggcttttgattcttctcgtcctgaacgtaccattagtgttagctaccatggtttcccttaagatttaagattttggtaatnaccncctggtnaangggtggattntaa

SEQ ID NO: 94341 - DNA, 1067 bp, Arabidopsis thaliana columbia
tgcagtaccgcaccggaatttccgggtgcgacccacgcgtccgccggaggctatggcatcaatctactcctctttaacctactggcgcgttaaccacccctacatctccaattttacttggatcgaaggtgaaaccctaggctccaccgcctttttcgtatccgtcgtagtctccgtttacctctccgccacgttcctcctccgatccgccatcgattcactcccatcactctgtccacgtatcctcaaaccgatcacagccgtccacagcctaatcctctggctcctctccttagtcatggccgtcggttgcactctctcaataacctcatctcacgcgtcttcagatccgatggcgcgtttccttcacgcgatttgctttcccgtcgacgttaaacctaacggaccgcttttcttctgggctcaagtcttctacctctcgaagatcctcgagttcggagacacgatcctcatcatactcggcaaatcaatccaacggctatccttcctccacgtgtaccaccacgcgacggttggggacatgtgttatctctggctccgaactcgccaatcgatgttttcgattgcgctcgtgacgaattcgacggtacacgtcctcatgtacgggtactacttcctctgcgccgttggatcgaggcccaagtggaagagattggtgaccgattgtcagattgttcagcttggtttcagttccgggttatccggttggatgctccgagagcacttattcggggcgggttgcaccgggatttggggatggtgtttcaacgctgcatttaatgcttctcttttggctctcttttccaacttccattcaaagaattatgtcaagaagccaacgagagaggatggcaaaaaaagcgattagattggtttcttggacaataagtaaaacctctcattgtgtcttgaattgttgattagtttccacacaaaaggattaattgtcttgaattgttgtttattttgaaatttttgtctgtgttgtacttgcccctgttgagatacttttgtacttgtatgaatataagatgacagaaaatatc

SEQ ID NO: 94342 - DNA, 429 bp, Arabidopsis thaliana columbia
  unsure (1)..(429): unsure at all n locations
cccacaggaancccgcaacgccatctcttaaccccacttgtaaagncgctcttaacttaaggtatgtgctaaccgtgttggatgtggttaaggtttctctaccaccaacgtccaactgttgcgctcttatcaaaggtctagttgatcttgaagccgcggctcctgtctttgcactgccctaaaggctaatgttcttggtatcaaccttaatgttcccatttctttgaacgttgtcctaaaccattgtggtaagaaggttccatctggtttcaaatgtgcctagagattacacattttaaattgaggttcctatatcccacatttcattcctgtttttcaaattccgcgtttgatgatatctttatctattgttgtaatttgttttatgcttcatctatcaatgaaataaaaaagtgttttgcttaaaaa

SEQ ID NO: 94343 - DNA, 564 bp, Arabidopsis thaliana columbia
  unsure (1)..(564): unsure at all n locations
caaaagcttgataaagagagagtttttagggttttcttgtacctattataagaaatactctaactgaaactttacttcttcatcaatggcttattctaaggttgcccttctcctcgtcttcaatgtcatcttcttcactttcgtcagctcgacttcggtcccttgtccaccaccaccgcccaagagctaccacaagaagcccgcaacgccatctcctaaacccacttgtaaagacgctcttaaacttaaggtatgtgctaacgtgttggatttggttaaggtttctctaccaccaacgtccaactgttgcgctcttatcaaagggtctagttgatcttgaagccgcgggtcttgtctttgcactgccctaaaaggctaatggtccttgggatcaaccttaatgttcccaattcctttgaacggtgtcctaaaccattgtgggaagaaggggcccactgggttaaatgggcctggggttacccattttaaattggggctttacccacatttaatccctggttttaaattccggggttgggatccttacatgngaatggaaagnnc

SEQ ID NO: 94344 - DNA, 710 bp, Arabidopsis thaliana columbia
ataggactcactataggaaaagctggtacgcctgcaggtaccggtccggaattcccgggtcgacccacgccccccagctttataacttctaaaacaaactcttataactttttacttcctcctccatggcttattctaagattgctcttctcctcatcttcaatgtcatcttcttcactttagtcagctcgacttcagtcccttgtccaccaccaccgcccaagagccaccacaagaaacccgcaacgccatctcctaaacccacttgtaaagacgctcttaaacttaaggtatgtgctaacgtgttggatttggttaaggtttctctgccaccaacgtccaactgttgcgctcttatcaaaggtctagttgatcttgaagccgcggtctgtctttgcactgccctaaaggctaatgttcttggtatcaaccttaatgttcccatttctttgaacgttgtcctaaaccattgtggtaagaaggttccatctgggttcaaatgtgcctaggggttacacattttaaattgaggttctatatctcacatttcattcctggttttaaaattccgcggttggggaaatccttcaaatggtggaaattggtctatccctcctccatggaatgaataaccaaaaggggttatagattagaaaaaaaaaaaagggcgggcggccgctttaaaggaatccaacgtacgggagcatgcc

SEQ ID NO: 94345 - DNA, 806 bp, Arabidopsis thaliana columbia
  unsure (1)..(806): unsure at all n locations
ggccaagattgggtcacgtggaaacagatctttttgcttgttgatgtcgnctgttgcgtgtgctgttctgtttcccattgtctggtccatcaaaaacttgcgtgaggcggctaagactgacgggaaggctgctgtgaacctcgttaagttaactctgtttaggcagtactacattgaggttatctgctacatctacttcactcgtgttgttgtgtatgcactggagtccattacctcttacaagtatatgtggactagtgttgttgccagcgagttagccacacttgccttctatctgtttactggctacaagttcaggccagaggtgcataacccgtactttgttgttgacgatgaggaagaagaggctgctgctgaggctctgaagcttgaagacgagtttgaattgtaagtcatcactggaataatcgtgtcacgtgtgagtcagtaaaaagaaacatactttgtttgacaggatgattgagagtaaaccggatcatcagctgcctgctaaaccgccttctcttctttggttttttcctcttgttatctttattagaatgcaatacctgttttgtttttacttgaattgttaggatacttatatagactctatgaatgtcttgtcccccaatgcatagtatgtgtattactggtaacataaaacgcttggtgctgctcgttatacttaatctgagtctctgcttttcaaaaaaaaaaaaaaagaaaaaaaggtcgggcgcggnnnnnnnnnnnnnnnnnnnnnnnnnnnnnnnnnnnnnnnnnnnnnntcgtctcaatcattc

SEQ ID NO: 94346 - DNA, 407 bp, Arabidopsis thaliana columbia
ctgcctcctaatttcttcgcccttctaccgaagaatctctccactcttgccctctggcgtaaccctaaaccagaagcaccagatttgtgcaactttttcccagagaacaatagaaaacccaacttgtgctctctagggttttctttattccttctcatctttggattttcttgggtcatcattttggaagcttacccaccagcgaaaaaattataacttccatcgattcctggcttctctctctcgctctctctgcatgtgctaaatcgccggactgatcctcactgtcacctctgttcccggcttattcgccggtgaaatctatggttggtgctcagatttatttccaattgtttgtgcatctggtggaggataaatgctccttgttttggatctagggatttcta

SEQ ID NO: 94347 - DNA, 638 bp, Arabidopsis thaliana columbia
agacccatgtcacatgtccagtaatccttacatgatcgtatttggtgtggcagagatcttgctctctcaggttcctgatttcgatcagatttggtggatctccattgttgcagctgttatgtccttcacttactctcccattggtctagctcttggaatcgtttcaagttccacccgaatggagttttcaaaggaagtctcactggaattaagcatcggaacaggtgactcaaacccacaagatatggagacccttccaagcacttggagacattgcctttgcgtactcatactctgttgtcctaaccgagattcaggatcaatcgccggagtgatgcttgatcttaaggtctataagccattcaagtctacatattgatgattatggaccatgaacaacagagaccacgctggtgtgtaaagtttaccatttcaaagaaaactccaaaaatgtgtatattgtatgttgttctcatttcgtatggtctcatctttgtaataaaatttaaaacttatgttataaattataaaaccggtgtgttttcaattcaaaaaaaaaaaaaaaaaaaaaacaaaaaagcggccgctctagaggatccaagcttacgtacgcgtgcgtgcgacgtcatagctcttct

SEQ ID NO: 94348 - DNA, 640 bp, Arabidopsis thaliana columbia
  unsure (1)..(640): unsure at all n locations
nnnnnnnnnnnnnnnnnnnnnnnnnnnnnnnnnnnnnnnnnnnnnnnnnnnnnnnnnnnnnnnnnnnnnnnccacgcgtccgcccacgcgtccgcggacgcgcggggggttatgccgcttttggagatgcagcaccgggaaacctcctcaccggttttggattctacaacccgttttggctccttgacatagctaacgccgccattgttgtccacctcgttggagcttaccaagtctttgctcagcccatctttgcctttattgaaaaatcagtcgcagagagatatccagacaatgacttcctcagcaaggaatttgaaatcagaatccccggatttaagtctccttacaaagtaaacgttttcaggatggtttacaggagtggctttgtcgttacaaccaccgtgatatcgatgctgatgccgttttttaacgacgtggtcggggatcttagggggcgttaggggttttggcccttgacgggttattttcccgtggggatttatttaagcanngggaggttttgnaaatgggnccggattgggttttttnaaanccttaggnttcctttctttnancncgggggcccccgggttgacaatncccggnatcttnnctaagggntaaccctaagtcaaat

SEQ ID NO: 94349 - DNA, 705 bp, Arabidopsis thaliana columbia
  unsure (1)..(705): unsure at all n locations
gggtgatcccnaccnnttgcnctttaaaaanaaaccccccntttnttnncncctcggtggagtgaccaaatcttnctcancccanctttccctttattggaaatcagtcncagaganaaaccaagccattgccttcctcaccaaggaaattgaaatcagaanccccggatttaatctcctcnccaaagaaaacgttttcaggatggttnacaggagtggctttntcgttacaaccccccgtgatatcgatgctgatgccgttttttaacgacgtggtcggggatccttaggggcgttagggttttggcccttgccggtttattttccggtggagatgtatattaagcacaggaaggttgagaaatggagcaccagatgggtgtgtttacacatgcttagtgttgcttgtcttgtgatctcggtggtcgccggggttggatcaatcgccggagtgatgcttgatcttaaggtctataagccattccagtctacatattgatggttatgggccatggacaacagagagagttggtgtgtaaagttttccatttcaaagaaaactccaccaatgtgtatattgtatgttgttcctcatttcggatggtctcatctttgtaataaaatttaaaacttatgtttttnatttnnnaaaaaaaaaaaaaaaaaaaaaaagggcggccgctttagaggatcccagcttacggc

SEQ ID NO: 94350 - DNA, 443 bp, Arabidopsis thaliana columbia
  unsure (1)..(443): unsure at all n locations
ccggcggaatcgaaaacgatgaagaaagcaacaaaaatcagtattgccgtcacaactatcttctacatgctatgtggctcaatgggttatgccgcttttggagatgcagcaccgggaaacctcctcaccggttttggattctacaacccgttttggctccttgacatagctaacgccgccattgttgtccacctcgttggagcttaccaagtctttgctcagcccatctttgccctttattgaaaaatcagtcgcagagagatatccagacaaatgacttcctcagcaagggatttggaaatcaggaatccccggntttaaaggcctccttacaaaggtaaaccggttttcaaggatggggtttacaaggnngtgggcttttttcggtanaaaccccngtggataatccgattgcttggtngccngtttttttaaaannacgg

SEQ ID NO: 94351 - DNA, 1838 bp, Arabidopsis thaliana columbia
ggcagcagcaaatactatcatcacccatctccttagttctattttataattcctcttctttttgttcatagctttgtaattatagtcttatttctctttaaggctcaataagaggagatgggtgaaaccgctgccgccaataaccaccgtcaccaccaccatcacggccaccaggtctttgacgtggccagccacgatttcgtccctccacaaccggcttttaaatgcttcgatgatgatggccgcctcaaaagaactgggactgtttggaccgcgagcgctcatataataactgcggttatcggatccggcgttttgtcattggcgtgggcgattgcacagctcggatggatcgctggccctgctgtgatgctattgttctctcttgttactctttactcctccacacttcttagcgactgctacagaaccggcgatgcagtgtctggcaagagaaactacacttacatggatgccgttcgatcaattctcggtgggttcaagttcaagatttgtgggttgattcaatacttgaatctctttggtatcgcaattggatacacgatagcagcttccataagcatgatggcgatcaagagatccaactgcttccacaagagtggaggaaaagacccatgtcacatgtccagtaatccttacatgatcgtatttggtgtggcagagatcttgctctctcaggttcctgatttcgatcagatttggtggatctccattgttgcagctgttatgtccttcacttactctgccattggtctagctcttggaatcgttcaagttgcagcgaatggagttttcaaaggaagtctcactggaataagcatcggaacagtgactcaaacacagaagatatggagaaccttccaagcacttggagacattgcctttgcgtactcatactctgttgtcctaatcgagattcaggatactgtaagatccccaccggcggaatcgaaaacgatgaagaaagcaacaaaaatcagtattgccgtcacaactatcttctacatgctatgtggctcaatgggttatgccgcttttggagatgcagcaccgggaaacctcctcaccggttttggattctacaacccgttttggctccttgacatagctaacgccgccattgttgtccacctcgttggagcttaccaagtctttgctcagcccatctttgcctttattgaaaaatcagtcgcagagagatatccagacaatgacttcctcagcaaggaatttgaaatcagaatccccggatttaagtctccttacaaagtaaacgttttcaggatggtttacaggagtggctttgtcgttacaaccaccgtgatatcgatgctgatgccgttttttaacgacgtggtcgggatcttaggggcgttagggttttggcccttgacggtttattttccggtggagatgtatattaagcagaggaaggttgagaaatggagcacgagatgggtgtgtttacagatgcttagtgttgcttgtcttgtgatctcggtggtcgccggggttggatcaatcgccggagtgatgcttgatcttaaggtctataagccattcaagtctacatattgatgattatggaccatgaacaacagagagagttggtgtgtaaagtttaccatttcaaagaaaactccaaaaatgtgtatattgtatgttgttctcatttcgtatggtctcatctttgtaataaaatttaaaacttatgttataaattataaaacccgtgtgttttcaattctatatcaaattaaaaaaagggcggccgctctagaggatccaagcttacgtacgcgtgcatgcgacgtcaa

SEQ ID NO: 94352 - DNA, 442 bp, Arabidopsis thaliana columbia
aaacaaaggatccttttttactggaaagatgttttttttttcttatcttctgagatggattgcgatagagagagagaacaaaaaaattctcagtgagcgcttattgatcaacaatggcgaaagagacagtgtgtgtaaccggagctaatggtttcatcggatcttggataatccgaacgttaattgagaaaggatatactaaaatccacgcttcgatttacccaggatccgacccgactcatcttctgcaactacccggatccgattctaagatcaagatctttgaagcggatctcttagactctgatgcaatctccagagctattgatggatgtgcgggagtgttccacgtggcgtcaccttgtacgttggatccaccggtagatccagagaaggagctggtcgaaccggcggttaaaggaacgatcaatgtgttggaagc

SEQ ID NO: 94353 - DNA, 467 bp, Arabidopsis thaliana columbia
ttccgggtcggaccaagccttccgccggtttacaagtccccgccaccaccggttttcttcttctcgcctcctccggtttacgaaggtgtcctccaccaccagttaagtactactcccctcctccagtttacaagtctccaccaccaccggttcactactctcctcctcccgtagtataccattccccaccaccaccggttcactactctccttctcccgtagtatatcactccccaccaccaccggttcactactctccttcttcagtcgtataccactcttcaccaccaccggttcactactcaccttcttcagtcgtataccactctccaccaccaccggttcacttcttaccttcttcagttgtataccactccccaccaccacccaagaagcacttcgaatacaaattttcttcttcttcggtccattacttttcccctacggtataccattcttcttcttct

SEQ ID NO: 94354 - DNA, 408 bp, Arabidopsis thaliana columbia
acaagactctcttcttcttcttcctctttatgttttgtccgccacacgcatgggcgggagtgatcagagttcttcgtctctctacttcaactctcatctctaaaaccctagactctctcgtcttcaatcgttttaaaaagaaatggaaggaaattgctcgcaaggacgctttgattctcaagtttcttctatgagagatcttcgtccaaatgctataaatcagaatcagaaacaacaccatccaaattctcgacaagactcaggctttaacaatactatggatacacgtcacaacaatgtcgacagaggaaagaaatcaatgtgtgaagatgatgaactttgtttggtaagttgtgatggtcaaaacaagtccaaggaaaactctccttggcaacgtgtgaaatggat

SEQ ID NO: 94355 - DNA, 419 bp, Arabidopsis thaliana columbia
gaagcaggggcaccacaggatcaagaggcgtttattaaagaagtggaggccggcaacaaggagaatttcctggaatttaaagccccaaagttttacggacagcccttaaattgtctcaagctttggagagccgttatcaagttaggtggctacgatgtggtcaccacatctaagctatggcggcaagttggagaatcgttccatcctccaaaaacatgcactacagtctcctggacattccgcattttctatgaaaaggcacttttggagtatgagaagcatttaaggcaaaatggtgagcttaaccttcctggttcagcttctcttccgtcttcaggcattgaaaaggaggcaagtagccatcaagcttcagggtcaggcagaacaagaagagatgctgcagctcgtgctatgcaagg

SEQ ID NO: 94356 - DNA, 835 bp, Arabidopsis thaliana columbia
catatcttgactttgtgtcggaaaatggtgaagagtttggtaattttggaagtccatcatggtttagttgggacaacaagcttccaggaacacatgtataaagaacaagacacttctttacaaatcatgattcatgtttgtttgattataacattttgtgacttatctaatacatttgcagatactattatcaagattaacctttttcaaaaaagggttatcaggaagcaaaggacttcaaggttttaaagaaacagcagaagctgtcatgtgtgggcttataccaagctcaccaactgctacatctagtagaaccgatggtggtctaatatgggtaagtgaatggaatgccctgcaacaccctgtgtcctctgcatttctagctacactctacagtgactatatgctcacctctggtgttaaggaactatcttgcagtgaccaatcctttaaaccttcagatctcagaaaattcgctagatctcaggctgattacatgttagggaaaaatccggagaaaatgagctatttggtgggatatggtgagaaatatccagaatttgtgcatcatagaggagcttcaataccagctgatgcaaccacaggatgcaaagatgggtttaagtggcttaactcggatgaaccaaatccgaatgtagcttatggagcacttgttggtggaccgtttttgaatgacacgtttatagacgcaaggaacaattctatgcaaaatgagccaagcacttataacagtgctcttgttgttggtcttttgtccagtttggttactacttcttcctcggtagaatctttttaaatgagatttttattaatt

SEQ ID NO: 94357 - DNA, 426 bp, Arabidopsis thaliana columbia
accacgcgtccgcgtgttctaacctcattcctccataacccctttcttccttttgaatctctccttcttcttcttcatccccaaattcgaaaccctaaccctaaaactcagtttcaaaatggctgaaccaatcaccaaggagcagcctcctccacctgctccggaccctaattccacctaccctcctccgtccgattttgattccatctcgatccctccgttcgatgatcatttctccgatcagactccgattggggaactaatgtccgatctggggtttcccgatggtgaattcgagctcactttcgacggtatggacgatctttacttccctgctgagaatgagtcgtttctcatccctatcaatacgtccaatcaagaacagtttggtgattttacttcggagtctgaaagttctggaatttc

SEQ ID NO: 94358 - DNA, 488 bp, Arabidopsis thaliana columbia
  unsure (1)..(488): unsure at all n locations
tgacaacttatgttgtaactagacctggaagggaactcttgttcaccgttgtctcgcaagacgagaaatacaaagctaaggtatgcatagatgtaattgttcaacggcttggagatgctgcagcggcgggactatttgaagtccttaccattgctcttggcggtcaaacgtcaactgcttcactctatgccctgccagtataataaaagcttcctactttcagacagttcgtcgtgtatgagtattatttctccatgaaacncctcatcaagtctccattgtttttttaacaggtgtgtttaatatggatagtcacagcggttcttcttgggccggcggccangnacanttggcgnaaccccagggtgggttcatctttcatagggaccaanatccttaactttgatncaganngttnagagnttcaacggcatatgtaggcgttattgggnaacanctttancccggccgcnatntggtnnaggtcc

SEQ ID NO: 94359 - DNA, 495 bp, Arabidopsis thaliana columbia
  unsure (1)..(495): unsure at all n locations
gggttggaatctccncgcggctattgagccttccatgcnttgcggtcaacgtcaactnttcactctatnccctgccagtntataaaagcttcctactttcagacagttcgtcgtgtatgagtattatttctccatgaaactcctcatcaagtctccattgtttttttaacaggtgtgtttaatatggatagtcacagcgttcttcttgggccggcgacaagaacaattggcgaaactccaggtgggttcatcttcataggaacaaaatcttaactttgatacagaagatgagaggcttcaacgtcatatgtaggagttatgggaaaacaacttaaacccgaccgacatgaagatgaaggatcacaaggcagagtaatggtttagaacttagcttaaagaattcatatgtctgctgataaattaaatattgtacaaagggaaattacgctctttcttttgagagcggagtatatgtaaccgaacttggtttttctc

SEQ ID NO: 94360 - DNA, 710 bp, Arabidopsis thaliana columbia
tagactctcgggtctctacgactcacttcatgggaaagctggcacgcctgcaggtaccggtccggaattcccgggtcgacccacgcgtccgattccgaccactgtactccggcgaaaacctcaatttctggggatggattagaaaaagagagcgactttaagaagcaactgaactctgagatagatccacaagcttcttcctcgcaaaacgatgcaataactatggaagatggagccgtctctgtaaacaatagggatctgcaagagataaaggaatcatccttctctaaaggaagtgagcaatatcgagttgatggagcccttgaagaaagtttgaattttgaggagaaggaacaagaatctgaagctcagagactattggaagcagagaagagaagattgctggctgaaatcgaacttgggtcaatctttaggaagagtgttgatgtggatacgttgcctaagatcgaagagacgatggataatgatgttgataagattgaattggttgatcatactgcgttggttggatgttgttcatcatcctaagagaccagggactgctcaaaatgagaaggatacacctagaaagcttaagaaaattggagataagagaaatgttattgaggggagtggagtagaaaacaatgggaagcagtttaggagattgtacactaggaaacaattggagtcaatgaggtttgcccaca

SEQ ID NO: 94361 - DNA, 481 bp, Arabidopsis thaliana columbia
cttggattttcctggtgagattctacaaaaccaaaagattccttcgccggaataatcaccggagataaagataaaggaatggcgtccctgaaatttccgttggagattctcgccgtcttcgtcatcatctccgtgattcttttgccgattgctcaatctcattcttcttcgccagctcccgcacccaccagcgatggaacatcgatagatcaggggatagcgtatgttctaatgatggtggctttggcgttgacttatttcattcattgacgtgatggatccgatctatttgttcttcctccataatggtttgtctttcgtagtgttgtgttacaattcttttctttttggggtttgtgacgtgagattttgtagaaaatcatattagggttttggtcctcatgcttttgtcctgtttttgttggttgcattattcggggaccctttttccttcccgtgggatggagagggggggtttttt

SEQ ID NO: 94362 - DNA, 494 bp, Arabidopsis thaliana columbia
  unsure (1)..(494): unsure at all n locations
gtcgtcttcttcgtcatctccgtcgctgttcgttctcattctttcttaaggtagagctggtggtttctgtaatcgccggtggtgatggcttctaacgatccaaaaaacggcggcggtttcttcgcctctcttgcttcatccatcaccaatttcggatcggccatgagtaaatcagtgaacggtttgatgggatatgaagggcttgaagtgattaatccagaaggaagtacagacgatgcagaggaagaagcagggagaggaagatggaagcaagaggaacgtgatggctattggaagatgatgcagaagtatatagggtctgatgttacatctatggttactcttcctgtgatcatttttgaacccatgacaattgttgcagaaaatggctgagttgatggaatactcatatttgctagacatgggttgcaaaactngaggtccctncatncgtatggtntattcantcatcatgggntatnaccttgngnnta

SEQ ID NO: 94363 - DNA, 535 bp, Arabidopsis thaliana columbia
  unsure (1)..(535): unsure at all n locations
ttcatgtggatatnctctgtttttgtaatgttatttgtggaaataacgatattgtcctttggttgttttttgtgctgtttancttggaggaatgaggagaggagatttatctctaaccttctctttgaaagggaagcatgggagagagtaccttggtgggtcggaatcagatgaagctactacaccgactaagatgcgtaagaccaatgctttcaaccgtctgatgagtggtctctcgatctcaaccgttagattcgatgactacggtcccaatggtgatcaaaaggtcttcaagctctggtgatgaaggtgggtttagtttctctccggggacacctccgatctataatcaccgggaattcaaagcagacgaaaggggtgtccctcaaccgggctccggtctaaggaaaggttattacctaatttcccacccccttagtaattaattttaatttatatatanttggggaattgaataattcaattgtntaaccttngggggnaattttnggntntnggcntaaatgttgntaaa

SEQ ID NO: 94364 - DNA, 940 bp, Arabidopsis thaliana columbia
  unsure (1)..(940): unsure at all n locations
ctttcagccgccgctttcactacctcttcctcttccttcttcttcttctaccttcttctcgtaaaggttttgctacacactggagctcgcaaatctggctatcgaaaaccacaatcacaaactcaacttcggggccttcaaggccaatcacaagaaagtcatgggaccaatgataagaacagaggaagaagaagactatacaagtccaccgtggctaatgccaatgctacgagggagttacttcgtcccttgttccatccatgtcgattcaaacaaaaacgaatgcaatttgttctgtcttgattgtgctggaaatgccttttgctcttactgtttagtcaaacataaagaccatcgtgttgttcagatacgaagatcttcgtaccataacgttgtgagagtgaatgagatacagaagttcatagacatcgcttgtgttcagacatatataatcaacagcgcaaagatcgtgttcctcaatgaaagacctcagcctagaatcggtaaaggtgttacaaacacttgtgaaatctgttgcagaagtctccttgattctttcaggttctgctctctcggctgcaagcttggaggaatgaggagaggagatttatctctaaccttctctttgaaagggaagcatgggagagagttccttggtgggtcggaatcaaatgaagctactacaccgactaagatgcgtaagaccaatgctttcaaccgtctgatgagtggtctctcgatctcaaccgttagattcgatgactacgggtcccaatggtgatcaaaaggtcttcaagctctggtgatgaaggtggttttaagtttcctttcccggggacaacctcccgntcctttaatcacccgggttttgaaggcgaaggggaccctacgggtccgtttagaaaggtnnttccaaatttcnacccctggattatttttt

SEQ ID NO: 94365 - DNA, 769 bp, Arabidopsis thaliana columbia
gccccagctctatacgactcatttagggaaagctggtacgcctgcaggtaccggtccggaattcccgggtcgacccacgcgtccgcccacgcgtccgtacggctgcgagaagacgacagaaggggggctaacaatggcgaagaagaaggaactgttatcaaaagcaccgtggagaggcgacgacgaagatgattccgataagtttagcaacgcaaagcttaaagtcacaaaggattctgatggtatgtcgaagatgcacgtccctagccgcggaaccaaaaaaggaagtctcgctgatgatgatgatgattcacttgagattgatcctcagcttcgttacagcttcaatcgcaactatcagttcctgcaaagtgtattcactatagacactttggtgaagcctcttcctccttcaatggcattcaatgtctctcgcaacttgagcttcttcacccgcattttcactcaattctttgatcctgaaggcattgcaaatgcacagaagtctctagggttggggcaggaagagaaagctccccgtgttcgttgaaatatgaccatatttcaatcttgtgaatggacccagcactgttagattgattaaaatatgtcctcaaagagatgttttgtatgaattttcctgagtacaatgaaatttccaagttccattttaaaaaaaaaaaaaaaaaaaaaaaacaaagcggccgctctagaggatccaagcttacgtacgcgtgcatgggacgtcaagtaattctaaggcgtccta

SEQ ID NO: 94366 - DNA, 336 bp, Arabidopsis thaliana columbia
cggacgcgtgggattggattctgcttttttcttttcacgtttccgatcgtttctggaacgtgtggtgagcctaaggttcatctctctcttctactcgtcgattctggtcatcgaacattccactcagctcacgtaaagtgctatatctcgtttcccctgtctcggttcaagctttcaagagaattgtgactgattctagaagggctctttgtcagcacactggaaccgaataaggagcctggtaacgtgtcaagtaattcgagcaccgatacagagaagtcgtctgacgagatctctgtcaaccatgccgtgatcgcgtggcaagagatgagaaag

SEQ ID NO: 94367 - DNA, 443 bp, Arabidopsis thaliana columbia
cccattctctctctctgttttccttgttctccaagccagatctctctccataaatctctcttcatctctctctttccaccaaacatccgcgatcctcgattctcaattccgtgtctgttttttttcttcacttagcgatggcgatgatagagcaaaggccgaagacgaagatcgtttgtactctaggtccagcttccagatctgttccgatggtcgagaagcttcttagggctggtatgaacgttgctcgtttcaatttctctcatggatctcatgaataccatcaagagactctcgataatcttcatcaagctatgcttaacactgggattctctgtgccgtcatgctcgacaccaagggtccagaaatccgaatcgggttcttgaaagatgggaaaccaatccagctgaaacaaggacaagagatcactatttcgactgac

SEQ ID NO: 94368 - DNA, 1220 bp, Arabidopsis thaliana columbia
cgtccggccaaatccacacccgcggggtcttctggtccatccttggttccccttttcctttctcactgtttctgccttacttaaaggctcaatctttgcttcaaattcaacccatctctttttcctcccttccctcacaatcaaaatcttaattctcagcttctggttttgtcgaaaatggaaggcggttccgctagtggatcggcttcggctttgtcaaacgatgaaaatctcgtcgtttcttgtgaggattcttcttctcctatagggaatgagcttgagcttggtcttacgttgagccttggtcgcaaagggtatcgagattgtagggtttacgctgatgattcttcttcttcttcatcatcttcttctctgagcagagctagcgtaattgctgggatcaagaggacagctgattccatggctgcaactagtgggcaagttgtgggatggccaccaataaggacttacagaatgaacagtatggttaaccaagctaaggcttcagccactgaagatccgaacttggagataagtcaagccgtaaacaagaatagaagtgattcaacaaagatgagaaattccatgtttgttaaggtgactatggatggcattcctattggaaggaaaatcgatctgaatgctcataaatgctatgaatcattgtcaaacactctagaggaaatgtttctgaaacctaaattaggttcacgcacactagaaaccgatggtcacatggaaacaccggtcaagatactaccaggtgggtctcccggcttagtcctaccgtatgaagccaaggaaggagattggatgcttgttggcgatgtcccgtgggggatgtttattggttcagtgagaaggctccggataatgaaaacatcggaggctactggtaaagctcagatgatattatgaagcaaataataatctacgaagaaccctttatgtttgaagcagtaataagacagatcacagatcaaagagaagacaaaaacattgtaagaagcttcttcttcttctctcccctttacagtttcttttttggctctgccatttttcttttagttaggtatatgttctctttgtaaatccccccttaaaaatctattagaaaacccttttttggacaaaaaaaaaaaaaaaaaaagggcgtccgctgtagaggatcccagcttacgtacgagtgcatgcgacgtcatagctgttgtataagtaac

SEQ ID NO: 94369 - DNA, 467 bp, Arabidopsis thaliana columbia
  unsure (1)..(467): unsure at all n locations
ttgctccaccttcgttcttctgattccatatagatccgtttaatagcagcaacgttgttcaattgagaaggtggaaacatgtttaagttcttaaaaggagcagtggctggatctgggacgggactcaaggatctaccttataacatcggtgatccttatccttctgcttggggttcatggagtcactttcgtggtacctccaaggatgatggatctccagtttcaatatttgctctctctgggaacaatgctcaagatgggcatttggctgctggacggaatggtgtcaagcgccttcgtacccgtgaggcatcccaaatattctttcattttctccacagtactgaggtcggaactccatgatggctctactacccaaagttacaaatctatatagtcacttgagcctgttatgccgcttgtcagattaggttaaagggctaggctttaaagtnncccnnngggtt

SEQ ID NO: 94370 - DNA, 552 bp, Arabidopsis thaliana columbia
  unsure (1)..(552): unsure at all n locations
gagtaagtccgttcaggtcgatcataataattccgacgaattagaaagcgaaaaaacaaatctacgaaattctcctctttccgaagatgcagattgaagaagaaggagaagaatcataagaataaagctttgaattatcccgttttgctccaccttcgttcttctgattccatatagatccgtttaatagcagcaacgttgttcaattgagaaggtggaaacatgtttaagttcttaaaaggagtagtggctggatctgggacgggactcaaggatctaccttataacatcggtgatccttatccttctgcttggggttcatggagtcactttcgtggtacctccaaggatgatgggtctccagtttccaataatttgctcccccctggggacaatgctccaagatgggcatttggctgctggaccgaaatnggtgccaangccttcggaccggggngnganccnaanatccttcattccccacaggactgggggccgaacncctggaggngctacaccaagttcaacctannagcncggccngtntncgta

SEQ ID NO: 94371 - DNA, 357 bp, Arabidopsis thaliana columbia
ctctcggaaatagttgctgaagaaagtttgagactttatggcgcttaaagcaaaaccaagatctgaaatggatatctcagattgttctgcaaatcaacaaccagatggtgttaatgtagtgggggatgcacaagaggtggaagaggatatagttgatatcttgaagtggcatgatgattttgaagaggaaagagaagaggttttgtgtggagcctcttcttcaaggtcttttggtgattcaatgtgtgctcgtgatggtgatgattttggtttgggtgatgaagcacaatctatggttagcaatgattatccattacctgggaacctgtgatgatgggactgagttttttgggtttg

SEQ ID NO: 94372 - DNA, 1780 bp, Arabidopsis thaliana columbia
tcttcttcttattttatcatagctaagctcaaaaacaatcgatagatggagaagaagaagagcatgttcgttgaacagagcttcccggagcatgaaattggcgatactaacaaaaactttgacgaggatggccgcgacaaaagaactgggacatggatgaccgggagtgcacacataataacggccgtgatagggtcgggagtgttgtctttggcgtgggcaatcgcacaacttggatgggtggcaggacccgccgtactaatggctttttctttcataacatattttacatcaaccatgcttgccgattgttaccgttcccctgaccctgttaccggcaaacgcaactacacctacatggaagttgtccgatcctatctaggaggaagaaaagtgcaattatgtggattggctcaatacgggaatctgattggaataacaatcggctacacaatcacagcttcaattagcatggtggcagtgaagaggtcgaattgtttccacaaaaatgggcataatgttaaatgtgccacttcaaacactcccttcatgatcatatttgcaatcatccaaattattcttagccaaatcccaaatttccataacctctcttggctctccattcttgcggccgtaatgtccttttgttatgcctccatcggtgttggtctctccatcgccaaagcggcgggtggcggtgagcacgtaagaacaacactgacaggagttacggtcgggattgatgtatcgggtgccgagaaaatatggagaacgttccaagcgattggggacattgcatttgcctacgcatactcaactgttctcattgaaatacaggacaccttgaaagcaggtcctccatcggagaacaaagccatgaaaagagcaagccttgtgggtgtctccacaacaaccttcttctacatgttatgcggttgtgttggttacgctgcctttggaaatgatgctcctggaaatttcctaactggttttggtttctatgagccattctggctaatcgactttgccaatgtctgcatcgccgtgcaccttatcggcgcctaccaagtcttttgtcaaccaatttttcagttcgtagagagccagagcgcgaaacgttggcctgataacaagtttattacaggagaatacaaaatccatgtcccttgctgtggtgattttagtatcaacttcctcagattggtatggaggacttcatatgttgtggtcaccgcggttgtagccatgatcttccctttcttcaacgatttcttgggtcttattggagcagcttccttctggcctttgactgtttactttcccattgagatgcatattgctcagaagaagataccgaaattctctttcacttggacttggttaaaaatcttgagttggacttgtttcattgtgtccctcgttgctgcagccggatcagtgcaaggactcatacaaagtctcaaggatttcaagcctttccaggctccttagtgaaatatgtgttctcgccaacgtctccaagaacacaagttccatgcactctcttccctccaataaaagtttctatttctttgtagtttattggtgtgagacaatctcataccaaatattgtacctctacttgcttgtcttaaacaaatctatcatcagtttatccccaaaaaaaaaaaaaaaaaaaaaaaaaagggcggccgccgactagtgagcttgtcgacccgggaattaaatccggaccgggacctgcagggggaccagccttcccttatattaattgtattaa

SEQ ID NO: 94373 - DNA, 413 bp, Arabidopsis thaliana columbia
gtttcgttgtcattcctcttgttgatgtatatgttgcaataataacatcggtcgtgcctattggaactccttttaccgtgacatatacaatttcatgtaatgatcatctcgtcagattataaacgtataatattgccctcacaacagactctaattctaaggattgatgttgcattctctgagataaacgtgctcatagtctacatgctttgaccagaagcctctgtatcttggaatcccaatctctagccatggtttgaggttgccattatagtgtatcacgggctgccctctcaatatccctttggttcacactcgggttgtatccaagccctagtatgtgccatttccggtctagcgggatatgttcgtctccaaaatgtggttaaccaaggggggaaaggccccaagtt

SEQ ID NO: 94374 - DNA, 533 bp, Arabidopsis thaliana columbia
gtttattcttctctgctgtatcaatcaaattaacggagtttgagtttcttttccgattccggcgatggggtcagtccccgatccaggcgagttaactgagttagctcagccgagtttcgaggagtttcagaaacagacgtcgttgatgactagctgtactcttctatggcaagagctctccgatcacttcacttctctagagcagaatctgatgaagaaatctgaagcgttgaagcagatgattgaaactctagataaccagactcagacctcgctcgagtctctgaagcgtagagaggtaacaatcgaccatagcgttgagatcgtagctgggaaagtaggtgaacgagctagagctgctcttgaatcgttagagaaagctagagatggttgtggtgatggttctaatgatgattccggtgatgttgacgatgaagaaggtcttctctctgctttgaaatctctttgtcttaaaatggatgcgagaggtttttggaactttgcgacggcgaggaagaaggagttggagaatc

SEQ ID NO: 94375 - DNA, 597 bp, Arabidopsis thaliana columbia
  unsure (1)..(597): unsure at all n locations
cgactcactatatgggaagctggtcacgcctgcaggtaccggtccggaattcccgggtcgacccacgcgtccgcttcaatttcactctctctcttgagtttattcttctctgctgtatcaatcaaatcaacggagtttgagtttcttttccgattccggcgatggggtcagtccccgatccaggcgagttaactgagttagctcagccgagtttcgaggagtttcagaaacagacgtcgttgatgactagctgtactcttctatggcaagagctctccgatcacttcacttctctagagcagaatctgatgaagaaatctgaagcgttgaagcagatgattgaaactctagataaccagactcagacctcgctcgagtctctgaagcgtagagaggtaacaatcgaccatagcgttgagatcgtagctgggaaagtaggtgaacgagctagagctgctcttgaatcgttagagaaagctagagatggttgtggtgaataagtcctaatttgagctntcctccctcccatctgccacccttttccttccctacacacccccagattacgtctccccaccccattcactgcattttcac

SEQ ID NO: 94376 - DNA, 504 bp, Arabidopsis thaliana columbia
taggtaccactatagaagagtctatgacgtcgcatgcacgcgtacgtaagctcggaattcggctcgagccaccacggaattctccctccggccaaatcggatcgaatctttcttaccattccggtgttcccgccggatttcagagctcgtggatggactaagtctcctttctctctccttataaatccctctcttgcttcagctgccaatcgtcgtctctctcatcttcctcctatcgcgtgttccagaggtattgatcaggaagatgaagagaaggagagcagagaacttctaccacacaaaaacgatgagaatgcaaccacttcacgctcttcttcatcagtagatagtggaggcctgacagattatcatcaagaagaaactcacaactcttccttcaagactgctgccttgtgcgttggcactgcggtggcatttggaactggaataggtttgaaggaaggtgctggcaacgcttcagagtttgtcgcaggctacatattg

SEQ ID NO: 94377 - DNA, 542 bp, Arabidopsis thaliana columbia
  unsure (1)..(542): unsure at all n locations
tggggctttaaattagtagaaatgatcagacagttttccccaagattccgattcagagtatgctcctatccaccgacaaatgtaatgactatcagaaacgaaataatcctttattttttataagtctaccaacttttttctaaaaaagaaagaagaataggaacgaaacaaggctcttttttttttcatatatttcgaaaataaaatcgaatttctgtcatgaataataaaaaaataggatgtctaattatttttcgtaatcgaaaaccacgatgggcttaaatacttttttttttttaggagttttttattaaagggttaagttattactcaacaaatagaaattcaaatttgtaaaggggtgagatgaattccgaagcgcgttttttattcttagaatttgagcagacagaattccattgggtaataattcgggaccccagatatatttaaaccattttnggacacancatacccaccaaatttaaaancngggcctnggtttntttatggccccgaggngccggatggggccagncccc

SEQ ID NO: 94378 - DNA, 466 bp, Arabidopsis thaliana columbia
gtccaaccacgcatccgcagattcctgagaatttgagcctaatccttcatcaccaagctaagtctcaagatctgattgtggttgtggttgacttcttcttcaaaggtttcacgagtacaataatgagtcaaaagggtttgatatatagctttgttgctaaaggaacagttgttctagcagagcatactccttattcaggaaactttagcaccattgctgttcaatgtctgcagaagctacccacaaatagcagcaagtatacttactcttgcgatggtcatactttcaatttccttgttgacaatggctttgtgtttctagtggttgctgatgagtccaccggaagaagtgttcctttcgtgtttctcgaacgggtcaaggaagactttaagaagcggtatgaagcgagtataaagaatgatgagcgacatcctcttgcggatgaggacgaagatgatgatttgtt

SEQ ID NO: 94379 - DNA, 467 bp, Arabidopsis thaliana columbia
atcctttccaagcaattaactgaagtccattaaaaccttctctgacaatggtgcctcgcggacccagcccaccaaccggctgcggcgaacgcaaccgcaactgcaaccccaatcgcaacctcgagcacaacccctgccgggcaggcgtatgaaccccgtcctatgcatcatcgtcgccctcgtcctcttgggactcctcgtgggtctcgccatattgatcacatacctcacactcaggccaaagcgactcatctacacggtagaagccgcgtcggtccaagagtttgctataggcaacaatgacgatcacatcaacgcaaaattcagctacgtgatcaaatcatacaacccggagaaacatgtctccgtaagataccactccatgcgtatctccacggctcatcataaccagtccgtggctcacaaaaatatctctcctttcaagcaacgtcctaagaacgagacta

SEQ ID NO: 94380 - DNA, 470 bp, Arabidopsis thaliana columbia
  unsure (1)..(470): unsure at all n locations
gacccangcgtncgnttcttctgtagacaccattgatatcctctaaattgttccccgtcgtagaaactttaggtaatcgttgccgtcgagctgagatttgtgaaggggaagccctgggagattcgataagggattgtaaagttgcacaagtttgcttatccccagaacctgctctgcaacacaacaatggggaaaaaaggagggactttgaagagaagtagcaaaagcacaaaaactcgcaaagatatcgtcgaagaccaatacgacgacgagattgacgcctttcataaacagagggatatagttcccttggatgttaatgatgatactgatgaatcggatgaagatgatgtgcaacctgtatttgatttacagggtgtggatgatgaaagtgaggaggatgaagatacagaagacgaagaggtggccgagaatggacttactgcgaaaatgattaggcagaagaaata

SEQ ID NO: 94381 - DNA, 608 bp, Arabidopsis thaliana columbia
  unsure (1)..(608): unsure at all n locations
gttttgtcctttttagattttgttttttttttattctttaaaccgttcattgatttcttctgagtcattagaggttgatgtatggcaagcaaaagggttttcaattgtgtgttggttgctgtgatctttgaccagattttatggtggaatttctgaaaaaagtatcaatccggttcttgaaatgatgaagagaccgatcccaagttggccatggtggttattaggaagtagaaaagagaaagaaactgaagctcttaagtttcctacaaagatagctcgagtaaataagaggaaagagcttgaacttgagagctttggttcgtctggctctgaatctgtagctgttgttgctggtgatggacctgaatggtctgttggatggactgagccacatggacctgatttccaaagtgatgatgaaggaaatgatggtggcttcttagtgttggttccttgttatagagctgtttgtttgaaggctcctagtaataataattacccacccctttgaggcctgtcaaagaatctcccccaatgggtttgcccccccnatgggaggatttccatggggcaaattgnnttcaanntttgaaaaactttttnccngg

SEQ ID NO: 94382 - DNA, 846 bp, Arabidopsis thaliana columbia
gaaaagattgcagtagaagaagaagaactgagaagcggcattgacgaagctgagaaattggttgcaaaggaagatgagataaagatgctgaaagctagactctatgacatggagaaagagcatgaatcactaggcaaagaaaacgagagcttgaagaatcagttgagcgattcagcttcagagatttctaatgtgaaagctaatgaagatgagatggtttcaaaggtgagtaggattggggaagagttagaagaaagcagagcaaagacggctcacctgaaggagaagcttgagtccatggaagaagcaaaagatgctttagaggctgagatgaagaagctcagggttcaaaccgagcagtggaggaaggcagcggatgctgcagcagcagttctttctggagagtttgagatgaatggtcgggatcgatctgggtcaactgagaagtattatgcaggtgggttctttgacccgtcagctgggttcatggatccaccgggaatggctgatgattatcatgatggactgggaagtggcaagaggaagagttctgggatgaagatgtttggtcagttgtggaggaagaaagggcaaaagtgagttacagattgtgtggagtgtcattcaagaaatggtgtgctcaccgtttctctcttttattttgctgtatttacctgcaagtttttgtaagtgggtccgcttcatcagaagctaactatcaatccaaatcaaccgcaaaaacaatttcatgaacaaatttctgaaaaaaaaaaaaaaaagggcggccgctctagaggatccaagcttacgtacgcgtgcatgcggcgtcatagtaaaatatagtgc

SEQ ID NO: 94383 - DNA, 458 bp, Arabidopsis thaliana columbia
taaacattcacaccatctctttctctaacaatggagatttttcaaaaggccaaagccgttcgtctacggagccatcacgacaaggacctagtcgccgatgaagacgaagaatctgtaactcaagaacgtaacggctcagcaggtgcagccaaatggaccggtgagataatcccaggctcaacatatctcatccgtctcaaaagcgcttatggcaaatacttaacagcgtctaacaaaccgtttcttcttggagccaccggaaaaaaagttctacagactaaacctagtcgtcttgactcgtctttagcttgggaaccgattagagattctgctttggttaagctcaagactcgttatggtaacttccttcgtggtaacggtggtttacctccctggagaaactctgttactcatgatattcctcatagatcggccactcaagaatgggtactttggca

SEQ ID NO: 94384 - DNA, 650 bp, Arabidopsis thaliana columbia
ggaattcccggtgacgacgcgtccgaaagaagtgtacaaggttgatgaaatgtttatgaggtggttctacacaggagacagatgacgttttcaccctgatggctgcctcgggataatagaccgaaaaaaggagatcgttaaacttcagcatggagaatatgtctccttgggcaaagttgaagctgctctaagtataagtccctatgttgaaaacataatggttcatgctgattcgttctacagttactgtgtggctcttgtggtcgcgtcccaacatacagttgaaggttgggcttcaaagcaaggaatagactttgccaacttcgaagaactgtgcacgaaagagcaagccgtgaaagaagtgtatgcgtcccttgtgaaggcggctaaacaatcacgattggagaagtttgagattaccagcaaagatcaaattattggcatctccatggacgccagagtcaggattagtcacagcagctctaaagctgaaaagagatgtaattaggagggaattctctgaagatctcaccaagttatatgcctaaatttttcttcttcctttactttttttttttttacgtctcgatgcattcgaaagacttaacagatgcacaaaaacttaaatataagaatagttatctcttttc

SEQ ID NO: 94385 - DNA, 413 bp, Arabidopsis thaliana columbia
cttcttcttcttcgtcttcttcctccgaaacttttttttgtttttcaaagtggtggagctaaccatgaaatcgactcaccatcacagagctccactaatatctgcttcttcctcatcttcatcttcttcccaaaaccattcattcgtctctaggctcctccttctccttactctacttccagtttcccttgcttgtctcgcctttatcctccaatggcgaggcggtggtctcgccgatcctgcctctgcttctgttcgttcctctacgtcggttcctggcggctccgatctcaatcacgaggtctttcccggcatggagactgtttcatctgtctccccaaagtctcaccaatcctcctccgactgctcaaatctagctcgcagctcttctccttcatttccttactatgctg

SEQ ID NO: 94386 - DNA, 765 bp, Arabidopsis thaliana columbia
  unsure (1)..(765): unsure at all n locations
aatcatggctaccaccaccaatctcagcttcgctctctccttcttactcccgttttgccgctacgaaatcccaaatcagagacccgctgtttacgtcccccctgccactcccatcttctttcttcctggttagaaatgaagcatctttatcttcgtcaatcacgccagtccaagcttttacagaagaagccgtcgatacttcggatttagcttcttcttcttcaaagcttgtacttgtcgttggcggcactggtggtgtaggtcaacttgtggtagcttcattgctcaagaggaatataagatcaaggttattactgcgtgatcttgacaaagcttccaagttatttggcaaacaagatgaatattccttgcaggtagttaaaggggatactaggaatgcagaggatcttgatccatccatgtttgagggtgtcacacatgtgatttgtaccactggaactacagcttttccttctaagaggtggaatgaagaaaacactcctgagaaagtagattgggaaggtgtgaagaatctcatttcagcattgccatcatcggtgaagagagttgttttggtttcatcagtaggtgtgaccaagtctaatgagctaccctggggcatcatgaaccctttttggagttcttaaagtacaagaagatgggggaagattttcnttcgtgacctctgggcttccatttcaccattatcagacctggtagntttncctnantnggccatacacatcttatgncctgganactttg

SEQ ID NO: 94387 - DNA, 507 bp, Arabidopsis thaliana columbia
cgcctgcaggtaccggtccggtattcccgggtcgaacccgcgtccgcgtgatcatattttgtggatcacatcattgtcttatttttggaattgcttatcctcgcactagttcactgatttgagatctgtgcagttaattttgtgctccatagcgattccatggcttctttaatgttatctctcggttccacttctctgttaccgcgcgagattaacaaggataagctaaagcttggaacttctgcttcgaacccgttcctaaaagcaaagtcttttagcagagtgactatgacggttgcagtgaagccttctcgtttcgagggtataactatggctccaccagaccctattcttggagtcagtgaagcattcaaagctgacactaacgggatgaaactcaatcttggtgttggtgcttatcgtactgaggaactccagccttatgtgcttaatgttgttaaaaaggcggagaatttgatgttggagagaggagataacacaaagtat

SEQ ID NO: 94388 - DNA, 1739 bp, Arabidopsis thaliana columbia
gaatcgcggccggtctctctctcgttgaatccttgttaatctttttcttcaatctctcgatctgatcgttatcgaaaccgcgcgattctaaccaagtccagttaattttgtgctccatagcgattccatggcttctttaatgttatctctcggttccacttctctgttaccgcgcgagattaacaaggataagctaaagcttggaacttctgcttcgaacccgttcctaaaagcaaagtcttttagcagagtgactatgacggttgcagtgaagccttctcgtttcgagggtataactatggctccaccagaccctattcttggagtcagtgaagcattcaaagctgacactaacgggatgaaactcaatcttggtgttggtgcttatcgtactgaggaactccagccttatgtgcttaatgttgttaaaaaggcggagaatttgatgttggagagaggagataacaaagagtatcttccaattgaggggttggcagcattcaacaaggctactgctgagttgctatttggagctggtcatcctgtcattaaggaacaaagagtagcaacaattcagggtctttcgggaacaggttcactgcgattagcagcggctcttatagagcgttatttccctggagcaaaagttgtgatctcatcaccaacctggggtaatcacaagaatatcttcaatgatgccaaagttccgtggtccgaataccgctactatgatccaaaaacaattggtttggattttgagggaatgatagcagatataaaggaagctccagaaggatccttcatcttgcttcacggatgtgctcacaacccaactggaattgacccaacaccagaacagtgggtaaaaattgctgatgtcattcaggaaaagaaccatatcccatttttcgatgttgcataccagggctttgctagtggaagccttgatgaagatgcagcatctgtgagattatttgctgagcggggaatggagttttttgttgctcagtcatatagtaaaaatttaggtttgtatgcagaaagaattggggcaatcaatgtcgtgtgctcctcagctgatgctgctacaagggtcaagagccagttgaaaaggattgctcggcctatgtactcgaatccaccagttcatggggcgagaatcgtggccaatgtagtgggtgatgtaactatgttcagtgaatggaaagcagagatggaaatgatggcaggaagaataaagacggttagacaagagctgtatgatagcctcgtttcaaaagacaagagcgggaaggactggtccttcattctgaagcaaattggcatgttctctttcaccggcctaaacaaagctcagagcgataacatgacggacaaatggcatgtgtatatgactaaagacgggaggatatcattggccggattatctctggccaaatgcgagtatcttgctgatgcgatcatcgactcataccataacgtaagctgagcttccatctcagtagatgacaataagaaacagttttatataccctttttagcttcttcttgatctttgattgaaaccagatggctaaattaataagctagcatcacactatgattgctagacaattttcaaggaaacttttgatttgatcgtgtttgacaggccttgttgtattggaagactcccatcgagttatagaagaacttgttacgattgaaaaaaaaaaaaagcggccgcgaattctgaccgg

SEQ ID NO: 94389 - DNA, 1114 bp, Arabidopsis thaliana columbia
  unsure (1)..(1114): unsure at all n locations
tgatacttccaggnnnnnnnnnnnnnnnnnnnnnnnnnnnnnnnnnnnnnncaggtaccggtccnggattcccgcgtcgacccacgcgtccgtctcttctctggctatcttagagggatttttgattgagattttaaaattttctgagttggattagttggttggtaaagagatggatccggatacggtgaagtcgaccctctcgaatctggcattcgggaatgtattggcggcagctgctagagattataaaaaggaagttcttgcaaatgaaaaggcacaaggatcaagacctgtcaacgaggaagttgatcttgacgaattgatggatgatccagagctagaaaagttgcacgcagataggattgcagcactcaggagagaagtggaaaagagagaagcattcaaaagacaaggacatggtgaataccgagaagttagcgaaggcgacttcttgggagaagtcacaaggagtgaaaaagttatatgtcacttctaccacaaggagttctatcgctgcaagataatggacaagcatttgaagacccttgctcctagacatgtggacacaaagttcattaagatggacgctgagaacgctcccttcttcgtcaccaagcttgcaatcaagactttgccgtgtgttatcctttttagcaagggaatcgcaatggataggcttgtcgggtttcaagatctaggtgccaaggccgatttctccccgacgaagctggagaatcttctggtcaagaaaggaatgcttagtgaaaagagaaaagaggaagatgaggaagtttctgaggtatcaagaaagcatacgtcggtccgttaggtcttcagcgaatgtcgactctgattcagattgatctcgaagcttttctcatagtagacccccgaccctttttgtattttgttttcccccctgctctgtttgaattgtttggtctatgaatcttatgcttctataagtctttatagtgggaaatttcgttccccaacaaaaatacatataagataaaaaaaaaaaaaaaaacacatagnnnnnnnnnnnnnnnnnnnnnnnnnnnnnnnnnnnnnnnnnnnnnnnnnnnnnnnnnnnnnnnnnnnnnnnnnn

SEQ ID NO: 94390 - DNA, 653 bp, Arabidopsis thaliana columbia
cggggcggcccacgcgtccggattgttatagcgatggtggctggaagattatcacgtgaagatgctaaagagcatgggtggctggttgatggatttccacggagggttgcccaggcacaaagtctggacaaactgaacgtgaaacctgacatttttatcttactagatgttcctgatgaaattctgatcgatagatgtgttggtcgaaggttggatccagtgactggaaaaatttatcatatcaaaaattaccctcctgaatcagatgaaattaaagcaagactggttacacgcccggatgatacagaggagaaggtaaaagcacggctgcaaatatacactcagtatgctgaagcgatcgcttcagcatactcagatgttatggtcaagattgatgcaaacaggccaaaagaagtggttttcgaggagacccagactctactgtctcagatacagttaaagagaatgataaagactgataaagcatctcctgttcaggataaatggagaggaataccgacgagattgaataacattccacattcgagggatatcagggcttatttttatgaagatgtgctgcaagccacaattagatctatcaaggatggtaacacccgtcttcgggtggacattaatatccctgagctaaa

SEQ ID NO: 94391 - DNA, 463 bp, Arabidopsis thaliana columbia
atctttttttctggtacacatgttctgttttgcctgcgtggtattatcaccggttgtgtggtaggttagggtaaattcaggttggccatttctgttgagctaacctccacaactcttttttttggtcgttcgcaggtaatttaatctatccttgttaaaattcgaccaagggcgtgatcgatttttctcgtttatgcacgaaattcgaaccgggataggcttggagaatatagaaggggaggccaaaaaaattaagaaatggtttaggaatgttggggataaaagaagaaggagaagaagtgatagtgatgatgataagattcgattttaatttaaaccgggtcccgaaatccagctggtgtggagaagtccaaataataatccaagtttttaagcctaaaaaaaaaaaaaaaggcggcccgctctaaaggatccaagcttacgtaggcgtgcatgcgacgtc

SEQ ID NO: 94392 - DNA, 465 bp, Arabidopsis thaliana columbia
cctacgaaaaaaaattcttcaattcaatatcactaatatgctattctctcttcttcttcttcttcttccgtcttgcgccaaacctcgagtcggcgaatcattcgattctcagattcgcatattttcttcgaattcgctaggctcaaaacgttgtttccgtgtacaagaagcaacctaacgatttggggccaggtgaaggaagagctgatttaggttattgagattcgttttcttcaaatggaaaacgaaagggttgagagagaacagagccaatttcaggaagacgagtttatcgattcgagaaaaccaccgccatggaggaaacagatcacggttcgagcgatcgtcgcgagtttattgatagggattgtctacagcgtgatcttgtcttgaagctgaatctaacgacaggactcgtaccgaatctcaacatctcatcagctcttttggcttttgttttcctca

SEQ ID NO: 94393 - DNA, 557 bp, Arabidopsis thaliana columbia
  unsure (1)..(557): unsure at all n locations
ttcgataaataattgaaaagaacaaaagaaacaaaagagacgagaaagagttttggcgatgaagaagaacgcactttggctactgtgcattctggtgttaccggcgatagcctgtggtaggaaaccggagaagaaggtaacaatttcatcctctgggaggaaggaagatgaccttgtaaccggtttgcccggccaaccaccggttaacttcaaacactacgccggttacgtgaatctggggcctgaacagaagcaaaaggcacttttctattggttcttcgaagctcaacaaaactcttctcgtcgtcctctcgtcctttggctcaatggaggaccgggttgctcatcaatagcctatggagctgcacaagaactaggcccttttcttgttcacgacaacggtggcaaacttacctacaatcatttctcttggaacaaagaggccaatatgtttgtccttggaagcngccggtttggggttgggttcccgtttacccataaccaaattggtccttcaaaattttggngttaagtancatcaatcgnctctttttntt

SEQ ID NO: 94394 - DNA, 640 bp, Arabidopsis thaliana columbia
  unsure (1)..(640): unsure at all n locations
ccgcannncccccagntattcaacnccngttggtcccacctaaccagttttctccggattggagcaaccatcctagcccttcaggatgcaagtgatgcctttatggaaactgctaaattttccaggtccccggaaaaagatttgggagccagtgtatgttttgcattatttgctgtctcctggctattgctacggttgatatacttcccattttggatcatcagggccacgagcattgaactcctggattatttggatatgacatcagctgaaggcacattgatgtactattctttcaacactatgttactaatgctgcttgttttccacatatattggtggtatctcatttgtgccatgattgtaagactacttaaaaacagaggaaaagttggagaagacataagatccgattcagaggatgatgatgattagtcttgtaagatacggaacatgtttccacttctccaaccaaaccatttagctgctgaagaatttgttttcagcttcattaccttactgactagcgttggagggtaacacaataaagaagaaaagggtattagattttatttcagttttgtattggtctgagttccattcgacattagactgcatattttctttgacatataagaaa

SEQ ID NO: 94395 - DNA, 832 bp, Arabidopsis thaliana columbia
  unsure (1)..(832): unsure at all n locations
cggacgcgtgggcggacgcgtgggcagatttcaagaaacccttaaaatcctctctctgtctctgtctgtttgtttgttttcttgtttccttctctctctctctttctttctttgtcttcctttcccaggttgttttttttttgctctctctgccttcttgactttcaaaagactctttctttcttttggattgattttggattctagggctctctttcttttagtgggtttttgttgttgttgttgtggtctctctgatgattactgaacttgagatggggaaaggtgagagtgagcttgagcttggtctagggctgagtcttggcggtggaacggcggccaagattggtaaatcaggtggtggtggcgcgtggggagagcgtggaaggcttttgacggctaaggattttccttctgttggttctaaacgtgctgctgattctgcttctcatgctggttcatctcctcctcgttcaagtcaagttgttggatggcctcctatagggtcacacaggatgaacagtttggttaataaccaagctacaaagtcagcaagagaagaagaagaagctggtaagaagaaagtgaaagatgatgaacctaaagatgtgacaaagaaagtgaatgggaaagtacaagttggatttattaaggtgaacatggatggagttgctataggaagaaaagtggatttgaatgctcattcttcttacggggatttggcgcaaacattggnaaggtatgtcctttccggactaatcccggggtcctttcggggttaacccagtcagttccncttannccgttngggnnttttaaggntggtccnnnt

SEQ ID NO: 94396 - DNA, 656 bp, Arabidopsis thaliana columbia
gttttctcgaaccttccacgagatatactaagccattgaagaagaagagacctgagacgaacaagaaatccagaaattaccaattgcttttttttgtttaatcgaattcaggaaaagtgaagaaacgaaagagagaagacaaagaagaagaaggtgagatgggagttgattattacaagggtttgcaggttgatagaagcgctgacgacgatgaccttaagaaagcttatagaaaactcgctatgaaatggcatcctgataagaaccctaacaacaaaaaagacgctgaggctaagttcaagcagatctctgaggcctacgatgttcttagcgatcctcaaaagagagctgtatatgatcaatacggtgaggaagggttaaaagggaatgtgccacctcccaatgctgctactagtggagcatcctacttctcaacaggagatggatcttcgtctttcagattcaacccgagaagtgcagatgatatattcgctgagtttttcgggttctcgaccccgtttggtggcggtggtggtggcactggagggcagagattcgctagccgcatgtttggtgatgatatgtatgcctcgtttggtgaaggagcaggtggaggaggagctatgcatcatcatcaccatcatcatcatcacgct

SEQ ID NO: 94397 - DNA, 798 bp, Arabidopsis thaliana columbia
cacagatccagctaaaccagaccttccacgtctacacgaatggcatttcagatctggacttgatcgctacatatggatcatcggcatgatatatgcatattttcatcccactgtagaaagatggatggagaaattggaggagtgtgatgctaagagaaggatgtcaatcaagacaagcataataggaatttcttcattcgctggttacctttggtatgaatacatctacaagctggacaaggttacgtacaacaaatatcatccctacacatcgtggattccaataaccgtctacatctgtctgcgaaattgcacccaacagctgcggagtttctccctgacactctttgcgtggctcggcaagattactctggaaacctatatttctcagtttcacatctggttaagatcgaatgtgccaaatggacagcctaagtggctattatgcattattccagaatacccaatgctcaacttcatgctcgtcacggccatctatgtcttggtgtcccaccgacttttcgagcttacaaacacgttaaagtctgttttcataccaacaaaagacgacaagaggctgctccacaatgttctcgctggagctgccatctcgctctgtttatatttaacatctctcattcttctccagatcccacactaaccatgagggactagaaacatgttgaaaaacatgaatctaaagctgcacaaaggttctttttggaacctggttaaattggttccacccccattttatattgaccattaaaatttggttttaaaggatcagtttttttt

SEQ ID NO: 94398 - DNA, 646 bp, Arabidopsis thaliana columbia
accgtgacccgattcaaatccgagatgcccagttgaagattatcgagaggcgtggaaagaaggcgaatcatcatgttggagataccgagggtaaaactcaaactcctggatctacttttctgagaaatttcactcctttagatgaatttgatggtaaaacccccgcgtccgctggagtatctggtagagaatttcatggtgttgaagtagatgctggtgatggagatgaagatatagatcttaatttgtccctagatgagttctttaggagatatactagtgaggataacgagagcttttcgaagattcttgagaaggtaaataggaagaagaaggagaagtatggctttctccttgaaggtgaaaaggaggatggtaaatctattgaggatgtgaagagagataggattacagatgggtatggtacatctgatcagccaccgagtactttagaaggatggaaatatacggcgaagaatcttctgatgtaccatccagctgatcggggtgaggcgcctttaactgaggcggaaagggcagtgagattacttggattgactaaggagatagttaaagggaacactcgttttcatggtaagactatggattctaggccaagagaagatggttctgttgagattctcta

SEQ ID NO: 94399 - DNA, 790 bp, Arabidopsis thaliana columbia
agaaacatcaggcggtggctctccgatcaagttcagacttctccgtcttctacgcctgctctttcaaaggctatcaagacactctctaccttcattctagtcgtcagttcttgagaaactgcaatatttacggaaccgtcgatttcatcttcggagacgcaaccgccatcctccaaaactgtaacatctacgctcgtaagccgatgagcggccagaaaaacacgatcaccgctcaatcacgcaaagaacccgacgagactactggcttcgtcatccagagctcgacggtggctactgcgtcggaaacttatttaggacggccgtggagatcgcattcgaggacggttttcatgaaatgtaatcttggagcgttggtgagtccggcgggatggttgccttggagtggtagttttgctcttagcactctttattacggtgagtatggtaataccggcgccggagcaagtgtctccggtagagttaagtggccaggttatcatgttttaaagacggtgacagaggcggtaaaattcacggtggggaatttcttggacggaaactattggattacggctacgggagtaccggtcaacgatggactttgatttttttttttaaagaattaattttgttagtgtggtctttgttgattttatgttttatttgtttgttggcgtataattgttatatatagctttatttcccaaaaaaaaaaaaaaagggcggccgctctagaggatccaagcttacgtacgcgtgcatgcgacgtcatagtcagctatagtttgcc

SEQ ID NO: 94400 - DNA, 741 bp, Arabidopsis thaliana columbia
cttgaacacttggggacttgttctctacaataaccttgaggctctgcttttgtttccccttgagctgcttataatgggagagttaaagaagataaagcatgaaatcactgacgagactgattggtactcgttgcaagtggttttacccgcgggtttatcgtgtctttttggcttggctatctctttcttcgggttctcatgtcgtcgggccatttctgcaacggggttcaccgttcttggaattgtgaacaagctgttgacagtggtgatcaatttgatggtgtgggataaacattcaacgtttgttggaaccttggggctcttggtttgtatgtttggtggagtcatggatcaacagtctaccatcaagaaaccgaatgctacacaagaagctaaaccgcaagagcaagacgaggaacaagagaaacttcttgaaatgcaggagaacaaggagagtaacagcgtcgatataaaggaaactctgaaatcagaagaggaaactatgatccatagtggttggagcttacagtggctggagtttcttcggtactgatacgatttagtttccaagtatagacctccattgtacctaggggttatgaaatccttttgtatttagagggaagagtcctccgtccccgatcccgtagttgaacaatatcgatttcttctttacattttgatgtgtttggatatttttcttgtacccgattcagatttatatgcgaatgaagaattctt

SEQ ID NO: 94401 - DNA, 777 bp, Arabidopsis thaliana columbia
  unsure (1)..(777): unsure at all n locations
catacaagtaccaaatangccaggngactgaggcccagcgatttcatttgtttaaacaacagtggggncttttacaatttctaccaatttactattttgaaaatccggcatatggatactttttcgagggcgaaagcgttgtgtttggcgttgacatcaacattgttaaaccctttgcaaaattgggaagtgttctctaatgaacaaaacattcgtgaccctattttccgaatggtgactcaccaaacttctctacacgttttcttgactcttacacttctgattccttttcttccggaggaagaaactgggcattgaaagtgtatccaaatggagttggaaatgctacgggtaattcgttgtcactctatttgttgagtgatcagtcaaatgataagggttatgtggaagctaagttacgagttattgaccagatccaatccaacaatttcgagaaaaaagtggcggcatggcccaatgcaacggagaatggatggggtttcgacaggtttctatcatttgcagatatcaaaaacacatcaaaaggtttcctagtcaacgatactctcaaacttgaagtccagatcttgtccttctcgaaaaccgactactactctcatcaatcgtctcttaatgttttaacgggagatagtacttaggtgactaatcgtcgctagtgtaattttacaactggctactatcactttgcttcattgtgttttttgtttctgttcaataataatgagttcgagcttaacaaaaaaaaaaagggcggcc

SEQ ID NO: 94402 - DNA, 815 bp, Arabidopsis thaliana columbia
  unsure (1)..(815): unsure at all n locations
gaaggaccgggncgacccgacgccgtccgaagaaataatgtattcagaggaaaagaaaagcagaaattatggttcaatctttgtctactgcttcttctgtttcgtactcattgtggaggttgcaagattcgcaaaaccttatatcaaccttcaaaacctaattgagacggaagcagtagtagaagaaggtttcatggcggtggggaactcagggaatcttccgtgtggctcgtcaaaacctagctctgcctctgttcgtgctcatgatgaacagaagctctcgcaagcagtaacaacagatacgagaactcgtcctccaaattcgtactgcgtgaagttccagtcttttgtcactatggcaaagcaggtcaaagaaaacggtggcaagtatgagtcacgtcctttctccgtcggtggatacaattggacgctcctaatctacccagtcatatacattccaacggactcgggtgggtacgtttcgatttacgtaagagtcgataactcaagcctcatcaccaatccaaaagatgtgtatgcagagatcacattcctcgcttataaaagcagtacagacaagtaccaaataagccaggagactgaggcccagcgatttcatttggtttaaacaacagtggggacttttacaatttcctaccaatttaactattttgaaaatccggcatatggatcctttttcgggggggaagcgtttttntttggggttgaatnaacaattgttacccttngaaatnggaggnttttgnccgccaaaaattgggccnntttgntgggnncccaaatttacgtttttc

SEQ ID NO: 94403 - DNA, 532 bp, Arabidopsis thaliana columbia
  unsure (1)..(532): unsure at all n locations
ggcccnaaggnaccaaatccttnccggaaantccancccgnannaaaagcnttnacnatntggcactttcnggaaaaaagctcggtaaataaacatgcttttaagatgcggtctacctgcaccctggacagcaaaagaccctatgaagcttcactgttccctgggattggctttgggctttccctgcgcagcttaggtggaaggcgaagaaggcccccttccgggggggcccgagccatcagtgagataccactctggaagagctagaattctaaccttgtgtcaggacctacgggccaagggacagtctcaggtagacagtttctatggggcgtaggcctcccaaaaggtaacggaggcgtgcaaaggtttcctcgggccggacggagattggccctcgagtgcaaaggcagaagggagcttgactgcaagacccacccgtcgagcagggacgaaagtcggccttagtgatccgacggtgccgagtggaaaggccgtcgctcaacgggataaaagtactctaaggataaca

SEQ ID NO: 94404 - DNA, 1350 bp, Arabidopsis thaliana columbia
  unsure (1)..(1350): unsure at all n locations
nnnnnnnnnnnnnnntgatacgtcnnnnnnnnnnnnnnnnnnnnnnnnnnnnnnnnnnnnnnnnnnnnnnnnnnnnnnnnattccacgccttgagcagacgaagaaaacccaaaaaaaatccagatccagctgaaattgaattttcaaccaacgaagaagagatttttccaagagcaacagacaagaagaagagaatgaagtcggagctaaatttaccagctgggttccgattccatccaacggacgaggagcttgtgaaattctacttgtgccggaaatgtgcttccgagcagatctcggctccggttatcgccgagattgatctctacaagttcaatccttgggagcttccagagatgtctctgtacggagagaaagagtggtacttcttctcacctagagatcggaaatacccaaacggttcgcgtcctaaccgggcagcaggaaccggttattggaaagctaccggagcagataaaccgattggtaaaccgaagacgttgggtatcaagaaagcactcgtcttctacgcagggaaagctccaaaagggattaagaccaattggataatgcatgagtatcgtctcgctaatgttgatagatcagcttctgttaacaaaaagaacaacctacgacttgatgattgggttttatgtcgaatatacaacaagaaaggaaccatggagaagtatttccccgcggatgagaagccgaggaccacgacaatggctgaacagtcatcatcaccttttgatacatcagactcgacttacccgacattgcaagaggatgattccagcagctcaggtggtcacggtcacgtggtgtcaccggatgttttggaggttcagagcgagcctaaatggggagagcttgaggatgctttggaagcttttgatacttcaatgttggtagttccatggagttgttgcagcctgacgcttttgtccctcagttcttgtatcagtctgattatttcacttccttccaggatccgcctgagcagaaaccattcttgaattggagttttgctccacaggggtaaaaacggaagagaccaaaaaaggtgtttgctagtagtactgtgatgtgccagagagaagagtctcatctcaactcatccctggctcttagtagtaaaagaagattgtagaatgttaatagcttttagcatcaatgtctcattagcaggcacattcttgttctttcatgagaagtttatatgaaaactaaaaatttatattcaaattcttcaagatgttgcacttatgtagatactgatattaaataacaacctaacctttatgagnnnnnnnnnnnnnnnnnnnnnnnnnnnnnnnnnnnnnnnn

SEQ ID NO: 94405 - DNA, 523 bp, Arabidopsis thaliana columbia
gctaaactgctaagagcatgcctctggataagaggcaacgggatttgcctctgggcttaagtcctgaagcttgcttcaaggatatagtaggtcggtctgtccttcctagaattcctctccctgagcttgggaaactatatgcagctaagcttctggctcgctgttcgcagccaccaccattccggtctttgctgtgcagtcatgataaggagtcttatggaaaaagattctcacggtctgacatgcggtcttggtgcgctgctgctactactactactactccacttggagcattagagtcttctcagaaaagacttttgatattcgatcagtcaggagaccagactcgtctattacaatgtccatttcctctacggtttccatctcatgcggctgcagaaccagcgaaactctctgagttacaagggatagagaaagctttcaaagaagatggtgaagagtttcacaagagtgatggaacagagtcagaaatgcatgaagacactgaggagatcaatgcctt

SEQ ID NO: 94406 - DNA, 444 bp, Arabidopsis thaliana columbia
atcaagatcaagagtaagacagagacacaaaggcgagagctatgtcgtcgtcggtggatttcgtgacggaacaggggagatgcggcgacgatggtaacggcgccggagagacagtaaagaatggcgaaattgatcatttgctttccgaaccgtcggctccgactatttctctccctacggaatctttcctcagagcagcgacgttactcaagaaccaggttgtggaggccacgtggaaaggtggtgtcgaagctcttgcctctggttcgggtccagtgctggatccgactgtgtacacaggactactcggcacagcgttcacctgcttgaagtcgtacgaggtaacgcggaaccatcaagatctgctaacttgcgcagagataatcgacacgtgtgccaacgttgcgcgtgccacaaccaggcacgtgacatttttatgtggaa

SEQ ID NO: 94407 - DNA, 1020 bp, Arabidopsis thaliana columbia
gactcacttactacgtgtatctgtcttttttacatatattttgaaagtttcatcctttatgcggggggatgcgaataatacaaataacctaacaaaactcgaatcagagaattccagatattacttacataagacaattttagcaattagctttcagatctcatctcgttattctctctctctatctcttctcctcaagaaccctaaaaatctccagaaaaaagatcccaaatttcgtatttcaacgatctgaatctctctctctttcgggtttattttgtttcccgatatggtttagaatttgtgatttaaatggaagctgacgtgtcaatttcctgaaaaaacccttatcgcgaaattttccagattaccaaaaaaaaaaagattgaaacttttttcgatttgtttgaagaagaagcacggtaggaacgacgacgatgaatcgtgctttggtcctacttttatatgtttgtactgtttcttgtttagcttcaagcaaagttattttgatgaggaataacatcactctctcttttgatgacatcgaagctaacatcgctccgtcagtgaagggtacaggtgaaattggagtggtttatgtggctgagcctcttgacgcttgtcaaaatcttatgaataaaccagaacagagctccaatgaaacttctccttttgtgttgattgttagaggaggctgtagttttgaagagaaagttagaaaagctcagagagctggtttcaaagctgctattatctatgacaatgaagaccgtggaacattgatagcaatggcaggtaactctggaggtataaggattcatgcggtctttgttacgaaagaaacgggagaagttttaaaggagtatgcgggtttccccgatacgaaagtttggttgatcccaagttttgagaactcggcgtggtctattatggcggtttcgtttatctcgctgcttgcaatgtcggctgttctcgctacttgtttctttgtgcgtaggcatcgaataagaaggcggacat

SEQ ID NO: 94408 - DNA, 572 bp, Arabidopsis thaliana columbia
  unsure (1)..(572): unsure at all n locations
gtaagatccagagattcttgagtcagccattccatgttgctgaaatcttcactggtggcccctggaaaatatgtcgacccttaaaggaaaacatcaacagtttccagggtttgttggatggcaagtacgatgatctttccgaacaatcgttttacatggttggaggtatcgatgaggtggttgcaaaggcagagaagatcgctaaagagtcagcagcttagaagctggatccatctcttgcatatgcttaatacctgtctgtttcttgtgacaataacgaaaagaaaaaaaccactgcctgtgagttacccacaccaagcggaatttgagttccgtatttatagtttctttcgaattccttgagagctacgagatgatgctgaacatacccttcattcccttgtactcagatttttggttcatttacttccttgacttgttgaaataaaggttaagcaagtcttgcagattaaaaaaaaaacaaaaaaagnnnnnnnnnnnnnnnnnnnnnnnnnnnnnnnnnnnnnnnnnnnnnnnnnnnnnnnnnnnnnnnnnnnnnnnnnnnnnnnncg

SEQ ID NO: 94409 - DNA, 852 bp, Arabidopsis thaliana columbia
gaaaatacgttgatcttaaggaaaacatcaacagtttccagggtctactcgacggtaagtacgatgatctttccgaacaatcgttttacatggttggaggtatcgatgaggtggttgcaaaggcagagaagatcgctaaagagtcagcagcttaaggaattgattcatctctttcatatgcataatacttctcttcttcttttgttgacaataacgaaaaaacaacaagaccaatgctttaggttgtctgctgaggcattgtgatcattgtgagtgtgagagatagtacggagaaaacagattcattcgttgaagttttgacttggaataatggagacaggtgttgatgttttcaatctctccacatttgtattcaagcttttgtattaaggaaagtatcgtgtttttacaggattcgatgttagaaatgaatttgcacttttattagtcttaaaataaacaaaaaaaagaatattgtttcccaggcccgagctggttcgtggcaggttggccgcgtgggtgggcggttgggttcctactgcctcccgggtcgttcgtgtgtatggcgggtttcgggatggcggtcttgtttgttgtgtccgggggccgcggcccgcgctcttgggtgcggggggcggggcgcatccgtaaatcagagagtcggaaaattgcgtcctactgggcatctgagtgccagtaattatagtttcttttggttcgaaattccatgagagctggcaagatgatactgaacagatccattcactgttactcaaatttttggttgttttgcttcaaaaagaaataaaaaaaacaggcgaccgctctaagggatccaagcttacgtacgcg

SEQ ID NO: 94410 - DNA, 687 bp, Arabidopsis thaliana columbia
  unsure (1)..(687): unsure at all n locations
caaacatttcactttctctctctctctcccgcacacacccactcatggcgtctcggagagtcttatcatctcttctccgttcatcttccggtagatctgccgccaaattaggcaaccgtaaccccaggcttccttctccttcacccgcgcgtcacgccgctccatgtagctacctcctcggccgcgtcgccgagtacgcgacctcttcacctgcaagctcagctgcgccatcttctgctcctgctaaggatgaggggaagaagacctatgattacggtggcaaaggtgcgatcgggcgtgtttgccaggtcattggtgccattgtcgatgtgagatttgaggatcaggaaggattgccaccaatcatgacatctctcgaggtgcaggatcaccccacaaggctagtgcttgaggtgtctcatcacttgggtcagaatgtcgtcaggaccattgctatggattggtactgaggggtctcgttcgtggaagggaaagtcctcaaaaactggcggtccaatcaactttacctgttgggaagggctactttttgacggcgcatgaatgttcttggngagccttttacggaagnggggaattnaggccnaccatactttacctattanaggntganccgcttttggtnatcngntatttggaaagaanctggcnctggtttaagttttttcc

SEQ ID NO: 94411 - DNA, 865 bp, Arabidopsis thaliana columbia
  unsure (1)..(865): unsure at all n locations
aggtctactacgactcactattgggaaagctgacacgcctgcaggtaccggtccggattcccgggtctacccacgcggggcgcacaactgtgctctcaagacagatttctgagcttggtatctaccctgctgtggatcctttggattcaacatcccgtatgctgtcacctcacattctgggagaggagcattacaacacggctcgtggcgtgcagaaagttctacagaactacaagaacttgcaagatattattgcaattttgggtatggatgagctaagtgaagatgacaagttgactgttgcccgtgcccgtaagatccagagattcttgagtcagccgttccacgttgctgagatcttcactggtgcccctggaaaatatgtcgaccttaaagaaaatatcaacagtttccagggtttgttggatggcaagtacgatgatctttccgaacaatcgttttacatggttggaggtatcgatgaggtggttgcaaaggcagagaagatcgctaaagagtcagcagcttaagagattgattcagatctttcatgcttaatacttctcttttttttcctgacaataacgaaaaaaaaaaaccaatgcgtgcgactctccgaccaaacggaatctgagttccgtaattatagtttcttttggttcaaattccatgagagctggcaagatgatactgaacagatccattcactgttaatcaaatttttggttgttttgcttcctttgttgaaataaagatgaaaaatcttgcagattctaaaaaaaaaaaaaaaggnnnnnnnnnnnnnnnnnnnnnnnnnnnnnnnnnnnnnnnnnnnnnnnnnnnnnnnnnnnnnnnnnnnnngaat

SEQ ID NO: 94412 - DNA, 1917 bp, Arabidopsis thaliana columbia
  unsure (1)..(1917): unsure at all n locations
nnnncnnnnnnnnnnnnnnnnnnnnnnnnnnnnnnnnnnnnnnnnnnnnnnnnnnnnnnnnnnnnnnnnnnnnnnnccacgcgccccgtagctccttttttctctatctcgctttctctgtttcaccacagtcatggcgagtcggcgaatcttatcatcgcttctccgttcttcttcgagtagatctacttctaaatcctccttgatcgggagccgaaacccgaggcttttatcccccggtcccgcgcatggagccgctccatgtgggactctccttggccgagtcgccgagtattcgacttcttctccggctaattcggctgcaccatcttctgctcctgctaaagatgagggaaagaagacctatgattacggtggcaaaggcgcgatcgggcgtgtgtgtcaggttattggtgccattgttgatgtgagattcgaagatcaggagggattgcctccgatcatgacatctctcgaggtacaggatcatccaacaaggttggtccttgaggtgtctcatcacttgggtcaaaatgtcgttaggaccattgctatggatggtactgagggtctcgtccgtggaaggaaggttctcaacactggtgctccaatcactgtacctgttggaagggctacccttggccgtatcatgaatgttcttggagaacccattgacgagagaggcgaaatcaagaccgagcattacttacctattcacagagatgctccggctttggttgatctagccactgggcaagagatcctggccactggtattaaggttgttgatcttcttgctccttaccaaagaggaggaaagattggtctctttggcggtgctggtgttgggaaaactgtgcttattatggagctgatcaacaatgttgccaaagctcatggtggtttctctgtgtttgctggtgtgggagaacgaacccgtgaaggcaatgacttgtacagagaaatgattgagagtggtgtcatcaagctaggcgaaaagcagtctgagagcaagtgtgctctagtgtacggacaaatgaatgagcccccgggtgcccgtgcccgttttggactgactggtttgactgttgccgagtatttccgtgatgctgaaggccaagacgttttgcttttcattgacaacattttccgtttcactcaggccaactctgaagtgtctgctttactcggtcgtatcccgtctgctgtgggataccagccaactctggcttctgatcttggtgctcttcaagagcgaattactaccaccaagaaagggtctatcacctcagtccaagccatctatgtacctgctgatgatttgactgatcctgctcctgctacaacttttgctcacttggacgccacaacctgtgctctcaagacagatttctgagcttggtatctaccctgctgtggatcctttggattcgacatcccgtatgctctcaccccacattctgggtgaggagcactacaacacggctcgtggtgtgcagaaagtgttgcagaactacaagaatttgcaagatattattgccattttgggaatggatgagctaagtgaagatgacaagctgactgttgcccgtgcccgtaagatccagagattcttgagtcagccattccatgttgctgaaatcttcactggtgcccctggaaaatatgtcgaccttaaagaaaacatcaacagtttccagggtttgttggatggcaagtacggtgatctttccgaacaatcgttttacatggttggaggtatcgatgaggtggttccaaaggcagggaaggtcgctaaagggggcaccagctttgaaggtgggtccctcccttggaaatgggtaaaacccgcctgttttttggcaaaaccggaaggaaaaccnttccttngttcccnccaangggtttggtcgttnc

SEQ ID NO: 94413 - DNA, 779 bp, Arabidopsis thaliana columbia
  unsure (1)..(779): unsure at all n locations
cattcctcagtnatctatcaaagttcgaagagaccgacgcaaaagggacagaaacggagaaggagaaagaggcagagatgggagtagagatccaatcgccgcagaacagagctcttacaccgttgagcagctcgtcgcccttaatcctttcaaccctgaaatcctgcctgatctcgaaaactacgttaacgttacatcgcaaacgtatagtctggaagtaaacctatgcttgcttcggctctatcagtttgagcctgagcgcatgaacactcatatcgtggctcgaatcttggtcaaggctcttatggctatgccaactccagacttcagcctttgcctcttcttgattcccgaaagagtgcaaatggaggagcagttcaagtcactaattgttctatcacactaccttgagactgggaggttcccaacagttctgggatgaagctgccaagaaccgtcacattctcgaggctgttccaggttttgagcaagctattcaagcatatgcaagtcaccttcttagcttaagctaccaaaaggttccaagatcagtgctggctgaggctgttaacatggatggtgcatctctagncaaattcatcgngcagcaaagtggctaacagtggatngnttttttgaaagagggtggnaggatttcttncccaaatggatttaaccctccggggtcanggaaaananaggggggnatntnccttggccaaattcccgattttcccacccttggtnnccatttttggncctnaaattcctttngcntg

SEQ ID NO: 94414 - DNA, 510 bp, Arabidopsis thaliana columbia
  unsure (1)..(510): unsure at all n locations
cgcttccatattgtcacacccatcaataaaattgatgtattctttggctatggntnggagataaagtaaactgactttcaaggttggagactttgagggaccaattgttattttcaaagatgtttcgttccagtaagacaattcttgtttcaacttggtttatatctttcatctaaaacatttccggctgctcttgagtcatggatgttcgaccatgaaaacttgtcagtaaaacaacaaaattgtggtctttttttcttttttcaaccttggctgcaaatcgatactggtctttgaggaggcttaaaaaaaaaaaaaaaaaaaaaaaaaaaaaaaaaaaaaaaaaaaaaaaaaaaaaatataaaaaaaacaaaattaaaatacacaaaaatacaaaaatataaaatcttntatagggcgtcctattttgaaggtccctgctttcggacgcgcacaggctactctaaattaccctgggggaaccctatttaaagccatggcccacttttt

SEQ ID NO: 94415 - DNA, 467 bp, Arabidopsis thaliana columbia
  unsure (1)..(467): unsure at all n locations
gaaaactttaaagccatgccatcactttggtctaacgaatccgatggatcattacgagagcatcttgtggatgttgttgtgtctggttcagaaccaaagattcgggtacatgatctgacccgagtcgccgatgatggatctcggatcttgaaaggagttacgatagatataccaaaaggtatgatcgttggtgtgattggacctagtggaagtggaaagtcaacgtttttgagatctctgaatcgtctttgggaaccaccggagtcaactgtgttcttggacggtgaagntataaccaacgttgatgttattgctcttcgtcgtagagttngnatgcttttcaagcttccngttcctttttcaaagggncttttncgganaatttgnganatggcccnaattttaangggggggaaacttaanttncgggagnggtttnaaaccncccnaaggttttaaaagccntt

SEQ ID NO: 94416 - DNA, 920 bp, Arabidopsis thaliana columbia
accacgcgtccggcaacaacaccaataagctcgggtacatgtacttccggtttatctcagcagctgaagccacagcttaagaattcttctagttcaaagttatgtcaagtcgaaggatgtcataagggagcaagaggcgcatctggtcgttgcatttcccatggtggtggacgtagatgccagaaacatggttgccacaaaggtgccgaaggtcgaactgtgtactgtaaagcccatggaggtggtcgtcgatgtgagtttctcggatgcaccaaaagtgcagaaggccgtactgacttctgtatagcccatggaggtggtcgaaggtgcagccatgaagattgcacacgagctgctagaggaagatcaggactctgtatcaggcacggtggaggaaagagatgccaaagagagaactgcactaaaagcgctgaaggcctttcaggactctgtatctctcatggtggtggtcggcgatgtcaatctaatggatgcacaaaaggagcacaagggagtacaatgttctgcaaagcacacggtggtggaaaacggtgtacacactcaggttgcaccaaaggagcagaaggaagcacgccgttctgtaaaggacatggaggaggtaaaagatgtgcctttcaaggagatgatccttgctccaagagtgttcacggaggtaccaatttctgtgtggcacatggcggtggtaagagatgtgcggttcccgaatgcacaaagagtgctagaggaagaactgatttctgtgtcagacatggtggaggaaagagatgtcagtctgaaggctgtggcaaaagtgctcaaggtagtaccgacttttgcaaagcacatggaggaaggaaaaggtgtgcgtggggtcaacccgagactgagtatgcgggacagtcttcttctggtccttgtac

SEQ ID NO: 94417 - DNA, 962 bp, Arabidopsis thaliana columbia
  unsure (1)..(962): unsure at all n locations
gatcctccagctacatacgactccattagggaaagctcgtacgcctgcaggtaccggtccggaattcccgggtcgacccacgcgtgcgggaaagagatgtcagtctgaaggctgtggcaaaagtgctcaaggtagtaccgacttttgcaaagcacatggaggagggaaaaggtgtgcgtggggtcaacccgagactgagtatgcgggacagtcttcttctggtccttgtacctcgtttgctcgcggtaagactggtctttgtgcactccataacagtctggttcaggataaccgggttcacggaggaatgactataacttccgagagccaagaaccgagagtaagcagcagcgaaacagagaacgaggaagagtttagcggctctcaagacatgaacatggatacaatgaaagcgagaagtgctaccggatctccagagactgatgttgatctcaatgagtatgaagcaggattggggttagctccggaaggaagagtccatggtggaagtttgatgatggcgatgttgggtagagctggtggctctggctcgaccggtgggccaaagaggtgggtgtaagttgtcttccgtttggttccagtcttgaattcaatgcgtgtgggccagtgagagtgaaagagtctgtggttgttctagttttaggtttgcttagagtaaaaaaaagggtccaaagtctgtgtcttattggtctttgtagatattgaatcaaagggtcgaagcataggttattgtgatgttgtgaattatacaggtaaaagcccacctgtggaaattgtcaaaaacagtcttatgatgatgatgataaataataataaaactcatgtcttttgtttgccaaaaaaaaaaaaaaaaaaaaaaaacacaaagnnnnnnnnnnnnnnnnnnnnnnnnnnnnnnnnnnnnnnnnnnnnnnnnnnnnnnnnnnnnnnnnntgtaccta

SEQ ID NO: 94418 - DNA, 619 bp, Arabidopsis thaliana columbia
  unsure (1)..(619): unsure at all n locations
nnnnnnnnnnnnnnnnnnnnnnnnnnnnnnnnnnnnnnnnnnnnnnnnnnnnnnnnnnnnnnnnnnnnnnnccacgcgtccggtgagattgttgtaatcacagttcgggaaagacttaacatttaagatttacgggtttgtttgatcgattagtctcatctgggtttttctccaagttaaattctttgtttctgagttggatcaagcttcgtcttcttcgactatggaggaagacaagaagtcttccactgatcctgtgaatgtcgatgataacgaggagagagaagctatagagattgctctgttccaagtgcctgaatgctatgtttatttgatacctccaaggaaaaccgcagcttcgtacagagcagatgagtgggacgtgaacaaatgggcatgggaaggagctttgaaagtggtgagcaaaggagaagaatgcattataaaactagtagataaaaccacaggggaactttacgctcaggcatttctaagagagggggaacttcatcctgtagaagcagtaatcgacagtagcagatattttgttctccgtgttgaagaaaagatagatggtcgtgttcgacatgcttttatcggactcggattcccggaaaga

SEQ ID NO: 94419 - DNA, 528 bp, Arabidopsis thaliana columbia
gagaagcggtcgcgacattgtaaagatctctagctccgtccttcttcctcgtagctaccctctctaatctttttttctcattcctgttcttgatagttttctagacagatttcgattaaacaaaaccgcggaacactttgaagaaatctgcgtgatttagagatggcggcttctttatcgagcagacttataaaaggaatcgctaatctcaaagctgttcgttctagcagattgacgtctgcatcagtctaccaaaatgggatgatgagattttcctcaacagtgccaagtgattcagatacacatgatgatttcaagcctacacaaaaagtccctcccgattctacgggctcacttaaagatatcgttgagaatgatgtgaaggataatcccgttatgatctacatgaaaggtgtccctgaatctcctcagtgtgggtttagctcactaggccgtcagagttttgcagcaatataatgttcctatcagttctagaaacattctagaagaccaagagttgaaaaacgc

SEQ ID NO: 94420 - DNA, 718 bp, Arabidopsis thaliana columbia
gtcggatttcaaggagtattacgtacatatgcaagcagcaaagagaagccaagcacctgttgcgtcccagatggtggatgaccggataattcttgacaatactgtacttgaacaagtttctctatggaagaaaagcaaaggacttactgataaggctgtcactggccatatttgtttgggaaccaaatgttcataccatcagattgacgacgtgttcatatgcaaagagacgggaaatgttcatgtatgcgatgataactgcaaggaagtaatactgagtccagagggtgacctcatggtgtgtactatctcaggagtttgttctgatactttacttgtacaaactgagccagacgcagatgggtgttatgaggaagaagctgaactagaagctgaagtattcacagataaaagccgattggcccggaggcttttgaacttggctacaactgcgatgatgtgcaggaactggaacgtaccctgaggttctgctgagcaaaagtctcgaccttttgtccaatttcataaggcctactttctgtaaggtcttctctctctctctttctctttctctctctctctctgacctgattctgcctgggttctgtggggttgaaatgaatcaaatgtagctcttgttttaatcagtcagctttgtaacttatacatatatcattgtatgtgattaacattgtccttaaaaagtgttagacctagt

SEQ ID NO: 94421 - DNA, 2255 bp, Arabidopsis thaliana columbia
ctatattctttcctacgtcagggcaaccagtctcctttatcatctctccatctcatcatcctcctccatttctctcccattttttcttctgtgtatctgcgggagagagtgaaatagagagatggaagctgtgattcaaaccagagggcttctctctttacccaccaaacccatcggagtgagaagccaacttcagccttcccatggcttaaagcagagacttttcgccgcgaagccaagaaatctacatgggttgtctctatcctttaacgggcacaagaaatttcaaacctttgagccaaccctgcatgggatttcgatttcccacaaagagagaagcaccgagttcatatgcaaggcggaggcgcggctgctggcgacggagctgtcttcggcgaagcgattccgcagctgttgtagcctcgcggaagattttcggtgtggaggttgcaaccttgaaaaagattatccctttaggattgatgttcttttgtattcttttcaattacacaattctgagggatacaaaggatgtcttggtggtgacggcgaaaggaagttctgctgagattatacctttcttgaagacttgggtgaatcttcctatggccattgggtttatgctcctctacactaaactctccaatgttctctccaagaaggctctgttttacactgttattgtccctttcatcatctactttgggggctttggtttcgtcatgtaccctctcagcaactatattcacccggaagctctcgcagataagctccttacaaccctcggcccaagattcatgggtcctattgcaatattgcggatttggagtttctgtttgttttatgttatggctgagctttggggtagtgtggtggtctcagttctcttctggggctttgctaatcagatcacaactgtggatgaagccaagaaattctatcctttgttcggcattggagccaatgttgcactgattttctcaggaagaaccgtgaaatacttctctaacttgagaaagaatcttggtcctggagttgacggcagtttcgttgaaagccatgatgagcattgtggtgggaatgggactcgcatttgtctctctattggtgggtcgaatagatatgttcctcttccaacccgtagcaagaacaagaaggagaaaccgaagatgggaacgatggaaagcttgaagttcttggtatcatcaccatacattagagatcttgctactttagtggtggcatacggtattagtatcaatcttgtggaagtcacatggaaatcaaagcttaaagctcagttccctagcccgaatgagtactcagcatttatgggagcattctcaacctgcacgggtgttgcaacattcacaatgatgcttctcagccaatacgtattcaataagtatggttggggagtagctgcaaagatcaccccaactgttctgctattgactggtgttgcgttcttctctctaatattgtttggcggcccattcgcaccacttgttgccaagcttggtatgacaccgctacttgcagctgtgtatgtcggtgcccttcagaatatcttcagcaagagtgccaagtacagcttgttcgacccttgcaaagaaatggcctatatcccattggatgaggacaccaaggttaaaggcaaagctgcgattgacgtggtctgcaacccattaggaaaatcagggggagctttaatacagcagttcatgatcttatcctttggatcactagcgaattcaacgccgtatctaggaatgatcttgttggttattgtcactgcgtggttagctgcagctaagtcgctggagggacagttcaacagcttgcgtctgaagaagagcttgagaaggaaatggagagagcttcatcggtgaagatccctgtcgtgtctcaggacgaaagcggaaacggttcccttggagaatctcctagcagttcaccggagaaatctgctcccaccaacttataaaaagtttttttttgatatttggttttgttgggggggaaagaaagaaggatgatgaatcaaaaataagattttgagagcagtctctcaaacaatcgcccttttgcaccactcactctttatagtctgtagctttttttccttacattcttttcagttcaatgtggtttcacgttctaagtttcttcctaaaaaaaaaaaaatatagtcactaagattataaattatgatagtctactctcaagcacacaaccaatgtttgcctgagtct

SEQ ID NO: 94422 - DNA, 2331 bp, Arabidopsis thaliana columbia
  unsure (1)..(2331): unsure at all n locations
nnnnnnnnnnnnnnnnnnnnnnnnnnnngggaaagctacgtacgcctgcaggtaccggtccggaattccctggtcgacccacgcgtccggtcaccttatcgtctctctatctcctccttcctatatccccttgctctctgggtttttgctcagtgtgctacgtgagagatagagagatggaaggtctgattcaaaccagaggaattctctctttacccgcgaagcccatcggagtgagaaggcttctccaaccctcacatggcttaaagcaaagacttttcaccacaaacttacctgccttgtccttatcctctaatggtcacaagaaatttcaagcctttcagcaaatcccacttgggatttcggtttcccacaaggagagaagcagaggattcatctgcaaggcggaagctgcggcggccggaggcggaaatgtgttcgacgaaggagacacagcggcgatggcggtgtcgcctaagattttcggtgtggaggttacgactctgaagaagattgttcctttagggctaatgttcttttgcatccttttcaattacacaatccttagggacacgaaggatgttttggtggtgacggctaaaggaagttctgctgagattataccctttttgaagacatgggtgaatcttccgatggctattgggtttatgttgctatacaccaaactttccaatgttctctccaaaaaggctctcttttacactgttattgtccctttcattgtctactttggagcctttggtttcgtgatgtaccctctcagcaatttgattcagcctgaagctcttgctgataagcttcttgcaacactcggccccagattcatgggtcctctcgcaatcatgaggatttggagtttctgtttgttctatgtcatggctgagctttggggtagtgttgtcgtttcagttctcttctggggatttgccaaccagattacaactgttgacgaagccaaaaagttctatcctctgtttggacttggggccaatgttgcacttatcttctcaggaagaactgtgaaatatttctctaatatgagaaagaatcttggtcctggagttgatggctgggctgtttcattaaaagctatgatgagtattgtcgtggggatgggtctcgccatctgtttcctctactggtgggtgaatagatatgtgccccttccaacccgtagcaagaagaagaaggtgaaaccacagatgggaacaatggagagcttgaagttcttggtgtcatcaccatacattagggatcttgctactttggtggttgcatatggaattagtatcaaccttgttgaagtcacatggaaatcaaagcttaaaagtcagttccctagcccgaacgaatattcagcatttatgggcgacttctcaacctgcacaggtattgcaacattcacaatgatgcttctaagccaatacgtgtttaagaagtatggttggggagtagctgcaaagatcacaccaaccgttctgctattgaccggtgttgccttcttctctctgatactgtttggcggcccattcgcaccattggttgccaagcttggtatgacaccgctactcgcagcagtgtacgttggtgccctccagaatatcttcagcaagagtgccaagtacagcttgttcgactcccttgcaaagcaaatggcttatatcccattggatgaggacaccaaggttaaaggcaaagctgcaattgatgtggtctgcaacccattggggaaatcaggcggtgctctaatccagcagttcatgatccttacattcggctcactcgccaattccacaccttaccttggagtcatcctgctcggtatagtcactgcatggttagcagcagctaaatcgctggagggacagtttaacactctcatgtctgaggaagagcttgagagggaaatggagagagcttcatcagtcaagattcctgttgtatctcaggaggatgcgccatcaggagaaactacgagccaactatcggagaaatctactcctactggcatttagacgatgatgaataaaagggttttgggatttggttacctgttggttttaatgttttggtcaggagtaatattttgatagtgagaagactaaaattaatcatttagttatatgtttttttggttgttattgttctcttgatgataccaatacaaaactagtaataaaatttccttgttcagtaaaaaaaaaccctgacgtagctcgaggaaaaaaaaaaaaaagggcggccgctctagaggatccaagcttacgtacgcgtgcatgcgacgtcatagatctcntatagtgcgtccta

SEQ ID NO: 94423 - DNA, 518 bp, Arabidopsis thaliana columbia
atacgactcactttagggaaagcacgtacgcctgcaggtaccggtccggaattcccgggtcgacccacgcgtccgtgttcacccagtttccctgcaaaaccctaaatccaagctcatcaaacactaaacaccaatcgaaatctccgatcctactaccgattaactcaataaatcggcgatcggagattggagtctctgttcatcggccagatttcaaaatccgagcgacggacatcgacgacgaatggggtcaagatggagtggagagagtatttgcctcatcttcaaccgtatcggtagcagataaagcaatcgaatccgtggaggagacggagaggctaaagagatcactagcggattcgttgtacggaacagatcgaggtttaagcgtatcgagtgatacgagagctgagatcagcgagctcatcacacagctcgagtctaagaaccctactccagctcctaacgaagctctgtttctcctcaacggcaaatggatcctcgcctacacgtcgttc

SEQ ID NO: 94424 - DNA, 1223 bp, Arabidopsis thaliana columbia
  unsure (1)..(1223): unsure at all n locations
accacgcatccgcccacgcgtccgcggacacgtgtccggaagaaacaaaaaaaaatggcgacggtacaattgtccacccaatttagctgccaaaccagagtttcaatctcaccgaactctaaatctatctccaagcctccgtttctggtaccggtgacctcaattattcaccgcccgatgatctccaccggaggaatcgctgtttccccccgtagagttttcaaagtccgagccacagatacgggagagataggatcagctctattggcggcggaggaagcaattgaagacgtggaagagacggagcggctaaagagatcgctcgtggattcgttgtacggaacagatcgaggtttaagcgcatcgagcgaaaccagagctgaaatcggagatctaatcacacagctcgagtctaagaaccctactccagctccgacggaagctcttttccttctcaacggcaaatggatcctcgcctacacatcgttcgtgaatttgttcccgttgctatcacgaggaatcgtaccgttaataaaagtcgatgagatctctcaaaccattgattcagataacttcaccgtccagaactctgttcgtttcgctggtcctttaggtacaaactcgattagcaccaacgctaaattcgaaatccgaagccctaaacgcgtccagattaagtttgagcaaggcgtaattgggacgcctcagctaacggattctattgagataccggaatatgtagaggttcttggtcaaaagattgatcttaacccgatcagagggttacttacctcggtgcaagacacagcctcgtctgtggctagaaccatatcaagccaaccaccgttgaaattctctttgccggcggacaatgcgcagtcttggctactcacgacttatctagacaaagacattcggatctctagaggagacggtggaagtgtctttgtgcttatcaaagaaggaagccctctcttgaatccttgaacttggtcaaaatatatgtgtctctcttgtcgttgtgttaagtgagacaaatatatatagtgttgttgtaggtttacttcttaatcgttattatgaacttgatgataatgaatataatgtttttaactgctaaaaaaaaaaaaaaaaaagnnnnnnnnnnnnnnnnnnnnnnnnnnnnnnnnnnnnnnnnnnnnnnnnnnnnnnnnnnnnnnnnnnnnnngaattgcaacccaacc

SEQ ID NO: 94425 - DNA, 722 bp, Arabidopsis thaliana columbia
  unsure (1)..(722): unsure at all n locations
cgacgtatctcgaatggaagagacttcgctttttctccaattacttcgtccgtcaatgcggtttgccgacgttttgcggcgattacggttactgcgatcgaggaatgtgcgtcgggtgccctacaccgaaaggtctgttagcttggagtgataaatgcgctccacctaaaacgacgcagttttgcagcggaggcaagggtaaagctgtcaattattacaagatagtcggtgttgagcattttactgggccgtatgttaatgatggacaaggcccaacttctgtgaacgattgcaaggctaagtgcgatcgtgattgcaagtgtttgggttacttctacaaggagaaggacaagaaatgtttgcttgctcctcttcttggtacacttatcaaagatgccaacacttcttccgttgcttacatcaaatattagcgagatttataaaccgaaaccaacgtgaattctcatagatttaatgaataattggtgttgttataatgcttcaccgtttttgttttcgtagactcgcgtattatgctcagtcctagtcaagtatgatattatcaaaataaaaatggatgatattgatgttcttcagattatcaaaattgaaattaatagtcgatcattataatgcgtcaaaaaaaaaaaaaaaagnnnnnnnnnnnnnnnnnnnnnnnnnnnnnnnnnnnnnnnnnnnnnnnnnnnnnnnnnnnnnnnnnn

SEQ ID NO: 94426 - DNA, 812 bp, Arabidopsis thaliana columbia
  unsure (1)..(812): unsure at all n locations
agtcggccatcggaccggggnggacttaatttgcccaatccattccacggacgattccgttcttagcncgatctgacggagtctcaggctactcgtatttcccagcagctacgtatctcaactgggaagagagtttctcattcttctccacttacttcgtccgtcaatgtggcttgccgtcgttttgcggcgattacggttactgcgatcgtgggatgtgcaacgcgtgtcctacaccaaaaggattactcggatggagtgataaatgcgcaccacctaaaacgacgcagttttgcagcggagtcaagggtaaaactgtcaattattataagatagtcggtgttgagcattttactgggccttatgttaatgatggacaaggcccaacttctgtgaacgattgcaaggccaagtgcgatcgtgattgcaagtgtttgggttacttctacaaagagaaagacaagaaatgtttgcttgctcctctgcttggtacacttatcaaagatgccaacacttcttctgttgcttacatcaaatattagtgtttttttgggaaagttatttaccgaattctttttgaattcttagagatttaatgaataatcggtgtgcttgtaatgatccaccgttgaatatattgtattaccttaaaaaaaagccatcagatgtatttactatatatatatagtacctttgagaatccaaaaaaaaaaaaaaaaaaaaaaaagnnnnnnnnnnnnnnnnnnnnnnnnnnnnnnnnnnnnnnnnnnnnnnnnnnnnnnnnnnnnnnnnnnnnnnnnnnnnncagatcc

SEQ ID NO: 94427 - DNA, 480 bp, Arabidopsis thaliana columbia
gactttcccaatcccaggaaaatcaaacttcgataagatagtttccaccatgtatcagcattctcgctcaggaacgtcttcttggttacactcttggtagcgctttgactggattcatcgtttttgagcagagaaaactcatccatgactccgtttccgatcctaaatctcaatccattgatcaagctcaggtgagtgatcgtattttcgggaagaaatatcgtatggaatttgcgtctctgtggaacaaagctgtggatcagacttttgaacctgcgattgagtatcttagttcacgtaaatggtagagatggataagttctttgctgaaatatgtgcctcgtgaagtcgattgttgtcgtgttcttgatgaaaaccttatctgaatacagctctgttcttgtttttgctactttcttgaaaaaagaaaatggttgtgttttactggaaatatgaagaaaagcttcttattgtttggct

SEQ ID NO: 94428 - DNA, 530 bp, Arabidopsis thaliana columbia
  unsure (1)..(530): unsure at all n locations
nnnnnnnnnnnnnnnnnnnnnnnnnnnnnnnnnnnnnnnnnnnnnnnnnnnnnnnnnnnnnnnnnnnnnnnnnnnnnnnnnnnccacgcgtccggcggggggccgggctcgattggcagtttacaaaaagaggtatattacatataaaagtggatattttccatgataagtgaaaatggccaattctttaagaggagaagtattgaatctttataagaatctgctgtatcttggacgagactatccaaacggagcagactatttcaaaaggcgtctgaagaatgttttccttaaaaacaaagatgtgaaggacccagagaagatcacggaacttattgaaaggggcagatttgtaatgaaagaactagaagcattatacttccttaggaaatacagagctatgaaacaacgctattactcagataccaacaatactaaatgatcagtattactatcatttgactgaagatcagtgccagctgtttatgtaccagctatgacaaaaataacatttaaagtgcaaggatata

SEQ ID NO: 94429 - DNA, 501 bp, Arabidopsis thaliana columbia
aatccgtagccaggagtttcaccctacttacttccggcgagttagtgatcaaggaatgcttttgcttgctgacaaatgcttgggaatggaaaccatttgtcttggtggcttttgtcgggtaacagatgctggtttcaagactattcttcactcttgcgctagcctctccaagtttagtatatatcatggacctaaattgacggatcttgtcttccatgacatcttagcaactactctttcgcttagtcatgttagcttaagaaggtgccatcttcttactgaccacgcaattcaaaagctggcatcaagtctcaagctggagaatcttgacctcagagggtgcagaaacctgagggatgaaaccttgacagctgtatctcatctgccaaaactgaaggttttacttcttgatggcgctgatattagcgacacagggctttcgtacctaaaagagggagttttggactccctagtttctttatctgtcagagggtgcagaaa

SEQ ID NO: 94430 - DNA, 523 bp, Arabidopsis thaliana columbia
cggaggaacacagcggtttctcttctcaaatttctcacaaaattttcatcaaaggtttcgactttttttgatttggtagaagaagatgccaccttcggaggatgtgaaagctatgaagatgaaagaggaggctgaggaagacaataagagcttgagttcctttgcgaagaagaaacccacgaacggtaacaatgctggttcgaagaaattgaagaaagaagagaacgatgacgatgatgatgataacaaacctatcaagtcatctgtatctgggtctcgagctaagccagtgaagaagaaggaagagattgataaagacgatgagaagaagcctgtttctaagaggaattcttctgttggtgtctcaaaggagaattagaaaccagagaaagaagaagaagtaaagaaaaagagagaaagaaaagtttatgatttgcctggtcagaagagagagcagcctgatgagagagatccacttaaggattttctacgagtcactttacaaacaaatttccactagcga

SEQ ID NO: 94431 - DNA, 668 bp, Arabidopsis thaliana columbia
  unsure (1)..(668): unsure at all n locations
aaatgatatttttcccaattgaaaatacactttccttttttattgttctagaagacttatccctctataaagtagccacactcttctgtcttctctcatcacctcgcgcgcatctctctcaacctgaacattttcattttttctaaatcaagaacttcaaatcttgaaactttctaaaaagatggagcttattcctgatcttcccgaaactgtagcctacgagtgtctcctacgctcctcctacaagcaattccctcttatggcctctgtttgcaaactctggcagcgagaaatcagcctctctgattttttccgacaccggaaagcttcaggacatagtcaagagcttgttgtcttgtctcaagctcgggtcgacccggttaaagaactcgtatcgggtaataaaaccatccccacccccgtgtaccgaatctcggttcttgaacttggtaccggtctaaggagcgagctgcctccggttccaggtcattccaacgggttgcctctgttctgcagattagtctctgtcgggtcggatcttgttgtattggggggggtttcccggtaaattggggacccctaaatcgggttcggttttaagtttttaccccacggggggggtgggaagggattcaagggggcccggtccttttngctnggttggatgc

SEQ ID NO: 94432 - DNA, 747 bp, Arabidopsis thaliana columbia
  unsure (1)..(747): unsure at all n locations
agcgtggccagttcgtgcgcctgttcatccaggcattgtccctagctggtctcaacttcttggcgacgtcactgttccttgcattgatgatagagttgcaacagcgtggttgaacgatccagagattaggaaagctattcatactaaagaggagagcgagattggaaggtgggaactttgcagtgggaaactctcattctatcacgacgcaggaagcatgatcgatttccatagaaaccttacactaagtggatatagagctctcatttacagcggggatcacgatatgtgtgttccgtttactggctcggaagcttggacaaaatctcttggatacaaagttattgatgaatggagggcatggatatcaaatgaccaagtcgcggggtatacgcaaggatatgcaaacaatctcacatttttaaccatcaagggtgcaggacatacggttcctgagtacaaaccgcgggaggctttagacttctatagccgatttctagaaggaagcaagatttaagagagctgtctcatcagtttcatattctgtgctgtatttaaaagtgatcatcttatagcaatatagaatcttgattgatttgaataagaaagatatattcttcaaatcattattcaacagagtaaaaatcatttacctcaaaaaaaaaaacaaagnnnnnnnnnnnnnnnnnnnnnnnnnnnnnnnnnnnnnnttgaatcgnnnnnnnnnnnnnnnnnnnncgtcctcaa

SEQ ID NO: 94433 - DNA, 519 bp, Arabidopsis thaliana columbia
  unsure (1)..(519): unsure at all n locations
nnnnnnnnnnnnnnnnnnnnnnnnnnnnnnnnnnnnnnnnnnnnnnnnnnnnnnnnnnnnnnnnnnnnnnnnnnnnnnnnnnccacgcgtccggattatgctgcggaagactatcccgtagttaaaatggaaaacttacgtgaggctcgaatcttccttttggttactgataatgaaatagagcgagtaagactaccaattaatgatggattagaggatgctatggacaatgttgttctcagatttggacatgtggggaagctcatgaatggcatacgaaatgttgagtatctggagttgtctgctgatactctcgaggtgctttctctatgctgtgagtcaatgccagtgttcaaaaacctcaaatcgttagctattaaaagtactgaaggtcgaggatggcaagcaatgccagttcttctaaggaattgtccacatttagagtttctactcattgagggactcttgcaccatgtcacagataaatgcggggatgcttgtgactgcgttcctcgggag

SEQ ID NO: 94434 - DNA, 487 bp, Arabidopsis thaliana columbia
cttccggaattggaaaaaggcccccaacctttttttttccttaatctttctctcctcccatcataatcaccatgtcctcccataccaatctcccctctcccaaaccagttcctaaaccagatcaccgggtctccggtacatcccaaaccaagaaaccaccgtcttcctccgtagctcaagaccaacaaaacctaaaatgccctcgttgcaactctccaaacacaaagttctgttactacaacaactacagtctctctcaacctcgtcacttctgcaaatcttgtcgccgttactggacacgtggcggtgctctaagaaacgtccccatcggtggtggttgcccgaaaaccaaaaaatctatcaaacctaattcctccatgaacacactttcttcgtcttcttcttcagagtctctatcatatgagatcatcaatcttctctcgcacatgatttagtgccgatatttacaatgacactcacttgatac

SEQ ID NO: 94435 - DNA, 478 bp, Arabidopsis thaliana columbia
cagctctatacgactcactatagggaaagctggtacgcctgcaggtaccggtccgggatttccggggtcgacccacgcgttcgcagcttcgcccaatccgaaggtgccatcgcctatgtcacctggtgcgaccctgctttgcaatcgtgcaacccccctgctggtggtaacggtgatcctcaattcgtcggtttgcaaggccaaaactaccaattccacggtatggctgatgaggtgttctccttggtctctacccctgagttgcagatgaactctttgttcaaattcatcgcctctggtaactgcgagtacaacaacaccgtctgctggtctcaccctggtacctatttgggtcaaatcgccatccagtatggtaacgagaagatcttgttgcaggctggttctcactcggagggtgccaccgtcctggtcaacgacaaggtcattgcccctagcgcccatgtgcacaagtaccatg

SEQ ID NO: 94436 - DNA, 324 bp, Arabidopsis thaliana columbia
agccacgaaggaaaagtaacgtttccgataaacttaggtttaagaaaattgagaagaggaacgataatactgaatctgagagtttaagtgttgttgaggaaccgaagaacgataaagaattgagtcttcgagctttgaatcagaatggtgatccattagggcggagagatttagggaggaacgtagtgaagtggattagtcaggcgatgaaagcgatggcttcggattttgcaactgcggaggttcagggggagttttcggagttgaggcagaacgtcggatctggtttgacgtttgtgattcaagctcaaccgtatctcaatg

SEQ ID NO: 94437 - DNA, 705 bp, Arabidopsis thaliana columbia
  unsure (1)..(705): unsure at all n locations
gaagaaattaagngttgaagatnctcttaatgctacaaaggctgctgtggaagaaggtattgtngttggaggaggatgtactctgctaagacttgcatcgaaagtggacgctattaaagagacctctagcgagacgatgaagaaaagggttggagctgacattgttaagaaagcattgagctacccactgaagttaatcgccaagaacgctggtgtcaatggcagcgttgtcagtgagaaggttctttctagtgacaaccctaaacatggttacaatgctgcaactggcaaatacgaagatctcatggctgcaggaatcattgatccaaccaaagttgtgagatgttgcctagagcatgcttcatctgtggcaaagacattcttgatgtctgattgtgttgttgtggagatcaaggagcctgaatcagcagctcctgctggtaaccctatggacaattcaggttacggcttctaagttagcaattgagaacagagtagtccctgatgaagcaaaagccacgaccaagttcttcacttcctgatctgaaacatctttaagccaatgtaaattatatgtttttccagtgacctgaagaaacatataatttggttctgtgttctccgattcaagatcaagtttttcaatatgacaacttcactaaagagacacagtttgcagtgctcaatagacttgatttagttagt

SEQ ID NO: 94438 - DNA, 712 bp, Arabidopsis thaliana columbia
  unsure (1)..(712): unsure at all n locations
gccagattctcagtgatttggatatttcgaaatgcgcaatctcagattcagggattcaagcattggcctcctctgataagctcaaactgcagatcctatcagttgcaggttgctctatggttacagacaagagcttgccagccatcgtcgggttgggttccactctattgggattaaacctccaacagtgtcgatccatttccaattccactgtcgacttcttagtcgagcgtctttacaaatgtgacatcctctcctgatcaacaattccactgtcgacctctccacttataatgtaaggtattttagtccgtccaagttcgtttatcaagtctcaactctttttcaggctctgtgatctacgcggtcccctctcgctaggctcggtacccggttttccttcttttttccaagcagttcgcttccggtttctttttttccagtcaatggtttttttgcggggtttcctttttatcaagggaactctaacttatctcgaaatcggaaggttgtgtgttgctttgagaatatatttacccggggtatacggggatttttaggggttatcaatctcccggttttccttgctgctttggggggtcttttaccgggcccagtttttctaattttaatccccggtcggttttgnccttttnnttggggtttggggtttnccccggaagggggcattntntggnattngtncggggtc

SEQ ID NO: 94439 - DNA, 659 bp, Arabidopsis thaliana columbia
  unsure (1)..(659): unsure at all n locations
cccccccccnaaaggaggattanccnccaagccgtacaagccaccctttcagcncngnacacnncccctncnaaggcncgacccggttncctcctttttccaagcagtcgctccggttcctttttccagtaaatggtttttttgcagggtttcctttttatcaaggaaactctaacttatctcgaaatcggaaggttgtgtgttgcttgagaatatatttaccgggtagacgagattttagggtttatcatctcctgtttcttgctgctttggtgtcttttacgagccagttatctattttatccccgtcgtttgtctttgttgggtttggttttcctcggaagggttttgtatgatatgtacgggttcaggtttggttcaggccttggttctctcagaggtttgctctggcttttgttgcaacaactctattaaagagttttttttgggtttttttttttgccagagccctcgttttttttccaggcactgtattacaatctgtatgaacactgtactaaattatgtaatgccctttgggatggtttaatgagtattgaataaaattctcaaaaaaaaaaaaaaaagnnnnnnnnnnnnnnnnnnnnnnnnnnnnnnnnnnnnnnnnnnnnnnnnnnnnnnnnnnnnnnnnnnnnnnn

SEQ ID NO: 94440 - DNA, 555 bp, Arabidopsis thaliana columbia
  unsure (1)..(555): unsure at all n locations
cttcctcttcttctagttgcttctttgcttctcctaactcttgcttgtctattactagacgaacgaatttgagctgtgttaacacttcggttaaatccttgcgccacagcagattcgactcgaagcataatctcgttaaacgtcgaatcaatggagattccgttgttcggagaagcaccacaagcaataatagcactgaggagacagaatcatcgtcgtcttcttcgtctgtagattgcgttggaatgggatcagacgtggaatgcgtcaataacggggaagatgaggagaatcggagctctggaatcttgagcggcggtgaaggaacgtttcttgaaatggacggttcctgaatttcaccctttcttttttcttggggaacggcgcatggtggcgatgaaggaagtgttgccccattaactgggcctttcttcgtgggccgcgtttcggtaaatnccggctggtttttttcttnncggcntttcnagtttaaaagggagaccctttncctnaggaatcaaatncttggtccntatcgncnnttttncccttttg

SEQ ID NO: 94441 - DNA, 542 bp, Arabidopsis thaliana columbia
ccgagatttttttcctctgttcggtcggccattgaattgttgttgattcattggctctaaaacgaaaatgggaattctcaacgacgacgccgttttaatcgaaccgggaaaaatctccggagatcccaccgtcgttaccgtcaattgtcctgatgaatccggtctcggttcaactctgtgtagaatcatcctcgaatttggtctctccattacccgagcagatttttcaacagatggaagatggtgttatatagtgttttgggttactccagatattagctctcctaaaattgattgggacagcttaaagaatcgtcttttatcagcttgtccttcttgcttaggctctttctacttctgccttcaatccaatgtctctaagcctccttccctttatcttctcaagttcttttgccgtgataggaaaggattgcttcatgatgttactaaagttttgacagagctagagtttacaatacaaagagtcaaagtcatgacaacaccagatggaagagttttggatatgtttttcatcactgacg

SEQ ID NO: 94442 - DNA, 591 bp, Arabidopsis thaliana columbia
  unsure (1)..(591): unsure at all n locations
attttaggagagctaatatctggagtaacccaaaacactatataacaccatcttcgttcttttgccgtgataggaaaggattgcttcatgatgttactaaagttttgacagagctagagtttacaatacaaagagtcaaagtcatgacaacaccagatggaagagttttggatatgtttttcatcactgacgcaatggatctattgcacacgaaacagagacaaaccaaaacgtgtgaccatctaacggctgtgcttggtgagcatggtgtgagttgtgagcttgaactagctgggcctgagttagagagtgtgcaacgattctcttcacttccacctttggctgctgatgagctgtttggcccagatgggtttgatattagcggctctagctctaacaaagcggttcttaccgttgataatcagttgagccctgcacatacgttgcttcagattccgttgtgtgatcaaaagggcttttctatggtatcccagggctccaaagccttcggtgccccaattgatacgggaggtctccccaggtaaggtagaggatttgggtntttagggcacggtnaaatgccacccantc

SEQ ID NO: 94443 - DNA, 447 bp, Arabidopsis thaliana columbia
gtaccgattcgggattcgcgcaacgcctcacgctttcgctcgttacagtgacagtgccggtaggagtcaccaatgacgggtctgcagtggtggtgggccgagcatcattcaagatcttcttcatcttcaacgcactcgcgttgtttacgtctctggcggttgtggttgtccagatcacattggtgagaggagagacaaaagctgagaagagggtagtggaagtgatcaacaaactcatgtggttggcatcgatgtgtacatctgtggcatttttggcatcttcatacatagtggttgggcgtaagaacgagtgggcggctgagctggtgaccgtggttgggggtgtgataatggctggtgttcttggaaccatgacttattacgtggtaaaaatcgaagaggacaaggtcgatgaggaagaaggtgaagagtgctcgcaggagtggt

SEQ ID NO: 94444 - DNA, 749 bp, Arabidopsis thaliana columbia
  unsure (1)..(749): unsure at all n locations
tgggttactgtgtgaacgggaacgngaggttgcttgtntatgagtacatgccacagggaaatcttggacagcatttgtttgagtggagtgaactcggttactctcctttgacatggaaacagagagtgagcattgctttagacgtggcaagaggtgtggaatatctccatagcttggctcaccaaagcttcatccacagagatttaaagccctctaacatccttctaggagatgacatgagagccaaggttgctgattttggattggtcaagaacgcacctgatggtaaatactctgttgaaacaagattagcaggcacattcggttatctagcaccagaatacgccgctactggaagagtaacgacgaaagtggatgtgtatgcatttggtgtggttctcatggaaatactaactggaagaaaagctttagatgattcattaccagacgagagatctcatctagtcacatggttcagaagaatcctaatcaacaaagaaaacatcccaaaggcactcgaccaaaccttagaagcagacgaggaaaccaattgagagcattttccagagttgctttgctagctggncaatnnacagccggggaccctaacaaaggcccgacatggccacgggtaaacggtccttaggccccttttttggggagtngaanccnttgtnccaagagnngaaggggntttnggatngttttnaccatggnttttcctaaggttttnaagttggaaacggggg

SEQ ID NO: 94445 - DNA, 470 bp, Arabidopsis thaliana columbia
ctctttctcagaaatctctctctttcgcactttctgcaaatggttctcttcttcctttaagctcaatctcgccactggagtctcaatcgggaaagatctccatcttctccggaggaaaaacggatccgtaaatcgtgaatttttaaacagagaagaatcaattcaatggaggaagagaaagcttctgctgcacagagcttaatcgatgtagttaacgagattgctgcgatttctgattatcgtataacagtgaagaagctttgttataatctagcgaggagattaaagctgcttgttcctatgtttgaggaaattagagaaagtaacgaaccgatcagcgaagatacgttgaagactttgatgaatttgaaggaagctatgtgttcagcgaaggattatctcaaattttattttcctatggttgcatgttttatctttttgactggatatgttattattttttcaagata

SEQ ID NO: 94446 - DNA, 703 bp, Arabidopsis thaliana columbia
  unsure (1)..(703): unsure at all n locations
tgcaactacagtaccaagtcaatgagggaagaaggcggttctgagatcatcaagacagcaatcgataaattgggactgagacacaaagaacacattgctgcttacggtgaaggcaatgagcgtcgtctcacaggacaccacgagactgctgacatcaacactttcctttgggtatactaacaaacatctttgcgggtttccggattggtaaaaacccccggattgcgatacatttggggatccttttgtgtgttggaatgttgtatgctagggtgttgcgacccgtggagcatcgatccgagtagcacgtgatacggagaaacaggggaaaggatactttcgaggacaggaggccagcttcgaacatggatccttacattgttacttccatgattgcagagaccaccatcctctggaatccttgatgatcatcagatcaagaaaaaatcttgaatgtcactcaaatttgtgtttcttgcaagattcaaagtttgtgttctctatcaagcaatgtcttaggataagtcaaagatttgctctgcttattctgctttttatttacttcacatcctattgaaaacatttctgtgtattatttatgaataaacattatcttaaaaaaaaaaaaaaaagnnnnnnnnnnnnnnnnnnnnnnnnnnnnnnnnnnnnnnnnnnnnnnnnnnnnnnnnnnnnnnnnnnnaac

SEQ ID NO: 94447 - DNA, 548 bp, Arabidopsis thaliana columbia
  unsure (1)..(548): unsure at all n locations
ataaaacacacaatctcaagattttttacttcttattacaaagattcaatcttctngtttctccttgcaaccatgagtcttcttgcagatcttgttaaccttgacatctcagacaacagtgaaaagatcatcgctgaatacatatgggttggtggttctggtatggacatgagaagcaaagccaggactctccctggacctgtnaccgatccatcaaaacttccaaagtggaactatgatggttcaagcactggtcaagctcctggtcaagacagtgaagtgatcttataccctcaagcaattttcaaagatccattccgtagaggcaacaacatccttgttatgtgtgatgcttacactccagcggggagagccaatccctacttacaacggggcatgctgcgggttgagatctttgctaaccctgatggtattcctgaggtgccctgggntggattggccagggtncacttttttgcagagggtttactggcctttggtgcccttggggtcctggcctaggccantnctnggtttgggtncaattt

SEQ ID NO: 94448 - DNA, 785 bp, Arabidopsis thaliana columbia
  unsure (1)..(785): unsure at all n locations
caatggagaagtcatgccgggtcagtgggagttccaggtcggtccagctgttggtatctcggctgctgatgaaatttgggtcgctcgttacattttggagaggatcacagagattgctggtgtagtggtatcttttgacccgaaaccgattcccggtgactggaacggtgctggtgctcactgcaactccagtaccaagtcaatgagggaagaaggcggttacgagatcatcaagaaagcaatcgataaattgggactgagacacaaagaacacattgctgcttacggtgaaggcaatgagcgtcgtctcacaggacaccacgagactgctgacatcaacactttcctttggggtgttgcgaaccgtggagcatcgatccgagtaggacgtgatacggagaaagaagggaaaggatactttgaggacaggaggccagcttcgaacatggatccttacattgtcacttccatgattgcagagactacaatcctctggaatccttgatgatcatcagatcaagaaaaaatcttgaatgtcactcaaatttgtgtttcttgcaagattcaaagtttgtgttctctatcaagcaatgtcttaggataagtcaaagatttgctctgcttattctgctttttatttacttcacatcctattgaaaacatttctgtgtattatttatgaataaacattatcttaaaagggctgaaaaatttactannnnnnnnnnnnnnnnnnnnnnnnnnnnnnnnnnnnnnnnnnnnnnnnnnnnnnnnnnnnnnnnnnn

SEQ ID NO: 94449 - DNA, 625 bp, Arabidopsis thaliana columbia
  unsure (1)..(625): unsure at all n locations
cgccgagcactaatacgactcatatagggaaagccggtacgcctgcaggtaccggtccggaattcccgtgtcgacccacgcgtcgagacagatttgattccatttttattactgttactatcatccaaacccttggtatttgtagccatgagtcttgtttcagatctcatcaaccttaacctctcagactccactgacaaaatcattgctgaatacatatgggttggtggttctggaatggacatgagaagcaaagccaggactctacctggaccagtgactgacccttcgcagctaccaaagtggaactatgatggttcaagcacaggccaagctcctggtgaagacagtgaagtcatcttataccctcaagccatattcaaggatcctttccgtagaggaaacaacattcttgtcatgtgcgatgcgtacactcccgcgggtgaaccaatcccgactaacaaaagacacgctgcggctaaggtctttagcaaccctgatgttgcagctgaagtgccatggtatggttttgagcaaggatacactttactccggaaagatgtgaagtggcctttggtgcctttggggtttccggcctagggcctttttnggtttgggagnatgc

SEQ ID NO: 94450 - DNA, 787 bp, Arabidopsis thaliana columbia
atgccgggacaatgggagttccaagtcggcccatcggtcggtatctcagctgctgatgaaatatggatcgctcgttacattttggagaggatcacagagattgctggtgtggttgtatcttttgacccaaaacctattcctggtgactggaatggagctggtgctcacaccaattacagtactaaatcaatgagggaagaaggaggatacgagataatcaagaaggcgatcgagaagcttggcttgagacacaaggaacacatttccgcttacggtgaaggaaacgagcgtcgtctcacgggacaccatgaaactgctgacatcaacactttcctttggggtgttgcgaaccgtggtgcatcgatccgagtaggacgtgacaccgagaaagaagggaagggatactttgaggataggaggccagcttcaaacatggacccttacgttgttacttccatgattgcagagactacactcctctggaacccttgaaaggatgatccgtaactcttgaagttgcttctgattgggttttttggaagttccaagcttgtcttttctctacagtgtgtattaagcaattgtaccggttgacactgccggagtttgtgatttggggcctttctttctttttcttctttttataatcttttgggttctgtggttagagcaaattcggtttgctctgtttgtttgacctttattgaaacctttggtattggtactaataatacaatctgaaaaggcctcttcatgtttcaaaaattgagacttactttctaatttt

SEQ ID NO: 94451 - DNA, 1153 bp, Arabidopsis thaliana columbia
  unsure (1)..(1153): unsure at all n locations
cgaaatctaaagcatcatctcattaacaaaaataaaacacacaatctcaagattttctacttcttattacaaagattcaatcttcttgtttcttcttgcaaccatgagtcttcttgcagatcttgttaaccttgacatctcagacaacagtgaaaagatcatcgctgaatacatatgggttggtggttctggtatggacatgagaagcaaagccaggactctccctggacctgtgaccgatccatcaaaacttccaaagtggaactatgatggttcaagcactggtcaagctcctggtcaagacagtgaagtgatcttataccctcaagcaattttcaaagatccattccgtagaggcaacaacatccttgttatgtgtgatgcttacactccagcgggagagccaatccctactaacaagcgacatgctgcggctgagatctttgctaaccctgatgttattgctgaagtgccatggtatggtattgagcaagaatacactttactccagaaagatgtgaagtggcctgttggttggcctattggtggttatcccggccctcagggaccgtactattgcggtattggagcagacaaatcttttggcagagatgttgttgattctcactacaaggcctgcttatacgctgggatcaacattagtggcatcaatggagaagtcatgccgggtcagtgggagttccaggtcggtccagctgttggtatctcggctgctgatgaaatatgggtcgctcgttacattttggagaggatcacagagattgctggtgtagtggtatcttttgacccaaaacctattcctggtgactggaatggagctggtgctcacaccaattacagtactaaatcaatgagggaagaaggaggttacgagataatcaagaaggcgatcgataagcttggcttgagacacaaggaacacatttccgcttacggtgaaggaaacgagcgtcgtctcacgggacaccacgaaactgctgacatcaacactttcctttgggggtgttgtcgaaccgtggagcatcgatccgagtaggacgtgatacggagaaagagggaagggtactttgggataggggccacttcaaagggccccaantnnncccccnntttnaaaaaaaccncgaaccct

SEQ ID NO: 94452 - DNA, 810 bp, Arabidopsis thaliana columbia
aattcacttaattctcactcactctctttccttctctactctctgtttctttcttccatggagctcttctcactctcttctcttctcctactctccactctcttcgttttctacatcttcaagtttgttttcaaaagaagaaaccagagaaactgctacatgcttcactacgagtgctacaagggcatggaagagagaaaactcgacaccgagacttgtgctaaggtcgttcaacgaaacaagaacttgggtcttgaagagtacaggtttctccttcgtactatggctagttccgggataggagaggaaacgtacggcccaagaaatgtgcttgaaggtagagaagactctcctactctccttgacgctcactccgaaatggacgagatcatgttcgacactctcgacaagcttttccacaagacaaaaggctcaatctctccttcagacattgatattctcgttgtcaacgtctcactcttcgctccatctccttccctaacctcacgagtcatcaacagatacaagatgagagaagacatcaaatcctacaatctctcgggactagggtgtagcgcgagcgttatatcgatagatatcgtgcaaaggatgttcgaaactcgtgaaaacgctctcgcactcgtggttagcaccgagacaatgggtcctcactggtacctgcggtaaagataggtcaatgatgctctcaaactgtctcttccgtgccggaggatgctctgttctgttaaccaacgcagctaggttcaagaccaggctttgatgtgctcgtgacagtgggtccggctcatg

SEQ ID NO: 94453 - DNA, 428 bp, Arabidopsis thaliana columbia
gacaccttctctaaactcaaattgatgatacatggtgttgatggagtcgcttcgtctgtacggacccgtgattaaaatttcccgagaggcaacacaagatatgaaggtaggacacttggagatcccaaagggcacaagcattatcataccgttactgaagatgcacagagacaaggccatatggggcgaagacgccgaacaattcaatcccttgagattcgaaaacggcatttctcaagccaccattcacccaaacgctctcctcccgttctcaatcggaccaagagcttgcattgccaaaaactttgccatggtcgaagccaagaccgttctcactatgatccttcaacagttccagcttagcctctcccccgagtataagcacacgccagttgatcacttcgatctctttccgcaatacggcctac

SEQ ID NO: 94454 - DNA, 530 bp, Arabidopsis thaliana columbia
aattcgggattccaccccacgccccacgccagctcgatagccgaacctgccgaaactatatctacatgggaaccaagttcaattcccgtaaggaagacgtcattggcgagacgtatctcgggattcaaatatttagattctacttcaagtgcaccaagtgctctgcagagctgactatgaagacggatccacaaaattctgattacattggcgaatctggggcatctcgaaattacgaaccctggcgtgcagaagatgaggaggttgataaggataaacagaaaagagatgctgaggagatgggggacgcgatgaagtccttggagaacagaactttggatttctaaaagagaaatggtccttatagctgcacttgatgaaatgaaatcaatgaagtctagacatgctactgtgagtgtagatgcaatgttggaggccttgcaaagaaccggcgctgagaaggtaaaacgaatagaagaagaagatgaagcagttataaagtcgatatttggtaaagaagttattaggag

SEQ ID NO: 94455 - DNA, 2888 bp, Arabidopsis thaliana columbia
ctttgtgaacaaaacacatctcgtatacttcagatctagactcgaaaattttagacctctttacaattggtctttgttcatctgaagttggagaaaatagttagcttaggtcggatcttttcatatgctttggatcctccttcgtctcttttgtataattttaaccttatcaagagttctttttgaatctcaaaagattatatagtagtatagaaggtttatatgtatatgtatagccagatagtttatgttgtttaaagattcgatgatagccaagttgggttaactttctttttccttgcctccttactcacatacaaaccctatctgtccgtacaaaatactaaaaaccctaacttttctctctccaccaatctagtttattgtttcatttccacttcaacgatgaaaagcttgcatgtggcggccaacgccggagatctggctgaggattgtggaatactcggtggagacgctgatgatactgttttgatggatggaattgatgaagttggtagagagatctggttagatgaccatggaggagataataatcatgttcatggtcatcaagatgatgatttgattgttcatcatgacccttcaatcttctatggagatctcccaacgcttcctgatttcccatgcatgtcgtcttcatcatcgtcttcaacatctccagctcctgtcaacgcaatcgtctcctcagcctcttcttcttcggcagcttcttcctccacttcctcagctgcttcttgggctatattgagatcagatggagaagatccgactccaaaccaaaaccaatacgcatcaggaaactgtgacgactcttctggtgcattgcaatccacagcttccatggagattccattagacagcagtcaaggttttggttgcggcgaaggcggtggtgattgcattgatatgatggagactttcgggtacatggatctacttgatagcaacgagttctttgacacctcagctatatttagccaagacgacgacacgcaaaaccctaacttgatggaccaaacccttgagagacaagaagaccaggtcgttgttccgatgatggagaataacagtggtggagacatgcaaatgatgaattcttccttggaacaggacgatgatctcgctgctgtgtttttggagtggctaaagaacaacaaggagactgtgtcggctgaggatttgaggaaagtaaagataaagaaagctacgattgaatcagcggcaagaagactaggcggtggtaaagaagcgatgaagcagcttttaaagctgattcttgaatgggtccaaactaatcacttacaaagaagacgcaccaccaccaccaccaccaacctctcttatcaacaatcattccaacaagatccatttcaaaaccctaaccctaataacaacaacctaatcccaccgtccgaccaaacctgtttctcaccttcaacatgggttcctccaccaccacaacaacaagcttttgtctcggacccgggttttggatacatgcctgctccaaactatccgccacagccagagttccttcctttacttgaatctccaccgtcatggccaccaccaccacagtctggtcccatgccacatcaacaattccccatgccgccaacctcgcagtataatcaatttggagatccaacaggtttcaatggatacaacatgaatccgtaccaatatccttatgttcctgcaggacaaatgagagatcagagattactccgtttgtgttcctcagcaactaaagaggcaagaaagaaacggatggcgagacagaggaggttcttgtctcatcaccacagacataacaacaacaacaacaacaacaacaataatcagcagaaccaaacccaaatcggagaaacctgtgccgcggtggctccacaacttaaccccgtggccacaaccgccacgggagggacctggatgtattggcctaatgtcccggcagtgccgcctcaattaccgccagtgatggagactcagttacctaccatggaccgagctggctcagcttctgctatgccacgtcagcaggtggtaccagatcgccggcagggatggaaaccagaaaagaatttgcggtttctcttgcagaaagtcttgaagcaaagcgacgtgggtaacctcggaaggatcgttttgccaaaaaaagaagctgagacacacttgccggagctagaggcaagagacggcatctctctggccatggaagacatcggaacctctcgtgtttggaacatgcgctacaggttttggcctaacaacaaaagcaggatgtatctcctcgagaacaccggcgattttgtgaaaaccaatgggctccaagaaggtgatttcatagtcatatactccgacgtcaaatgtggcaaatatttgatacgaggggttaaagtaagacaaccgagcggacaaaagccggaggccccaccgtcgtcagcagctacgaagagacaaaacaagtcgcaaaggaacataaacaataactctccgtcggcgaatgtggtggtcgcttcaccaacttctcaaactgttaaatgaaaaacagagacaaaaagaaacaatataaatattattatgtaccaaataagaaagagggcaaaaggaaaaaatggcagcgtacccgagtgtgccacttctcgtgcatgcatgggatcttgaagacaaatggagggtcatgattaaagctgtttggtcagggtccgggtttttactccattttttgccttttcttgtcgagtcggttcttttataactctttactctttttaccttcaggatattgtagagatgattaattctggaaatggtgtttgtgttataaaaaaaaaaaaaaaaaaatatagttcttttgttgttgt

SEQ ID NO: 94456 - DNA, 709 bp, Arabidopsis thaliana columbia
  unsure (1)..(709): unsure at all n locations
ctctnnnnnnnnnnnnnnnnnnnnnnnnnnnnnnnnnnnnnnnnnnnnnnnnnnnnnnnnnnnnnnnnccacgcgtccgcggacgcgtgggcggacgcgtgggcaaaaacaaaatgaaattttcaatcacattagctctatgcttcactctctccatcttcttgatcggttcacaagccaaagttccagtcgacgaccaattccgagtggtcaacgaaggtggctacaccgattacagtcccatcgaatacaaccccgacgtacgtggcttcgtacccttcagtgacaacttccgtctctgtttctacaacacaaccccaaacgcatacactctcgctctcagaatcggaaacagagtccaagaatccactctcagatgggtctgggaagcaaacagaggctcaccggtcaaagaaaacgcgacgttgacttttggcgaagacgggaacctcgtactcgctgaagccgatggaccgcttggtatggcaaacggacacatgctaacaaaggcggccgtggggggtcaaaattctttgggaattggcaatattggaatttnacggttccagtngaaaatttgtttggaangcttttnttttccaccggaaaattntnngttggcagnttttnaacttaacggtgggccaantgaagaggnttntcattntaanaacggccgncanttgttntgggcagagtgttnctagga

SEQ ID NO: 94457 - DNA, 809 bp, Arabidopsis thaliana columbia
  unsure (1)..(809): unsure at all n locations
aatacgactcactttagggaaagctcggtacgcctgcaggtaccggtccggaattcccgggtcgacccacgcgtccgcacaaaaacaaaatgaaattttcaatcacattagctctatgcttcactctctccatcttcttgatcggatcacaagccaaagttccagtcgacgaccaattccgagtggtcaacgaaggtggctacaccgattacagtcccatcgaatacaaccccgacgtacgtggcttcgtacccttcagtgacaacttccgtctctgtttctacaacacaaccccaaacgcatacactctcgctctcagaatcggaaacagagtccaagaatccactctcagatgggtctgggaagcaaacagaggctcaccggtcaaagaaaacgcgacgttgacttttggcgaagacggaaacctcgtactcgctgaagccgatggacgcttggtatggcaaacgaacacagctaacaaaggcgccgtggggatcaaaatcttggagaatggcaatatggtaatatacgattccagtggaaaatttgtatggcagagctttgattctcccaccgacacacttctcgttggacagtctttgaaactcaacggtcggaccaaactcgtaagcagactgtctccatctgtcaacacagacggaccgtacagtctcgtgatggaagccaagaagctagtcttgtacttacacgacaacaaaactccgaaaccaatcgcttattntgaatacgaattcttaccaagatacatcattccagtcatgacgtcaagctgtggagattccgcacac

SEQ ID NO: 94458 - DNA, 1117 bp, Arabidopsis thaliana columbia
cctttgaagacccattcggaatttccgggacgacctacgcgtccgcccaccgacacacttctcgttggacagtctttgaaactcaacggtcggaccaaactcgtaagcagactgtctccatctgtcaacacaaacggaccgtacagtctcgtgatggaagccaagaagctagtcttgtactacacgacaaacaaaactccgaaaccaatcgcttattttgaatacgaattcttcaccaagataacacaattccagtcaatgacgttccaagctgtggaagattccgacacaacgtggggtctagtcatggaaggtgtcgattctggttctaaattcaacgtttcaacgttcctctcacggccgaaacacaacgcgacgttgagttttattcggttagaatcagacggaaacatcagagtttggagttacagtacgttggcgacttccacggcttgggacgtgacatacacggcgtttaccaacgccgacactgacggtaacgacgagtgtaggatccctgagcattgtttggggtttggtttgtgtaagaaaggccagtgtaacgcttgtcctagcgacaaagggcttcttggttgggacgagacatgtaaatctccaagtctcgcaagttgcgatcccaagacatttcactacttcaagatcgaaggagctgatagtttcatgacaaaatataacggtggatcatcgacgacggagagtgcgtgtggggacaagtgtacgagagattgcaaatgtttagggtttttctacaatagaaagagttcgaggtgttggttgggctacgagctcaagacattgactagaaccggagattcttccctggttgcttatgtcaaagctcctaatgcaaacaaaaagtcaactctttgaggtctgaaagtcatatatatatatgaaattattgtgttgtgtgtttaataaggttcgtttgtgtacctttttaaaaataaatggtgtactgattctcaagataaatcctaatacaaagtgaagtgaaaaaaaaaaaaaaaaaagggcggccgctctagaggatccaagcttacgtacgcgtgcaggcgacgtcataactcttctatagttgtacctaatacattcc

SEQ ID NO: 94459 - DNA, 403 bp, Arabidopsis thaliana columbia
accacgcgtccgaaaccaccgtctatgtcatcagttatcttttaaccaacacccttctttggtggacattctgttctttggtcggaaacatgtaatcaagaaaaagaactaactttatctgttttagctgagcttcttggtttcgatgactacattacaccgtattccgaagcaaggggagaagatatcctaagaggagtaaactacgcttctgcagctgccggaatccgagaagaaactggtcgacaattggtaatttagtccttaaaacagaatacacaattttggtttgatgtcatgagatatcatttagacttcagtttttaaaactaggaaacataaatcttttgtccatttttggttcagggagctagaataacatttgcagggcaagtagctaatc

SEQ ID NO: 94460 - DNA, 676 bp, Arabidopsis thaliana columbia
  unsure (1)..(676): unsure at all n locations
aacaatttgaattttcatagaatactcttaaaagcttcactgttttttataactaaattcatttacaactttatataagaaccaaaaaatcagagcgcaacttctacctctatcatcgttggaccctcaaaatttgccagaattccgacgaaaccaatcatcagcagaaatcaaaatttatccaagcacccaaacattgacaatttaacatccttgcnccttttaagcncttgggtagagatggctagagtttgtgtaatgatgatggctatggctatagctatggctatcaacatagctatgggtgatccaatagcaccatgttacttcatattcggtgactctttggttgatagtggaaacaacaatcggctttaccctctctagcaagagctaattacttcccttacggtatcgacttccagtacggtccaaccggtcgcttctccaacggaaaaaccaccgtcgatgtcatcactgagcttcttggtttcgatgactacattacaccgtattccgaagcaaggggagaagatatcctaagaggagtaaactacgcttctgcagctgccggtatccgagtagaaactggtcgtcaattgggagcttgaataacatttgcagggctagatagctattcatgtaaacactgtgtcacaagttgtgaacatactcg

SEQ ID NO: 94461 - DNA, 536 bp, Arabidopsis thaliana columbia
aggggaacaaagccggagcctcaccgcgggggggggcgctctaaaactagtggattccccgggctggaagaatttgcgggccggcctcaaaatccgggactttttgggtgagaggggaaaccaccattcggttaacttttttaccagaagctaataccttccttaccggaatcaccttccagaccggcccacccggccgtttttctatttggaaaacccaccggcgatggtcatcactgacctcctgggttccgatgactcctttgcaccggtttccgaggcagggggagaggatatcctaggaggagtaaactacgctcctgcagctgccggaatccgagaggaacctggccgacaatggggagctagattaccattggcagggcaaggtagctaatcatgtaaacactgggtcacaggtggtgaccatactcggagacgagaatgaagctgctaattacctaagtaaatgcatctactcaatcgggttaggcagtaccgactatctcaataactattttatgcctgtttattac

SEQ ID NO: 94462 - DNA, 547 bp, Arabidopsis thaliana columbia
aaattcatgaattttataagacttgcaaatgagcgaccttaacattacaattgcttaagtgataactctcaaaactttagctcttctctcataacgcttaaccagggacattgataatatacaatgcctaataactaacgatcaacttctcttattttctttatattagtcatcggatgcaatcactacatggcttttggctttcctctcttcctccttcctgaacttgatcccacaagcattgcataaactctgaaacacatttaccaatttaaaaattaataataattattaagcagcataattaatctttaaccatgatttattagttgaacattcggagactaattaccttaggaccaagaggacctcttcgccacataggagtgttaagtgcgttacaattcatgttcgtacacttcttcatcccttcaatcctccccccgcagaatccaccacaaccgcgaatccgcttcggggttgcgttttccttccaagagtttgtcatcaccgtagagttgttacgacgagctctcctagcaggaac

SEQ ID NO: 94463 - DNA, 635 bp, Arabidopsis thaliana columbia
  unsure (1)..(635): unsure at all n locations
aaggngtgtggagcnncngcntctccctcttattcacagaaggtggtgttcgcacctccatcagggactctctcccgaaacgcaatctggcaattcttgtcccggttttggaaagatttgtggcatttcacatgactttgaacatgatccctccggagacacataaagcagtgatgggagtgattgaaccctgcaaatcaccgtagaaagggatcaaaaagggccaattaattcttcattctccaatttctctgtacagcttctgcaatagaaaagaaaaaagaccttggaatgctttggggtgatcactaactctggtgatcgcattgatgtatgatataagattataaggctgctattagtacgttagttctctcttttagagttaaactgtttgtctcggcttaggttttgtttagttgtcctttacagttttactcatacactccattctttttgtagttttcttgactaatcccatatatacaagtttgctctaccactttttttttaaaaaaaaagggcggccgctctagaggatccaagcttacgtacgcgtgcatgcgacgtcatagtctttctatagtgtgtcnnnnnnnnnnnnnnnnnnnnnnnnnnnnnnnnnnnnnnnnnnn

SEQ ID NO: 94464 - DNA, 384 bp, Arabidopsis thaliana columbia
  unsure (1)..(384): unsure at all n locations
catattcattacgggtttctgggtatttcgatatgggaaaagagtggggagagatgctggagagtgctgataagagtcagctgatgaggcttcaagctttctatgaagacatgattggtagagttaaggacaaggtgttgcagagaaggattcaggagattatgaaagattgtcttcagtcttcagcccctaaatactagtatcacttgttgcgtgctaatagcaataccttcacttgagctgacaatagtttcgtcttcaaattctgtgtgttttgtgcaaatgatgagataaaggatttggttttggtgttaaattgtattaattggccaagtattatgtcatttttcctttncatagntttttaatanctggtccataatt

SEQ ID NO: 94465 - DNA, 547 bp, Arabidopsis thaliana columbia
cgtccgaaaagggtttatcatccttgaaaaggagacaaatattgcttcaaagctaaaatcaaacgggcttcgtgtttacgttgaaagatttagcaacgagtgtgtaactcatgcatttgacttttacgatgatccaacgttagagatagactcttttgtccgcgatgtccaaattgatggcatcatcactgacttcccagcaacccctgcaagatacagaaagaacaagtgttacggcgaatttggtctgactacaaccggtgagctcataactttcgcgaatccaatgcttcttccaccagctgaagctccatatccagcactacttgactcagatgtgacggaaccaccattgcctgaagcaagaagtcagcctcctgcttcttctccatcaaaggcagaggaaaaagcaatagaagttccctttgcatttatagccatggctattcttgtgtgcttcttcatttcagtttagtgataagtgtttgtaaccgacttcgactgcagtatctgcaagtgaaccttatgaataacaatgtctagtact

SEQ ID NO: 94466 - DNA, 451 bp, Arabidopsis thaliana columbia
gcagccttttagccaaaaaaaacaaacaagaattcaaaaatggctgaacaacaagatcatcacaaagagcttcagcttttaccttctccaccgtctaccgaatctccggtaaggaaacaccgaccaacagttataacaaccgaccatcacaacaatcaccaccgttcctcctccatgatccaccacgatcttgacctcaaactctccatcagcctcagctcgatctcaacagcggaggagcttccaaacggtggtgtggaggcgttgaagtggcaagccgcggagcagataaggcttgcggctatagagaaggcttacgccgagagggttagagagttgactcgccgtgagatggagatggctcagtctgagtttgctcgtgcaagggtgatgtggcagaaggcaaggggaagaagtggagagagctgagagattgaaggagagatcaatg

SEQ ID NO: 94467 - DNA, 555 bp, Arabidopsis thaliana columbia
aatacgactcactttagggaaagctgctacgcctgcaggtaccggtccggaattcccgggtcgacccacgcgtccgagaagacgacagaagggaaagaaagtggaagagatagaagaatcggtggagaaaggtataaaaaccaacgaagaagcgacggagaccgtatcgattttagtcgacgggctagaagaccgtatcaaaaatatgttgaaacttgtagataatgctatgtgaccatgaagataatgaggcggccacgagaattgtcctaactcagatcagtaagaaagtagagaaattaacaaagaaaatcacggaggttggtgaaagtgtggaagatcatagcaagttgattgcaaaggccagacttcaagttctgcaaaagatcaaccgttaatcttttgtttaacgatgtttgttgttcaaaatccatattttagtatgttttaatcatcccattgtacctttttaaaatattatatgttttgtaatttcaccatccgagagattggttgatatgtacctctatcccgtatattcgtgaaataaagttt

SEQ ID NO: 94468 - DNA, 533 bp, Arabidopsis thaliana columbia
  unsure (1)..(533): unsure at all n locations
nnnnnnnnnnnnnnnnnnnnnnnnnnnnnnnnnnnnnnnnnnnnnnnnnnnnnnnnnnnnnnnnnnnnnccacgcgtccgagcccatcatttttttatttctcctgcgaattctccgccatagattttcttttgaatttctcctgctaactcttgagctccccaaaggcggctacatcggttttgtcacctctactcgctcacttttctccgtccaattttgcagcttttgaagatcaagaggtgaacattcggagtgatgaatcggccaaaggttcagcgtcgtgttggaaagtatgaggttggaaagacgcttggacaaggcacttttgcgaaagttcggtgtgctgttaatactgagacaggagaacgcgtggctctcaaaatacttgataaggagaaggttcttaagcataagatggctgaacagataaggagagaaatttgtactatgaagctgattaaccatccaaatgtagtgcggctgtatgaggttttggcgagcagactaagatatatattggtctagagttc

SEQ ID NO: 94469 - DNA, 801 bp, Arabidopsis thaliana columbia
gcagtaccggaccggaattcccggggcgacccacgcgtccgtcttcctccatatgcgtggctcttaaaaacctaattcacaatgtccgtcgttctcaacgccggcttcagttctccgcttcaaaacagatcacatcatgttatacagttaaagccttcgccttttgcgtcatacatatctctaaacagttcaagaaggtcactgttatgcaaaagaagattggttgtatcttgtttggatacaaatgacaattctgtcacaactacatccgtagattcttcttcttcttcagattctaataaaccagtaagtgaatcagttgaatcaagcaatggcactgccaaaaaagcaccattgacagcacgagagagactaagagcggctcgtgttcttagccgatacactgaagcaacaccgaaaccgtcaaaaccttaaatggggagccaacttcttgatgtgctcaaggaaagtgataagaaatcaaagaggaaaccgggtctacccgaagcacccacttacatgcttgatgatagcaggagagggatgccaaagagcggtcttacgtttgatttaccgggaggcttcgatattctcatcattgctttctcctttgggatcattagccccgtcatgtttgctactacttttctttggttggaaacttcgggcgatacacttcaaacgaattgttaaagttgagaatttgggaaaaaaaaatccatcccgtggtttgactaatcgtcctccccccttcttaccaaaaaggggtgggcccgcttttaaagggaatcccagggctta

SEQ ID NO: 94470 - DNA, 777 bp, Arabidopsis thaliana columbia
  unsure (1)..(777): unsure at all n locations
attaaggatctgaaactgtgggtgatgaatgtagttcctatcgactcacttgataccctttccgattatatacgaacggtggtttgtttggaatctatcatgattggtgtgaatcattcagcacttaccctcggacttacgacctccttcacgctgatcatcttttctcttcactgaaaaagaggtgcaacttggtgggcgtgatggctgaagtagaccggattcttagaccacaaggaactttcatagtaagagatgacatggaaacgataggagaaattgagaagatggtgaaatcgatgaaatggaatgtaagaatgacacattccaaagatggagaaggattgctctctgttcagaagtcatggtggcgtcctacagaggccgagaccattcagtcggcaatagcttgagatcaaggaaacgaagaagagtgtgggttaatatagtcgacagttgttccttttacgatccaattgattgtttcttacatgtattagtcgaatatttgtatcccttttttgcattgaagaaagttgtatacaagacaaaagtgtaatcttatcgtataatgagcttttgctttggtcctaaacaacccacatagaatccttattcttcttattcaagcccgcatttcctctgtgtaagccccgctgcaatcttcctctgtcaaaaaaaaaaaacaccaaaaaagnnnnnnnnnnnnnnnnnnnnnnnnnnnnnnnnnnnnnnnnnnnnnnnnnnnnnnnnnnnnnnnnnnnnnnnnnnnnnnnc

SEQ ID NO: 94471 - DNA, 759 bp, Arabidopsis thaliana columbia
actataagcaaagctggttcgcctgcaggtaccggtccggaattcccgggtcgacccacgcgtccgctcaacggtatgggaatctattggccttatgttagaaatgtgatggacatgagagcagtctatggaggttttgctgctgcattgaaggatctgaaactgtgggtgatgaatgtagttcctatcgactcacctgatacccttccgattatatacgaacgtggtttgtttggaatctatcatgattggtgtgaatcattcagcacttaccctcggacttacgacctccttcacgctgatcatcttttctcttcactgaaaaagaggtgcaacttggtgggcgtgatggctgaagtagaccggattcttagaccacaaggaactttcatagtaagagatgacatggaaacgataggagaaattgagaagatggtgaaatcgatgaaatggaatgtaagaatgacacattccaaagatggagaaggattgctctctgttcagaagtcatggtggcgtcctacagaggccgagaccattcagtcggcaatagcttgagatcaaggaaacgaagaagagtgtgggttaatatagtcgacagtcgttccttttacgatccaagtgattggttcttacatgtattagtcgaatatttgtatcccttttttgcattgaagaaagttgtatacaaaaaaaaaaaaaaagggcggccgctctagaggatccaagcttacgtacgcgtgcatgcgacgtcatagc

SEQ ID NO: 94472 - DNA, 783 bp, Arabidopsis thaliana columbia
atcatcggaatttataatttctttctctgagaactataaaccaaacgagttgtccaaaaagaagagatcaaagtttcttcttgaagaaagaaagaaacacaaaagctatggcatattcaactaaactttatcttcctcttaaaacaccatgttttgttccaaagacagtaagagcaaagactttgatgcttcaacagagtcaagttcatgttaaagtcaagaaagccacagtttcacagcctcagccgatcagatactccaccaagaacattgtttttgaagatccgatacaagggatcatctgttacacagatgataatggagaggttatatgtgaaggatacgatgaaggtcctcgttgtcccacacagagtccaatggtagcttcttactcaagagaggtggagattcttgatcttctgcaaagaagttatcaggagctgagcgattcaaacaaggatggtcaaagaccgataattgcttcagaacaagagttcatgatgatcaaatggagcagctttgacttcctctaaatcccctttcttttttcttcatcgaaacatcaaaatctggttctctcttcaaaaaggcctcttgaataagaatgtacagaaaaaaggctatgaaagaagcagcgatttgcttctttcttgtttctcttttgtaagaaacttacgtccagattttgatttcaatctttcccccaaaaaaaacaaaaaaaaaaaaaaagggcggccgctctagaggatccaagcttacgtacgcgtgcatgcgacgtcatag

SEQ ID NO: 94473 - DNA, 1265 bp, Arabidopsis thaliana columbia
  unsure (1)..(1265): unsure at all n locations
caaacttcagaagacaaatgaagagcacccgtccaaacgtgcaaaccttgaacgggctattaagttagctgaggaagaaatgttgaggacaaagctcgaagcaaccacaaaggcgaaggaactgctagaggctcatggttcgtggcttcccccttggcttgctgttcactggtttaaatttcagacttataccgagacacattgggaggcccatgggaaacctgctgtggagacagtaattctaaaggtgacggaagcaaaagctcaagctgaaaagtgggctgaaccacatgtcgaaaacgttaaaactaaatatattccagccatcaagggaaccgttactatacatgttgagccacacttccgaacactatccatcaaagctaaagaggcttaccattcatcaaagagtgctgtttcccctcacattgtcacggttcaagaatttgtagacccctgttatcaggaggccaaaaagttcagcaagccatatgtcgaccaagtggccacgaccacgaaaccacatgttgataaaatgaaggttgccatgaaaccttacacaaccaaggtgatcatcgtctatacagagttccttgaatccgccacaacttatcacaatcaggtccaagcccatgttgaacgaaaactgaaaagccatgagctgacggagccttttgctaccaatgagtttgtttggtttgcggcctctgcattgttggtatttcccatcttcgttgcttacagagtgctctcttctctcttctgcacaaagacaaagaaacctgttaaacaccctcatcaccatggtcgtcgtaaggccaaaagggctcacactgacaagtgatattcattgttccacgctctcaaaatagtcgaggtcacgaggttaaaacgccattgttgttggactgttctaaagtcagctagctcaccggacaggttgcttgttgaatgaagggaaagtctcgagttggtgtctgatgggtttttagaggctcgttgtgcacaagtgttgacttctttcctttattattttgtattgttttggacaatttatttcagcatttttacacagaagattagacattactagagaaattctagcaaaagcttggttgtattttagtgtatttttctattttacgtggatatatattgcgatatctttaatttcataaaaactcttcaaagtgcaactnnnnnnnnnnnnnnnnnnnnnnnnnnnnnnnnnnnnnnnnnnnnnnnnnnnnnnnnnnnnnnnnnnn

SEQ ID NO: 94474 - DNA, 824 bp, Arabidopsis thaliana columbia
  unsure (1)..(824): unsure at all n locations
cttctcagacaagggccaaggttgtccacatgagtgagcttgaaaaacgtgaatgttcttcaaacctcaaaccatgaaaaatgttgataagagctcgacattactctctaccttaatctaaaccacaaaggagaaaaagaatccccttcaagcaacttagatcaaagtgtcatcaagaaactccgagatcaaatctaatctttctctggtttgaatcaagaagagcaaaatcacattctcaaccccatcttttcagtgtggttaaagcaaaaagaatctcgagacaaagaagaaaagctaaaaaagagaaccccaaagaatcgaatatttattatttcgccccgaagattctatttctgatcatttacacccctaaaaagagtagagctttcgtgaagccaccatgtgtggaggagctataatctccgatttcatacctccgccgaggtccctccgcgtcactaacgagtttatctggccggatctgaaaaacaaagtgaaagcttcaaagaagagatcgaataagcgatccgatttcttcgatcttgacgatgatttcgaagctgatttccaagggtttaaggatgactcggcttttgactgcgaagacgatgatgatgtcttcgtcaaatgttaaggcctttcggtcttcaccgcaactacttaggccgtaggttccgctttcggctccactgtagggtcagcatattcccaagaaacctgtggggcccttggnaaagcttggnaatcttttagggggaggggcaggtcagtcccgggggttgggcaaaggcctttgggaatggttcggggcctacccggat

SEQ ID NO: 94475 - DNA, 1315 bp, Arabidopsis thaliana columbia
  unsure (1)..(1315): unsure at all n locations
nnnnnnnnnnnnnnnnnnnnnnnnnnnnnnnnnnnnnnnnnnnnnnnnnnnnnnnnnnnnnnnnnnnnnnnnnnnnnnnnnccacgcgtccgcggacgcgtcgagacaaagaagaaaaactaaaaaagagaaccccaaagaatcgaatatttattatttcgccccgaagattctatttctgatcatttacacccctaaaaagagtagagctttcgtgaagccaccatgtgtggaggagctataatctccgatttcatacctccgccgaggtccctccgcgtcactaacgagtttatctggccggatctgaaaaacaaagtgaaagcttcaaagaagagatcgaataagcgatccgatttcttcgatcttgacgatgatttcgaagctgatttccaagggtttaaggatgactcggcttttgactgcgaagacgatgatgatgtcttcgtcaatgttaagcctttcgtcttcaccgcaactactaagcccgtagcttccgctttcgtctccactgtaggttcagcatatgccaagaaaactgtagagtccgctgagcaagctgagaaatcttctaagaggaagaggaagaatcaataccgagggattaggcagcgtccttggggaaaatgggctgcggagatccgtgatccgagaaaaggctcccgagaatggcttggaacattcgacactgctgaggaagcagcaagagcttatgatgctgcagcacgcagaatccgtggcacgaaagctaaggtgaattttcccgaggagaagaaccctagcgtcgtatcccagaaacgtcctagtgctaagactaataatcttcagaaatcagtggctaaaccaaacaaaagcgtaactttggttcagcagccaacacatctgagtcagcagtactgcaacaactcctttgacaactcttttggtgatatgagtttcatggaagagaagcctcagatgtacaacaatcagtttgggttaacaaactcgttcgatgctggaggtaacaatggataccagtatttcagttccgatcagggcagtaactccttcgactgttctgagttcgggtggagtgatcacggccctaaaacacccgagatctcttcaatgcttgtcaataacaacgaagcatcatttgttgaagaaaaccaatgcagccaagaagctcaaaccaaactctgatgnggtcagacggttttatggcattaccttgacaacggcttttttgggcncccccttngagtgggngccnttttttgggganntnttggnctntgnctcgggnggggaacccctgggnttttgggtttgt

SEQ ID NO: 94476 - DNA, 971 bp, Arabidopsis thaliana columbia
  unsure (1)..(971): unsure at all n locations
cagtaccggttcgggattccccgactcgacccacgcgtccgttttggtgatatgagtttcatggaagagaagcctcagatgtacaacaatcagtttgggttaacaaactcgttcgatgctggaggtaacaatggataccagtatttcagttccgatcagggcagtaactccttcgactgttctgagttcgggtggagtgatcacggccctaaaacacccgagatctcttcaatgcttgtcaataacaacgaagcatcatttgttgaagaaaccaatgcagccaagaagctcaaaccaaactctgatgagtcagacgatctgatggcataccttgacaacgccttgtgggacaccccactagaagtggaagccatgcttggcgcagatgctggtgctgtgactcaggaagaggaaaacccagtggagctatggagcttagatgagatcaatttcatgctggaaggagacttttgaagtgatcgatggttccttagtttgtaaataaagctgtgttggattttgctgttgggggatggtacaagtcacacctcaagctctatgcattggtatctcatgagcctctcttccatagagagtttctcttttaattttgtcgaaataaaaaaggtgtgatgaagtaaatagaggtataataatatctatctattaagtcttgttttgttctttcatttttgtatttcttttctatttaaaagacagtttattagtcttctgagctctctttttgatctttgttatagcgtatcatcaccctcgaaagtgtaatgttttgtacccccaaacttgtttagcattataataaagtctctttggaacttctctaaaaaaaaaaaaaaaagggcggccgctctagaggatccaagcttacgtacgcgtgcatgcgacgtcatagctcgtctatggtcnnnnnnnnnnnnnnnnnnnnnnnnnnnnnnnnnnnnnnnnnnnnn

SEQ ID NO: 94477 - DNA, 405 bp, Arabidopsis thaliana columbia
cccttttctctctctctcgaagatatcgcctttaattccttcttcttcttctgatttcttcaaagattcatttcttagagatctcagcttctgtaagagtaggctagctaccaaaaaaaaagaaatagaaaaaaacattgatgcttaatcagcagttcttggtgtttgagacacatgtctccaataatactcagtgagatctttctctctgggtttatgttaaattccacaatcaggcgcaggacccatcttgttcaatctttctctgttgtcttcctttactggctttactatgtctcatgatctctgaacttatctccagttttatatctatacgcataattacaacaaaaccctagtttcttttcaaatttctcttcttcgtttttcgtcatctgggtcctg

SEQ ID NO: 94478 - DNA, 620 bp, Arabidopsis thaliana columbia
  unsure (1)..(620): unsure at all n locations
catcaaccttcttggaaagagtctcaacacttgcagagaaaaagaacaaggaagatcccggaaaatggcaacggcgattgtacgttcagctctttcccgagcagtgactcgcgcagtccgaagacatccgtcgctcctaagcgaaacttttcctcttccgccggccatgacgatgcttatgaagctgcgaagtgggagaagataacttatctgggtattgctagttgcactgctctagctgtctatgttttatccaagggccatcatcacggcgaagaccctcctgcctatccgcatatgcacatccgcaacaaggagtttccttggggtccggatggtctgtttgaggtgaagcacaacaaagagcactgagtcttgcgtggtcataataacgtcttcttggtttatttgaaaggctaaaatgttttaccgtatttgttctcaccgtttgtcaacgatttgctactccaatctcttttcttttgttgggaaataaaagttaatactttgcttggcaaaaaaaaaaaaaaaaaaagggggccncctnaagggccaanctttgancgggnatnggggnaaancccccaangggcccaaattatccanggggnggttaaagc

SEQ ID NO: 94479 - DNA, 840 bp, Arabidopsis thaliana columbia
ctatggttgccttttccatgagcttttggctttccagcttgctgatcgccatgccccggctgagagggaaagtgagaaagcaaagtctgaagagatcattggattttcaagctcagcagtctctattctaaaagatgctgagctttcagtcactgagattgacgaaacttctctaatccacatggatgttgatcaaagtttcttgcaaattccacaatctgttaaggctgcaatctttgaaagttttgtgaggcagaacatatctgaagcggaagttgatatcaacccatgtattaagcagtttgtgtggagtaattatgggtttccaaccaaaagcagcacaggctttgtatatgctgatggctcactagcactattcaataaactggtaatttgttgtgctcaagaaggtggaacgctttgtttacctgctggtacaaatggaaattatgttgctgctgccaaatttttaaaagctaatgtcgtgaatatccctaccgagtctagtgatggctttaagctgacagaaaagactctaacgaaagcactcgagtctgtgaagaagccgtgggtttgtatatctggaccaacggttagcccctacaggcttggtgtacagcaatgagggagatgggtatacctcgttgtcttccttgtcgctaagtttggagcaaagggcatcatcgatacttcattctcgggattagaatacagtgcaactagctgggatttgaagaacgctttgtcgaaaatggattcttccttatcagtttcgctgcttggatgtctctctttgaatttgctcagtggagctattaaactcgggtttctagttttgga

SEQ ID NO: 94480 - DNA, 512 bp, Arabidopsis thaliana columbia
atttttcattcccttgttccggcgataacagtctcagtggcgacaaaccctattgccgagccggctcgcattttcctctagctatcgcaacgcctctcgctctctctccccaccggtttacataaagatggaaagtagcttgtatgatgagtttggtaactatgttggacctgagattgagtctgacagagatagtgatgatgaagtagaagatgaagatctccaagataagcatcttgaagaaaatggttccgatggcgaacaagggcctgggggttctaatggctggattaccactatcaatgatgttgagatggagaaccaaattgctcttcctgaggataagaagtactaccctactgctgaggaggtttatggtgaggatgatgagaccttggttatggatgaagatgagcagcctcttgagcaacccattatcaaacctgttaaagatattagatttgtggtgggggtcaaagatcacgcaacgtatgtgacaacacatgttttta

SEQ ID NO: 94481 - DNA, 527 bp, Arabidopsis thaliana columbia
cttgcatttcactttaacaaaacctcaagttagagttgtgagtgttcagagttcagatcgattgaaactctcagttgctactcaacagaaattggacttttggtttgttgagatgtattgtttgaagttgctttgttccactagtgtaaaataacattctcttctctgcatctttagacttatcaaggaatcaaacccattttatcagtgcaggtgacgtggatatatgaagcagatgttttggggaaccagagttctgtaaatagaaaccttcacgcgacgttgaaaggtttttgagacgaatataggaggagaagatgggatgtgtttcttcttgcttccgggtcgaggacattgatgagtacatgaatccaaacagctctgtctataggaactgtccctgcataagatgccttgctcataatttccttaacctgtatatttcggtcttcagaagaggggaaactcgctctctcccatcttcggttcaagctactgcatcgataacttcctcttcttcacacgat

SEQ ID NO: 94482 - DNA, 606 bp, Arabidopsis thaliana columbia
  unsure (1)..(606): unsure at all n locations
atcaaagctgccactaaaaactttgatgagtcccgggtgcttggtgttggtggtttgggcaaggtttacagaggagagattgatggcggaactacaaaggtagccatcaagagaggcaacccaatgtccgagcaaggtgtacatgagttccagactgagattgaaatgctttcaaagcttagacatcgtcatcttgtgtccttgattggatactgtgaagagaactgcgaaatgatcttagtctatgattacatggctcatggtacaatgagggagcatctctacaaaacccagaatccttctcttccatggaagcaacgtcttgagatatgcattggagcagcccgaggtttacactatctacacactggtgcaaaacacacaatcatccatagagatgtgaagacaacaaacattctattggatgagaaatgggtggccaaggtctctnattttggtctatcgaagactggtcctacactagnccacacacacgtaagcacagttntgaaaggaagtttcgggttatcttgacccngagtattttcagacgggcagcaacttgncttnngaatccggtngtntnnctcctttggnggttgttct

SEQ ID NO: 94483 - DNA, 732 bp, Arabidopsis thaliana columbia
  unsure (1)..(732): unsure at all n locations
cgggggggcccagggcgcccgaaaaaaacagggtttctctgatattttgttttgggaggctgcaactggcaaaaacagggaagagcttttcgcagctaatgtttttatgctcaagggcaatgttgtatcgacaccaacaattgcaggaactattttgcccggagtcactcgaaactgcgtaatggaattgtgtcgtgatttcggctaccaggtcgaggaacgtacgattcctctagtggactttctcgatgcggacgaagctttctgtactggcactgcttccattgtgactagtattgcatccgtaacctttaaagacaaaaagaccggattcaaaacaggggaagaaacattggctgcgaagctatacgagacgttaagtgatatccagacgggtcgggtcgaggataccaagggatggacggtggagattgaccgccagggctgaaagttgaaactgtaacttgatgctaaatatgtgtgtgtgtgtatacaaaacttatgtaagaaacatctgaagatgtctctgatctttgtgattgtgatgatcatgcatgtcctatcgttgcgatgtattttataaatgttcgtctgtaagttatttaataactatggctttttgctttatccaaaaaaaaaaaaaaaaaaaaaaaaaaaannnnnnnnnnnnnnnnnnnnnnnnnnnnnnnnnnnnnnnnnnnnnnnnnnnnnnnnnnnnnnnnncgtcctaaa

SEQ ID NO: 94484 - DNA, 708 bp, Arabidopsis thaliana columbia
  unsure (1)..(708): unsure at all n locations
ttttattatctctctctttctgcgtgttccaatttcttccacaaaaccctaggtttgtgttaaaccctgaaattcgtgtaacctttcaacaatctcttcaattttgttttcgattctgaatccattgtttacgaatctctcatctaaagctacattcttcgttaaatcgtttttaatcgactcgctcactcgtgagttgactcgtcagctgtttccataattgcttattgaatttttatacgatgatgtttcaatatggaagaaactagaggaatttctgatccagagaatgggagttcgagttacggcggtaaaccgccgaatccactctccttctcttcttcctccgccgctgctgccgtttacaggcaaaccttcgacggcgagcgatcgttggcgccgtgtaataagaggtcactggttcgacactcatctctcgtgaagacaatggtgtcagatatatctgttgagaatgagtttactatagagaagaacaagtctgagtttgttcctgctacgcgttctggagcttggtctgatattggctccaggtcaagcatggaagatgcttatctatgcgttgataatttcatggatagctttggccttctgaattttagggtggnccaagtgccttctaatgggggatttaatggccatnggtgggaanaatccncctgggtttnnantgnccccatntncccgggg

SEQ ID NO: 94485 - DNA, 697 bp, Arabidopsis thaliana columbia
aaataaccgctcactaaaggtagcgcaagctggagctgcgccgcggtggcggacgctctagaactagcggatcccccttgctgcttgacttcgcggccgcctttaccgttctgtctaaattgaagaatttttttatcacaaatcctcagatttcttgatctccagatcccccgaatcaatggtctctcatcgcatggaagattcaggaaaaaaaatcagagtttctcttctttggaaaggaaacacatactctgttgagatcgattctggagcttctctgaaagatttacgttacgaattgagaaagttaaccggcgtttcatcggagacgcttcgtttgatcgttccaagggtgaatgaaatacgatcaagcttgatgttacccttttctgatgaacactcgagcttgagtttgcaggaatcaaacatcattgaggatgaaactatcagaatgatgggagtgtctgaagaagaggtcgaaggtgtcctaaaagaggcagtgtctgacatgaggattctttgctttgaggaagatgaaagaacgcctcctcaaaaaaagtcgcatgtttcgcgcgccttcctttaagctttccgcaaggggacttaccattcttctgggggatttttccgccacttttttcagacttccccgggttgttaggagtttaaaaccccttcccgccctttctggcttggc

SEQ ID NO: 94486 - DNA, 639 bp, Arabidopsis thaliana columbia
  unsure (1)..(639): unsure at all n locations
acggacgcgtgggcttcagcttcgaccattttcgtcttcttcattcagtgttgagtccgcgtttacctgtgagctcgaagaaagtgacgatcaatgggaaccctaggcagagcattttactcggtcggtttttggatccgtgagactggtcaagctcttgatcgcctcggttgtcgccttcaaggcaaaaattacttccgagaacaactgtcaaggcatcggacactgatgaatgtatttgataaggctccgattgtggacaaggaagcttttgtggcaccaagcgcctcagttattggggacgttcacattggaagaggatcgtccatttggtatggatgcgtattacgaggcgatgtgaacaccgtaagtgttgggtcaggaactaatattcaggacaactcacttgtgcatgtagcaaaatcaaacttaagcgggaaggtgcacccaaccataattggagacaatgtaaccattggtcatagtgctgttttacatggatgtactgttgaggatgagacctttattgggatgggtgcgacacttcttgatggggtcgttgttgaaaagcatgggatggttgctgctggtgcgctttgtacgncaaaacaccagaattccttctggagaggtatnggg

SEQ ID NO: 94487 - DNA, 498 bp, Arabidopsis thaliana columbia
  unsure (1)..(498): unsure at all n locations
cagctannnnnnnnnnnnnnnnnnnnnnnnnnnnnnnnnnnnnnnnnnnnnnnnnnnnnnnnnnnnnnnnnnnccacgcgtccggaaaaaccctagaaaccattacttatctctcccactggctctgtctctgtcaaatctcggatcgatttcgcggtgggctcgattcgtgattcctcaaagttcatcatccctaaggcactgtcacttaatggcatcggaatcgaaaagctacgctaggagagatcgtcttcttgagattgaggccactgttcgaaagtggtgggaagacgaggatgtattcagagccgaatcttgtgagaatcttccaaaaccaggagaaaagtttttctcaaccttccctttcccgtatatgaatggttatctacacattgggcatgccttttcattgtccaaggttgattttgcttctgcttaccataggctaagaggacctagtgggcttcttcctttgggttcccattgccccggaatgcc

SEQ ID NO: 94488 - DNA, 462 bp, Arabidopsis thaliana columbia
  unsure (1)..(462): unsure at all n locations
cgggggggttgggtttcttctcccttcctacatcctctctcttctctttctctacactttcatctaatggccggcctgagatggagagagtggtggaacacgatggccttccccacccggcgtatctggaatcgtttcaccgttcgcgtcgggtttcgacacagcggacttttgaggttagaacatgacgtgagttcttgcgagtatgaagacatacacataatgtggaatttgttacacaagaatgaagatcttacacgcgtaccaatccaacaacaacaacaacagaggaagaaaccttgttggaatcttcttggttcgtatctttgccaaagattctgatccgttttatgatataaaccaaaccattgttgtatttgagagagccttgacggggtcccttgcagtgtggtgtggtttttttnncaatttcgnaantaannnatccggggttnngggttt

SEQ ID NO: 94489 - DNA, 585 bp, Arabidopsis thaliana columbia
  unsure (1)..(585): unsure at all n locations
acacttcaaccccagagaatttctagttgcttgcgaaatgcagaagtgaagtgtgtaaggagcttggaataccggaggagcaatgtgagctatctatgggaatgtctggtgactttgaactagcaattgaactgggaagcacaaatgtgagaataggatctactattttcggggcgagagagtatcctaagaagtaatgatgtaaactactgagtgatgagattgattctaagtttgaacatcaaaaccagtttcagggaagaataagagcttaggttttaatgttgaaatcatgtagatcttctctcttcttttgttttgcattgtatttggtgatgttgcttgtaagttgtaaccaaggtacattattactatttttctaatttcatggatataaacacatgaaagaagaatatagaatcttgtctttgctacgttactagtgagaagtagttaaaagggtgtcacaaccacttgttactattcaaaaaaaaaaaaaaaaaaaagnnnnnnnnnnnnnnnnnnnnnnnnnnnnnnnnnnnnnnnnnnnnnnnnnnnnnnnnnnnnnnnnnnnnnnnnnnnnnn

SEQ ID NO: 94490 - DNA, 556 bp, Arabidopsis thaliana columbia
ttgcagagcttgaaggtgttgttaaaagtgctacatcatatgcattaaacagacaactaagcatggatgatcttacaaagcctgtggaagaagagaatatcaagatcactatggaggattttctccacgctatctatgaagttcaacctgcatttggagcctccacagatgacctagagcgctgcagactcaatgggatggtagattgtggtcatcggcataatcacatttacaaaagagctatgcttctagtcgagcaagttaaagttagtactagaagtcctctagtcacttgccttctggaggggcccagtggaagtgggaaaactgctttagcagcaacaattggtatcgatagtgacttcccatatgttaagatagtttctgcggaaactatgattggtctttctgagagcacaaaatgtgctcacattgtcaaggtctttgaggatgcatataaatctccaatgagcatcattatccttgacgatattgaaagattgttggaattcatagcaatcggtcctcgcttttcaaacataatttcacagacgct

SEQ ID NO: 94491 - DNA, 525 bp, Arabidopsis thaliana columbia
  unsure (1)..(525): unsure at all n locations
atttttataagatatcttcacatacacaaaaacatttattgtacagtgcacaagtgatcgaatatttgattctttttcatgatcagagatctgatctaaatggagtatgaccgtacgttgaacttgattccatacggactacaaggagtaagagaggaggaagaaatcgaagaagacgatgaagagagcatgacgttgtcgtcagtaccagaaaacgaaacgtcggagtgttcttcgcctccggcgacgtatcctccaatccctcctcggcctaaaacaccgagagagccgatggagtttctatgcagatcatggagtccttctacttctgagatctctttagctttatcatctcagaaatctgataaacaactcaacaaaaaccctaatatttttcagtttggccgattgtcacctttctcttgggctcccgttagcaccacccaccggcgcttaacaaacgggaaacgctagcgagtgcgggttcacgcgcngaagancggggaccgtttcggaaanttggtt

SEQ ID NO: 94492 - DNA, 449 bp, Arabidopsis thaliana columbia
gaaatgctccgcctgcttcattcggtttggactcttctctatacttgtcgtctcctatcatcgcaattcatcttcccccgtctggtgtgttaaaccggagaaatttggagtttcgccggaatcttcctctgtctattgcataattgcctctgtctctgatcaaaagttgatcgtacttggattcccgatctcttccttctagattaggtcctggaatcggcttcttaggtgctcctcgctttcactgcccccgatctcttccttctcaattagggcaagaacgagcggacgtcagagaatcaattacgattctgagatgatgaactcgaggattacatggatcatcatcaagcgaacaggtatgaaaagatgggaacgatgaatgattttggtttctcgaagaagaaggacgtgagaatagagcgtattttgatttgtcatgaatgaag

SEQ ID NO: 94493 - DNA, 459 bp, Arabidopsis thaliana columbia
  unsure (1)..(459): unsure at all n locations
tatttttccgttaattgttgttgttatcttcaacgatagcgttgtgctctggagaagtgtttgatcgcagaaaagcttcgttctttgtagtctacaggtttgatcactgagttcttaactncttttttggtttgattgcgatcctgtactttcgtttagattacttaaaggttgggtctttaacatgatcgactgatagatttgtgggaattttgataatctgagttccagagtttgggaattgatgatttgatttgagtgttaaatttgttttgatggttgtctgattggtgtcacccatttgtaatgtgtgtgtaggcgtggaaaggaattgcaaaaaagctccgtttcaagcaagagcatgacctttgggaaggagaaggggcagaggcttctaggnttngaggggaagtatcccnataaggatncccggtgattttntnnnaaggcttagaaggg

SEQ ID NO: 94494 - DNA, 684 bp, Arabidopsis thaliana columbia
  unsure (1)..(684): unsure at all n locations
cnnnnnnnnnnnnnnnnnnnnnnnnnnnnnnnnnnnnnnnnnnnnnnnnnnnnnnnnnnnnnnnnnnnnnnnccacgcgtccgcggacgcgtgggcaagactccaagggactgggactccgtgctctgaccaagtcccagcttgatgaaattcttacacctgctgcatgcacgatcgtttcatctctctccaacgatcaattggactcttacgtactctctgagtccagcttctttgtctacccctacaaagtcatcatcaagacttgcggtaccactaagctcctcctctctatcccaccacttctaaagctggctggtgagctctctctgagtgtcaagtctgtgaagtacactcgcggctccttcctctgccccggaggccagccttttcctcaccgcagcttctctgaagaagtctctgttcttgatgggcactttactcagctgggcttgaacagcgtagcctacttgaatgggcaatgatgatgagactaagaaatggcatgtctatgctgccctctgccccagggactccagcaactgcaaacaaccaaatggnctacantcttcgagaattgtgcaattaatttggtcctggccaanaggggaaaggnttgnctgtntnnttnaaagggtttnaaggtttncaaaggncttgggggcaaatngcctgataaacttt

SEQ ID NO: 94495 - DNA, 627 bp, Arabidopsis thaliana columbia
  unsure (1)..(627): unsure at all n locations
acttatataaaggcactctttctacctttctttttttcctaacaacccattttattggttcagcattaccaaatcatcaacttaatcgtttctctcaaatttagggttttctcttttctcgaaagtcttgcggttttctgaatcatctctatctggtttgagggtttcgtttgatatctggagaaaggggtttctggaaacaaggagttcataattcgcgatcttgatctatcgatcttcatttatatataaaagcgtgaatgagattatgatggagtcgaaaggtggtaaaaagaagtccagcagtagtagttccttattttacgaagctcccctcggttacagcattgaagacgttcgtccaaacggtggaatcaagaaattcaaatcttctgtctactcaaactgctccaagaggccatcctgagtaccagcgtgcacccgatcttcataatataggttatagctttcctttactttcccaggtttaaattttcttctttcaaaaggccccttttctgcctggttcccggacccaatcggtcttttcccccactaaaagccctttgggtacaaaaaagggggggtgtggcctttattcaaatgggtttgaggnncgggaacggc

SEQ ID NO: 94496 - DNA, 651 bp, Arabidopsis thaliana columbia
  unsure (1)..(651): unsure at all n locations
taggagcacactatagaagagttatgacgtcgcatgcacgcgtacgtaagctcggaattcggctcgaggcgttgtgctctggagaagtgtttgatcgcagaaaagcttcgttctttgtagtctacaggcgtggaaggaatggcaaaaagctcgttcaagcaagagcatgacttagagaagagaagggcagaggctgctaggattagagagaagtatcctgataggattccggtgattgttgagaaggctgagaagagtgatataccaaccatcgacaagaaaaagtacctagtcccggctgatctgactgtggggcagtttgtgtatgtcattcgcaaaagaatcaaattgagtgcagaaaaggctatcttcatattcgtggacaatgttcttcctccagcaggtgcgctcatgtcttctgtgtacgcaagaggaaaaaggatgatgatgggttcctctatgtcacttacagcggagaaacccatttggatttggtccccntaatagnggccctttnctggntattccatttacccccctcaattttccccaatnttcanctnctattaattccttggagaagncccctttgccttttcntnaggcctttgcggggtaantgtcngacntaatatgttnacnncttaaaat

SEQ ID NO: 94497 - DNA, 683 bp, Arabidopsis thaliana columbia
  unsure (1)..(683): unsure at all n locations
gccggaccaaagcctccnatntgnaccccgctttgatcgcccctgcggactactcgatgccctcaattgaaggggatgcaatctccacgacccatgtgccccctgaagatgggttttcgctacgctaccttcgaagctgtgggttccggcttcaccccccttgcccttagccacctggtgccaagggttctctcttgcttcgagcccaagcaattctctgtagctgtgcactcgagcgttggagcgaactcatacaagcccagagattactgtagacttggaagactatgggtgcagagagaggacatttgagtctctaggagaagagagtggaacagtgatgtatcagacgtttgagaagcttggtaagtactgtggatcgcctagatctaccttgaagtgtgcaatggagcagcaacaatagctgcagcagcgaggacgagaaggacgagggaatctagcagaatttttcctcctaataaccaattttcgagccttcctggttttggccttcctttttaaaaaaccttattaaggtcttatgcaataatgccttgtgaagtttgaggccggcccctcacaaangggggccgggaatncctgancccggggngccccaagcctanaangggcnccnccccgggggggcccancnttttncccccnangnaggggaaatttna

SEQ ID NO: 94498 - DNA, 813 bp, Arabidopsis thaliana columbia
  unsure (1)..(813): unsure at all n locations
tttaatttccgggtcgccccacgcgtccgtatcttttcgttaattgttgttgttatcttcaacgatagcgttgtgctctggagaagtgtttgatcgcagaaaagcttcgttctttgtagtctacaggcgtggaaggaatggcaaaaagctcgttcaagcaagagcatgacttagagaagagaagggcagaggctgctaggattagagagaagtatcctgataggattccggtgattgttgagaaggctgagaagagtgatataccaaccatcgacaagaaaaagtacctagtcccggctgatctgactgtggggcagtttgtgtatgtcattcgcaaaagaatcaaattgagtgcagaaaaggctatcttcatattcgtggacaatgttcttcctccagcaggtgcgctcatgtcttctgtgtacgaagagaaaaaggatgatgatgggttcctctatgtcacttacagcggagaaaacacatttggatttggatctccataatagagacctcttgctggatatttcattttactcctctctattttcaccaaatatttcatcttcttattaattactaagcaagcaagccacctatgtacttattctctaaggacctttggtcgggcgttaatatgtacagaaaacataaaataatgtatataatcttctttcaaggaaaaaaaaaaaaaaaaaaaaaaaaaaagggaggatcnnnnnnnnnnnnnnnnnnnnnnnnnnnnnnnnnnnnnnnnnnnnnnnnnnnnnnnnnnnnnnnnnnnnnnnnnnnnnnnnnnnnnnnnnnnnagatcat

SEQ ID NO: 94499 - DNA, 1089 bp, Arabidopsis thaliana columbia
agcgctacacgactcactatatggaaagctggtacgcctgcaggtaccggtccggaattcccgggtcgacccacgcgtccggccccggaggccagccttttcctcaccgcagcttctctgaagaagtctctgttcttgatgggcactttactcagctgggcttgaacagcgtagcctacttgatgggcaatgatgatgagactaagaaatggcatgtctatgctgcctctgcccaggactccagcaactgcaacaacaatgtctacactctcgagatgtgcatgactggcctggacagagagaaagctgctgtcttctacaaggatgaagctgacaagactgggtcaatgactgataactctggaatcagaaagatccttcccaagtctgagatctgcgactctgaattcgagccctgcggctactctatgaactcaattgaaggggatgcaatctccacgatccatgtgacccctgaagatgggtttagctacgctagcttcgaagctgtgggttacgacttcaacacccttgaccttagccaggtggtgacaagggttctctcttgcttcgagcccaagcaattctctgtaactgtgcactcgagcgttgtagtgcattcatacaagccagagattactgtagccttggaaacctatgggtgcagagagaggacatttgagtctctaggagaagagagtggaacagtgatgtatcagacgtttcagaagcttggtaagtcctgtggatcgcctagatctacctccaagtgtgaatggagcagcaacaatagctgcagcagcgaggacgagaaggacgagggatatctagcagaatttttcttcctaataactattttcgagctttctgtttttgttctttctttttaaaaaacttattaggttcttatgaataatcacttgtgaagtttgagttcgtctccttcacaagcaagttgtattggtgttttctactttatcaatatgggttttatatgcctaaagccttgttatgttattattcttaaaaaaaaaagcaaagggcggccgctctagaggatccaagcttacgtacgcggacatccacgtg

SEQ ID NO: 94500 - DNA, 2020 bp, Arabidopsis thaliana columbia
  unsure (1)..(2020): unsure at all n locations
nnnnnnnnnnnnnnnnnnatacgactcactttagggaaagcacgtacgccctgcaggtaccggtccggaattcccgggtcgacccacgcgtccgctctcattgcttcatcattaccaaatcatcaacttaatcgtttctctcaaatttagggttttctcttttctcgaaagtcttgcggttttctgaatcatctctatctggtttgagggtttcgtttgatatctggagaaaggggtttctggaaacaaggagttcataattcgcgatcttgatctatcgatcttcatttatatataaaagcgtgaatgagattatgatggagtcgaaaggtggtaaaaagaagtccagcagtagtagttccttattttacgaagctcccctcggttacagcattgaagacgttcgtccaaacggtggaatcaagaaattcaaatcttctgtctactcaaactgctccaagaggccatcctgagtaccagcgtgcaccgatcttcataatatagttatagctttctttactttccagtttataattttcttctttcaaagctccttttctgctggttcccggatccaatcgttctctcctcctactacaagtcctgtcgctcacacaacaaggcgagatggccttatctgcaatcggtttcgaaggttacgagaaacggctcgaggtgactttctttgagccaagcatctttcaagactccaagggactgggactccgtgctctgaccaagtcccagcttgatgaaattcttacacctgctgcatgcacgatcgtttcatctctctccaacgatcaattggactcttacgtactctctgagtccagcttctttgtctacccctacaaagtcatcatcaagacttgcggtaccactaagctcctcctctctatcccaccacttctaaagctggctggtgagctctctctgagtgtcaagtctgtgaagtacactcgcggctccttcctctgccccggaggccagccttttcctcaccgcagcttctctgaagaagtctctgttcttgatgggcactttactcagctgggcttgaacagcgtagcctacttgatgggcaatgatgatgagactaagaaatggcatgtctatgctgcctctgcccaggactccagcaactgcaacaacaatgtctacactctcgagatgtgcatgactggtctggacagagagaaagctgctgtcttctacaaggatgaagctgacaagactgggtcaatgactgataactctggaatcagaaagatccttcccaagtctgagatctgcgactttgaattcgagccctgcggctactctatgaactcaattgaaggggatgcaatctccacgatccatgtgacccctgaagatgggtttagctacgctagcttcgaagctgtgggttacgacttcaacacccttgaccttagccagctggtgacaagggttctctcttgcttcgagcccaagcaattctctgtagctgtgcactcgagcgttggagcgaactcatacaagccagagattactgtagacttggaagactatgggtgcagagagaggacatttgagtctctaggagaagagagtggaacagtgatgtatcagacgtttgagaagcttggtaagtactgtggatcgcctagatctaccttgaagtgtgaatggagcagcaacaatagctgcagcagcgaggacgagaaggacgagggaatctagcagaatttttcttcctaataactattttcgagctttctgtttttgttctttctttttaaaaaacttattaagttcttatgaataatgacttgtgaagtttgagttcgtctccttcacaagcaagttgtattggtgttttctactttatgaatatgggttttatataccaaaaaaaaaaaaaaaaaaaaaagggcggccgctctagaggatccaagcttacgtacgcgtgcatgcgacgtcatagctcatctatagttcgcctcaannnnnnnnnnnnnnnnnnnnnnnnnnn

SEQ ID NO: 94501 - DNA, 1954 bp, Arabidopsis thaliana columbia
  unsure (1)..(1954): unsure at all n locations
cnnnnnnnnnnnnnnnnnnnnnnnnnnnnnnnnnnnnnnnnnnnnnnnnnnnnnnnnnnnnnnncggaatttccacgcgtccgcgcctttattgactgagagaaagcttttgacaatgggccacagacacagcaagtccaaatcctccgatccgccaccgtcctcctcctcctcttcctccggcaacgtagtccaccatgttaaacctgccggagaacgccgcggatcatccggttccggaaccgtcggatcgtcaggctccggaacaggcggatctcgttccaccacatctactcagcagaatggtcggatcttaggtcggccgatggaggaagtacggagaacctatgagtttggtcgtgagcttggtcgtggccagtttggtgtcacgtacctcgtaactcacaaagagacgaaacaacaggtcgcttgcaagtcaatccctacgcgccgccttgttcacaaagacgacattgaagatgttcgccgtgaagtccagattatgcaccatctcagcggtcaccggaacatagtggacttgaagggagcctacgaggacagacactctgtgaatctgataatggagttgtgtgaaggaggggaattgttcgataggatcatttctaaaggtctttactcagagagagctgctgcggatttgtgtaggcagatggtgatggttgtgcatagttgtcattctatgggtgtaatgcaccgagacttgaagcccgaaaactttctctttcttagtaaagatgagaactcaccattgaaagctacagactttggtctctctgtcttcttcaagccaggtgataagtttaaggatcttgttggaagtgcatactatgttgccccagaagttctaaaacggaactatggaccagaggctgatatctggagtgctggtgtgattctatacatccttctcagtggtgttccgcctttctggggagaaaatgaaacggggatctttgatgccattcttcaagggcaacttgatttttcagctgatccatggccagcactatcagatggtgccaaagatcttgtgaggaaaatgttaaaatatgaccctaaagatcggcttacagctgcggaagtgctaaatcatccgtggattagagaagatggggaggcatcagacaaaccgcttgacaatgcggtgttatccaggatgaaacaattccgggcgatgaacaaactaaaaaaaatggccctgaaggttatcgctgagaacctttctgaagaagaaatcattggtcttaaagagatgttcaaatctctagacactgataacaatggaatagtcaccttggaggaattgagaaccggtctcccaaaacttggttcaaagatctctgaagctgaaataaggcagttaatggaagcagctgatatggatggagatggatcaattgattacttggagtttatatcagccacaatgcatatgaacagaatcgaacgtgaggatcacttgtacaccgcattccagttctttgacaatgacaacagcggctacataacaatggaagagctagagctagccatgaagaaatacaacatgggtgatgataaatccatcaaagagatcattgctgaagtagacaccgatcgtgacggaaaaatcaactacgaagaatttgtagcgatgatgaagaagggaaatccagaattggtgccaaaccgacgcagaatgtgagagatcttttgatgttgtttgtttgtttttggttatcactttactcaaactttgtgtttctgttacaatcaattattttgtttcctgcaatctctttttatcaacacaacataaaaaatactttgagatcagaaagccatttgcaggtttggttaaaaaaaaaaaaaaagnnnnnnnnnnnnnnnnnnnnnnnnnnnnnnnnnnnnnnnnnnnnnnnnnnnnnnnnnnnnnnnnnnnnnnnnnnncatt

SEQ ID NO: 94502 - DNA, 416 bp, Arabidopsis thaliana columbia
gaaactagaaaacgcctatctctgctcattggcttctccatctccgatcaaatccgcggtcgtagtcagagagagagacaaatggctatgcctagggcaacctctggtcccgcttacccggagaggttctacgctgctgcatcttatgtcggtctcgacggatctgattcgtcggcgaaaaacgtcatctcgaaattccccgatgatactgcactacttctctatgcgctataccagcaggctactgtaggaccatgcaacactccgaaacctagtgcctggagaccagtggagcagagcagatggaaaagttggcaggggctcggaaccatgccctccattgaggcaatgcgtctctttgtgaaaattctggaggaagatgatcctggttggtattcgagggcatctaatgatat

SEQ ID NO: 94503 - DNA, 566 bp, Arabidopsis thaliana columbia
ccccctcgatgtcgacggtatcgcataagcttgatatcgaattcgcggccgccgcggtcgtagtcagagagagagacaaatggctatgcctagggcaacctctggtcccgcttacccggagaggttctacgctgctgcatcttatgtcggtctcgacggatctgattcgtcggcgaaaaacgtcatctcgaaattccccgatgatactgcactacttctctatgcgctataccagcaggctactgtaggaccatgcaacactccgaaacctagtgcctggagaccagtggagcaaagcaaatggaaaagttggcaggggctcggaaccatgccctccattgaggcaatgcgtctctttgtgaaaattctggaggaagatgatcctggttggtattcgagggcatctaatgatattccagatcctgttgtagatgtccaaattaatcagagagcaaaagatgagcctgttgttgagaatgggagcacatttagtgagacaaaaacaatttctacgggggatggacgtttggctgtaacccaagataaagatgtagtctcagaagact

SEQ ID NO: 94504 - DNA, 499 bp, Arabidopsis thaliana columbia
  unsure (1)..(499): unsure at all n locations
aaggggccgggttggtttnccccggttnggcttgcnaactgngcaccntcccaatggttttcaaagctgccatcgagctcggtgtcaccgacactctctacttagctgctcgtgatgacggtcaccggatccagttccttcctcacaccttctgagatagctattaggctccccacaaaacctagtaaccctgaagcaccagctctgttggatcgtattcttcgtttacttgctagctactccatggtcaagtgccaaattatcgatggtaacagagtctacaaagcagagccgatttgtcgatatttcttgaaagataatgttgatgaagaattaggaacacttgcttctcaacttattgtcactctcgataccgtcttcctcaatacatggtaactttcttttcaagattcactctctttcgatttctaatattagatccatatatcaagaatttggagattgatgtttttttgcatggggggaatttaaaaaatca

SEQ ID NO: 94505 - DNA, 743 bp, Arabidopsis thaliana columbia
  unsure (1)..(743): unsure at all n locations
aaatagcaataattttttattaaatatcttttacatcaaatatctctataagcctcgtctttaaaaccagacacagaaactcctcactttcgaaaaaaacaagatcattacacaaaaatgggacacctaattcctcaaaccggagatgaagagaccgagcttggtttagctgcggttaggctagctaactgtgcagccttcccaatggttttcaaagctgccatcgagctcggtgtcatcgacactctctacttagctgctcgtgatgacgtcaccggatccagttccttcctcacaccttctgagatagctattaggctccccacaaaacctagtaaccctgaagcaccagctctgttggatcgtattcttcgtttacttgctagctactccatggtcaagtgccaaattatcgatggtaacagagtctacaaagcagagccgatttgtcgatatttcttgaaagataatgttgatgaagaattaggaacacttgcttctcaacttattgtcactctcgataccgtcttcctcaatacatggggaggattaaaaaattgtggtacttgaaggaggagttccatttggccgtgccaatggggggtttgaaactctttgcctatattagcaaagatgatggttnagcaaanntttacccgncccggattctnttcnggggttttnaaagancctcaaanttnnggtgggtncgaagggtaatgtgttggttnttagggggngtc

SEQ ID NO: 94506 - DNA, 716 bp, Arabidopsis thaliana columbia
agaacaagcagaggaatataactttttttttctttttcctttttgcttttttacaaccaaaaaaataaagcaagccgtagagagcaagagacggtgtaaagatgcactacacacgcatctcgccggctttagtaccatctctatcaccaaccgccgcggctgaatctagcggtggtgggacgatgatagctactgttttcatggcccttctcctcccctgcgtcggcatgtgcatcgtcttcctaatctatctattcctcttgtggtgctccacacggcgtcgtatcgaacgccttcgatttgctgaaccggttaaaccggtcacaggtaaaggcctttcggtgttggagctcgagaaaatccctaaactcaccggaagagagctagccgtaatagctagatcaacggaatgtggctggtttgccttgaagatatagagagtgggcaatcgactcggctagttcccggttgcaaccatggggttcaccaattatgggctgatacggggcgatctaaccacacggtttgtccagtttcccgggccgagcgggccccgcacctacctcaatgtaatgaaaatcaaagtccatgttagaaacagaattttcaaaaacattctttccttcttttttactcgttttgtgtacttctcttgtttttcccttttcttagttttgtgtaagcgttatagagaaaaaagtttccaggttgtaact

SEQ ID NO: 94507 - DNA, 864 bp, Arabidopsis thaliana columbia
  unsure (1)..(864): unsure at all n locations
nnnnnnnnnnnnnnnnnnnnnnnnnnnnnnnnnnnnnnnnnnnnnnnnnnnnnnnnnnnnnnnnnnnnnnnccacgcgtccgctctaatggctacaacaaccacatcatgggaagaactcttaggctcaaagaattgggacactatcttagacccattagaccaatcacttagggaactcatcttacgttgtggcgacttttgtcaagccacctacgatgccttcgtcaacgaccaaaactccaagtactgtggagccagccgctacggcaaatcttctttcttcgacaaggtcatgctcgaaaacgcttccgactacgaggttgtaaacttcctctacgccacagctcgtgtttctctccccgaaggtttgcttctccaatcacaatcaagagattcttgggaccgtgagtctaactggtttggctacattgctgtcacgtctgatgaacggtctaaggctttaggacgccgtgagatctatatagctttgagaggaacgagcaggaactatgagtgggtcaatgttttgggtgctaggccaccttcagctgaccccttgctgcacggacccgagcaggatggttctggtggtgtagttgaaggtacgacttttgatagtgacagtgaagatgaagaagggtggaaggtgatgctcggggggctcacaatctatacttctaatcaccccgaatcgaaattcactaagctgagtctacggtcacagttgttagccaagatcaaggagcttctgttgaagtataaggacgagaaaccgagcattgtgttgactggacatagcttgggagctacagaggctgttctggccgcctatgatatagctgagaacggtccagtgatgatg

SEQ ID NO: 94508 - DNA, 415 bp, Arabidopsis thaliana columbia
ctacagagctcgcagcaactagcgcaggatgttggagaaggttgaaactttcgacatgaacagagtcattgatgaattcgatgaaatgactagaaacgctcatcaagtccagaaacaaactttgaaagagattcttctcaagaaccaatccgccatttacttacaaaactgtggtctcaatggaaacgctactgaccctgaagaagctttcaaatctatggttcctttagtcactgatgttgaattagagccttacatcaaaagaatggttgatggtgacacttcacctattctcactggtcaccctgttcctgccatttccttaagctctggaactagtcaaggccgtccaaagtttattcctttcactgatgaattaatggagaacacattgcaactgtttcgcactgctttt

SEQ ID NO: 94509 - DNA, 572 bp, Arabidopsis thaliana columbia
  unsure (1)..(572): unsure at all n locations
gaaaagagagagagagatctctggctctgtatcgctcgctgctcttcctcccacagatcgaaaaccatgaatcctgagtacgactatcttttcaagctcctgcttatcggggattctggcgtaggcaagtcttgtcttcttttgagattctctgatgattcttatgtagaaagttacattagcactattggagtcgattttaaaattaggactgtggaacaagatggcaaaacaattaagctccaaatttgggacactgctggtcaagaacggttcaggactattactagcagttactaccgtggggcacatggaattattattgtctacgatgtcacagatgaagaaagcttcaataatgtcaagcaatggttgagtgaaattgatcgttatgctagtgacaatgtcaacaaactccttgttgggaacaagtctgatcttactgaaaacagagccattccttatgaaactgccaaggcttttgccgatgaaatcggggttcccttttatgggggctaggtgcaaaagatgcttcaaaacggtngnccagggtttcatnggcaatgtntnna

SEQ ID NO: 94510 - DNA, 501 bp, Arabidopsis thaliana columbia
tcgctggagaaaaataaagagagagaaatagagagagagactctgtagaagaagcacatgaattgttctggttttatgatagctttctcttaagaagaagaagaagaaagataaattaaaagggtggttctgagttttaaggattattgtttgaaacaagaagcaagaagaagaagaattgaagaataaaaaagatggagttatctgattgctctaatgaatatgagaagctcgttgttcggatgaacatgcccagggtcgtaattgacaatggagtttgccctaattcaactgtcgtcaagattgatagtgcaagaagcccaggaatattgcttgaatctgtacaacttctcactgatatgaatctctggatcaaaaaagcttacatttcctctgatggaaaatggaatatggatgtttttcatgtgagcgatcttaacggagacaaattaaccgacgagaacctaatccgttacattgaaaagtctattgaaacgtctc

SEQ ID NO: 94511 - DNA, 611 bp, Arabidopsis thaliana columbia
actggatgcttgctttattctgtggattttctatcattggcaagaacacttgagaaacttcagattaagagaaacatggccaagcttgagctttataggaacttcaccaatgcactcgctatctctgttctgctctctatcgcttggattggttttgagctatacttcaacggaactgaccctctaatcgaactctggcgaatggcgtggatcattccagctttttggaatttactctcttatggtctgttagcagtcatatgcatcctttgggctccatcaaataatcctacaaggtactcatacttagcggaaacaggggatgagtttgaagaggaaggtatctcattgacaggtagtggaattaagagtacagaagatgttgaaaggaatgaacttctatttgggcttccagacgacgttgaagagggcaaacgtgagtaagctccagatagcaagcgttagatagtccatacctcgccgagtagtttttagtgtatgtaaccttatgtcttttatcctttgtacctgagtaagttgtttactgacctttaaggacttgtttaccagatcgaagttcttttagtcttatagaaagatttacagactgc

SEQ ID NO: 94512 - DNA, 482 bp, Arabidopsis thaliana columbia
tcgacccacgcgccacgcataccgagtgaggttcacattaccgacaaaatggggccggctttatcatcctcctctctgtttttctcttccaagacaacttctccgatcagcaatctcctgatcccgccatctctccaccgcttctctctaccctcttcatcttcctccttttcctctctctcttcttcttcttcttcttcttcttctctcttgacattctctctgaggacttctcgaaggttatctcctcaaaaatttaccgttaaggccagctccgtcggtgagaagaagaatgtacttatagtcaacaccaacagtggcggtcacgccgtgatcgggttttacttcgccaaagagcttctctccgccggccacgccgtcaccatcttgaccgtcggcgatgaatcttccgaaaagatgaagaaacctcctttcaaccgattctccgaaattgttagcggcggaggaaagacggtgtgggg

SEQ ID NO: 94513 - DNA, 513 bp, Arabidopsis thaliana columbia
ggagtcagatacagttccctagatcgagaatctccaggcgctttgtaatacctgtttagtatatctttgtcaagttctctgtcagagatttaccgggaatcgatcagaagatatgaactgggttcaacgcaaaatctacctttataatgtcacattcgggctctacatgcttgattggtgggaacgatacctcttcaattctttggtggttgttttgatgtggttcgttttatacaacgggactcgctacttttcggagcttttccagaggcatttgacatgaaaacatgtcttgttcctcgcacagtagagcacgaaaagcctagatcatccaaaggcatgttcgtttggttccaatttctgagacgtataccatcataaatccctctttcggcgtcacctttgtttttgtcaattttcctccaacggctctaggacagcgcctatgtctctatagtatttgttcccatgtgtttgcgattaacagaaaatgttttggagactcgtaagatc

SEQ ID NO: 94514 - DNA, 529 bp, Arabidopsis thaliana columbia
gttggagggttattctcaaaagaggttttagattctatgaaaggttcaacctcgacaaggcctgctatatttgcaatgtcaaaccccacaaaaaatgctgaatgcacgcctcaagatgcattttcgatattaggcgaaaatatgatttttgcgagtggaagcccattcaagaatgtggaatttggaaatggtcatgtacgacattgcaaccagggaaacaacatgtatctatttccaggtattggacttggcactcttttatctggtgctcccattgtctccgacgggatgcttcaggccgcatccgagtgcctagcagcatacattgagcgaagaagaagtgctagaggggattatataccctccaatatcaatgatacgagacataacataaagaatagcagctgcggtgattaatgaagcgattgaggaggatttggttgaaggatatagagaaatggacgctcgagagatccaaaagctggatgaggaggggctgatggagtatgtggaatacaacatgtggaat

SEQ ID NO: 94515 - DNA, 563 bp, Arabidopsis thaliana columbia
  unsure (1)..(563): unsure at all n locations
ccgatcgtcggaaatctctgatctctctcaggatcgcttgttcgctacgcagatctcacctgccatgactcgaggaagtcaaagagagcgtgaccgtgaaagggctctagctcgaaccggaggcaaaggaaagaacaaagatgatggattaactcctgagcaacgtcgtgaaagagatgcaaaagcattgcaagagaagactgcaaagaaagctgctcaagccgctgctgcagctagttccggaggaggaggaggcaaaggaaacaataagtgagaaaaaatgatctatgcttcgatgtttgtaactgtgcttttgaatatgaaagtttggtgtttgtgttgagaatgttttggcttcgtttggtttgagtttgtatcaaaacttagacttggtgatgtactttgattaaaccaatgattactcttacaatatctatgattacaagtacatttggccaaannnnnnnnnnnnnnnnnnnnnnnnnnnnnnnnnnnnnnnnnnnnnnnnnnnnnnnnnnnnnnnnnnnnnnnnnnnnnnnnnnnnnnnnnnnnnnnnnnnnnnn

SEQ ID NO: 94516 - DNA, 1757 bp, Arabidopsis thaliana columbia
aatgccttctccaagtcagtttctttcctcattcaacagtttctcttcttcttcctctgcttaaacgaaaccctcaaagaaataaaaaaaagctctcaagaatggcgaacaaaccaagaaccagatgggttcttccttacaagaccaaaaacgttgaagacaattactttcttggtcaagtccttggacaaggccaattcggaaccactttcctctgtacccataaacagacaggtcaaaagcttgcctgcaaatccatacccaaaaggaagctcctttgtcaagaagattacgacgacgttctgagagagatccagataatgcatcacttgtctgaataccccaacgttgtccgtatagagagtgcgtacgaggacaccaaaaacgtgcatcttgtgatggagctttgtgaaggaggtgagttgtttgatagaattgtgaagagaggtcattacagtgaaagagaagctgctaagcttatcaagaccattgttggggttgttgaggcgtgtcactctcttggtgttgttcatagagatcttaagcctgagaatttcttgttttcttcttctgatgaagatgcttctcttaaatctactgactttggcctctctgttttctgcacaccaggagaagcattttcggaactcgttggtagtgcttactatgtggcacctgaggttttacataagcattatggtcctgaatgtgacgtatggagtgctggagttatcctctacattctcttatgtggttttcctcctttttgggctgagagtgaaataggcatcttcaggaagattttacagggaaagttggagtttgagatcaatccttggcctagcatttcagagagtgccaaagatcttataaagaaaatgcttgaaagcaatcctaaaaagaggctaactgctcatcaagtgttgtgtcatccgtggattgtggatgataaggttgctccagataaacctttggactgcgcggtagtgtcccgcctgaagaagttctctgcaatgaacaaacttaagaagatggctttacgagttattgcagagagactatctgaggaagaaatcggtggtctcaaagaactgttcaaaatgatagacacagataaaagtgggactatcacgtttgaagagttaaaagatagtatgagacgtgttgggtcagagcttatggaatcagagatccaagaactcttgcgtgcggctgatgttgatgagagtggaacaattgactatggagagttcttagctgcaacaatccacttgaacaagctggagagagaggagaatctagtagctgcattctctttctttgataaggatgcaagtggttacatcactatcgaagagcttcaacaggcatggaaggagtttggtataaacgattctaatcttgatgaaatgatcaaagacattgatcaagataatgatggacaaatagactatggagaatttgtggcaatgatgaggaaaggaaatggcactggaggagggattggtcggagaactatgaggaactctctcaactttggaactactcttcctgatgagtctatgaatgtctgaagtactcatttttagtgaaaataatttagcgactttatggagcaaaacatgtcatatgatacaacttgctgtttctgcttactctaattctgcttttaacaactcttagtaattgaaattgtaagctctcaacaatttgtagaattttcccatggattttaccatatctcagagctttagaga

SEQ ID NO: 94517 - DNA, 857 bp, Arabidopsis thaliana columbia
  unsure (1)..(857): unsure at all n locations
taggaacactatagaagagctatgacgtcgcatcgcacgcgtacgtaagctcggaattcggctcgagctttgacaaaaccagggaaagagacagagagagataatggcggctaaactaatctgttcgtctttaacagtgcattcaatggcaaataagaagccatcaccttctgctgcaacaagaacaataacctcaaagaagagcacagcgactccacaggtgaaactgctgacaagagtcgagcagctcaagcttctgaccaaagccgagaaagcaggacttttgtctttagcagagaaatcaggtttctctctatcgaccatcgagcgtcttggattgctgaccaaagcagaggagttcggcgttttgtctgccgccacaaacccggaaacgcctggaacgttattcactttgagcctcggtttactccttcttggaccggtttttgcatatgtggttcctgaagattacacttgggaagtagtgattcaggttcttgtggctctactctctgttcttggtggctctgctgcttttgctgcttctggttttgtctccaatttgcagaaatctgattagcccgatcgtttttttttttgtatcaaatatatttacccggtgtagcaagagacttttctgcatttaagatgaaaactttataatgtatttgatctacattgtatcaaccagtcattttcactattttctatctatgtaaatggtttcatatacagaaaaaaaaaaaaaaaggnnnnnnnnnnnnnnnnnnnnnnnnnnnnnnnnnnnnnnnnnnnnnnnnnnnnnnnnnnnnnnnnnnnnnnnnnnnnnnnnnnnnnnnnnngtagnnnnnaaatca

SEQ ID NO: 94518 - DNA, 561 bp, Arabidopsis thaliana columbia
  unsure (1)..(561): unsure at all n locations
atcgagagatgttgagatctaatcctaataattcgcttctcctnatgaattacggcaagtttttgtatgaggtggagaaagatgcagagggagctgaagagtactatggaagagcaatactggagaatccaggagatggagaagctttatccatgtatggaagattgatatgggaaacgaagagagatgagaagagagctcaaggttactttgatcaagctgttaatgcttctcctaatgattgtatggttttgggatcatatgcacgtttcatgtgggaggcagaggatgatgatgatgatgatgaagaagaagaagaagaagaatggatggctgcatcaccactcatggtttctgcagtttagagactaacccgacgaagatgaagaagaagtaatggagactaagattatgtatcaagtatcacccttttttttttgtctatttcactgtctttttactaacttttgttgttataacctgaagtgttttgaatacatgtttgttgaaagtaaacgtatgttacctttttataagagaattatagtgcttctgtttttt

SEQ ID NO: 94519 - DNA, 469 bp, Arabidopsis thaliana columbia
  unsure (1)..(469): unsure at all n locations
aaaacgttaaaaataccaaaatttagaaatccaataaaagttgtgaaaaaaagccgcaaagggtcgttgttgtttgtcgcctctcaatggcagcttcttcaactaatgctcgtctcaccaaccctcctcgtctactctccaaaccccgactttcacctacctccgtcgccaatctccgttttccagccgccgatttctccactcgcttctttgccgattcttcgtccccgcggctaaggagtgtaccgtttccggtggtattttccgatcaaaggcgccggcgaagcatgtgaacctagcaatgtctatgtggcttcaaattccacggaaatggagatcggaagtcatgatatcgtgaagaatccgagcttgatctgtgctncantgatggcggnttcaatagncangatggtgattgaaacgagtaaagcccatcgaaattgggtgcagaccttgggttgaaatttcg

SEQ ID NO: 94520 - DNA, 571 bp, Arabidopsis thaliana columbia
tttgattcaatcactcaccggagaagaagaagaagctatgccggtggtcaaagctccgctcggtggctactctgggaaattcagtccattctacgagtcacgcctcgccgtcgctacagctcagaacttcggaattctcggaaacggccgaatccatgtcctcgagctcgctcctggagctccaggcgtaactgaatccgtctcgtacgatacagccgacgctgtatacgacgtatgttggtcagaatctcatgactctgtgctcatcgccgcaattggtgacggctcagtgaagatttacgacacagctcttcctcctccttctaatccgattagatcattccaagagcacgcgcgtgaggttcaatctgtggattacaatcccacgcggcgcgattcgtttctcacttcttcgtgggatgatacggttaagctttgggctatggatcgtccggcgagtgtaaggacttttaaggaacatgcttattgccgttatcaagcagtctggaattctatacatggtgatgcgtgggcttcagctgatggatgattgtacattaaggacttgggg

SEQ ID NO: 94521 - DNA, 407 bp, Arabidopsis thaliana columbia
cccacgcgtccggtttttttgtaataccatcaatgtgtgtttaaagaaaggcctcttgtgtatctgcacgacatctcaaacaaaaccaatcaataaaaacaagaaacaatcttctttctcatggacagatctcaagaacactatgccaatggtgaccagaacttagatgcaaaccttatagatcatgaggtggtaactgaatcatcatcatcagctgtgcctcaaaccgagaactataaaaggtggcttcgtgtctccatagacgtaatctttgtcctcttttgccagccactagctacaattctgggtagattgtactatgaaaatggaggaaatagcacatatgtggtaacacttcttcaactcattggcttccctgtactggttctgttccgcttcttttctcg

SEQ ID NO: 94522 - DNA, 460 bp, Arabidopsis thaliana columbia
cgatcacgcggccgctcttctgtatctaaaagacatatcaaacgaaagaaatcaataaacacaatattctttcttccaaattttctcatttctcatgggcatatctcaagtacactattgcaatggtgaccagaacttagaagcaaaccttctagatcatgaggaaactgaatcattttcagtacctcaaacgaagaactgtaagaggtggctccgtgtctccatatacgcaatctttgtcatcttctgccaaccacttgctacagttctgggtagactgtactatgaaaatggagggaaaagcacatatgtggtaacacttcttcaactcattggcttccctgtactgattctcttccgcttcttttctcgaatcaggcaacccaaatcaacagatacaaatttcagtcagtccccttccttcaccaccctttgcatcggtttacttgtgcactggact

SEQ ID NO: 94523 - DNA, 667 bp, Arabidopsis thaliana columbia
  unsure (1)..(667): unsure at all n locations
tgnccccaccngggantcggnaatttcggngacnnctgcccgaagttttgnancatggggaattcccggccggtntccngtgaggcacttcagcttctcttgtcatcggatctttcncnctcgtnatggctttgcacangaacaaggttggacaaaccccacaaccccagcgatcgagttgggacccgaattcaaaaaggtagcgagttcccttagccggttcaagtccatcccgagtatagttgagctcgatagtctttaaggtctcaggtgatgtttggtttggctccggcgttgttctcaagggcaaagtgccagtaaaggcaaacgccgggactaaacttgaaatccctgacaatgccgggctcgagaataaggacatcaacggtccagaggatctgtgaaaaaacttaaaagacttactttgaggcgtcttcttctgtttttcacttctcttgtaaatgagagcacttttgatatgaaacctctttcatgtgaaaagacccaagaataacgagagttgaatatgtttttggcagttttttttaaaaaaaaaaaaaaaaaaaaaaaaaaaaaaaaaannccccaaaaaaaaaaaaaagggcggccgctctagaggatccaagcttacgtacgcgtgcatgcgacgtcaagaatcttctatagt

SEQ ID NO: 94524 - DNA, 1208 bp, Arabidopsis thaliana columbia
  unsure (1)..(1208): unsure at all n locations
acggtcaaatgttgacattcacacttttaaccagagcaaatatccccgtgttgtggcagatgagtttgtgccatggcccagcaagggaaagaccgacaaggagggctggtatcctcccggtcatggtgatgtattcccagccctcatgaacagtggaaagctcgatactttcttatcacagggtaaggaatatgtgtttgttgccaattcagacaacttgggtgccatcgttgacttaacaatcctgaagcacttggtccagaacaagaacgaatactgcatggaggttacacccaaaaccttagctgatgtaaaggggggaactctcatttcttatgaaggcaaagtccagcttctggagattgctcaggttcctgatgaacatgtcaatgagttcaaatcaattgagaagttcaagatattcaacacaaacaacctatgggtgaacttgaaggccatcaaaaagcttgtggaagctgatgcacttaaaatggagatcattccaaacccaaaggaagttgatggagtcaaagttcttcagctggaaactgcagctggtgctgcgataaggttttttgataatgcgattggtgtgaatgtacctcggtcacggttcttgccagtgaaggcaacttcagacttgcctcttgttcaatcggatctgtacacactcgtagatggctttgtcacaagaagcaaagctagagcaaaccccgcaaacccagcgatcgagttgggacccgaattcaaaaaggtagcgagtttccttagccggttcaagtccatcccgagtatagttgagctcgatagtctttaaggtctcaggtgatgtttggtttggctccggcgttgttctcaagggcaaagtgacagtaaaggcaaacgccgggactaaacttgaaatccctgacaatgccgtgctcgagaataaggacatcaacggtccagaggatctgtgaaaaaacttaaaagacttactttgatgcgtcttcttctgtttttcacttctcttgtaaatgagagcacttttgatatgaaacctctttcatgtgaaaagacacaagaataacgagagttgaatatgtttttggcagtttaatttaatccctccaaaaaaaaaaagggcagccactctagaggatccaagctgacggacgcgtgcaaacgaagtnnnnnnnnnnnnnnnnnnnnnnnnnnnnaacgggaat

SEQ ID NO: 94525 - DNA, 1033 bp, Arabidopsis thaliana columbia
  unsure (1)..(1033): unsure at all n locations
cgagccttgaaacttttgattggtccgtctgcagtaccggtccggaattcccgggtcgacccacgcgtccgcttctggagattgctcaggttcctgatgaacatgtcaatgagttcaaatcaattgagaagttcaagatattcaacacaaacaacctatgggttaacttgaaggccatcaaaaagcttgtggaagctgatgcacttaaaatggagatcattccaaacccaaaggaagttgatggagtcaaagttcttcaactggaaactgcagccggtgctgcgataaggttctttgacaacgctatcggtgttaatgtacctcgctcacggttcttgccagtgaaggcaagttcagacttgctgctcgtccagtctgatctctacaccttagttgatggctttgtcactcgaaacaaagctagaactaacccctcgaacccgtcaattgaattgggacccgagttcaagaaggtggctactttcttgagccggtttaagtccattcctagtatagtcgagctcgacagccttaaagtgtctggtgatgtctggtttggctcttccattgttctcaagggcaaggtgactgtggcggcaaaatccggtgtgaagcttgaaattccggacagggccgtggtcgagaacaagaacatcaatggtccagaagacctctgaataaaacaaattcaagtcttcttccctctctcatggaagacacatcttgatactcctttaattggtgtgaaaagatcacaagtggcacagcaaagcaagtttatgaagaaagaataaataatgtttctttttctttttgcagcttagcaaagtcttttcctctttggactttattttaattttgctctttgaattttcccaaaacatcacatttatatgttcgattatatttgggttctatccacaatcatttttctttttgattaanaaaaanaattnnnannnnnnnattnntnnnnnnnnnnnnnnnnnnnnnnnnnnnnnnnnnnnnnnnnnnnnnnnnnnnnnnnnnnnnn

SEQ ID NO: 94526 - DNA, 519 bp, Arabidopsis thaliana columbia
  unsure (1)..(519): unsure at all n locations
nnnnnnnnnnnnnnnnnnnnnnnnnnnnnnnnnnnnnnnnnnnnnnnnnnnnnnnnnnnnnnnnnnnnnnctcaacaatggtgtttgaagcattcgaagtcggcacagtcccattcaattccgatggttggggaccaccagatgcttccgacacttcctccaccagcgtcgcggcggcgaatctcctcccaaacgtccccttcgcttccttctcacgatccgaaaaactcggacgcgttgctgattggactcgagctctctcaaatccatcagctcgtcctcacaccggatccaaatcagatccatcagcgatcttcgatttctcagcttttgcagtagatgaaggatttggtctaacaaactcaggtggaaacgccgacgaagacgccgctttccgattagtcgacggaaaaccaccgccgcgtcctaaattcggacctaaatggagattcaatcaataccattaccgaaatcagcttcctcaacgtcgtgatgaagaagttgagctaagaaacgtga

SEQ ID NO: 94527 - DNA, 566 bp, Arabidopsis thaliana columbia
  unsure (1)..(566): unsure at all n locations
ggagtccgaatgtgaatatcttgagggacccgcggtggggccgaggccaagaaactcccggagaagatcctatcgttgccgcaaaatatgccgccagctacgtccggggacttcagggtactgctgccggtaaccgccttaaagtcgccgcatgttgcaaacattacactgcttatgatcttgataattggaatggcgtcgaccgtttccacttcaacgctaaggtcacccaacaagatttagaggacacatacaacgtgccattcaaatcatgtgtttacgaaggaaaagtagcgagtgtaatgtgttcgtacaaccaagtcaatggaaagcccacatgtgctgatgaaaatctcttaaagaacactattcgtggtcaatggcgtctcaatgggtacattgtctcagattgtgactctgttgatgttttcttcaaccaacaacattacactagcactccggaagaagcccgccgccagatcccttaaaagcccgggtttgggacttgggcttgcgggcccgtttttttgggggtttttcacnggnagggtcccagttangaaagg

SEQ ID NO: 94528 - DNA, 968 bp, Arabidopsis thaliana columbia
acccctagcgtccgcccacgcgtccgaaagatctctataaataccatcattcactttctatcacatgaaaactaaaaaacacaaacatcacatgtatacacacatatagttacaaacacacatacacaaaacacagatatataaaaatgtcttgttataataaagcactattgatcggcaacaaagtcgtcgttatacttgtattcctcttatgtttggttcactcgtcagagtcacttcgaccactgtttgcatgtgatccagcaaacgggttaacccggacgctccggttctgtcgggccaatgtaccgatccatgtgagagttcaagatttgctcggaaggctcacgttgcaggagaagatccgcaacctcgtcaacaatgctgccgccgtaccacgtctcggtattggaggctatgagtggtggtccgaggctctccacggcatttccgacgttggtccaggcgctaagttcggtggtgcttttcccggtgccaccagcttccctcaggtcatcaccaccgcagcttctttcaaccagtctctatgggaagagatcggacgggtggtgtctgatgaggcaagagctatgtacaatggtggcgtggccggtctgacatattggagtccgaatgtgaatatcttgagggacccgcggtggggccgaggccaagaaactcccggagaagatcctatcgttgccgcaaaatatgccgccagctacgtccggggacttcagggtactgctgccggtaaccgccttaaagtcgccgcatgttgcaaacattacactgcttatgatcttgataattggaatggcgtcgaccgtttccacttcaacgctaaggtaaatcttcttcacatattatatatatctaatatcgtatatagtaagaaaatattttgcaatttattatcaaatttatataaccaattttgcatgttttgtttcaaagtttgtatgcat

SEQ ID NO: 94529 - DNA, 1255 bp, Arabidopsis thaliana columbia
  unsure (1)..(1255): unsure at all n locations
acggcgcatgcacgcgtacgtaagctcggaatctctatagcggctccccacgccccaaggaaaagtagcgagtgtaatgtgttcgtacaaccaagtcaatggaaagcccacatgtgctgatgaaaatctcttaaagaacactattcgtggtcaatggcgtctcaatgggtacattgtctcagattgtgactctgttgatgttttcttcaaccaacaacattacactagcactccggaagaagccgccgccagatccattaaagccggtttggacttggactgcgggccgtttttggcgattttcacggaaggtgcagtgaagaaaggattgttaacggagaatgacatcaatttagcacttgctaatacattaacagtccaaatgagacttggtatgtttgatggtaaccttgggccgtacgctaatcttgggccaagagatgtttgtactccggcccataaacatttagctcttgaagcagcccatcaagggattgttcttctcaaaaactctgctcgctctcttccactctcccccagacgccaccgcaccgtcgccgtgattggtccaaactccgacgtcactgagactatgatcggcaactatgcagggaaagcatgcgcctatacgtcgccgttgcaagggatttcaagatacgcgaggacacttcaccaagctggctgtgccggcgtggcttgcaaagggaaccaaggatttggtgcagcggaggcagcggcgcgtgaagccgacgcgacggttcttgtgatgggattagatcagtcgatagaggcagagacacgagatcgaaccgggcttctcttaccgggttatcaacaagacctagtgacccgtgtagctcaagcttctagaggtccagtcattttggtccttatgagtggtggaccaatcgatgtaaccttcgctaagaatgatcctcgtgttgctgccatcatttgggctgggtatccgggtcaagcgggtggagctgccatcgccaatatcatctttggtgctgctaatcccggagggaaactaccaatgacatggtatccacaaggtttccgtggcccaaagtgccattaacggtaatggccattaagggatccggtaattttccaggggggccattcaggtttttcaaagggccctgagttttccatttgggtcggttaagtanactccctnacttaaaggtttgccaaacccntttgnccacntttagtttcttccanttaaattttnaaatccttttna

SEQ ID NO: 94530 - DNA, 1131 bp, Arabidopsis thaliana columbia
atgttctccagctacatcgactactatagggaagctggtcgcctgcaggtaccggccggattccgggtcgcccccccgccgagggaaccaaggatttggtgcagcggaggcagcggcgcgtgaagccgacgcgacggttcttgtgatgggattagatcagtcgatagaggcagagacacgagatcgaaccgggcttctcttaccgggttatcaacaagacctagtgacccgtgtagctcaagcttctagaggtccagtcattttggtccttatgagtggtggaccaatcgatgtaaccttcgctaagaatgatcctcgtgttgctgccatcatttgggctgggtatccgggtcaagcgggtggagctgccatcgccaatatcatctttggtgctgctaatcccggaggaaaactaccaatgacatggtatccacaagattacgtggccaaagtgccaatgacggtaatggccatgagagcatccggtaattatccaggaaggacatacagattctacaaaggtccagtagtatttccatgttgggttcggtttaagttacactaccttcactcatagtttggccaaaagcccattggcccaactatccagtttcactctccagtctcacctctgccaataccattctcaactcttcatcacactccatcaaagtgtctcacaccaactgcaattcatttccggacaaatgccccttcacgtcgaagtatcaaacacaggtgaattcgatggaacacacacggtgtttgtatttgctgagccgccgataaacggaataaaaggattgggtgtgaacaaacaattgataccgttcgagaaggttcatgtcatggcaggggcaaaacagaccgttcaagttgatgttgatgcttgcaagcatcttggtgtagtggatgagtatggaaagaggagaatcccaatgggtgagcataagctgcacattggtgaccttaaacatactattttggtccaaccgcaactttgacggacgcattaaaaaacccaccaataaggaaagccttttaaccaaaaaaaaaaaaaagggcggccgctctagaggatcccagcttacgtacgcgtgcatgcgacgtcatagtcttctatatgtcact

SEQ ID NO: 94531 - DNA, 1220 bp, Arabidopsis thaliana columbia
  unsure (1)..(1220): unsure at all n locations
acgactcactatttggaaagctggtccgcctgcaggtaccggtccggaattcccgggtcgatccacgcgtgcgcccacgcgtccggaggtccagtcattttggtccttatgagtggtggaccaatcgatgtaaccttcgctaagaatgatcctcgtgttgctgccatcatttgggctgggtatccgggtcaagcgggtggagctgccatcgccaatatcatctttggtgctgctaatcccggaggaaaactaccaatgacatggtatccacaagattacgtggccaaagtgccaatgacggtaatggccatgagagcatccggtaattatccaggaaggacatacagattctacaaaggtccagtagtatttccatttgggttcggtttaagttacactaccttcactcatagtttggccaaaagcccattggcccaactatcagtttcactctccaatctcaactctgccaataccattctcaactcttcatcacactccatcaaagtgtctcacaccaactgcaattcatttccgaaaatgccccttcacgtcgaagtatcaaacacaggtgaattcgatggaacacacacggtgtttgtatttgctgagccgccgataaacggaataaaaggattgggtgtgaacaaacaattgatagcgttcgagaaggttcatgtcatggcaggggcaaaacagaccgttcaagttgatgttgatgcttgcaagcatcttggtgtagtggatgagtatggaaagaggagaatcccaatgggtgagcataagctgcacattggtgaccttaaacatactattttggtccaaccgcaactttgacggacgcataaaaaaaccaacaaataaggaaagcattttaacaaagtggagtgtttcctcttatttatataatatagagagataggtttattttcttatgaaattattactcaagaaagtatgaatttgtaaagaaccaccaaagggttgcttcttggttgtgtcttttttcctttaatttttttttggaccaaaggtattgtaacttgtggctcccaacataagaaatacaaggagcccttgtaaaatgctgaaactaaagataaatgataaatttgatatataaaggatttttagagtnnnnnnnncttttgggnnnnnnnnnnnnnnnnnnnnnnnnnnnnnnnnnnnnnnnnnnnnnnnnnnnnnnnnnnnnnnnnnnn

SEQ ID NO: 94532 - DNA, 1027 bp, Arabidopsis thaliana columbia
gtgcactatacaagagcttgacgtcgcatgcacgcgtacgtaagctcggaattcggctcgagtgtcgacccagatcagcaagaagagaaagttcgtagccgatggtgtgttttacgctgaactcaatgaggttctaaccagagagcttgctgaggatggttactctggtgttgaggttcgcgtcactcctatgcgtactgagatcatcattagagccactcgtactcaaaacgttctcggtgagaagggaaggaggattagggaattgacatctcttgtacaaaagagattcaaatttcctcaggacagtgttgagctttatgctgagaaggttgctaacagaggtctttgtgctattgctcaggctgagtctcttccttacaagcttcttggtggtcttgctgttcgtagggcgtgctatggtgttttaaggtttgttatggagagtggagctaaaggatgccaactcattgtgagtggaaaactccgtgctgcacgtgctaagtcgatgaagttcaaggatggttacatggtttcctcaggtcagccaaccaaggaatacattgatgctgcagttaggcatgttcttcttagacagggtgtgcttggtctcaaggtgaagatcatgcttgactgggaccccaagggcaaacaaggaccgatgacaccattgcctgatgttgtgatcatccatacaccgaaagaagatgatgtatacattgcacctgctcaggttgttactcaagctgcttttgtaccggaagctccattaaccaccacagattatccagcaatgccagttgcttagagagccttttcgttttctggtttaaaacccaatggggatggttctttttttgggacagtactagttttctcatgttattctaagttaatacttaaagttctggaggttgaattacatcaaggatatgaatgtatgtttttcgttatcttttgtttaaattttatttatctattaacgatttgtctttttttaattagaaaatttgtgtttatcgacacc

SEQ ID NO: 94533 - DNA, 675 bp, Arabidopsis thaliana columbia
  unsure (1)..(675): unsure at all n locations
accacgcgtccgcccacgcgtccgcctccgaatctagggtttttgtctctagcctcctcaagctttgcaaacaatcatggcgacccagatcagcaagaagagaaagttcgtagccgatggtgtgttttacgctgaactcaatgaggttctaaccagagagcttgctgaggatggttactctggtgttgaggttcgcgtcactcctatgcgtactgagatcatcattagagccactcgtactcaaaacgttctcggtgagaagggaaggaggattagggaattgacatctcttgtacaaaagagattcaaatttcctcaggacagtgttgagctttatgctgagaaggttgctaacagaggtctttgtgctattgctcaggctgagtctcttcgttacaagcttcttggtggtcttgctgttcgtagggcgtgctatggtgttttaaggtttgttatggagagtggagctaaaggatgcgaagtcaattgtgagtggaaaactccgtgctgcacgtgctaagtcgatgaagttcaaggatggttacatggttcccccaggtcagccaccaaggaatccattgatccccagtgaggatgcnccctaaanaaggggcnctggccaangngaacatcctactgggcccagggaanaagccgtgancatcctatnttnct

SEQ ID NO: 94534 - DNA, 475 bp, Arabidopsis thaliana columbia
aacgaatctgctcctttagtcatcttctcttttgagaaaagatagatcttcttcaccttcttcattgatctcagatcccgatcccgtctccttatcttccgccggcgacttcttcatttttctcttctacctaccacctcttaatcattctctctccccccgcagatctagcgaatcgaattcgaatccttaagtagtagtggaatcatggcgctaagcatgcgaaaagcgatcggagttgttaaggatcagactagtatcggcatagcgaaggtagctagcaacatggctccagatctggaagttgcgatcgtgaaagctacaagccacgacgatgatcaatctagtgacaagtatatccgcgagatccttagcttaacttcactctcccgtggctacgttcacgcctgtgtcacctttgtttcacgccgtctaaaaagacgccgggctggatcgttgttctcaggctcttatg

SEQ ID NO: 94535 - DNA, 3241 bp, Arabidopsis thaliana columbia
  unsure (1)..(3241): unsure at all n locations
aggacgcgtgggcggacgcgtgggccgcttataaactttctctcttctgaaaacagatctctctactttgcttcttcactcgacttgtatctatcatccatggcttccgagaatcctttccgaagcatattgaaggcgttagagaagcctgatggtggtgaattcggtaactactacagcttacctgctttgaacgatcccaggatcgataaactaccttattccattaggatacttcttgaatcggccatacgtaactgtgatgagttccaagttaagagcaaagatgttgagaagattcttgattgggagaatacttctcccaagcaggttgagattccgttcaagcctgctcgggttcttcttcaggactttactggtgttcctgctgttgttgatcttgcttgcatgagagatgccatgaataatctcggtggtgattctaataaaattaatccgctggtccctgtagatcttgtcattgatcactccgttcaggtggatgtggcgagatcagagaacgcagtgcaggcaaacatggagcttgagttccagcgtaacaaggaaagatttgcttttcttaagtggggatccaacgcctttcacaacatgcttgtcgtacctcctggatctggaatagttcatcaagtcaacctagaataccttgccagagttgttttcaacacaaatggacttctttacccagacagtgttgttggcacagactctcacaccactatgattgatggactgggtgttgctggatggggagttggcggtatagaagcggaacgaccgatgcttggtcagccaatgagcatggtcctacccggtgttgtgggtttcaagctaacgggaaagttaagagatggaatgacagctactgatttggtcttaacagtgactcagatgttgaggaaacatggagtagttggaaagtttgttgaattccacggggaagggatgagagaattgtctttagctgaccgtgctacaattgccaatatgtctcctgagtacggtgcgaccatgggattcttcccagtcgatcatgtcactttgcagtatctaaggttgacaggcaggagcgatgacactgtctccatgatagaggcgtatttacgagcaaacaagatgtttgtggattacagtgagccggagagtaagacagtttattcctcatgtctggaattgaatctcgaggatgtggaaccttgtgtttctggtcccaagaggcctcatgatcgtgttcctttgaaggaaatgaaagcggactggcattcttgcttggacaatagagtaggattcaagggtttcgctgtacctaaagaagcacagagtaaggctgtagagttcaattttaacgggaccacagcacagcttagacatggagatgttgttatagcagcaatcaccagttgcacaaatacttcaaaccctagtgtaatgcttggcgctgccttagttgcaaaaaaggcctgcgacctaggactggaggttaagccatggatcaaaactagtcttgctccaggctctggagttgtaacaaagtacttggcaaagagtggcttgcagaagtacttgaatcagctcggcttcagtatcgttggttatgggtgcaccacatgcattggaaactcgggggatatccatgaagctgtggcttcagcaatagttgataatgacttggtggcatccgctgtgttgtctgggaacagaaattttgagggacgtgttcacccgttaacaagagctaactatctagcttccccaccgcttgttgtagcctatgctctggctgggactgttgacattgattttgagacacagcccattggaactgggaaagatggaaaacagatatttttcagggacatttggccctctaacaaagaagttgctgaggttgttcaatctagtgtccttcctgatatgttcaaagctacatatgaagcaatcaccaaaggaaattccatgtggaatcagttatctgtggcgtcaggtactctctatgagtgggacccgaaatcaacttacattcacgagccgccttatttcaagggcatgaccatgtctccacccggtccacatggtgtgaaagacgcatactgtttactcaattttggagacagtattaccactgatcacatctcaccagctggtagcatccacaaggacagtcctgcggctaagtacttgatggaacgaggtgtggatagaagagacttcaactcatacggagtcgccgtggtaatgatgagattatggcgagagcactttgcaaatatccgtattgtcaacaaacacttgaaaggagaagttggtcccaaaacagttcacattcccactggagagaagctttctgttttcgatgctgccatgaaatataggaacgagggacgcgacacaatcattttggctggtgctgaatacggtagtggaagttctcgtgattgggctgccaagggtccaatgcttctgggtgtgaaagctgtgatttcaaagagcttcgagcgaattcaccgaagcaatttggtgggaatgggaatcatacctttgtgcttcaaggcgggagaagatgctgagacccttggcctaacgggtcaggagctttacaccattgagctcccaaacaatgttagtgagatcaaaccaggacaagatgtaacagtcgtcacaaacaatggcaaatctttcacatgtacactccgatttgacacagaggtggagttggcttatttcgatcacggagggattttgcaatacgttatcaggaacttgatcaaacaataaatctggtaacaccagagacttgagttatatatcccaaggtttgttgcaataaaaatgtttgcagggaggaggacgagaatgactttaatttaaacttttgcttttgttcttcttcgtctcttgcttcgtgctagtcaattggaaacattatcactgtcgagtcattttttttctttcaaataaacatgcgagctctttttttgttgttgttgttcataagcattgtcaatgctgcattgatagaagtatactctaccattagaaaataaacacaaatacacaaagtaatctaaagagctagaggatgaaaattatctgtgaaggttgtacaaaaacattaaaaaaaatctgagatgatccaaaggattgattatcacattcgaagtgatggttcagagattacctctggnnnnnnnnnnnnnnnnnnnnnnnnnnnnnnnnnnnnnnn

SEQ ID NO: 94536 - DNA, 537 bp, Arabidopsis thaliana columbia
  unsure (1)..(537): unsure at all n locations
aangaatggtgacaacaatttcttttatttctttcaaaatttttgcattggaacactttattttacagtcaaaggtttatgaagttctatgatctttctcaatgtagacaaagcaatgacagcttctgagaaataacattgccgtaatatataatgcaaacgtttattgtaatagtaaagctcataagcagaggcaaaacaatctgtgatcattttaacatatcccactactaatttcagtaggtaaatagttcagagtaaagtgtctttaaaaggattcttaacgtgtctctcaagcagccaaactcttggggggcaatctcaaggacattctcagacagcccattagcagacattatcatttccaattgtgccttggctaggaccttgacgggtttcatcgtaccgcttccacctcgaaaaggcagacaccatacgagaagcaacctgagggttcaatttgtctaactggacaacaatgtcacccaagaacttgtaacctgatccatccttggcatggaaattcactggggaacc

SEQ ID NO: 94537 - DNA, 799 bp, Arabidopsis thaliana columbia
  unsure (1)..(799): unsure at all n locations
gagaacttgagaaaggcctcttcagcaacaaacattgttgatgatctcagttgcgaatatttggggcctcccaatctggtgggtttcaagatgttgatggagaaactgaagagagacgacgtgccaggctggaacgtcaccagaggacacaggagcgggctgcaaaagcacttgctgagaaaaatgaacgtgatcttcaagtacaaagagaacaagctgagaaagataggattgggtgggaccctggatgttgagatacgacggtggggtgcagggaaggagggaaacttgcgtgctctgctttcaacattacaatatgttctttggccagaatgcggttggcagcctgtatcgttgaccgatttaattaccggtgcatctgtcaagaaagtttacaggaaggccactctctgtatacatcctgacaaagttcagcaaaaaggagccaatctccagcagaaatacattgccgagaaagttttcgncatgctcaaggaagcatgggacaaattcaactcagagggactctttttgaaaaaacctgagntaatggttttttgagagtgtgtttgttcggcctctnggggggaaagnatgaaggcatttgggcattcanttcggaaaggccaaaaattgggtgccccaagntttggaaggcagaaaagtttntcgntaaggggtattntnttnccccaggcttgtttaccccntcanttngaatcattcatnttnccccggnggaacttgggaatnttttttttttgtngnaaaattttccctcccaattnccccctttttt

SEQ ID NO: 94538 - DNA, 570 bp, Arabidopsis thaliana columbia
  unsure (1)..(570): unsure at all n locations
ttncccattcaatttcttgcccanatcggtgccccntncgtgcccgttnatccccgggcnnttccagaaanttccgggngccccccccatttcccccgggccaagtccgccaaaaggagccaatccccggcggaattccatgcccgagaaagtttccgacatgctcaaggaagcatggaacaaattcaactcaggggacctctttggaaaaaacccctgagataatgtttttggaggagtgtgttgttccgtcttcttagcgcggaaagatgaagcatgtggcattccattcggaaagcccaaaaatggtgccccaagttggaagcagagagttgtccgatagagtatgtattcccccagactgattacccatcactgcatcatcatataccacgcagcaactgggcattcttttttttgttgctaatttttccttctcattaccctcttcttcaagagtatgatgtcaaatgtattgatgttgaattctgtatcaaaaaaacacaatacttgagagctgtgtattcttgtttccaaactatttatatatgcatatatgaacattctttt

SEQ ID NO: 94539 - DNA, 480 bp, Arabidopsis thaliana columbia
  unsure (1)..(480): unsure at all n locations
tggaggttgcaggtcactgtgtgcggcagtggatcttgctgcatcaggtataaacatgaccaaagtggaagagattcagactctgaacgattactgcaaaccattgcttgagtttctgagctcgcttggctcagatgacggtaaggtgattgtggttgctcatagcatgggaggaatatccgctgcacttgctgctgacagcttcgcttgtaagattgccgctattgtctttttgacagctttcatgcccgacacaataaacccacctgcttatgtttacggaaagctgctcagaagcattccacaagaggaatggttggacaccacgtgtgtgaacctccggggaacctgattttcccctacagtatacctctttttgggaccaaagtttttggccaagaaaatgtatcaaaactctccagttcaaggtcttgaagtggtgagcattagtgagggaaacccgtngtncaancaatctgg

SEQ ID NO: 94540 - DNA, 531 bp, Arabidopsis thaliana columbia
cgaagatattatttttcatggattgagcaatgaagaggacgataatttcgaaaagatcgcgatacaatggacaagttctcgtacaattcgtatccagattcagctgaatcgtcgccaagatctcgcgatgtcgaatttgaaaatccgtcgccatgggaggaccagcagcagcagaactacaaggtgaagctcatgtgcagctatggcggcaagatccagcctcgtccacacgataaccagcttacttatgtaaacggcgataccaaaatcatgtcggtcgatcgtggtatcagatttccggctttagtatcgaagctctccgccgtctgcagcggtggtggtgatggaggagaaatctcgttcaagtatcagcttccaggtgaagatctagatgcgtttgatttcggtgacctaatgattgaggatctggagcacatgatgcatgagtacgatcggttgcttcgtttgtctactaaaccagctaggatgcgtttgtttctcttcccgtcttctcccatttccggcggattt

SEQ ID NO: 94541 - DNA, 670 bp, Arabidopsis thaliana columbia
tgaacaaggtggccataatgtacctgtggccgctggtgcaggtgacaccaacatgtgcggaggcattgtgcagatgttttgggataaaatattaggtagatgcttggactttgatgatcaaattcgccagacctctctcaagatagtggaagttgtactacgtcaaggcctagtgcatcctattacgtgtgttccttatttgattgccctcgagacagatcctcaagaggccaaccaaatgctggcccatcatttactaatgaatatgcatgagaagtatccggctttttttgagagccgtcttggtgacggacttcaaatgtcctttatcttcatgcaatccatcagccaggtcacttcagaaccaaatcaaagtcttcagcaaaagggttcaacaaacatgttgggcaaaaatgatcatgctagtagtactctcacccaagctagacttggagtctctaggatctacaagcttatccgtggaaaccgggtttctcgaaacaaatttatgacttcgattgttcgcaagtttgataatccaacctggaatggctcagtaatatcgtttctgaagtattgcactgaaacccttgcttactttcattcacattaccttgtgaaccactctattttgatattccataaaccgagttattcatatttcgtctgt

SEQ ID NO: 94542 - DNA, 427 bp, Arabidopsis thaliana columbia
gcacgcgtcagcattattttgttaacaaaaaaaaagaagaattatctggcaaagtgtttaatttccgagaaagttgaagcagagaagcagaaagtttcagaattctcttttctccaagtttaacgcgtttttagctcaaagctcacacacacgaccactctattcctcctttaacctttgtgtttgtcaatttgtgtttcctcttttgtcgactcatttctcgattcaatctcgattttttttttttttgtttttatggaaatctaatgaactttttttatggatttgatctgttaaagtttcgattaagaagatagtggtttaggtttacggttttgtaattgatttattatctgtaatgggttgtgaggtttcaaagttatctgcactttgttgtgtttcagagtctggaagatcgaatcctgat

SEQ ID NO: 94543 - DNA, 424 bp, Arabidopsis thaliana columbia
ttcggacgcgtgggggaaaagagagagatgaggaagttgaatccgcttctgaaacgaggcttgaaggctattgaaaatggtgatttgttgaagatcctccaaagtgaaattcgtcacgaaatctcccatcctcgtttccagggcgttgagaccggttctctaggagatttcaaattggattgggatttcaccggaaagccaagatattgttctgaagagacagtttgattcacgcgagaaggttgtggtctctgctttattgcaaccagaacctatagaactagaagatgatttagtgtttcctagggaagctcatgccaaagtttgtatcaaaaagcctggtctcagctctatcttgcagtttcattgccgggtttacgaatcaggatctggatcttctcatttcgacatcgagagcgcctac

SEQ ID NO: 94544 - DNA, 857 bp, Arabidopsis thaliana columbia
  unsure (1)..(857): unsure at all n locations
cggaanttcccgggtgcgacgcgcatcgcgtccggtgtatctgaccttccacctgccgctctttgaaaatcactcgccgtgtctctctaagcttcttcttcactgtgaaaacctcagatcgcaaatatgcacgcaccggtactcgttctgagcgattcgttgaagcgtgaatctggaagtaaggttcatcatggtaatatccaagcttccaaggctgttgctgatatcattcgtacaacattgggtcctcgttctatgttgaagatgcttcttgatgctggtggagggattgttgttactaatgatgggaatgctattcttcgtgagctagatgtcgctcatcctgcagctaagtcaatgattgagttgagccgtacgcaagatgaagaagttggtgatgggacaacgtctgttattgttctagctggtgaaatgcttcacgttgcagaagcgtttcttgagaagaattaccatcccacagtcatatgccgagcttacatcaaggctctcgaagattctattgctgttcttgacaaaattgctatgtcaattgatatcaatgaccgttcacaagtgctagggttagtcaagagctgcatagggacaaagttcactagccaatttggagatcttattgcggatttggctattgatgccactactactgttggtgttgatcttggacaaggtttgagggaggtagacattaaaaagtacatcaaggttgagaaagttcctggtggtcagttcgaggactctgaggttcttaaaggagttatgtttaacaaagatgttgttgctcctggtaaaatgaaaagaaagattgtcaacccacggattaatcctcttgactgtcc

SEQ ID NO: 94545 - DNA, 597 bp, Arabidopsis thaliana columbia
  unsure (1)..(597): unsure at all n locations
aaaaaaaaacgaggcgtaacaggaaggataagaagcaggggtccatcatcaaatacggcagtgtagcaattgcgttttcgactttatagagatattttcatagagatggtctcgaagctaacaagttgacaaatttcttcgttataagagagatagatgagttgcaggagagtgctgaagtcgatacaagccttggcggctcatagtttactcttctgtttcacgcttttattggtgcttaaactcgatcacaccgtctcttcctcatggtggatggtgtttttcccgctgtgggcttttcatgcagttgttgcaaggggcagattctctcttcctgctcctgttgctccacgtaaccgtcattgggctccttgccatgctgttgtcgcgacaccgttacttgtagcatttgaattactcctcctgtatataacctcgagagtcttatgctncgttggccaccagctgtcaagtttgaagnattgctttcttaaccattgttggngttttgaataanaaaancttggaggcaatttgngaannttncggncatttatccagggggcngnggcaagaaaacctnatttnnaantnngc

SEQ ID NO: 94546 - DNA, 788 bp, Arabidopsis thaliana columbia
ctgcaggtacggtctggaattcccgggtcgaaattaaaatggaaggcttaacattgatagtagtgatgatgtcaagctttatgttgggagggcaaggtcagcagataagcacgccatgcacctcctccatgatctctaccttcactccatgtctcaacttcatcaccggaagcagcggcggttccgtcactcccaccgccggctgctgcgactccttgaagacgttgaccaacactggcatgggctgtgcttgcctcatcctcactgctaacgtcccgctgcctactggcttcatcaatcggactctggcgcttgctctacctcgagcctgcaaaatgggcggtgtacctattcaatgtcaagctgcggggactcctctaccagctccaggtcaggttccatttttgattgctccaccacctcaggtgtctgcttttagcccgggagcgtccaaggcggcggggacaacaccaacacaggcacctgcaccggatactcccgcggatggaccaacgggacccacaactaaatcaggaattcgacccgtagatcagcccatgcaacccaccggcctcgctcaatcttctacttctccatttctcccgttgcttttcatatctcttatcctgttgaacttataagcccaatcgacgtgtaaagtctttaacctgttatgcatgtgttgtcagatattttcattaaaaaaaaaaaaaaaaaaaaagggcggccgctctagaggatccaagcttacgtacgcgtgcatgcgacgtcatgctgttctatagtgt

SEQ ID NO: 94547 - DNA, 479 bp, Arabidopsis thaliana columbia
atctagagagctagagaaatattcagtggtcggagaatggcgtctctcaaaattccagcatatattcctcttcccgaagaagactccgagcagctccacaaggcattcaaaggatggggaactaatgaagggatgatcatatcaattttggctcatagaaacgcaacgcaacgcagtttcattcgtgccgtttatgctgctaactacaataaggatcttctcaaggaattagacggagagctttctggtgactttgagagagttgtgatgttgtggactcttgatccaacggagagagatgcgtatttggccaatgaatctaccaaattgttcaccaaaaacatttgggtcctagttgaaatcgcttgtactagaccttctcttgagtttttcaagaccaagcaagcataccatgttcgctacaagacctctctcgaggaagatgttgcataccatacatctggaaatatccgaaagct

SEQ ID NO: 94548 - DNA, 654 bp, Arabidopsis thaliana columbia
  unsure (1)..(654): unsure at all n locations
nnnnnnnnnnnnnnnnnnnnnnnnnnnnnnnnnnnnnnnnnnnnnnnnnnnnnnnnnnnnnnnnnnnnnnnnnnnnnnnnnnnccacgcgtccgccgccattagagtcactggtgctagcagcagtagacgaagcagtcagaccaaatccaaggctgctcctactcccatcgataccaaggcctctaccaaacgccgaaccggctccatcccctgcggcaagcgtaccgattttggctactccaaagacttccacgatcactacaccatcggcaagttgctcggccatggtcaattcggctacacctacgtcgccatccacagacccaatggagatcgcgtcgccgtcaaaagactcgataagtctaagatggttcttcctattgctgttgaggatgtcaagcgtgaggttcagattcttattgctctctctggccacgagaatgttgttcagtttcacaatgcctttgaggatgacgattacgtctatattgttatggagtgagtctcctttcctcatttcttatagtctatccttcatgtatcggtggcattcacattttactcttgcctttcttctaggttgtgcgaaggaggcgaattgctggataggatattatccaagaaaggtaatcggtactccgagaagatgcag

SEQ ID NO: 94549 - DNA, 456 bp, Arabidopsis thaliana columbia
aatcttttttttggttttaaaaagaaagttgggatttttgaagcgatcttgtttctctaccccggccgctgctatcttcacttccgcagacgtgggcaatataccaaagacgaagaacgctctcttcaacccgaatccgcctgctctatcttcgtcttcttgttggctctgcaattcgcaggccaagcagatcatagaactgagaatcagggaaggctcgaatcaggggcttcttcgtgtacatgctctgtttaacaacgaggaggcatcacgtgaaagtgaagataagaatgggtttggtttgctacctgcggatattttctctttgcctcaggagaagtttggaagtaatgcaagtggcgaaaaggatagtgaaaatataattgatgtagagacatctcttgcgggtcctcatggtggaggaactcgagctgggctctttagaaactccatttc

SEQ ID NO: 94550 - DNA, 563 bp, Arabidopsis thaliana columbia
ctgtctaacaatacactaccacacactttcacgctctcttctctcacacctttcttcttcctcaccaaaattcttctctctatgttcttcttcatcttctagctctctcatctcttcttctcgccatagcttcaccttccttctcaagctgtacagttaaagcttaagattaattttcgttaattttaaattcgaagaaaagatgaatcactttgcggttcaaccaaacgcgttcgctgctggcggagatttgagaagcagctccgtttcagttgttgaaagagatcaaaccaccgtcgtttgtccaaaaccacgtcgtattggtctccgtaacaaccatcaccatccttctcgatctctccgttgttacttcagtcatcaattggagctttgtgaatccaaagcagagactgatatcttagatatcatactcaccaaggatggttatggtgcagaacaagttaataagcaggtaatagactcgccgtccccgtttttatgtgggtcgccgccgggcaggggcgcccccccattaacacaggatgctcgatttcgagatgaga

SEQ ID NO: 94551 - DNA, 436 bp, Arabidopsis thaliana columbia
ctcaaagtcaactccggatctcaagtgaaagactcatcccgaattgcacctgatgctactccctcatccccatcgtcgtctctgtctttattcaaaggagtgttaccgaggtattttcagctcggagtggtcggtggctcagttcaggttggttgaaggaactcagtacattagccccctttggccatcaaaagaacaccgttgttattcttggcatggatgggagcttctacagatgccagtttgatccggtgaacggcggtgaaatgtctcagcttgagtaccacaactgtctgaaaccgccttcagttttctaaaagctttactacttatactcttttggtccttctctctctttatatctctctgcaacttaagcggtgagatatggtgtatagttttgtgtatataataatgatgggtcgtcctataattt

SEQ ID NO: 94552 - DNA, 633 bp, Arabidopsis thaliana columbia
ccggctggaaaaccggggggcgccacgcgtccgcttcctttgatcagtaaaaaaagtctccgccttcttcttctctttcctctttcccctaattgatcaatcatgcttcttcatttctagttctctcttcctgactcatttccctcattagatcttcttctccactaaacccataattgaaagaagctctttttttgcttacattgaagttaaaaaatcatcacttgttttgtttttgaagaaacacacataaagtttgtctttttacttctcaaatttggttgttttcactcaatttcaatcttgctttctgattcagattctgggttttcttcagaattcccagagaagttgttggaattgaatttttcacttttttgttcataaaagttctagtctttttagatgaacatggacaaggaaacagagcaaaccctaaattacttacctttgggtcagagcgatccctttggcaatggcaatgaaggaacaattggagatttccttggaagatactgcaacaaccctcaggagatttcaccgttaactctacaatccttctctctgaattctcagatctccgagaatttcccaatctctggtggaatcagattccctccatatccaggtcaa

SEQ ID NO: 94553 - DNA, 751 bp, Arabidopsis thaliana columbia
gtccaaaccttttcctaagcaagaggaccctgtcacctcgagttttggagagtcaaatagatgccaaaaaggaactggaaaaatgtcttaagacaacttgtgaggagttcatcatgtcagtaactaagctagttgtggatcctatgctttcatttgtgacgaaggtcacagccataaaagttgctctttcctccggaactcagaatcacaaagttgattctgtcatggctaagccgctgaaggaacaagctttcgcgacaccagataaggtggttgaacttgttcaaaaggtatacgctgcgatacaacaagagttgcttccgattttagcaaaaatgaaactctatttgcaaaacccatcaacaagggcccttacttttcaagccgatcaagacaaatatagtggaagctcatacgcaagtggagtctttgctcaaagctgagtactcagctgaagaacaagccaatattaatatgatctccattcaggatttgcaaacccaactcgacaatttcctttaaggtcatggctcaatcgatgtttttgtgatgtccgtacttcctctggttatatcttatataatgactttgattcttttgactccttttagctactttacaagagttcgctttagaagaatacatattattttgtatccaagaactcatacatcttggtctctctacattcggccgccccgcggtcaaaaagtgtagatcatatgctaatataagactagctatcaagttc

SEQ ID NO: 94554 - DNA, 1513 bp, Arabidopsis thaliana columbia
  unsure (1)..(1513): unsure at all n locations
gttgatattaaaaaaccgaccacgcgtccgcgtttcttcttcttcttctccaattttcaaaattcgaaaagatgttgaagctttcgtgtaatgtgactgattctaagttacagagaagcttactcttcttctcccattcatatcgatctgatccggtgaatttcatccgtcggagaattgtctcttgttctcagacgaagaagacaggtttggttcctttgcgtgctgttgtatctgctgatcaaggaagtgtggttcaaggtttggctactctcgcggatcagctccgattaggtagtttgactgaagatggtttatcttataaagagaagtttgttgttagatcttacgaagtgggtagtaacaaaaccgctactgttgaaaccattgctaatcttttacaggaggtgggatgtaatcatgcacaaagtgttggtttttcgactgatgggtttgcaacaacaactactatgaggaagttgcatctcatttgggttactgcgagaatgcatatcgagatctataagtaccctgcttggggtgatgtggttgagatagagacttggtgtcagagtgaaggaaggattgggacaaggcgtgattggattcttaaggattctgtcactggtgaagtcactggccgtgctacaagcaagtgggtgatgatgaaccaagacacgagacggcttcagaaagtttctgatgatgttcgggacgagtacttggtcttctgtcctcaagaaccgaggttagcatttccggaagagaataacagaagcttgaagaaaatcccgaaactcgaagatccggctcagtattcaatgattgggcttaagcctagacgagctgatctcgacatgaaccagcatgtcaataatgtcacctatattggatgggttctcgagagcataccacaagaaattgtagacacgcacgagcttcaggtcataactctggattatagaagagaatgtcaacaagacgatgtggtggattcactcaccaccaccacctctgaaattggtggaaccaatggctctgccacgtctggcacacagggccacaacgatagccagttcttgcacctcctgaggttgtctggagatggtcaggagatcaaccgcgggacaactctgtggagaaagaagccttcaagttaagaaatagacaatgtctttagccattttgttctcaagtttccatcatctcaatgaagatttcgcttcacgagtctgagcaggtctccatttttctctttcaagtttgggttagactagagggaactggattgttggagtattaatctttgttgaatttcattatgtttgttcatgtttttgtacaaattttggggatttagccaaacccatatcgtctttggtcttgtcttgtgcctgcgtgtatttttaatctatccgttcaaaaacacagattgttcattagtgttttatataaacagagttaaagacctgannnnnnnnnnnnnnnnnnnnnnnnnnnnnnnnnnnnnnnn

SEQ ID NO: 94555 - DNA, 480 bp, Arabidopsis thaliana columbia
ataccaaaacacgagagatgtttgtggaggaagtgatggagttggtggagcttaaacctcttagaaactctatagttggtcttcctggtgtagatggtctttcaacagaacagaggaagaggcttactatagcagttgaattggtagctaatccatcaataatcttcatggacgagccaacatctggtcttgatgcaagagctgctgccattgttatgcgtactgttaggaatactgttgatacaggaagaactgttgtttgtacaattcaccaacctagcatcgacattttcgaatccttcgatgagttgctgttgatgaaacgaggaggacaagttatatatgctggaacactaggacatcactcacaaaaactcgttgaatactttgaggctattgaaggggttccaaagatcaaggacggatacaatcctgcgacgtggatgcttgacgtcactactccttcaatggagtcacaaa

SEQ ID NO: 94556 - DNA, 497 bp, Arabidopsis thaliana columbia
cttagggctaagagtttagagaaaggttgggacttgaatttgggtgaaatggctaggatttggaaaggtgggtgtattatcagggcggttttcttggacaggatcaagaaagcttaccagagaaacccgaatttggcgagcttagtggttgatcctgattttgctaaagagatggttcagaggcaagctgccatggaggcgagtggtgggtcttgctatatctgcctgggattagcacaccaggaatgtgcgcaagtttagcgtatttcgacacttacaggcgtgctagattacctgcgaatctggttcaggcgcagagagatctctttggagctcatacatatgagagaaccgatcgtcctggtgcataccacactgaatggactaagcttgcaaggaagagtcagtaaagcatggacacagtcccttgatttgagggctttatttcatcatagaacacgaaaacaaattgtttcagcttatttttgttgagttat

SEQ ID NO: 94557 - DNA, 429 bp, Arabidopsis thaliana columbia
  unsure (1)..(429): unsure at all n locations
cttccgaagagattgtntccgccggcgaatcatcagagatcgaggaagcggttgcaagtctaaccatgtnttctaacaagatttttttgacgagttccgatggcgagtctttcgagatcgacgaagcggtggcgcgtaagtttctgatcatagtgcacatgatggaggataactgcgccggtgaagcaattccgcttgaaaatgtcaccggggatatcctctccaagataatcgagtacgcgaagatgcacgtcaatgaacctagtgaagaagacgaagacgaggaggcgaagaagaatctagactcgtggggacgctaagttcatggaaaagctagatctngagacccatcttcaaaatcattctcggtgccaactaccctaaanttcgaaggacttcttcggnttcnctagccanaccggtttcctg

SEQ ID NO: 94558 - DNA, 534 bp, Arabidopsis thaliana columbia
  unsure (1)..(534): unsure at all n locations
gagaggctggaaccggaatcgctgagctaattgctcttaaaatttcgaaagagactggaaaaccaatcgatgagacccggaagaagatttggcttgtggactccaagggactgattgttagcgaacgcaaagaatcgcttcaacatttcaagcagccatgggcgcatgaccacaagcctgtcaaggagctcttggcagctgttaatgcaatcaagccaactgttcttattggaacctctggtgtgggtaagactttcacaaaggaagtagtggaggccatggctaccttgaacgagaaaccattgattcttgcactctcaaacccaacttctcaagccgagtgcacggcggaagaagctttacacatggaccaagggtcggtgcaattctttgcaagtgggagcccgtttgacccctgttcaggttggggtggaaaaaatttaacgcttggcccggaaaaaacttntaaaatttncccngggtttggnnttgggttaacantncngggncntttgttccccngnaaaanttttt

SEQ ID NO: 94559 - DNA, 950 bp, Arabidopsis thaliana columbia
  unsure (1)..(950): unsure at all n locations
cggaagaagatttggcttgtggactccaagggactgtttgttagctcacgcaaagaatctcttcagcacttcaagcagccatgggcacatgagcacaaacctgtgaaggacctcattggtgctgttaatgcaatcaagccaaccgttctcattggaacatccggtgtgggtcagactttcacaaaagaagttgtcgaggccatggctaccaacaacgagaaaccgttgattcttgctctctcaaaccctacttctcaagctgagtgtactgctgaacaggcttacacatggaccaagggtcgtgcaatctttggaagtggaagcccatttgatcctgttgtgtacgatggcaaaacctacttgcctggccaggcaaacaattgctacattttccctggtctgggtcttggtttgatcatgtctggggcaattcgtgtccgtgatgacatgctcctcgcagcttctgaagcattggccgcacaagtgacagaagagcattacgccaatggtctgatctacccgccattctcaaacatcagagagatctctgctaacattgcagcctgtgtcgccgccaaaacctatgacctcggattggcgtcgaacctgccacgtgcaaaggatcttgtcaagtttgcagagagcagcatgtacagccctgtgtacagaaactaccgttaaaaaagttttgttgaagaaacctgcagattatactattcacaacccttgatagtttcttaaggcttgtatttaagttttttgtttgtttgtttgttgtttgttttctcttctacattatgatgctgtttgtgaactctctctctgtctttgctgataaataataaattgttactaatataaaaaaaaaaaaaaaaaaaagnnnnnnnnnnnnnnnnnnnnnnnnnnnnnnnnnnnnnnnnnnnnnnnnnnnnnnnnnnnnnnnnnnnnnn

SEQ ID NO: 94560 - DNA, 1016 bp, Arabidopsis thaliana columbia
  unsure (1)..(1016): unsure at all n locations
tatacgactcctatagggaaagctggtacgcctgcaggtaccggtccggatttccctggtcgacccacgcgtccggtctcatatgacatctaaatgtgattcatgtcctcactcctgattatacaacaaaattataatttggttttcatgctgctcctcgaatctaatcatatattgtgcttaaaaaaagggtcgtgcaatctttggaagtggaagcccatttgatcctgttgtgtacgatggcaaaacctacttgcctggccaggttcgtgctatttcaacaacttcttctctctcaactttgtacatctgacaatcttagagctcacatcatatttccactatcctacttaacttcaggcaaacaattgctacattttccctggtctgggtcttggtttgatcatgtctggggcatttcgtgtccgtgatgacatgctcctcgcagcttgtaagtaaaaataaacttcagaaaatcaaacatggatactgataaagacactcaaagattctcaatggcatctctctctcatgttntcaacagctgaagctttggccgcacaagtgacagaagagcattaccccaatggtctgatctacccgccatcctcaaacatcagagagatctctgctaacattgcagcctggggtcgccgcaaaacctatgacctcggttagtggaatgaaactgtctaactctttaatgagacttgctgactctctaattcaagtctaaatccatgtatttgggtgangattggcgtcaaacctgcccctgcaaggatcttgtcaagtttgcagagagcagcatgtacagccctgtgtacagaaactaccgttaaaaaagttttgttgaagaaacctgcagattatactattcacaacccttgatagtttcttaaggcttgtatttaagttttttgtttgtttgtttgttgtttgttttctcttctcccttatgatgctgtatgtgaactctctctcaaacaaagctgataaataataaattgttacat

SEQ ID NO: 94561 - DNA, 1754 bp, Arabidopsis thaliana columbia
  unsure (1)..(1754): unsure at all n locations
ctacgacgaaggatgactccgtccacgttcttcttcactgtttgacaataagctccaattttcagacttttcatttcaaacttgtgggtctcattttcctctggcctatataaatccactatcctccacttctgtctttcatcatcattccacataaacaaaatatcttcttgctcattattcatcatcaatctactactccgtaaactttgcttcctctgtttgtattagctcagaagagatatgggaagtactccgactgatttacccggtgaggatgtcgccgataacagatccggcgtcggcggtggtatttctgacgtctacggtgaggattccgccaccttggaccagcttgtcaccccttgggttacctctgtcgctagtggctacacattgatgcgtgatccgagatacaacaagggacttgcgtttactgataaagaaagagatgctcattacttaactggtcttcttccccctgtgattttgagtcaggatgttcaggagaggaaggtgatgcacaatctccgtcagtacactgttcctctgcagcgttacatggccctgatggatcttcaggaaaggaacgagaggttgttctacaagcttttgattgataacgttgaggagttgcttccagttgtgtacacaccaacagttggtgaggcttgccagaagtatgggagcattttcaggaagccacagggtctctacatcagtttgaacgagaagggcaagattcttgaagttttgaagaactggccccagagaggaatccaagttattgttgttactgatggtgagcggattctcggtctgggagatcttggttgccagggaatgggaattccagtggggaaactttctctttacaccgctttgggaggaatccgtccatcagcttgtcttccaatcaccattgatgtgggtacaaacaatgagaagttgctaaatgatgaattctacatcggtcttaaacagcgaagagcaactggccaggaatatgctgaattcctgcacgaattcatgtgcgctgtaaagcagaactatggagagaaagtgttggttcagtttgaagattttgcaaaccacaatgcgtttgaccttttgtctaagtacagtgatagccatcttgtcttcaatgacgatatccagggtactgcatccgtggtgcttgctgggcttattgccgctcagaaggtgcttggtaaaaaactggctgaccataccttcctgttcttgggtgccggagaggctggaaccggtatcgctgagctaattgctcttaagatttcgaaagagactggagctcccatcactgagacccggaagaagatttggcttgtggactccaagggactgattgttagctcacgcaaagaatctcttcagcacttcaagcagccatgggcacatgagcacaaacctgtgaaggacctcattggtgctgttaatgcaatcaagccaaccgttctcattggaacatccggtgtgggtcagactttcacaaaagaagttgtcgaggccatggctaccaacaacgagaaaccgttgattcttgctctctcaaaccctacttctcaagctgagtgtcttgttgaaaggttncaacatggccaagggncgtgaatcttttggagtgnagccntttntccngtttnncggtggaaanctatttcctggcaggaanattntanatttccngggttggcttggttccagctnggattggccgnttaatccccngtttc

SEQ ID NO: 94562 - DNA, 553 bp, Arabidopsis thaliana columbia
gctggtacgcctgcaggtaccggtccgtttttcccgggtcgacccacgcgtccgtacggctgcgagaagacgacagaagggtacggattacggtacctttagaaagagaagcttccatatatcacagccatggtggttgtcactcacatctccacttccttccaccaaatctctccttccttcttccatctccgtcttcgtaatccctccaccacttcttcgtctcgtcccaaactcgacggtggtttcgctttgtcaattcgagcttacatagagaaaccaaactctttctccaccttcgctaacaaagtcatcggttctcttcccgttatcggactcctcgctcgaattatcagcgatgaaggcggcgttggtagagatctcgtcgatttcgctgagtttaggaaacgagttgggaataaatgtactcctgatgattctagggctttctatgagttccaacagcgacgaggcaaggcaggtgagcctttgtatgtgcttctgtgttgttggggtgctgcagtaggtgcaggtcttctcaaatctgaagaga

SEQ ID NO: 94563 - DNA, 476 bp, Arabidopsis thaliana columbia
atacccgataatctcttctatgtttggtagagatatcttcgcaaagtcttatctttccttaccgtgttccgtgttttttgatgatttatgtgaacaagattaagcagagacatcaacgattatgaagtacgttttggtgacacgaggagtggtgagtggtcctggcaaacgtgtcactgctagtagcattggacttctccttcaagcatgtggtcttcgtgtcacttccattaaaattgatccttatcttaacactgatgctggaacaatgtctccgtttgagcatggagaagtatttgtattggatgatggtggagaggtggatttggaccttggaaactatgaacgatttttagacagtacattgacccgtgacaacaatataactactggaaagatataccagtcagttattgacaaggaaaggaagggggactacctcggaagaactgtacaggttgttcctcatgttactg

SEQ ID NO: 94564 - DNA, 406 bp, Arabidopsis thaliana columbia
ccttctttgatctcttcaggaactggtaatttttcagcagctaggaacaatatgattggggaaatcgagaaccgatcaacattcctcttagcagtaaaagcggatgtggagacacaaggggactttggacagtcgttagcaactgaagtccgagcttcttctttcaccgacatagaagatctcttggcgttcgttagctggctagatgaagagctctccttcttggttgatgaaagggcagttcttaaacactttgactggccagaaggtaaagctgatgcgctacgagaagcagcttttgaatatcaagatcttatgaaactggagaagcaagttacgtcctttgttgatgatcctaatctctcttgtgaacctgctttgaagaagatgtacaagttgctagaga

SEQ ID NO: 94565 - DNA, 576 bp, Arabidopsis thaliana columbia
  unsure (1)..(576): unsure at all n locations
ttttagaaanacaaaaaaaaaggcggagctttttcgagaaatttgttgcttacccttccctgtgatattccttgggatctgctttacagttttatacatacacatttgattggaccattggttcggtattcttaaacgaccggagatttatccacacaacgtcttctcgcagccaaacacatcaaactacaacatgttcttcttgtgtagaaaactctcactttcacgattccgacaccattntcctttcagactccgtcgttttcttggggaaaacccaaatccaactacccatttctttacattacccgacaatcaaacaaaacgaccagagaagtcgagactcgacggcgtagaacacaaaaccctaaaggtaaatggcataaacatgcacgtggcggagaaacccggttccggntccggagaagatccgatcatactnttcctccacggatttccggagctttggtacacgtggcgacaccagatggttgccgtctnttccttgggataccgtacgatcgnnccggntcttngtgggtacggagacacagaaagngccagnnaaagttnnag

SEQ ID NO: 94566 - DNA, 352 bp, Arabidopsis thaliana columbia
  unsure (1)..(352): unsure at all n locations
ggaaaacaccgggccgacccacgcgnccggngagagaagaaaagaagagaaaaattttgggtggcattggngnganganggaggcgagaccccgccggngggcacncnccgcagccccccaagcagnaacagaggcggagccaggnnggangaagaacnncnacaaggacacgngnccncaggccgaagacaaccgccgngaacaagncaaacnccnctacaaacgccacaagaacaccgcnnncnctnggctccgnaacaacnnccaagacngcgccgnngagncaagngangcgncgcnnnngcngganncgacaagaagagagccaggagagaaagaacacgacaggag

SEQ ID NO: 94567 - DNA, 572 bp, Arabidopsis thaliana columbia
aacactcactcactcacttatttccattacctctctcactaaaaatcaaacttttctctgtctcactctctccaaaaacagaggaaggagaacaaaccaagaactcaagctcccctgctcttctcatctttcttcttcgttttctattttctttcttctttattctttgattcttttgaaatgaatcatctttacaaaaacccatttcgcatttatgaaattagtttccatttctgcgcgagtctactcttgtgtttcttactcttctctgctcaagctgttgcaggtggtggaggtggtggtcactcttgggatggaatcgtggtgactcaggcgaactatcaggcactccaagctatcaaacacgaactcattgacttcaccggagttctcaaaagctggaacaactctgcctcctctcaagtttgctccggctgggctggaatcaaatgcctccgaggtcaagtggtcgccattcagctcccttggaagggacttggcggtactatctctgagaagattggacagcttggaagtctcagaaaacttagcctccacaacagtgttatcgc

SEQ ID NO: 94568 - DNA, 447 bp, Arabidopsis thaliana columbia
gtggacttggatgtctcaagtgttcctgaagtcctcaggcctctttatgagtcttccaaaatccttgctcaaaaaatgactgtcgctgctctgagacatgtgcgccaaattgctcaagagactagtggagaagtccagtatagtggtggacgccagcctgcagttttaaggactttcagccagagactctgccggggtttcaatgatgctgtaaatggttttgtcgatgatggatggtctccaatgagtagcgatggaggagaggatattacgaccatgattaactcttcctctgctaaatttgctggctcccaatacggcagctcatttctttccaagttttggaagtggtgtgctctgtgccaaagctctatgcttgtgcagaatggtccaccccttgtattgattcggatcctgagagaacaccgagctgaaaggcagactatg

SEQ ID NO: 94569 - DNA, 518 bp, Arabidopsis thaliana columbia
  unsure (1)..(518): unsure at all n locations
nnnnnnnnnnnnnnnnnnnnnnnnnnnnnnnnnnnnnnnnnnnnnnnnnnnnnnnnnnnnnnnnnnnnnccacgcgtccggccatttcaagccttatgcaggagccatttcgttcagtaccacttatatggatagttcatgaagatattcttgcaaatcggttacctgtttaccaaaggatgggccagaattctcttatctcccactggagaagtgcttttgcgagagcagatgtggttgtctttccacagtttaccctgccgatgttgcatagcgttcttgatgatgggaacttcgttgtgattccagaatctgtagttgatgtttgggctgcggaaagctacagtgaaacccatacaaaacaaaatctaagggaaattaacgaatttggtgaggatgacgtgatcatcttggtgcttgggagctccttcttttatgatgagttttcttgggataatgccgtggcaatgcacatgttgggaccacttttaacacgatatgggaggagaaaagataca

SEQ ID NO: 94570 - DNA, 793 bp, Arabidopsis thaliana columbia
  unsure (1)..(793): unsure at all n locations
caaagggtgtcccatggaagtaacccccaagggtggggggccgctcccatagtaataaatgcagcgggtcaggaatacccccaaagggtcagaagttgtggtgcggtggcccttcccaaaagccccccccaggattttccaaggccaagtttcccggaaacgcgggaggcgcacaaaactcaattccgggaaaccccttacttccaacagcagcaccagcaacaacaacanccaatacttagcggcggttatgaaccagcaacgatccatgggaaacgaacggttccagccgatgatgtacgctagaccaccgccagctgtcaactatatgccaccacaaccgcaaccgcaccaacaacatccatacccgtatccatatccgtatccaccccagtatccgcctcccaatggtggccagtattctgattacttcaatggcgagaacacatcaagctgcaatattatgtgaacaacaacatcaaaactttccatagtttgtgtccggtctgtgattatacatggaaatgttttttttttcataattattgggggttcttagaatccttttttttcctccaccggatcaaatcctaaattatattaggatttttttttataatttgtgatagttcttaagtaattttatagaatcataatatataaaatcaaacgaatattttatattcagtacttgttttttnnnnnnnnnnnnnnnnnnnnnnnnnnnnnnnnnnnnnnnnnnnnnnnnnnnnnnnnnnnnnnnnnnnnnnnnnnnnnnnnnnnnnnnnnnnnn

SEQ ID NO: 94571 - DNA, 594 bp, Arabidopsis thaliana columbia
cactctttgggactcacttagggaattctggtacgccagaatgtaccggtccggaattcccgggttgacccaggcgtccgtataaatatttctctgcttttaatttccaatttgctctgattcattcacaaataacaatcctctcttcgtttttgtttttcttttggatccaaagctctcttaaatctgtaaatcaacaatggccgccaccactgagaatctccctcaactcaaatccgccgtcgatggccttactgagatgagtgagagtgagaagagcggattcatcagcctggtttcacgttacctgagcggtgaggcacaacacattgagtggagtaagatccagactcctaccgatgaaatcgttgttccctacgagaaaatgacccctgtctcccaagatgttgccgagaccaagaatctgttggacaaacttgttgtgttgaagcttaatggaggtcttggaacaacaatgggatgcactggcccgaagtccgttatcgaagttcgtgatggtttgacatttcttgatctgattgttattcaaattgagaatttcaacaacaagttttgttgtatggttccgttagt

SEQ ID NO: 94572 - DNA, 456 bp, Arabidopsis thaliana columbia
  unsure (1)..(456): unsure at all n locations
cctgcgacccgcgttcgaagtcgtggcgctttaccaacaacggaacatccggcggatgcggctgtacgatcccaaccaggagactctcaacgctctccgcggctccaatatcgagctcgtgctcgatgttccaaaccccggatctccagcggctcgccctccgcccaagcggaagccgacacatgggtccccaacaacgtccgcaactttgcaaacgtcacatttcgctacatctctgtcgggaacgaggtacagccctcagaccaagctgcgagctttgtcctccccgcgatgcagaacatagagagagcagtttcaagcctcgggatcaaggtctcgacggctatagacaccagaggcatttccgggtttccgccgtcaagtgggacgttcacaccggagtttaggagctttatcgcaccggtgataagtttcttgtcaagcangcaatctcct

SEQ ID NO: 94573 - DNA, 512 bp, Arabidopsis thaliana columbia
acgcctgcaggtaccggtccggaattcccggcttgacccacgcgtccgtaccgctgtgagaagacgacagaagggggaacatccggcggatgcggcggtacgatcccaaccaggagactctcaacgctctccgcggctccaatatcgagctcgtgctcgatgttccaaaccctgatctccagcgccgcgcctcctcccttgcgggggccgacacatggggccgcaacaacgtgccgcaactatgcgaacggcacatgccgcgtcgtctctgtcgggaacgaggtccagccctcagaccaagccgcgagctttggcctccccgcgaggcagaacctggagagagccggtgcaagctctcgggagcaaggcccggacgggggatcgaccaccagaggcattgaccggggctccggcgggaagtgggagcgctgccaccggaagggtgagaggtaaaccagaccgcgggatagtgtacgtggaaagcaaaagaccgtccgtggcccggacatctt

SEQ ID NO: 94574 - DNA, 818 bp, Arabidopsis thaliana columbia
aagaagaaaagctttgagaagccatggatacggaaactgagttcgataggatactattgttcgaacaaattcgtcaagacgccgaaaatacctacaagtcaagtcctttagatgccgataatctgactagatggggaggagttttactcgagtcatctcagtttcatagcatctcagatgcaaagcaaatgattcaagaggccatcacaaagtttgaagaggcattgttgattgacccaaagaaagatgaagcggtttggtgtattgggaatgcatacacttcatttgcgtttctgactcctgacgagactgaagctaaacataactttgacttagctactcagttctttcaacaagctgtggatgagcaaccagataatacacactacctgaaatcactcgaaatgacggccaaggctccacagctgcacgcagaagcttacaaacaaggcttaggctcacaaccaatgggtcgcgttgaagctccagcaccgccgagctcaaaggcagtgaagaataagaaaagtagtgatgccaagtatgatgctatgggttgggtgattctagccattggtgttgttgcttggatcagtttcgcgaaagctaatgtgcctgtctctcctcctcgttaagtagactcgttaggagactttgatgaagtttttcaatttttgaggttttgacagttggagcttgttgtgtaagatttttagttgtactacgagtactttactcttgaaagaagatagaataaaatgtcctttttttactttaaaatgggagagaaagggcaccctttcccttatcgggggggcggg

SEQ ID NO: 94575 - DNA, 745 bp, Arabidopsis thaliana columbia
  unsure (1)..(745): unsure at all n locations
tgatactccagctccnnnnnnnnnnnnnnnnnnnnnnnnnnnnnnnnnnnnnnnnnnnnnnnnnnnnnnnnnnnnntacccacgcgtgcgcgcacgcgtacggtttctggttgtagaagtccatacactcttcggcagtgggaaagaacttcagatacaacagaagactgcatatcataagccctgtccttgccatgccagccttacagtgaacaaccacaaacgatgtgtggatggaaaaggacttgtgctacccagccaaattagatatgtgaaatactttgaaagaattttgacctacttcaacggtgaaaaccaaccaggccgtaggtgtatgcttaggggattccggctccataggtgtccctattggattaggccatccatcactatttcagatcacaatggtgttctctttaccacgaaaaagcatcctcggaccaaggatctctcgcctgaagacttttggttcagtgccccaaagaaaggggttatggtctttgccttacctggagagccaggtctaacagaattggctggggacttcaaaatccaatttcatgaccggcaaggagatttctactgctggttaaacacgacaatgatggaaaatagagtgatcctaaaaaccagtgagcttgatgggtttgacaagaggaagctaccatcgcctggatttatggttgaagatgttctagctgatataaatgcaacaatccttacgaaccctagttctgaaacagca

SEQ ID NO: 94576 - DNA, 622 bp, Arabidopsis thaliana columbia
  unsure (1)..(622): unsure at all n locations
acgcgtccgtcgctttttgctatttccttgtaacttaaaagaagaaaaaatgagaggtagcggagcagggatcgccggcgttttgccggggttgtgtgctattcatcgccggaacaatctccgcctttgaagacatagagaggttgaggatttggccgttaccggcacaagttagccacggtgtgctcggagaatgtatctaagtggagatttcaagcttgttacggagggaagcaaatatggagacgcctcagggattttgaaagaaggatttgatagaatgcttggtgttgtgaggctgagccacgtcatctccggtgaccggaattcttcaggcaccggtggatctgctttgcttcagggacttcacgtcatcatctcctcctctaccgatgagttggaatatggagcagacgagtcgtacaaattaagtggttccatctccagagaagccgtctttatgcacaacttgagggccaagagtgtttatggggcattgcacgggtctacagacattttgccagttatgtcattttaaatttgaggaaaaaggtcattggggttcttaatggctccatgggatatcatagnccnancctggttctntttanccgnggccttt

SEQ ID NO: 94577 - DNA, 543 bp, Arabidopsis thaliana columbia
  unsure (1)..(543): unsure at all n locations
atttctcttccacaaagagtcctaacttcgagttgaaacaaacaccatttctcatctctatctcagaaagaacaaaccatttcgtgttctttctttctctattctcataaggaaatataattcctgaaactgttgagttcttgtgaaaggaaataaaaaacatgatgatgggcaaagaagatctaggtttgagcctaagcttagggttttcacaaaatcacaatcctcttcagatgaatctgaatcctaactcttcattatcaaacaatctccagagactcccatggaaccaaacattcgatcctacatcagatcttcgcaagatagacgtgaacagttttccatcaaccggttaactgcgaggaagacacaggagtttcgtcaccaaacagtacggtctcaagcaccattggcgggaagggaagtgagagagagggattctccggacccggcgttggctccggcgacgatcacgacggggtcactccggttcgggggtcnnngggggccccnntttnganancgggggggaacgtggggngg

SEQ ID NO: 94578 - DNA, 465 bp, Arabidopsis thaliana columbia
  unsure (1)..(465): unsure at all n locations
cggacgcgtccgcccacgcgtccgctttgtcccactctctctctttctctttcttgtaccaaaagctttttgaatctccaagattatagcaaaaccaaagataaaatactaacttaaaagatttctgaaaataatgagttgcaatggttgtcgagttctacgaaaaggttgcagtgagaattgcatcctccgtccatgtattcaatggatcgaatcacctgaagctcaaggccacgcccccgtcttcgtcgctaagttcttcggccgtgccggtctaatgtctttcatctccgccgtaccggaatctcaatgccctgctttgtttcagtctttgctatacgaagcttgtgggagaactgtgaatccggtgaacggagccgtcggatttattgtggacggggaattggaatgttttgtcaaagcggcggttnagacgggtgctttcgtgggtngttctttaaaacc

SEQ ID NO: 94579 - DNA, 741 bp, Arabidopsis thaliana columbia
cacatccaccgtttataccgcccattactcaggtgcggtctagcgttgggcgcgcatcgatggatggctgcattacaacgtcaatgcgaatgcctcacgattctcatgtcctccactgtttccacgttccactaatccatcccctataaactgcaatgggagaaaaagcatgctaaagctagcgaagaggatgactgataatttctgtggaggggtttgtgcttcgtcgttacagaaatggagcaaactcaacgttggcaacgtcgacgaagacgttaggataatgactaggaagagtgtaaacaatcctggcgagccccctgggataattctaaatgcggcgacgtcagtttggatgccggtatctccgaggcggttgtttgacttccttggaaacgaacggcttagatcggaatgggatatcttatccaacggtggaccaatgaaagagatggcccatatagctaaaggccatgaccgttccaactccggctgcctcctccgtgccagcgcgataaatgcgaatcagagtagtatgctgatattaccaagagaccagccatacacgcttgcaggaaccggttgccctggtaccccccctggtggatatccccacccaaatgcaaggctgttgaatgaaacggcggggagaatttttggcttaccgtggccccttcctttgtctttcgaggaaataccgcccattctttcccttaaacggggccaacgggcttgggtccc

SEQ ID NO: 94580 - DNA, 470 bp, Arabidopsis thaliana columbia
aaaaaacttagaaagcagagaagagttaaagtgttagagagagagagagactgtgatcggagatgtgtagcaacaaagcaagtccggtcgtcggagaagaaaaacagagtacgagatcatcgaagaggatcaagaagagaaaaaacagagaagctaccaccaccatggaggataagtcttcttccaatcttgacgcgtctcgtaagatcagaacaaaaacgaaaaaacccaaatttctcagtctcaagctcgagctcaacacttctcacgagatcaacgtgaatcccagaagcaagaagagcaagaagaagaacaacaacaaaaaacagagcaagaagaaagaaccggatacgacgccgtttaaggagaagaagagagcagagactactactacactggggggaggagagaaagaagaagagcaatacgacaccgttgcagcttacctctttcaattccgccaccgacag

SEQ ID NO: 94581 - DNA, 479 bp, Arabidopsis thaliana columbia
cactttttcaaattgtcgtctaaagtctctaaaaccaccatcgaagtcttgacagagagaattcgaatcggacagagaatttcttccgtagtttttcttgtaagcgaaaaagaagtttagttagctcgtgtgagagaagggtgtaatgagctgttttggttggtgtgggagtgaggattttcgcaacgctactgacactggcccaaggccagcgcataacccagcaggttacaatggaggccactaccaaagagctgatccacccatgaaccagcctgttattcccatgcagcctatttctgtaccagccattccagtggatgagctgagagatataactgataactatggttcaaagaccttgatcggcgacggttcttatggaagagcgttttatggtgttcttaaaagcggtggtgcagctgccatcaagaaacttgactctagtaagcagccagatcaagaatttctttcccaga

SEQ ID NO: 94582 - DNA, 563 bp, Arabidopsis thaliana columbia
  unsure (1)..(563): unsure at all n locations
gataatagtagattatgtccaaggcagtttgtgtatcatccactagatcctagcctaatgggagtggggactttggatggcgagggggttgttctcaatcacgaaagtgggaaaattttccgttacatcccatctaatggatctcaaagtaccatcttgggactttgttggctcaagatatatccatctatggttatagctggctcagccaatggctcattgaagctgtacgacatccaaaaagcgtcatccacggttactactagcagtcattccacttctggttctgtcacttttgatgagtttgaccaattaacgtcggttcatgctaattcgacggaccaactatttctggctagcgggatactcgaaggatgttgctttgtatgacatttggtaggggaacacgcctacaggtttttgctaatatgcatcaagagcatattaaccgtgggtgaaaattttcggaccattncccgtttctttttgcggctttcttctttcgntaaaantgtaagcttttgggatttnagcaagagccatcccgccatgnnaacccgttt

SEQ ID NO: 94583 - DNA, 443 bp, Arabidopsis thaliana columbia
atcagatgaaactttggaatccgagcccctgcacatgattgtaaatcctgacgatgcaaacgagaacagagtagtcaatggggcagatactgaaattggtgtttccaacttgagccatgtaaacgcagccatgagtcatgttattcctgaagagcaagcttcgctgcagggagatattcttattgatatcaatgaccgggttcctcgtgacttcctctctgaaatattctcacaggcaatctcagaggatacatccactgtccggccatatcctcacgatggagctgctgttagcatgaatgtgcaaaatcacgatcgttaaaactggtcatattttcagcagctggctgaagatcagtttatccaaagaagatgttgtacttgaccaagctgattctcgcattccatctgaccgtaaagatggtggagagagcttcagattg

SEQ ID NO: 94584 - DNA, 770 bp, Arabidopsis thaliana columbia
  unsure (1)..(770): unsure at all n locations
gctcgatctcaagctgaagatgccctgaacaagtttcaaagcatagcaaagaaagatgagggaacaatccaggaactgaagacactgatcaaagaatgcagagctaacagctgcatagagcatgcgaccgggattatggaggaagagagggctccagagaatctgtcgaatggaatgtcaactatatcactaaacaatacagctgcgcaggtggaggagaagtacctgttagacaaactggatgtgtatgaatctgcggttggggattcaaacacgaaaacagccccaaagattgaacggttcccaccggcattacaatctataccgcgtaatccgattgttctagaccttgcctacaactgcatcgacttcccagttattgaaaacaggatgaagaaaaaaggaggcttctttagtagccgaatttcttctctctggtaaaagctttaaaccggctttctctctaaggttaaaaaaggatctcggattcattctccctttttatttaccagactcagaaacttgttgttgctctttcgtagcttctgaaacgaaatgcatgagatttctgttaaatttattttgtcacagaatcacaatttagacattttgttcttccattttagtgacacttggaattttggaaatagagaccagttttattggtnnnnnnnnnnnnnnnnnnnnnnnnnnnnnnnnnnnnnnnnnnnnnnnnnnnnnnnnnnnnnnnnnnnnnnnnnnnnnnnnnnnnnnnnnnnnnnnnnnnnnnn

SEQ ID NO: 94585 - DNA, 1204 bp, Arabidopsis thaliana columbia
ttaggtcacactatagaagatctatgacgtcgcacgcacgcgtacgtaagctcggaattcggctcgagctcaatttcattctctcttctctctccaatttcacaacaagtgggagtctaaagtttcgttgaaggtgggattgcctctgtaatcgccggctgctctactcaccctctcgatctaatcaaggttcgtcttcagcttcacggtgaagcaccttccaccaccaccgtcactctcctccgtccagctctcgctttccccaattcttctcctgcagctttcctggaaacgacttcttcagtccccaaagtaggaccgatctcactcggaatcaacatagtcaaatcggaaggcgccgccgcgttattctcaggagtctccgctacacttctccgtcagacgttatattccaccaccaggatgggtctatacgaagtgcttaagaacaaatggactgatcctgagtcagggaagttgaatctgagtaggaagatcggtgcagggctagtcgctggtggaatcggagccgccgttggaaatccagctgacgtggcgatggttaggatgcaagctgacgggaggttacctttagcgcaacgtcgtaactacgccggagtaggagacgcaatcaggagcatggttaagggagaaggcgtaacgagcttgtggcgaggctcggcgttgacgattatccgagcgatgattgtgacggcggctcagctagcgtcttacgatcagttcaaggaagggatattggagaatggtgtgatgaatgatgggctagggactcacgtggtagcgagttttgcggcggggtttgttgcttcggttgcgtctaatccggtggatgtgataaagacgagagtgatgaatatgaaggtgggagcgtacgacggcgcgtgggattgtgcggtgaagacggttaaagcggaaggagccatggctctttataaaggctttgttcctacagtttgtaggcaaggtcctttcactgttgttctcttcgttacgttggagcaagttaggaagctgcttcgagatttttgataccattcttttattgatgatgatgatggcgactgtttatattgatttattcatttttgaaatagtgaacacaagaaggaactaggaagagggggattcaatatattttttgttcaagcattgttgttaaatacaattcaattttagtttctat

SEQ ID NO: 94586 - DNA, 801 bp, Arabidopsis thaliana columbia
ctctacgacttacttagggaacgctggtacgcctgcaggtaccggtccggaattcccgggtcgacccacgcgtccggtcacaaaacaaaactcgctgcaaataaatacctttgtttacctcttcttctccttcactcacaacatctcaatttcattctctcttctctctccaatttcacaacaatgggagtcaaaagtttcgttgaaggtgggattgcctctgtaatcgccggttgctctactcaccctctcgatctaatcaaggttcgtcttcagcttcacggtgaagcaccttccaccaccaccgtcactctcctccgtccagctctcgctttccccaattcttctcctgcagctttcctggaaacgacttcttcagtccccaaagtaggaccgatctcactcggaatcaacatagtcaaatcggaaggcgccgccgcgttattctcaggagtctccgctacacttctccgtcagacgttatattccaccaccaggatgggtctatacgaagtgctaaaaaaaaaaggccggcccttgttcgggaaatttaatttgagtaagaaaactgggcagggatattccctggtggaaatcgaccccccttgaaatcacccgcccggcaatggttaaatgcaaccgccgggggttacctttaacgaacggctacctccccgcgagtggagcccatcctggaccctggtatgggaaaggtcacaactttgggcgaggtccgggtcaccataaaccccaatatgtgcacggcgtttttgcgcctccccctttaagaagggttttgga

SEQ ID NO: 94587 - DNA, 1464 bp, Arabidopsis thaliana columbia
  unsure (1)..(1464): unsure at all n locations
gcacgaggagagaactactctctctatctctctttctctctatctctctctatctctctcatttcttcctgcgtcaatggcgactcaaggtcaggttatcacttgcaaagctgcggtggcttacgagccgaacaagcctctggtcatcgaagatgtgcaagtggctccacctcaagctggtgaggttcggatcaagatcctctacactgctctttgtcacaccgacgcttacacttggagcggcaaggatcctgaaggtctctttccttgtattctaggtcatgaggctgctgggattgttgagagtgttggtgaaggagtaactgaagttcaagctggagatcatgttatcccttgttatcaagctgagtgtcgtgaatgcaagttttgcaaatctgggaagactaacctttgtggcaaggtgagatctgctactggtgttgggattatgatgaatgaccgtaagtcgaggttctcggttaatgggaaacccatttatcacttcatgggtacttccacgtttagtcagtatactgttgttcatgatgttagcgtcgccaaaattgatcctactgctcctttggataaagtttgccttcttggatgtggtgttcccactggccttggagcagtttggaatactgcaaaagtagaaccagggtcaaatgttgccattttcgggtctttggcactgttggacttgctgttgccgagggtgcgaaaacagctggtgcttcaaggatcattggcattgacatcgatagcaagaagtatgaaactgcaaagaagtttggtgttaacgaatttgtgaacccaaaggatcacgacaagccaattcaggaagtgattgtcgatctcactgatggcggtgttgactacagctttgagtgcatcgggaatgtctccgtgatgagagctgcattggagtgctgtcacaagggatggggaacttcggtcatagttggtgttgcagcatcaggacaagagatatcaactcgtccgttccaactcgtgactggccgtgtgtggaaaggaacagcttttggtggtttcaagagtcgaacccaagtgccttggcttgtagaaaagtacatgaacaaggagataaaagtggatgaatacataacacacaacttgaccttgggagaaatcaataaggctttcgatctattgcacgaaggtacttgccttcgttgtgtcctcgataccagcaaatgactatatgggtcctctctgctttaatctatgtgttcttgtgactttcgtcttttatcggtattgacatttcctaagagcaacagactactctactcgtgtgtgtctcgtttctatcttatgcttcaataaaatatcaattaagaccggaaaaaaaaaaaaaaaagcccacgcgtccgnnnnnnnnnnnnnnnnnnnnnnnnnnnnnnnnnnnnnnnnnnnnnnnnnnnnnnnnnnnnnnnnnnnnnn

SEQ ID NO: 94588 - DNA, 443 bp, Arabidopsis thaliana columbia
cttcttctctcttcctcatatttattactctctctttcacaaacacacagaaaataaataaataaaattaattaatgtgagaaaatcaattcaaaaatttggacatacgtatcatctgagagaagaagggtttggtgaataccggcgggtggaaccgacggcgatggcgaagaccggtgttttcgattcggatccgacggcgattgctaaagccaaggaactgaagcgtgagatgaagaagttgctgattaagatcgatgacgaagatgatttgggtgttcagacgattgatcagttacaggacgctttgtctgcgttgagagaagcgacgatgaggaagatggcgaaatcttcctcgttagagatgctcgagactgtgtcttgtcctgaggagtttcgttgtcctctctctaatgagcttatgagggattccgtcgttttgg

SEQ ID NO: 94589 - DNA, 617 bp, Arabidopsis thaliana columbia
  unsure (1)..(617): unsure at all n locations
cgccgtcttcttcaaacgccgattcaatcttcttttagtccccggcgaccagagcgtcggtatcttctagaaccaaacacgtggcggacggaaaccgctcgattctccgagataactcgtcgattagctccgatccctttagattcctctgagaccgaatcgggtaatggcaaacccaaggtttcaaatttatgtgtggctttaagatatcggcgaggatttcgtctactaagtggaagagtagctttctattgcatcgaagagagagattttccggtgaatttctaggtctggttgatgtaacagcgaaatgttcgaggaagtagaagattgatggatcaagtgggtgtgaaggagagaaccatttagcgtatgagattggtgtgtctctgtcgattcctgttcttcttagggttcttgttatgtactctaattcgcggccggggttggtnaatgtggtgttgtnattggctcggaaactagggncnctgatnatnatgcctgttcttggggttnggttccctancctttaaggttcctnaaaaccatgnntaaccnttaaanttaaccttgggnatggggaangggaagagggttttcccgttttntnggttaac

SEQ ID NO: 94590 - DNA, 790 bp, Arabidopsis thaliana columbia
  unsure (1)..(790): unsure at all n locations
cgcgtccgcggacgaatcatgactctgcttccgatttcaatcttcttcttctttttattttgcattccttcgccattaatcgccgccgctaacgatgacgatataccgacggcgtacactctcctccaaagctacaactttcccgtcgggattcttcctaaaggagtggtgtcatatgatttagataaatctactggtcaattccacgcgtatttcaacaaatcgtgcagtttcgctcttcaaggctcttaccaattggattacaaatcgacaatctctggatacatatcggagaacaagatcacgaagcttaccggcgtgaaggtgaaagttctcttcttgtggctcaacatcgttgaggttattaggaacggagacgaactcgagttctccgttgggatcacatcggcgaacttcgagatcgatgagttttacgagtcgccacagtgtggttgcggatttgattgcaaaacgaagacgaagactttgggaagaaacccttttgtttcttcggtttaaaggttaagacttcttattgcagaatctgaactctttggatgatttatgttctttctccaatcatttaatttttcaatcaatgctttgtttgtatctcttcttaggatcgaaccgataagttgtatttatgaaccgatcaggaataaaacagtggtggaaaaagttaattcttnnnnnnnnnnnnnnnnnnnnnnnnnnnnnnnnnnnnnnnnnnnnnnnnnnnnnnnnnnnnnnnnnnnnnnnnnnnnnnnnnnnnnnnnnnnnnnnnnnn

SEQ ID NO: 94591 - DNA, 646 bp, Arabidopsis thaliana columbia
ctctttctccgatcgatctgctagacgatgacgatgagtttccttctataaaaccagtaactacgagatttgatttataacaatcatgaaactctggtcatgtttgaaaatccagcttcaaatagtcctcatcttcgtaaatctagtagcaaatctgtcttcattgatcctggtttaaacggacatttaggtgaaatgggtgaccttaaaggttcaaattcaccacttcatataacacctatggttccttctcctatcttcctcgggagatttaaggtggttttgggtctgttttgggctttatgttgctgcaagattggatgggattcagttatgagaatgagtatcgacctgcgagatttatttttgtatgaagcgtttctttattacaatcctcttcttcttgtgacaatgatggtttggctgtggggagtgaacttatgggtgttctctcaaggaagtgttaattattccaaagtctttgatcttgatcataaccaccttactcatagagagatgtggaagtgtagcatgtggatgacaatcattgtcccaactagcatgacagcgtatctatatctgtattctcatggggaagtatctttggctgcttcacaaccggtgctcctgtacattgcttttgctt

SEQ ID NO: 94592 - DNA, 964 bp, Arabidopsis thaliana columbia
  unsure (1)..(964): unsure at all n locations
ggaancccggncgacccacgcgtccgggggatacagagagaagccaaaccggattgccgcacgaacggcgtcgggttagtccgacggaggaaccatgtcctcgtctcttcttctctccggttctactgtatcttcttcgtttatcgctccatctaagccttctctcgtacgaaattccagtaagacatcactgttaccatttcgtaatgtttcgagaagcttcaaaaccgtcaagtgcaccgttgattcttcatatggaggcaatgttcccacgttccctcggacgagagtttgggacccgtacaaacgtctaggagttagtccatatgcttccgaggaagaaatctgggcctctcgtaactttcttttacagcagtacgctggacatgaaagaagcgaagagtctatagaaggagcctttgagaagcttctcatgtctagttttatcagaaggaagaagactaaaatcaatcttaaatcaaagtgaagaagaaagttgaggaatctcctccgtgggctccaaagctcttcccgatttcgttgaaatgcctcccatggacactattttcagaagacttttcctctttgccttcatgggtggttggagtatcatgaactctgcagaaggcggtcctgcgtttcaggtggcggtatcattggctgcgtgcgtatattttctgaatgagaagacaaagagcttggggagagcttgctttatcggaaatggagccttagtttccggggtggttctccggttcgttaatcattcccatgattccgacgtttctcattcagcctacatggacactcgagctcctaacatcactggtcgcttatgtgtttttgtttctttcttgtactttcctcaagtaagttacgttgtggttttatccaaactctttttgttcttttcgcccagacatttacaaaaccttaaggaaaaattagtgaaagttgttaagtg

SEQ ID NO: 94593 - DNA, 429 bp, Arabidopsis thaliana columbia
cttaaaaagagctctgctttgagatcttagccattaagttctcttgatgatgtctggttcaagattagcctctagactaataataatcttctcaataatctccacatctttcttcaccgttgaatcgattcgactattccctgattcattcgacgatgcatcttcagatttaatggaagctccagcatatcaaaacggtcttgattgctctgttttagccaaaaacagactcttgttagcttgtgatccatcagctgttcatatagctatgactctagatccagcttacttgcgtggcacggtatctgcagtacattccatcctcaaacacacttcttgccctgaaaacatcttcttccacttcattgcttcgggtacaagtcagggttccctcgccaagaccctatcctctgtttttccttccttgag

SEQ ID NO: 94594 - DNA, 512 bp, Arabidopsis thaliana columbia
agctctatacgactcacttattaagggaaggttgtacccctggaggtcccggcccggatttccgggttcaaccaagccttccgccaagccttccgggaaagctttcgctgcactcgctgtggggtgcgtcctctggcctctggtagctggccatggatgggttaccaatccacaacctagaggttacaccggtactcaggatggtgctagccaaactgctgcctgtggtattgcaggaacataccctcaagttgtttctctgaccaacggagattacttgaacgtttcttggacaatcggaggcggacacgatggaaatggagttggaccaaacacttgcagattcgcttggtctctttccgatacctctacttccgatttcaatagccacgttctcattgacggcctcaactgctcagctggaaacaaattcaaatctttccaagtcaacactgcagtgactactccatctactgcttacttgcaatttagatggtccgctggtgatggtg

SEQ ID NO: 94595 - DNA, 365 bp, Arabidopsis thaliana columbia
gagaaatcttctgagcgaaattctgacaaaagagatgatggaatgggataatcagcgacaacccaataaccatcactcttctaatcttcaagggatcgacgttaatggcggctccggcgccggaggacgaatgtacgtgaaggtgatgaccgatgagcagtatgaaactctcaggaaacagattgctatttacggcaccatttgtgagcgtcttgttgagatgcataaaactctcactgctcaacaagatcttgcaggagggagaatgggacgactatatgcagacccaatgatgtcatctttaggtcataagatgactgcttgacaaaggtggactcctacgccagtccagctttagattcttg

SEQ ID NO: 94596 - DNA, 1141 bp, Arabidopsis thaliana columbia
  unsure (1)..(1141): unsure at all n locations
gaagattactactaaacagagtcttttttgacttgccaaaaacacatctgtctctctctctctctttgcggatctgaaatggcgattcctgttatcgatttctccaaactcaatggtgaagaaagagagaagacactgtctgaaatcgctagagcttgcgaagagtggggattttttcagctggtgaaccatggtattccattggagcttctaaataaggtgaagaagctgagctcagattgctacaaaacagagagagaagaagcattcaagacttctaatcccgtgaagttgctcaacgaattggttcaaaagaactctggcgagaagctagaaaacgtggactgggaagatgtcttcactctcttggaccataaccaaaacgaatggccatccaacattaaagagactatgggagtatacagagaagaagtgaggaagctagcgagcaagatgatggaagtgatggatgagaatttgggtttgcctaaaggttacataaagaaagctttcaatgaaggaatggaagatggagaagagacagctttctttgggactaaagtcagccattaccctccttgtcctcatcctgagctagtcaatggccttcgagctcatactgatgcaggaggtgtcgttttgcttttccaagacgatgaatatgatggccttcaggtcttgaaagacggcgagtggatcgatgttcagcctctacctaatgccattgttatcaacactgggtgatcagattgaagtccttagcaaccggaaggtacaagagtccgtggcccagggtgttgccgaagggagggaaggaaccagagggcctatagcttcccttctacaatccggcggacaaggcggcgataggggccagccccgggggccggaagagggagggaagttnagaagatctatcccaaagtttgtgttgggagattccatgggatggtttttncaacccagaagtccatgncctaaaanagnccccgtttccaacctggaaagcccccccaaaatganccaattnaattaaatttttcaaggaccannccccgggtttncnnaccccctatggatttnccctnaacganaaaatccncaatttnttnggaaaaaatttgggcnngncccccagggt

SEQ ID NO: 94597 - DNA, 633 bp, Arabidopsis thaliana columbia
ccttgttgtactctcaaattcttgggtcgttctgagtcgtctccgcgttaaatcttttccctttttgatcctttcttcctttcttcttcttcttcgcattgatttggtcctccttcctcttctattctattcattaagaacctaatcttcatcttctccatcttcttcttcacggactccacttcgctcatccaggaaggtttattagtagtaaccaatccaagtgttccttttgtttgaagcaacaagctttgtgatattatcctgagagacaatgtttggtttaaggaaatcaccggcaaatcttcccaagcataactcagtcgacctcaagtcttccaagccaaatcctttcgattcagatgatgaatctgacaacaaacatacccttaacccttctaagaggactacctctgaaccctctttggctgatatgacaaacccttttggtggtgagagagttcagaaaggagatagtagttcatccaaacagtcattgttttcgaactccaaataccagtacaagaacaatttccgtgattctggtggtattgaaaaccagtcggttcaggagcttgaaggttatgctgtgtacaaggctgaagagactacgaaatctgtacaaggttgttt

SEQ ID NO: 94598 - DNA, 425 bp, Arabidopsis thaliana columbia
accacgcgtccgtaactttttctttttgggcatttcctatttctcccttcgtctccatcaagcaaccctctctctctctctctctctatcatcatcatcgcagaggagacgatcttacgcgacgaatccttgagagattgagagggacaagcgagttttgtaggtgtctcagaccggacccaaggattgttgacggtctatattgaacaagtaaacaaggatgcgtaagtggatctgttgtacatgtcaaatagaagactcaaatgaagagcaacaactgaaaagttcacagcagcaatctgatgcaaatcataagaattcaaaaccagcacctgttgcaaaacatgaggttaagaaggaagctcttcccatcgaggtccctcccttgtctttggatgaggtcaaggaaaagactgaaaattttg

SEQ ID NO: 94599 - DNA, 514 bp, Arabidopsis thaliana columbia
gccaaagctgttaactttttctttttggccatttcctatttctcccttcgtctccatcaagcaaccctctctctctctctctctctatcatcatcatcgcagaggagacgatcttacgcgacgaatccttgagagattgagagggacaagcgagttttgacccaaggattgttgacggtctatattgaacaagtaaacaaggatgcgtaagtggatctgttgtacatgtcaaatagaagactcaaatgaagagcaacaactgaaaagttcacagcagcaatctgatgcaaatcataagaattcaaaaccagcacctgttgcaaaacatgaggttaagaaggaagctcttcccatcgaggtccctcccttgtctttggatgaggtcaaggaaaagactgaaaattttggatccaaggcactgattggtgaagggtcttatgggagagtatattatgcgacactaaatgatggtgtggcggttgctctgaagaaacttgatgtcgcaacctgaagc

SEQ ID NO: 94600 - DNA, 653 bp, Arabidopsis thaliana columbia
atctggtgttcttctcgtacttgcggattcctccgaattgtttcttcacagtttcttaacgcttggaagtatggtgagtgagagaagagtgcatccggattgtataaacgcttcaaatccttatcacgagtgtgtcgagtattgctttaagaaaatcgctgaagcaaaggccagattcgagaagcagaacactggattagctaaagttcacgagcagacgagggagccgctcgatgataaaagaatagaggaagatagttcagaagaagaagaggaggaagaggataaccgagaacctcaagtagatgtaactcaacttacagggagacaaaagaagttgtttgagttgagacttaagatgaatgaagcaagaaaatccaatcagacggatgtcgggagtgaaaagaagaaaatggaagcaccaacagagacattaggaatctcataacagaaatggttggaggggaggaagaaaaagattgggaaacttcttgatgctaatggtttagatatgacacaggcttatatgctcgatactcaagaagcagctgaatcaaaatacaaaaaatgggaaaaggaacctacgcctgcgggttgggatgtctttaaccagaagacgttatacaacgcatacaagaaacggacaaagaaca

SEQ ID NO: 94601 - DNA, 783 bp, Arabidopsis thaliana columbia
  unsure (1)..(783): unsure at all n locations
gagctcccaggccggggggggaggaccncanccggcgagnagnatcgnnacagaactangagcagactctccaaaaacacccagtcatgggctctgtggatattccctcgggtgggcacgttgaagttggagaccatgaagatggaggaattaagcctgatatgttggtatctttgactgccccaaaattatgtgcaaagagattccgtggccctcatcactttttaggggggagatttgtaccaccttctgttgcagaaaagtataagctggagctccctagttacccagggacatctatgtgtgttagaattggtaaacctcccaaagttgacatatctgctatgagagtgaactatgtctctccagaattgcttgaggagcaaggttgaaactgttcctacggtccagtttcgtaaatggtttgatgaggcagttgctgctggattgagagaaacaaatgctatggctttgtctacagcgaacaaggacaaaaaaccctcatcaagaatggttttactaaaaggatttgatgagaatggatttgtctggttcaccaactacgaaagtaaaaagggttctgatttatcagaaaatcctagtgcagcacttcttttttactgggnaattttgaaccggcaggtaagaattgaaggnccagtggaaagaatacctgaggcagaatcccnggataccttccatagccggcctagagnagccantttgggccattgtagcagcagagtcctgtgacctgcagnatgtcntncgcgattgagacta

SEQ ID NO: 94602 - DNA, 996 bp, Arabidopsis thaliana columbia
  unsure (1)..(996): unsure at all n locations
nnnnnnnnnnnataccactcactaagggaaagacggtacgcctgcaggtaccggtccggaattcccgtgtcgacccacgctgatctgtaaagccattatcactaccaatccaaaagagcttttattaatacaccttactcgtgaccggattcgcagagttcacgagcttccgagtcaaaaacactctaaaacaaaaccatgactttgttccatagactcgatctcatcgatccgtacacgtgtacaccactcatcgtccgtgaaacctccattgttgaaccttcatcattgttcctagggtttccttccttcatcgacgaagacattgaagatctcttcgagttttcatcacctaatcctctcgatctattcgaaaccgtgacggatctggttaagattaagaaatctccgtcgtcttgcaagtacaaggtgattcgtcggagattagagccggagtatccattgaagtatctttgtgaccgtgtttctgatttggaatcaaagtttgatagattgggtagtcctaagagtgataggatgtatacattgacgaaggagataaagggaagtggtgagaggaagtataaatgggaggcggagattcaaggaccgttggagaggatgtataagttggaagctgagattgaaggttcgggagagaggaagtatagatggacgacggagattaaaggagggaagatggatgaggaagggttaaagttagctgctttgaagaaggagaaggcgaaagctatagctattgctgctgctgaagcggagaagaagatgaataagaataagaagaagagttataattggacgacggaggtgaagagtgagagagagatgggtgaggtttcgcatacttatatcatcaaggctactactggaggaaaaaaaaaaaaaaaaaaaaaaagggcggcgtctagagattcagctnnnnnnnnnnnnnnnnnnnnnnnnnnnnnnnnnnnnnnnnnnnnnnnnnnnnnnnnn

SEQ ID NO: 94603 - DNA, 553 bp, Arabidopsis thaliana columbia
  unsure (1)..(553): unsure at all n locations
cnnnnnnnnnnnnnnnnnnnnnnnnnnnnnnnnnnnnnnnnnnnnnnnnnnnnnnnnnnnnnnnnnccacgcgtccggaaaatttcagatgaaaactttggaattagctttacctccatctccaccgtctttagttccttcttttaactacaattccaccgcacgaagcgtcgggaatgatgtcagaaccaacttcgatgttcaactttttctaaggaaacctaaacaccaaaaatcagaacctgtcgtcgttattcaacaacctcagattcaaccgcaaaatccaagttctcgttgttctacttctgatattctcagactaatggattctctttctttaccaggaaacgaagatatttactcttgtcttgccaaagaatcagccagagaaaacgatcaacgtggagctcacgagctacaagtgcatatcatgaagtctagtattagacccacgatcacttttatcaatcgtcttcttttgatgcatgtttcgtgtgggcgtttagatattacacgccagatgttcgatagaatgcctcacagagattttcat

SEQ ID NO: 94604 - DNA, 941 bp, Arabidopsis thaliana columbia
  unsure (1)..(941): unsure at all n locations
gcagtaccggtctggaattcccgggtcgacccacgttctccctcctctgctctctcatctacttcctctgtatattcttcgcacaaaattaagtttctaaatccagtttctgacaatggaaacaaaccatttatacactttgtctacacttgttgttatgctgctagtgtcagtgacaccgacagtgacatcaaaagacgaggttgtttcttgtacaatgtgttcttcatgcgacaatccatgtagtcctgtccaatcatctcctccgccaccttctcctccaccaccgtcaacccccacaaccgcatgtcctccccctccttctcctccaagctccggtggcggtagctcttactattaccctcctccttctcagtccggtggaggcagtaaataccctccaccatacggtggcggtggtcaagggttattactatcctccgccgtattcaggaaactatcctacgccgcctccgccgaatccgatcgtcccttatttcccgttttactatcatactccaccaccaggttttggctcagatcggtttatgagttcttactctattatttttgctctttttgctgtctttctctgtttagtgtgacggaaaatagtcggaaattcgccgggaaaatgacgaagaaaaagtcgaaataatgtggcagatccgtagatctataaatctttagatttctttgatcatggaaactaaatgatgttggatcttttactttcttcgatctgttttaactttttcttttgttgttgacaactttgtattcacattgttcttgattattaatatattaattactcgttaaaaaaaaaaaaaagggcggccgcgttaaaggatcccagcttacggacgggtgcctgcgacgtcannnnnnnnnnnnnnnnnnnnnnnnnnnnnngaaatcatacccaaagggggcgcggc

SEQ ID NO: 94605 - DNA, 863 bp, Arabidopsis thaliana columbia
  unsure (1)..(863): unsure at all n locations
nctgagaggtgggcgaatgatccaagagaagaagaacaatctctcttagatcgtttgatctgatccaatcgaagaagaagatgggaatcttattcacgcggatgttctcttccgtctttggtaacaaagaagctcgaatcctcgtcctcggtctcgacaatgctggaaaaaccacaatcctctatcggcttcagatgggggaagttgtctctacgattccgactattggatttaacgttgagactgtgcagtacaacaatatcaagtttcaggtctgggatttaggtggacaaacaagcatcaggccatactggcgatgctatttcccgaatacacaagcagtgatctatgttgttgactcgagtgatacagatagaatcggggtggcgaaagaggagtttcatgcaattttagaggaagatgaattgaaaggtgcggtggttctgatatttgcaaacaagcaggatcttcccggtgcactcgatgatgcggctgttacagaagccttggagttgcataagataaagagtcgtcaatgggcaatcttcaaaacttgtgctgtgaaaggcgagggacttttcgagggattggactggttgagtaatacattgaagtcgggaagtggctaaaatcatcgtcatacaccaatctgtcacatttctcaagagtgtaactttgatcatttttacttattggtttgtttagtatcttttttttatcttagttcttcatcttaaagagttaatatcaatgacatgttcacttaatattctctttttgttgttttgtttcattctgaaagaaaaaacccaacacagatttttgattgagacccataaggggtaatatcatcactttttaac

SEQ ID NO: 94606 - DNA, 752 bp, Arabidopsis thaliana columbia
gacctcccagcccatttaaatgtctggcaaaaggtctgtttaaggtaacaagggctcgtctcagcatctacgacccacaagtcactgaagagcagatccaaagagacttaaccatgaacaaattcgactgggaccacccacttcatctccagcccatgagccccaccactgtgaagcaagtctcagtcgcttgggacgcatacactgcaaccaaagacgcccacggtatctgcattttaaccgagtgggacgagttcaagaaacttgatttccagcggatctttgagaatatgcagaaaccggcttttgtttttgacggtagaaacgtggtcgacgctgataaactcagggagattgggtttattgtttactccattggtaagccattggaccagtggctcaaggacatgcctgctcttgcctaaacaacaaccaaacctcttccttagcttttttctccattttttccgaattctcatgagtttttccatatatctttaactacagtatgtttgatcaataattgtttcttttgttcttcctattatgaattcctacagagattttaggtttggttcttgttggtaattatgtaccttgggttatcaaatattgtaagcttttcgaatattactttcataatataaaagttttcccaagttaatttctaaaaaaaaaaaaaaagggcggccgctctagaggatccaagcttacgtacgcgtgcatgcgacgtacatagctgttgtatagtg

SEQ ID NO: 94607 - DNA, 731 bp, Arabidopsis thaliana columbia
gtatctccgtggatcaatcgcagccgttcattctgttcttcgccacgcgtcttgtccagagaacgtcttcttccatttcatcgctgctgagtttgactctgcgagtcctcgtgttctgagtcaactcgtgaggtcgacttttccttcgttgaactttaaagtctacatttttagggaagatacggtgatcaatctcatatcttcttcgattagactagctttggagaatccgttgaactatgctcggaactatctcggagatattcttgatcgaagtgttgaacgagtcatttatcttgactcggatgttataactgtggatgatatcacaaagctttggaacacggttttgaccgggtcacgagtcatcggagctccggagtattgtcacgcgaacttcgctcggtatttcacttccggggtctggtcagacccggctttaccgggtctaatctcgggtcaaaagccttgctatttcaacacaggagtgatggtgatggatcttgttagatggagagaagggaattacagagagaagttagagcaatggatgcaattgcagaagaagatgagaatctacgatcttggatcattaccaccgtttcttttggtgtttgcgggtaatgttgaagctattgagcatagagggaaccaacatggtttaggaggagacattttacgaagaagtttttggtcatttgcattcttgttctgtgagcttgtttgcattg

SEQ ID NO: 94608 - DNA, 574 bp, Arabidopsis thaliana columbia
  unsure (1)..(574): unsure at all n locations
nnnnnnnnnnnnnnnnnnnnnnnnnnnnnnnnnnnnnnnnnnnnnnnnnnnnnnnnnnnnnnnnnnnnnnnnnngcccacgcgtccgtacggctgcgagaagacgacagaagggggaagaagaacatcacaaatggcttcccagagttcttcactttttctggttatcttcttcatcttcatctacgcttcttcaattccatcctctattctcgccagagcacatgaacatgacggagatgaagagatcagaagcgttgggcgtagattccttctaggtttcaaagaaactccaaaaggaagtaatatcaccttcgcttgttctccttcaggtccttgtgtctcttgcaattcctccgaaaagagaaaagagaagtatcgttgcagtgaaactggttatcgtattcctttcaaatgtaaagaggttagagaagaagtggatgcacataagaaaaatggtgaagatgaaacacacaatgatcaatcgaataacactggcgaagaaccgcaaacaaggaatctggtggatgattcatcaccggcgacaaaggggaagcttagtcttcaaaacttat

SEQ ID NO: 94609 - DNA, 802 bp, Arabidopsis thaliana columbia
  unsure (1)..(802): unsure at all n locations
tgcttgaaaatttctccccccttttcttttttttggacactttccccatagttcattcgaaaccttaaaacaagttttgaggaanaaccaggaccaagagagttgtgtttttgattgaagcaaaagtgttttagtgtctccttccaattccttccgaaaagagaaaagagaagtatcgttgcagtgaaactggttatcgtattcctttcaaatgtaaagaggttagagaagaagtggatgcacataagaaaaatggagaagaagaaacacaaaatgatcaatcgaataacaatgacgaagaagcgaaaacaaggaatctgttggatgattcatcaccggcgacgaaagtgaagtctcagtcttacaaaacttatagaagctgtgtgccatctgcagacgaagagaagttatcagttcttggttttgagtcgattatgctaggactgtttctgttaagcggagctgctatttacatcagaaagagacagacggtaccgatgcttggggtatcatcaagtggaagattgcaaggcaattctcggttttgaaagaaccatttctcggtatgtaaaagctttcatctgctcactcagaaacagatttaacatttgtcattgtctgttgaaagatgagatatgtttgagtgtatagaatagctttagggggacttcatataattgggactacttgtttcatatatggcaaccatgtttggctttgatgatgtaactttgcttatcgtctctgaactgcggccgcgaattcgagatcaagcttatcgataccgtcgaccggagggttg

SEQ ID NO: 94610 - DNA, 541 bp, Arabidopsis thaliana columbia
  unsure (1)..(541): unsure at all n locations
ggtttgattttgtattttttttctttatagaaaattttgaggtttttcaattgaatctaaaagaattgatgttgttggtgcaggcttatgagtgcaatgccatccaagaagatgcttcttgatttgtcgaccggagaatccagtggaatgaattactcttctacttctcctacataaaacctacacttttttttttttttttcacaatggtaatttgtaattgtaatcattagattatgattatatagttaccatttatattcttacgagcaggagaagacgttagggcgtctctgtatttgatcattgtttgtaatgctttggtctgtttattgtaggattccattataactttaagaactaacagatatatgtttgtcatggactcatgtctgtcaagaatttaatatcaaataaaattcactataatttttttaaaaaaaaaaaaaaaaaaaacacaaagnnnnnnnnnnnnnnnnnnnnnnnnnnnnnnnnnnnnnnnnnnnnnnnnnnnnnnnnnnnnnnnnnnnnnnnnnnncat

SEQ ID NO: 94611 - DNA, 982 bp, Arabidopsis thaliana columbia
  unsure (1)..(982): unsure at all n locations
cnnnnnnnnnnnnnnnnnnnnnnnnnnnnnnnnnnnnnnnnnnnnnnnnnnnnnnnnnnnnnnnnnnnnnnnccacgcgtccgcggacgcgtgggcggacgcgtggggtttgaaaggtgaaactggagatagcaaaccggttcgagaagctgaaagaatgtatggaaaacaaatccataacactgctgctacctcatcaagctctgccactcacactgataatttctcaaggtgtagggacacacccgttgctgcgactaatgcaatgagcatgatcgaatcattcaatgcagctcctcgtaacatgattccttcaggtatgtgtgtctaatatcaacatcaaaacaaaatataatcaagatttttgcttcctcaaatcatatgtctaaactcgaaaattgcttttttccagtccctcaagctcggaaagcatccttggctcggttcttggagaagcgcaaagagaggtttgattttggattttttttctttatagaaaattttgaggtttttcaattaattaaaaacaatcttttgtgggggcggccttatgagggccatccaaccaagcaaaggttttgggttttcgcccggagattcagtggaagaaatatttttcaattctcaaacaaaaacctacaccttttttttttttttttacaatgggaatttgcaattgtaatcattagattatgattatatagtcaccatttttattcttaccagcagtagaacacgttagggcgtctccccattcgaccattgtttgtaatgctgtggtctgttaattgtaggattgcattatacctttaagagctaacgagatatatgtttgtcatggactcatgtctgtcaagaatttaatatcgaataacattcactataatttttttccgcccaaagaggcctcaaacccctaggtcagccgctctagaggatcccagctcacgcacgcgtgcatgccacgtcaaagtgttgtaga

SEQ ID NO: 94612 - DNA, 1301 bp, Arabidopsis thaliana columbia
  unsure (1)..(1301): unsure at all n locations
nnnnnnnnnnnnnnnnnnnnnnnnnnnnnnnnnnnnnnnnnnnnnnnnnnnnnnnnnnngtccgaccacgcgtccgcccacgcgtccgctgtaacattaccaaaacgaaaccttccttgtggattcccacttctttcttctgttttcttcttcctcttctttaaattggatgttttgggcaagaaacagagagaaacacgttaatttgagagtttgtcattgaatatttggtttgcaatggaaagagattttctgggtttgagcgacaagcagtatctaagtaataacgttaagcatgaggttaacgatgatgctgtcgaagaacgagggttaagtacgaaggcagctagagaatgggggaagtcaaaggtttttgctacttcaagtttcatgccttcttcagatttccaggaggctaaggcgtttccgggtgcataccagtggggatcagtttctgcggccaatgttttccgcagatgccaatttggtggtgcgtttcaaaacgcgacgccgcttttactaggcggttcagttcctttaccaactcatcctctcttgtcccgagtggcttcctccggatcatctcctcagctcacaatcttttatggcggaactataagcgtctttaatgacatatctcccgataaggctcaagccatcatgttatgcgccgggaacggtttgaaaggtgaaactgnagatagcaaaccggttcgagaagctgaaagaatgtgtagggacacacccgttgctgcgactaatgcaatgagcatgatcgaatcattcaatgcagctcctcgtaacatgattccttcagtccctcaagctcggaaagcatccttggctcggttcttggagaagcgcaaagagaggcttatgagtgcaatgccatacaagaagatgcttcttgatttgtcgaccggagaatccagtggaatgaattactcttctacttctcctacataaaacctacactttttttttttttttttacaatggtaatttgtaattgtaatcattagattatgattatatagttaccatttatattcttacgagcaggagaagacgttagggcgtctctgtatttgatcattgtttgtaatgctttggtctgtttattgtaggattacattataactttaagaactaacagatatatgtttgtcatggactcatgtctgtcaagaatttaatatcaaataaaattcactataaaaaaaaaaaaaaaaaagnnnnnnnnnnnnnnnnnnnnnnnnnnnnnnnnnnnnnnnnnnnnnnnnnnnnnnnnnnnnnnnnnn

SEQ ID NO: 94613 - DNA, 464 bp, Arabidopsis thaliana columbia
attctgtggccggcgatttccctcccgatccacttctcgcctccggagccttcatctcctccgccggtgacggaaccctagacagtagtgcgaaacgacgaccgattcagggaggaatcggaatttctggttcgggagagagcgtacgcatcgggatggctaacggcactgatcaggtgaatcatcagacggaatcgaagtcgcggaagcgtgcggcgcctggagataattggttgcctcctggttggagagttgaagataagattcgaacttccggtgccacagctggttcggtggataagtactattacgaaccaaatacaggacgtaagtttcggtccaggactgaggtgctgtactacttggaacatggaacttctaaaagaggcaccaagaaagctgagaatacatatttcaatccagaccattttgaaggccaaggaagcaatagagtcaccagaacc

SEQ ID NO: 94614 - DNA, 638 bp, Arabidopsis thaliana columbia
  unsure (1)..(638): unsure at all n locations
accacagctaataacatgaatagcttcttttttcatcgatctcgtgttcgncacctccctcgatgctctcttctccatcaacggcgacgcaataaacacaggagacatcccaaatctcttctcaaaattcttctgcgacatcaacgacgatttctcaagctcatcatatccctcaagcccttcttcaatatcttccaaatcaaaaatcgcctccgtcgatgatcgttttctactatagctgctcatcgttttatcatcactcttcttcttagtcttcttctttagtttcgagaacaagctcttgattcctgatgtcttcttcgaccaatcttatttgtgattacggttacctccgccgcaacaacagcagatccacgaccgccaacaatcacaggtcattttctttcgtttttccgntaccggaggtcatatccgtataatgctggtctattggatacacatcctgttcctacatagnnctggtcttgggattccactaaggctctaatgnttatctgtnataacaaaaaccaggttttanggggtttgaattngnaatcgggggtttggtaatgaaggctncatcgagaggcggtgttttgntggganggncgtgnntcgttcgcgaangtggggtc

SEQ ID NO: 94615 - DNA, 514 bp, Arabidopsis thaliana columbia
caggggacatatagagagcggaagacatcccgaatactacttgaaatactctgttgaaaatcttgaaaccgcagtgttggatttcttcgaaggatataccacagccccacatttgagacggtctcagtgaaaaaagaagattgaaaaccccataaaactttcctttttcggtttgcccacattagaattacccatttatatcattctttgaattcattccattttcatgtggtggcagtgttgagattgttttccaggcttctggtgaatagtctctctctcttttgtacttgtaagcatatttgttgtgtgttgtttgtttgttaccaaatttcattactccattgttgatataaatgtttgtattttgtgacttttgttgcactagttccttcataaacccatctaaatgcaatttgattttttaagatttaaaacaccaaggccgaccgctctagaggatccaagcttacgcacgcgtgcatgccacgtcatagtcttgtaagtgtcacct

SEQ ID NO: 94616 - DNA, 1128 bp, Arabidopsis thaliana columbia
  unsure (1)..(1128): unsure at all n locations
gaaggatgctcctgttgtaatttggttgacgggagggcctggatgtagtagtgagttggctgtgttctatgagaatggtcctttcaagatcactagtaacatgtctcttgcttggaatnagtatggatgggatcaggtttccaatcttctgtatgttgatcagcctgttggaactggtttcagctacacgacagataaaagtgatatccgtcatgacgaaactggagttagcaatgatctttatgattttctgcaggctttctttgcggagcaccctaagttggcaaaaaacgacttttatattactggagagtcatatgctgggcactatatcccagcttttgcttcccgagtccataaaggaaacaaggctaatgagggagttcatattaacctaaagggattcgctattggaaatgggcttacagatcctgcactccaatacccagcctatcctgactacgctttggaaatgggtctaatcacgcaaaaagagcatgatcgcttagaaaagattgtcccactgtgcgaactatcaatcaagctttgtggaactgatggcacaacttcttgtttggcatcatatcttgtctgcaactctttgttcagtggtgtaatgagtcatgctggtggagtaaactattacgacatcaggaagaagtgcgtgggaagtttgtgctacgatttctcaaacatggagaaatttttgaatctgcaatctgtgaggaagtcacttggtgttggggacatagactttgtctcctgcagtacttcagtctatcaggcaatgcttgtagattggatgaggaatctcgaggttggaattcccacgctcttggaagatggaatcagcctccttgtgtatgctggagaatatgatcttatctgcaactggctcggtaactcgaggtgggtgaaatgcaatgggagttggtcaggggaaaccaaacttttgggggcggctaaagaagttcccgtttatttgttggatggcaaaagaagccacggcttgtttaaaagccttattgaccaactcaagtttcctcaaagggtgggagattnaagggccanatgggtcccaattggcccngcctaaaagctgcanttnaaatncttnagcggntggtt

SEQ ID NO: 94617 - DNA, 776 bp, Arabidopsis thaliana columbia
atacgactcactttagggaaagcacgtacgcctgcaggtaccggtccggaattcccgggtcgacccacgcgtccgtacggctgcgagaagacgacagaagggatctgtgaggaagtcacttggtgttggggacatagactttgtctcctgcagtacttcagtctatcaggcaatgcttgtagattggatgaggaatctcgaggttggaattcccacgctcttggaagatggaatcagcctccttgtgtatgctggagaatatgatcttatctgcaactggctcggtaactcgaggtgggtgaatgcaatggagtggtcagggaaaacaaactttggggcggctaaagaagttccgtttattgtggatggcaaagaagcaggcttgttaaagacttatgaacaactcagtttcctcaaggtgagagatgcaggacacatggttccaatggaccagcctaaagctgcattgaaaatgctgaagcgatggatggagaattcacttatcgaagatgctactgtgactgttgctgctcagggaggagaggaactggttgctcagatgtgatcacatcttcttttgcgttgcatgaaaacaaaaggcagcaaacataaaacaatgtgtgagcaattgacgttttcttctgtaatttgatctcataagtcataagaaagatacagtatatgtaggggttgcccaatttcgttataaaatcaaactctgctgacaccaaaaacataataattactacgaaatgtgttatctatgtttgtttccg

SEQ ID NO: 94618 - DNA, 451 bp, Arabidopsis thaliana columbia
atcaaaatcgtcgctctctgtttgctggcgtaacttagccttgttcttcttcttcatcgcgatatctccggtgtcttcttcggctccagcagaagaagaagctctctgtatccatccatatcgaaaaaccagagatcggaggaaggagagagagataccaatctctgttgctttggttttaagggtttagaggagatgtcaaaccacccgaagatcacatcggcgcatcagaatgtggaggagaagctaagggaacttcaggagaggttctgtcatcttcaagctgctaggaaagaagggcggcatggtgaccttgcgcttttagaagcccaaatctctcagaatattcgggagtggcaagctgaactcactgctccttctcctgaatcttctctgttgggtgaaggtattagccaattccttgaggagtttgctcctctgttgaaattag

SEQ ID NO: 94619 - DNA, 487 bp, Arabidopsis thaliana columbia
  unsure (1)..(487): unsure at all n locations
ggtatttgaccggatttgtgaatattctcgtctatgtacgagatcaataaattccggcttggagtcggactgttcctaccggctatgtccggttctctgtctcgctcttagcgagattcgatctctattctatctatacatcttcaccgtatttctttgtttatcttccaatttctctctgtttccccaattgatcgaggagtaatatcttcatcactctccttttgctcaaatcgtgtgagcaaagatggatcttagctacaccaaattgggtgtaactggtggtggagcttccccggattggtgttaccaagagaattttgaagcaactttatagaatcgaaccaaaagaatttcggtgctatctatctttttggattggagatcggcggaagggaaaaggattttacattcgttctaggaccagatccgccggtggtagtcagaatacggcgatgtccggcaccgttaccggtgntgctttagg

SEQ ID NO: 94620 - DNA, 530 bp, Arabidopsis thaliana columbia
ctcactatagggaaagctggtacgcctgcaggtaccggtccggaattcccgggtcgacccacgcgtcccaatcgatgcagtttctggcttccgaagaagaaaagatcatgcgcgaatactcgaatcgagagttctatgttttgtggaaaccatagccagagattggaaggtcaatggattccatgccctattgatccttctcagagaatctcgaatggcatgtaaagagatgtcctttacttaaacaaactgtagaattgtctggtcaacgattttatcagaagggtattaatgctgggaacgacgaagaagaagaaaagatgggatcttgttctcttgttacttcagagatgaagagaaatctgctctatagtatgagtgtttctaagtttcatcagcttattaagaaaattgaggatgttcatggcggtatttgtaaagatatcgaagattcgtatttgtcacctgaagcttgtaacatatggtttaaataggagatagataggaaattaccatttcaagagaaacat

SEQ ID NO: 94621 - DNA, 754 bp, Arabidopsis thaliana columbia
  unsure (1)..(754): unsure at all n locations
cggcccggaattcccgggtcgacccacgcgtccggggagagataactgcagggtacttaatgaagaaaagtgcaaagacaaatgggtggagtaggcgatggtttgttctgaatgaaaaaactggaaagcttggttatacaaaaaaacaagaagaaagaaacttccgcggcactgtaactttggaggaatgcagtatcgaagaaatttctgatgatgaaggagaaaaatcaaagagctcgaaagataagaaatcaaatggaccggattcaaaaggaccaggccttgtatttaagataacttgcagggttccatataagactgtacttaaagctcacaatgcgttggttctcaaggccgagagcatggttgataagaatgaatggattaataagctgcaaaaggttatccaggcccgaggaggccaagtgggtagcgcttccatgagacaaagtctttcagaaggctcacttgataagatggtaaggaaaccggtcgacccggaagaggaattacggtggatgtcccaagaagtacggggttatgttgaagctgttctcaacagtctagctgccaatgttccaaaggctgttgttctctgtcaagtggaggaaatccaaggaagacatgctgaatcagctatacagctctatcagcgcaattngtaatngnggnttnaatcatttnttcaagaggtcagaacgtcaaaaanggngggcccttnccngnaacagtccnctnttntntcaaagcnact

SEQ ID NO: 94622 - DNA, 649 bp, Arabidopsis thaliana columbia
ctaagatgatatacgtatacatgcatattgcaaaaatcagtggtcccataccattttgagtcatcatgagcgtatgagagtaaattcttctcacatattaataacaacccttcaaagttataagatttttagagagagagctaccacgttttcgtatctccgggaacgatggatgaatcaagtattattccggcagagaaagtggccggagctgagaaaaaagagcttcaagggctgcttaagacggcggttcaatctgtggactggacttatagtgtcttctggcaattttgtcctcaacaaccgggtcttggtgtgggggaatggatactacaacggtgcaataaagacgaggaagacaactcaaccagcggaggtgacggcgggagaggcggcgttagagaggagccaacagctcacggagctttatgagacacttttagccggagagtcaacgtctgaagcaagagcatgcaccgcattgtcaccggaggatttgacggagacagaatggctctatctaatgtgtgtgtctttctcttttcctcctccatctgggatgccaggaaaagcgtatgcaatgaggaagcacgtatggctaagtggtgcaaatgaagttgacagtaaaactttatctagagctattctc

SEQ ID NO: 94623 - DNA, 637 bp, Arabidopsis thaliana columbia
  unsure (1)..(637): unsure at all n locations
gcttgcttctctcggaaattgtgctacatatctcgtgaagaaacgaaccgacagtaatgctccttggatctttgatgtgaactatatgaatttggcagcatctataatatatggatatgcaataattgtgcctctgggattttattttgcactccgttatatggggtccaaagctgatcttctaagattctggtgcctttggggatactctctcttcattttcgatccaacctctcttccattgcttattccagtagagtttctgagatgggtgattatactcttagctggtagtgcatgcgtcgtgttttggtgccctgaatctacggtcttacctcgagacgaacaatgatatcacggctgtaatggctgcagcatttggtctgcaaatggttctttcaatcttcatcaaggtctggttctttccttaatctccatgagacggtcaacaccagacaaaacatatatatgtaaaaacctttagattntgatgtgctgcggtagaactaagaatgtcgttaccagaaaatgaaacccacanagtagaagaaggaacatatncgctaaatcattcggtttcgtttttactggcggattttcatcgttgcttgtaacggatgggtttttcattttttgg

SEQ ID NO: 94624 - DNA, 2069 bp, Arabidopsis thaliana columbia
  unsure (1)..(2069): unsure at all n locations
ctctatctcaatcaattcaatttttaatgtaatttcttgtttgatttttctattttcttcgagaaaacaaaattctcctgtaaaatttaatattataaaagtggtttctttttcatttatgtttatataattttcatctttaatcttaaattctggtaaccttaatgcgcgatccgcttttcaaaagttttgtgagagagaatagatctaaaaaaatccacaattttgttcaaatcttggagttaaatgctgaattttaggccttgttgcttagatttatggcttaaagtttcaaacttttcattggatatggtacaaatcttgtagttaaacactgaattgtgtccctcgtgggcgttgttgctttgatttatggccaaaagtttcaaacttggatatggtacaatcttgtagttatacactgcattgtctctcttgggtgttgttgttgctttgatttatggcttaaagtttcaaactttttcttggagatggttcaatcttgttgttgaaagttgaaacactgaattgtctctcttgtgcgtgttgttgcttagatttatggctaaaagtttcaaactttcttcacttcagagcttcttgaatggaaactatggttttgtggttttggttaatcttctgctaacactttttgccctgttttggtttgggaaagtgagaagaaaatgtcaggatctgagacgggtttaatggcggcgaccagagaatcaatgcaatttacaatggctctccaccagcagcagcaacacagtcaagctcaacctcagcagtctcagaacaggccattgtcattcggtggagacgacggaactgctctttacaagcagccgatgagatcagtatcaccaccgcagcagtaccaacccaactcagctggtgagaattctgtcttgaacatgaacttgcccggaggtgagtctggaggcatgactggaactggaagtgagccagtgaaaaagaggagaggtagaccgaggaaatatgggcctgatagtggtgaaatgtcacttggtttgaatcctggagctccttctttcactgtcagccaacctagtagcggcggcgatggaggagagaagaagagaggaagacctcctggttcttctagcaaaaggctcaagcttgaagctttaggctcgactggaatcggatttacgcctcatgtacttaccgtgctggctggagaggatgtttcatccaagataatggcgttaactcataatggaccccgtgctgtgtgtgtcttgtctgcaaatggagccatctccaatgtgactctccgccagtctgccacatccggtggaactgttacatatgaggggagatttgagattctgtctttatcgggatctttccatttgctggagaacaatggtcaaagaagcaggacgggaggtctaagcgtgtcattatcaagtccggatggtaatgtcctcggtggcagtgtagctggtcttcttatagcagcatcacctgttcagattgttgttgggagtttcttaccagacggagaaaaagaaccaaaacagcatgtgggacaaatgggactgtcgtcacccgtattaccgcgtgtggccccaacgcaggtgctgatgactccaagtagcccacaatctcgaggcacaatgagtgagtcatcttgtggaggaggacatggaagccctattcatcagagcactggaggaccttacaataacaccattaacatgccctggaagtagccaagtgatctgtgtcggcttaaaaccaacaacttcccgttattagagtgatttatttctacatttggtttagactttctagttctgatggttatttctacagttggtttagactttctagttctgttcagacaaaaggagtttgataaattgaccgacctattttgtgtgtttgaggtactttcagaaccataggtgttcagaaattagaatgttctgtttaaggtagatcttttattttatgttgaggtactttcggaaccataagttgttcagaaattggaatatcctgattaatgtnnnnnnnnnnnnnnnnnnnnnnnnnnn

SEQ ID NO: 94625 - DNA, 619 bp, Arabidopsis thaliana columbia
ggatcttgatactattgagtggcttgaaggttatttgcaaaagcaagatgtgcctatggttagtatgtcacatgacagagcctgtcttgatcagttatgtactaaaattgtggaaactgagatgggtgtgtccaggacatttgagggtaattattctcagtatgtgatctcaaaggctgagtggatcgaatctcagtttgcagcgtgggaaaagcaacagaaagagggcgactcaactaaggacttgatcgccaggcttggtgctggtgccaattctggtcgtgcttccactgcagaaaagaaactagagaagcttcaagaacaggagctaatagagaagccatttcagcggaagcagatgaagattaggtttccagagcgtgggacaagtggaagatcggtagtcaatgttaaaaacattgattttggtttcgaggataagatgctatttaagaaggctaatctatcaatagaaagaggggagaaaatcgccatccttgggccaaacggttgtgggaaaagtacgttattgaagctaattatgggtttagagaagcctgtgaaaggtgaagttattcttggagagcacaatgtactgccaaactactttgaacagaat

SEQ ID NO: 94626 - DNA, 447 bp, Arabidopsis thaliana columbia
gggtcctttggctgctccagtgcttcaacacctgactaaagaagacttgagcaagctttactttggcaatttccagattctggacattaatggttccacatgtttccttaccaggactgggtataccggggaagatgggtttgagatttcggttccagatgagcatgctgtggatctagcaaaagcaatcttggagaagtccgagggtaaggtaaggcttacgggtctaggagcaagagacagtctcaggttagaagcaggactttgtctatatggaaacgacatggagcaacacatttctcctgttgaagctgggctcacatgggccatagggaagcgtagaagagccgaaggtggatttcttggcgcggatgtgattctccagcagcttaaagatggacctacaatcagaaggggcggtttcttctcctcaggaccacccgcaag

SEQ ID NO: 94627 - DNA, 779 bp, Arabidopsis thaliana columbia
  unsure (1)..(779): unsure at all n locations
ctatagggaaagctggtacgcctgcaggtaccggtccggaattcccgggtcgacccacgcgtccgatgggtttgagattacggttccagatgagcatgctgtggatctagcaaaagcaatcttggagaagtccgagggtaaggtaaggcttacgggtctaggagcaagagacagtctcaggttagaagcaggactttgtctatatggaaacgacatggagcaacacatttctcctgttgaagctgggctcacatgggccatagggaagcgtagaagagccgaaggtggatttcttggcgcggatgtgattctccagcagcttaaagatggacctacaatcagaagggtcggtttcttctcctcaggaccacccgcaaggtcgcatagcgaggttcatgatgagagtgggaacaagattggagagatcacaagtggagggtttagcccgaacctgaagaagaacatagccatgggatatgtgaagtcaggtcagcacaagactgggactaaagtcaagatcttggtccgtgggaaaccatatgaaggcagcatcacgaagatgccattcgtggccaccaaatactacaaaccaacatgaaatgtgtgtctccttcgtccatgactttgtctcttgcttctgttaaatgacttgtgtttttcttctgttctgttttggcctgaaaaatgtacgatattttgccaagagggcattgcttatttcatttttattggaatnnnaaaaaaaaaaaaaaannnnnnnnnnnnnnnnnnnnnnnnnn

SEQ ID NO: 94628 - DNA, 426 bp, Arabidopsis thaliana columbia
tcttgctttatcaacagttcggtaactacgacaaagaaaaacaggcgggaaaccaaatcaatggaggattcttagctttttctctgtaactcccattatcgtatcttcagcttagtgagatagatggaggaaattggcggcggaagcatcagcagcaatggtgtggtgatgaagaaggaaggattagggttttctaaaaggggaattaaaatagagaatccttttgcttttaaggctcttcaagtcttcactggatttggcgttggttgtggagttggtattggtagtggtgcacctttgaatctcggtagtattccaatggtgggggaaattttgaattcagctagaggagcaaccaatgtattttcgggtgccacacaccacgtgaatggcgctgtacagtatagacaaacttgttcctgctct

SEQ ID NO: 94629 - DNA, 974 bp, Arabidopsis thaliana columbia
  unsure (1)..(974): unsure at all n locations
cgggaattaccggggtggcccacacgcgtccgaacaaattttaaaagagggatttacaggaaacaaattggtgaaaatctgttgtattggagctggatatgtaggaggaccaacaatggcagtgattgcattgaaatgtccagatattgaagtggcagttgttgatatctctgttcctagaatcaacgcttggaacagtgatcagcttccgatttacgagccaggtcttgacgatatcgttaagcaatgcagaggaaagaatcttttcttcagtactgatgtggagaaacatgttagagaagctgatattgcctttgtctctgttaacacaccgactaaaacgactggtcttggagctgggaaagctgctgatctcacttatttgggagagtgctgctcgtatgatccgcggatgtatcggtttctgacaagattgttgttgagaaatcgactgttcccggtgaagncaacttgaagntatttnggaggttttaatgcataacagtaaaggaatcaaggttcaggttctttcggatccggagtttcttcctgaaggaactcctatcgctgatctttttaaccctgaccgggttttgatcggagggcgagaaacacctgaaggattcaaagctgttcagacacttaaagaggtttatgctaattgggttcctgaaggtcagatcatcacaactaatctctggtctgctgagctttctaagttagctgcaaatgctttcttggctcagaggatttcatcagtcaatgccatgtctgcactttgtgaatccactggtgctgatgttactcaagtgtccttacggttgttgggtacctgatttcaagaatccggttccaaaattcttggancggttagtttttgggattccggagggttccttngtttnccagaaaggccaannctngaacntcgnntanaanctntcnaattnnaacgggcttncccaagnnggggg

SEQ ID NO: 94630 - DNA, 711 bp, Arabidopsis thaliana columbia
  unsure (1)..(711): unsure at all n locations
ccggnncggaannccggcgccgacccacgcagtagcgcggtacgttcgctcgctcatctctgtctgaatctcacaagaagaagtgaaagatggtgaagatatgttgtattggagctgggtatgttggtggaccaacaatggcagtgattgcattgaaatgtccagacgttgaagtagcggttgttgatatctctgtaccacgtatcaacgcttggaacagtgacacgcttccgatttacgagcctggtcttgatgatgttgtgaagcaatgccgtggcaagaaccttttctttagtactgatgttgagaaacatgttagggaagctgatattgtgtttgtttctgtcaacacaccgactaagactagaggtcttggtgctggtaaagctgcggatcttacgtactgggagagcgctgcgcgtatgatcgctgatgtttcggtatcggataagattgtcgttgagaaatcgactgttccggttaaaacagctgaagctatttgtggaagattttgacacataaccagtaaaggggnttaaagtttcaanatntttcgaatncccgagttttttggcggaagggacccncgattaagggccntttttaatccgggcccggtttnntntncggngggggggaancccnnaagggtttnaaaccggntaaaacttcnaagnatttttttcnccttgggtncttaagccaaaaaaa

SEQ ID NO: 94631 - DNA, 783 bp, Arabidopsis thaliana columbia
  unsure (1)..(783): unsure at all n locations
gacgtctgtatcaaacaagaagattgcggttctcggtttcgcattcaagaaagacaccggtgacacaagggagactccagccatcgatgtgtgcaagggtcttttagaagacaaagcaaggctaagcatttacgacccacaagtgactgaggatcagatccagagggatttatccatgaacaagttcgactgggaccatcctctacatttgcagccaatgagcccaacaacagtgaaacaagtgaccgttacttgggacgcatacgaagcaactaaggacgctcacggtatctgcatcatgaccgagtgggatgagttcaagaaccttgatttccagaagatctttgacaacatgcagaaaccagctttcgtgttcgatggaagaaacattatgaatctgcaaaagctaagggagattggtttcattgtttactccattggtaagcctctcgacgactggctcaaggacatgcctgccgttgcctaatgatgttcattgctgactctttcgtcctccatcatttgtgcttttcttcttcttgtggtttgtctttaagacttgttatatttcttacaatatgtttgttatgttctctggtgtgtgttttgttttttttggtattactttcatatttttttggtcgaagaggacttgtattcgacaatgtcgcttcaattttggttgtctccttagaaactaaataaatattggtttataaaaaaacaaaaaatcnaaaaaaaaaggcggcgcgtctaaaggaacaagataacgtnnnnnnnnnn

SEQ ID NO: 94632 - DNA, 1893 bp, Arabidopsis thaliana columbia
tacaactcattttagggaaagctggtccgcctgcaggtaccggtccggatttcccgggtcgacccacgcgtccgttcaagagaacaacttcttaaccacgaatcttcagagagagatttcaggaaacaaaatggtgaagatctgttgtattggagctggatatgtaggaggaccaacaatggcagtgattgcattgaaatgtccagatattgaagtggcagttgttgatatctctgttcctagaatcaacgcttggaacagtgatcagcttccgatttacgagccaggtcttgacgatatcgttaagcaatgcagaggaaagaatcttttcttcagtactgatgtggagaaacatgttagagaagctgatattgtctttgtctctgttaacacaccgactaaaacgactggtcttggagctgggaaagctgctgatctcacttattgggagagtgctgcgcgtatgatcgcggatgtatcggtttctgacaagattgttgttgagaaatcgactgttccggttaaaacagctgaagctattgagaagattttgacacataacagtaaagggatcaagtttcagattctttcgaatcccgagttttttgctgaaggaaccgcgattaaggacctatttaatccggaccgtgttcttatcggagggcgggaaaccccagaagggtttaaagcggtgcagactctcaaggatgtgtatgcacactgggttcctgaaggccaaatcataacaaccaatctctggtctgctgagctgtccaagcttgcggcaaacgctttcttggctcaaaggatttcatcagtgaatgctatgtcggctctgtgtgaagccacaggcgcagatgttactcaagtgtcttacgctgttggtactgattcaagaatcggttccaaattcttgaacgctagtgttggattcggaggttcttgtttccagaaggacattctgaatctcgtctacatctgtcaatgcaacggacttccagaagtggcggaatactggaaacaagtgatcaagatcaacgattaccaaaagaaccggttcgtgaacagaatcgtgtcctctatgttcaacactgtctccaacaagaaggttgcgattcttggattcgcattcaagaaagacactggtgacacaagggaaacacctgccattgatgtgtgtaaaggtctattaggagacaaagcacagatcagtatctatgatcctcaagtcacagaggtaccagattcagagggatctctccatgaacaagttcgactgggaccatcctcttcacttgcagccaatgagcccaaccacagtgaaacaagtgaccgtgacttgggacggatacgaagctacaaaagacgcacacgcggtttgcgttttgactgagtgggacgagtttaagtcgttagattaccagaagatcttcgacaacatgcagaaaccggcttttatcttcgacggaagaaacattatgaatgttaacaagttaagagagattggtttcattgtttactccattggtaagccacttgacccatggctcaaggacatgcctgcctttgtctaatcacaaggcaaaacctggttgattcttgtttcttactttcattgtttgtgcttttttgctttcgctttcatataaattttagtctcaagattcgatttgtgaagtcttgaagagttgtttcttacattttacaatgtgtttcttatgctaagctcttataattttgtgtttcacattttgtcaaaagctcgtgtaattgttgtttccttagaaaaaagcaataaaggtttagtttttaaaaaaaaaaaaaaagggcggccgctctagaggatccaagcttacgtacgcgtgcatgcgacgtcatagctcgtctaagggt

SEQ ID NO: 94633 - DNA, 1030 bp, Arabidopsis thaliana columbia
atccacctctctttctctcttaaatttcgttctgtctccggcgaagtcgccggcgggaagctaaaaggcaggttagaacgaattcccggcagacaatccaacaatgcgagggttattacgagcttcatcgcttcttctctgtggtgttattctgattcagctgcttgctgctcaaatccatgctcaaagtaaaaaacctaaaagtccatggccaacgctcactggtgatcctcccctcgcgtccgctcgtggtggattctctggattgttcccagattcgagttacgatgcttacaatttcgcaattctgacaagtgtaccagatgctgttctatggtgtgatgttcagctaaccaaagatgctcttggtatttgcttccctgatttaacaatgagaaattcttcatctattgaagctgtttaccctactcgacaaaaatcttacccggttaacggagttcctacttccggttggttcaccattgatttctccttgaaagatctcaaagatgttaacttgatccgaggtattttatctcggtcagaaaagttcgatggtaattctaacccgattatgacggttcaaagcgtatccacgcagatgaaaccatcattcttctggttaaatgttcagcacgatgcgttctacgcgcagcacaatttgagcatgagcagttttctggttgcagcttcaaaaactgttctcattgacttcatctcttcccctgaagtgaacttctttaagaaaattgctggtcggttcgggcgtaatggaccaagtcttgtgttccggtttcttggtcaagacgagttcgagccaacgacaaacagaacttacggctctatcttgagtaacttgacttttgtcaagacgtttgcttcagggattcttgtccccaagtcttacatattgccacttgatgaccagcagtacttgcttcctcatacatccttggttcaagatgctcacaaagcaggattagaagtttttgtgtcaggttttgcaaatgatattgatattgcacacgac

SEQ ID NO: 94634 - DNA, 456 bp, Arabidopsis thaliana columbia
ggaggagaacacaaatccaattcacactggaaactgttgggtcggatcctgagtgatatttcgagaccgatgatgtggaagaacattgctgggttgtcgaaggcagcggcagcggcaagaacacacggatctcggcggtgcttttccacagcgattcctggtccttgcatcgtccacaagcgtggtgctgatattcttcacgatccatggttcaataaggacacaggttttcctttgactgagagagatagattagggatacgaggcttgcttcctcctcgtgttatgacctgtgtacagcaatgtgatcgtttcattgagtcgtttcgttcgctagagaacaacacaaaaggagagcctgaaaacgttgttgcattagctaaatggaggatgttgaatagattgcatgaccgtaatgagactttgtactaccgagttcttattgataacatcaaa

SEQ ID NO: 94635 - DNA, 530 bp, Arabidopsis thaliana columbia
gcgactcactatagggaatagtctgtacgcctacaggtaccggtccgggaatttccggggtcgacccacgcgtgcgcttcgaataatttctaggggttttcttttctctaaagttttcatttttatttcaatgagagctcgaagaaggagaatatgggtttgagaactgataatattatggcttcgtttcgaggtggaatcggggtttctaatggctgagtcaactcggtgattctgtgttatagtcacgagcaaatataaaaaagtttgtaactttcttgtttttttaggtgtgtgtgttcagagaaaaggtcgaatcttttttcggtgtttgtaaaagggaaagttgtaatcttaaagtctgtttttctttcttgtgttttggtatttagctcataaaagccgaggagtaatataaaggataggttttgtctttgtgtgcccttttgagattgcatgaagaagaaaaccctctagtgtggtttgaaggaaacagaattcgatatttatgcggtaatgtgatttgtgaa

SEQ ID NO: 94636 - DNA, 430 bp, Arabidopsis thaliana columbia
ctttcgttagtttttccaatttcggattcggccttgttgagaatatatttacgattttaattgagagattttgtgacagctcgagtgtcaatggagggtgtggtgcacggaatcatcgagacacaccatgttgaacctcttgagattctccttcaaggtctttgtggtgttcaacgcgaacgtttaagagttcatgagttatgcttaagaagcggcccaaatcttgcagttgtgtcatcagaagttaggctattatgtgatctcgatcaacccgaacccacatggacggttaaacatgttggtggtgcgatgagaggtgcaggagctgatcaaatctctgttttggttagaaatatgattgaaagtaaagtaagcaagaatgctttgcgtatgttctatgcactccgttacaaactagaccatgagcttc

SEQ ID NO: 94637 - DNA, 396 bp, Arabidopsis thaliana columbia
tacggctgcgagaagaaaacgagaggcaagggtcaggcataatatgctctctcactagcctaagaatttgtagaagcgaaaaccatggattagggtttttcagtttcctctttcaatcgattaacccacagaacaaagtatctcttaccttcgggtttagatattctcttcgtctccgtctatatatcatttctcaaagtcgacttacgaatttgactcaggagatatttcgtttgtgattttgttaaggctagcttcaattctattcagattaatcaatggattctcagatgctcgtggcgcttggactatcccttgttgggggattaagtacctctttaggtgcgctttttgtagttcttagcgagactcccaatatgaagatgcttggacttc

SEQ ID NO: 94638 - DNA, 479 bp, Arabidopsis thaliana columbia
cctcatcccaagactgtttgcttacgctgttctacagcctcttcctcgctacttccaaaaccagagcattattacacctctcctcatcacctcttgttttgtgttctgtctccatgttcctctctgctggcttttggtttataagtcagggcttggtaatcttggaggagccttagctctcagtttttcgaactggctttataccattatccttggatctttaatgtgcttctcctctgcctgttctgagacacgcgcaccgctctccatggagatatttgacggcattggagagttcttcagatatgctcttccttctgcggctatgatttgcctggagtggtggtcatatgaactcataatattactctctggtctcttacccaacccacagctggagacttctgtgctctctgtctgtcttcaaacaactgcgacagtctattcgatacatcttgcaatcgcagctgcagcaagca

SEQ ID NO: 94639 - DNA, 1686 bp, Arabidopsis thaliana columbia
  unsure (1)..(1686): unsure at all n locations
aggatacccgacgtcgtttgactaaatggatccaacgctagacacatcctaaatcacgtcaacgacagtgtcgggactgaaagcagcccgaaagcaaagtaagctagcttagctaggtccaagatccaagctttggaattttgtaaattgtctccactcttagccgttttaatggaaactgttccaccatctcccattacatggccagatgggggagctctcactaacgactgggtacatgggcttatgtcgtgtttcgaatggtcttcatggaatctacctccttcccagttaccttcactattgcctgtcaacgtctttgattccctcgtcctcaccgctcataaaatcctccacaaagaacgtaactgcgttcatatcgatgatcttgactctgtatccaacgttgttgtggttggtgacattcatggtcagcttcatgaccttcttttcctattgaaagatactggctttccttgtcaaaaccggtgttatgttttcaacggagactatgtggatcgcggtgcttggggacttgaaaccttccttgttctcttgtcctggaaggttttgatgccggacagagtctacctactccgtggtaatcatgagtcaaagtattgtacatctatgtatggtttcgagaaggaagtgcttacaaaatacggagacaagggaaaacatgtgtaccggaaatgtttgggttgtttcgaaggtcttcctttggcttccataatttctggacgtgtttatacagcacatggagggcttttccgcagcccagtcttgcctaagcgaacaacaagggggaaaaagaaccgtcgggtagttcttctggaacctgagccgagctcaatgaaactcggtaccttagatgagttgatgcaagctcgaagatcagttcttgatcctccttgggaaggttcaaacttgataccaggagacgttttatggtctgatccttcaattactccgggcctttcaccaaatgaacagagaggcattggtcttctttggggtcccgattgtacagaggattttttgaagaaatatgaactaaagttgatcatcagatcacatgaaggtccagatgctagagagaagagaactggtcttggtggaatggacaatggatatacaatagaccacaatgtcgaatccggaaagcttatcactattttcagtgcacctgactatccgcaattccaagcaacagaagagaggtacaaaaacaaaggagcatatattattttgcaggcgcctgatttctcggatcctcaatttcatagtttcgaagctgttaaaccgcgaccaaaggcgcatccgtattatgactttgaaaatgtcattgattctgatgatgagatggataagtcagcaatggacaccaataacgaacaaccaaatagctgaccgaagctgaaaaggagtatcttgaattgatgttttttacagttgttgtgattgctcattatttgcaaacataaaatggaatcaaatgtaaagaaaagagatgaagaaaattatttgtagaattcacatttaagttatgtatggaagatgaagaaataagaaccatcttaaatctccaaaaaaaaaaaaaaaaaaaaaagnnnnnnnnnnnnnnnnnnnnnnnnnnnnnnnnnnnnnnnnnnnnnnnnnnnnnnnnnnnnnnnnnnnnnngga

SEQ ID NO: 94640 - DNA, 427 bp, Arabidopsis thaliana columbia
gtacaaactcgttaaatttgtacgactataatttgttttaaaacactcgttataatatattaaagtttcacccaaaccgagaaaagagagaatctgtgcatgttgctcagaaaatcttcaaagcgtaatctgggcttacgttagctctcacgaacccccaaggatcttctatatatgttttttcatttccccataaaatctttcattatctaaaaaatattattatcgtatcttttttcttctatatattcttcctcctcaatcttgattcttgtttcttgagtattctttgatgaatcgtgaaatgacgtcaagctttcttctcctgacgttcgccatatgtaaactgatcatagccgtgggtctaaacgtgggccccagtgagctcctccgcatcggagccatagatgtcgacggccacttcacc

SEQ ID NO: 94641 - DNA, 849 bp, Arabidopsis thaliana columbia
  unsure (1)..(849): unsure at all n locations
cgtcgcatgcacgccttccttagcttggaattcggcttgaggaaaagaaaactttctaccatggcattaattttttttttttttcttcttttgggccggtttattaagcaacggggggttaacaacggagccagccgcgaaccaagttaaggccttaaagggaaattttttcttaaaaggggtaaattactactttttgcttgtatttgggggccgggaaggcggcctaaccttgtaaaacttaagaaccgaaacctgtccaacaggggtgatccaggaccaattggaagtctttaaaggcctaccggttaaattctcaccatatgacaaatcaagaaccatccctgtctcaactgatgtaaacatcaaattctctccaacttcgatctgggaattagccaatttcgacgagacgacgaaacaatggttcatttcaacttgtggcgttgaagggaatcccggtcagaaaacggttgataactggttcaagatcgacaaatttgaaaaagattacaagatcaggttttgtcctactgtctgcaatttctgcaaagtcatctgtagagacgttggagtgtttgtgcaagatggaaagagaagacttgctttaagtgatgttccactaaaggttatgttcaaaagagcatactagaagatgataaaacaaattccacaagaatttacaatgcttttgtaacaccattaataataaataagaacaatgcttgtttctgcaaaaaaaaaaaaaaaaaggnnnnnnnnnnnnnnnnnnnnnnnnnnnnnnnnnnnnnnnnnnnnnnnnnnnnnnnnnnnnnnnnnnnnnnnnnnnnnnnnnnnnnnnnnnnnnnn

SEQ ID NO: 94642 - DNA, 654 bp, Arabidopsis thaliana columbia
  unsure (1)..(654): unsure at all n locations
cgagcatttaaccaaaatcagatgcactttgactttgacttttgtatccgttctgcttattaatagaaatctgttttctcatctctcccccgtcgtgccgaaaaagtttccattaaaagaaaacttcctacaatgtcatcacttctctatatcttcctcctcttggccgtcttcatcagccaccgtggagtcaccaccgaagcagccgtcgaaccagttaaggacatcaatggaaaatctctcctcacaggcgtcaactactacatcttgcctgtaattcgcggccgtggaggcggactaaccatgtcaaacttaaagaccgaaacctgtcccacaagtgtgatccaagaccaatttgaagtctctcaaggcctaccggttaaattctcaccatatgacaaatcaagaaccatccctgtctcaactgatgtaaacatcaaattctctccaacttcggtctggggatttggccaatttcggcgggacggcggaacaatggttcatttcaacttttggcgtttaagggaagtcccgggtcagaaaacggttgataactggttcaaggtcggcaaatttgaaaaggtttacaagttcagggttttcccccctggcgaattttttaaaggccattttggggngttggggtttttcaag

SEQ ID NO: 94643 - DNA, 518 bp, Arabidopsis thaliana columbia
  unsure (1)..(518): unsure at all n locations
cttgatcagactggtcagaggacagacgacctaaggagacctttggacagacaaaatcgtantcctgaacaacgagaatggaagaggcgtttacttagtactgttgacaagttaaaagatgcgttttgtcgccagcatgccttggatctcatttttactgaggaaggagatagccatctgtctgcggatatgtacgtaaacatagatgaaaatggcgaggatgtggacttctttccatctctgatattccaggaactttttgccaaacttaacaggatggcaagtctagcagcagatatgtttgtaggaagagaaagattcgccatatctttgttgatgcgattaacagagactgtgatcttatggctttctggagaccagagcttttgggatgacattgaggaaggtcctcgacctttgggacctcttggcctacggcagctgtatttggacatgaagtttgtcatatgctttgcatcccaaggtcgctacctatcgaggaatttgcacaggggaac

SEQ ID NO: 94644 - DNA, 789 bp, Arabidopsis thaliana columbia
  unsure (1)..(789): unsure at all n locations
cagatgcagttacacactatttgagaagaaagttcgcattcttgtgatggatacagagactgtatctaggctttatgagacagagcttttgcatgacatgaggaaggtcgtcgacctttgggacctcttggcttacggcagctgtatctgcacataaagtttgtcatatgctttgcatcccaaggtcgctacctatcgaggaatttgcacaggggtactaatgagataatatttaaagcgttagcagctttcaccgcaacagggatagatccatatagtgagctgccagaagacgattggttcaatgacatatgtgtggatgcgatggaaagattgagtggcaagacaaagggcaacaacggggatgtccacagtccgactgcttcagtgtcagctcagtctgtttcatcagcgagatctcatggcagctattgaaaccaaacccatcttacatttgttaagaaggtgaatggtcaataacttttgatcttctcttttcagctctgcttttccaaaagctttctattttgtagagtctccagttgttgatgagatgattttgggggcgtgtaaatgttgttgagttgacatgtttgttttcttgtattggtcctctctctctctcaatggatgcattctttgggttaaaatattgaagagagtgttgatctttcttctctatgatacactctctttctgttttggtattggatcagatgtagcgcgcccgagcgtccgagatctagataacaggttcattaaacccgtagnccggaggnnnnnnnnnnn

SEQ ID NO: 94645 - DNA, 571 bp, Arabidopsis thaliana columbia
  unsure (1)..(571): unsure at all n locations
agcgctctacgactcactatttggaaagctggaccgcctgcaggtaccggtccggaattcccgggtcgatccacgcgtccgctttgagattctccgattgcatctcaaaaaatctcagctatggctacctcctccgcttggaagctcgatgaccaccccaagctccccaagggtaagaccatcgccgtaatcgtcttagatggttggggtgaatctgcccctgatcagtacaactgtatccacaacgctccaactccagccatggattctcttaaacatggagctcctgatacttggactttgatcaaagctcacggtactgctgtaggacttcctagtgaagatgatatgggaaacagtgaggttggtcataatgctcttggtgctggtcgtatctttgctcaaggtgctaagctttgtgaccaagctcttgcttctggcaaaatctttgaaggtgaaggttttaaatacgtttctgaatctttcgagacgaatactttgcatcttggtggacttctcagtgacgggggagtccactctcggctcgtcaactacagtngttggttaaagg

SEQ ID NO: 94646 - DNA, 931 bp, Arabidopsis thaliana columbia
ctaaaatggggctacggctactttgatcatgatcaaactgataattatcttcagattgttccagagattcataaagaagtagaaaatgcgaaggaggatttattggttgttgtccctgatgaacattctgaaactgttgttcatcatcatattaaacatttttcggcgcgatcagatcatcgatggtagcggagaaacaaacatgagaaccccaaaaaacgtcgtatccaggtcttaagtagtgatgatgaatcggaggagtttacaagagaagttccttcagttactcgaaaaggtttcaagagaagaagaagagacgagaagatgagtaataagatgcgtaagctacagcaactcgtacctaattgtcacaagacggacaaggtttcggttctcgacaagaccatagagtatatgaaaaaccttcaacttcaacttcagatgatgtcaacagtgggggtgaatccttattttcttccggcgacattaggatttggaatgcacaaccacatgctgacggcaatggcttcggctcacggcctaaatccggcgaatcacatgatgccatcgccgctaattccggcgttaaattggccattaccaccgtttactaatatttcatttcccacattcatctagtcaatctctattttcttacaacatcatcatccagcttccttctcctcagtctccttcacgggttggttccctaatttcccaagtttcttgggattttttttcccatgcggtgtggaggccatcggtaaagtaagtagctcgttaaaaggttattgtgaaatgaccggtggcttattaaggggggaaagaggtccaaattaggacagtttgtgtgaaccatttgtgtcatatacttttttttccgggtggttttgtatattaataataatcaaaaagttaaaactttttgtat

SEQ ID NO: 94647 - DNA, 645 bp, Arabidopsis thaliana columbia
  unsure (1)..(645): unsure at all n locations
taggagcactatagaagagctatgacgtcgcatcgccgcgtacgtaagctcggaattcggctcgctaaagaaaaaacacttctccaaacttttcatctccgatatctctttaactaacatgtcgaataatcaagctttcatggaattgggatggagaaacgacgtcggatcacttgctgtgaaagatcagggcatgatgtcagaaagagcaagaagtgatgaagatcgtctaatcaacggtctaaaatggggctacggctactttgatcatgatcaaactgataattatcttcagattgttccagagattcataaagaagtagaaaatgcgaaggaggatttattggttgttgtccctgatgaacattctgaaactgatgatcatcatcatattaaagatttttcagaggggtcagatcatcgattttatctgaggaacaaacatggggaccccaaaaaacgtcgtatccaggtcttaagtagtgatgatgaatcggaggagtttacaagagaagttccttcagttactcgaaaaggttccaagggaggaggagggccgggggttgggattaagattcggaccttcagaactcgtcccaattttcccaagcggcaagtttggtnttcaagccctgggtttnnanc

SEQ ID NO: 94648 - DNA, 974 bp, Arabidopsis thaliana columbia
  unsure (1)..(974): unsure at all n locations
nnnnnnnnnnnnnnnnnnnnnnnnnnnnnnnnnnnnnnnnnnnnnnnnnnnnnnnnnnnnnnccacgcgtccgcccacgcgtccgctcagcctctccttcttcgtttcctaaactcatttttcttcgctctctttagattctttttttctcatatctctccttgatcctctgttttttattctgaggttgtttttcggagaaggaatcacctaaaccctttcaaatctcttcttctaccaaatatatttttttggatgaaaaaaacttctaccaaattctcagattttatttccttgagggttttgtgttttttttgcatggtctagttgatttctgaaatttaagtatatcttgtttacgataatatagaaaaaaattattggtgtttttgtgtgtttataatttatcttgggtcaatgataatagtggacgacgagtcggtgtcttagggtttactttttgtaaagaaaattttcttgttgaattattggctttttgtgaattcgattttctcttatttatataaaacattattgaatttcaacgctattttgaaaattttatttttaatattcatgttgtattagaatctggaatgtcagaagaacgtgtgcaggaacaagaacttggggttggtgtaatagtttaaataaattcttacaaagaataaaaaaaaaatcaggttctctgcaccaaatttttaaaatcattatttaacatattttgctaaattctctaaaaacaaatttgataatgatgaaaattttgattagttctgtgttgtgtttggtgattgcttgaattaagtctgattgaattttaggggtatttgaggtttgtgtgtctttgagattattgtttaccaaaaaaaaagaaaaaanggagatggaaccagatacgagacaaagcctcaccggaaaacacctccaaaacagaggagctgatggaacaatagcaagaaagactgattttc

SEQ ID NO: 94649 - DNA, 519 bp, Arabidopsis thaliana columbia
  unsure (1)..(519): unsure at all n locations
agctggtggacgcgattcggaaggtgttgggttgatatatctatatgaggtttagcttctgttccaataaagatggtgttttggagttgcttgtagcattagatttgaacggcttccttgtatttgttagcgcgcacaatttagttcgtaaaaattcattcgacagcccaatgttgcaaaagtgggacagagataacttgcagaatatatatcgttgttgcttctactatgggaaacttttggtggttgatgtcaagattctagtaaaggaacttaaaagcttgtgacaagatcataacacataaaataggagttttgaatttagacacaattaaatttttttttttctcttttctcaaagtgtaactttatgtatcatttaaaagaaccatacatggaatgccaaacacttgtttagcccaaaaaaaaaaaaaaagnnnnnnnnnnnnnnnnnnnnnnnnnnnnnnnnnnnnnnnnnnnnnnnnnnnnnnnnnnnnnnnnnnnnnnnnnnnacaatcg

SEQ ID NO: 94650 - DNA, 533 bp, Arabidopsis thaliana columbia
agagagagaagacacttagtaaagaaggtctgtgtgctgttctctccgaaattcctttttttggtctcgagggtttttcagactgtgaagagacatagctgtggcaaagatgagaggacctttaggagcagtgattggaagatatacttcaagtgatgggagtgctccaaatgatgggatcatcaagcacaatagaaagtgcagagatattacgtttctcatcatcttcattgccttttgggtttcaatgattgtcaattccagctttggtttcaaccaaggcaacccattaagactcacatatggattggactatgaagggaatgtgtgtggtagcaagcatcgtcaccgtgaccttactcaacttgagcttagatattggttaaaccctaaccaagtttatgaaagtggtttgaaagatggggaacttaaattggctaatgctagaactatttgtctcttggattgccctgcaccttctgatgatactctcaactgggtatgtgactatcctgacggcgagattcgtctca

SEQ ID NO: 94651 - DNA, 669 bp, Arabidopsis thaliana columbia
  unsure (1)..(669): unsure at all n locations
cnnnnnnnnnnnnnnnnnnnnnnnnnnnnnnnnnnnnnnnnnnnnnnnnnnnnnnnnnnnnnnnnnnnnnnnccacgcgtccggcttggttgtttaccgatagtgagacaagagtttaagacaggtgagaattgtatggagatggttaacttcatggtgaaaacacacaatgaaaggcttagtcgtttgctcgttgcgataaccgtaccgttactgtaccgtggcttccggtacagcctctttgatttcaatggtgaaattctccggaggatcaatgaaccatcactccatggatatactgatacaacgacttcttgctgcggaactggatcgagaaatgcatacgggtgcggttatagtaacgtgcatgctaagctctgcagctaccagaaatcatttttgttcttcgacgggcgtcacaacaccgagaaaaccgatgaagaagttgctaatctgttttattccggagacaaacatgtcgtctctccgatgaatataaaggatctcgtaggtaaagcagcgaccgatcttcttgcgcaagaaatctagaaatccccatcgtgttctgttctgtttctttgaaataagtaaatggttgttgttgtaaactgtaaacctctgtattccccttcatatatatatgatgataaagaaaaaattacccctttt

SEQ ID NO: 94652 - DNA, 414 bp, Arabidopsis thaliana columbia
ccgctcaaggatcttctcaaaattcagttgggaacaccaccagtgaagccttgttgttcgctcctcaatggtttagttgatcttgaggctgccgcttgtctctgcaccgccctaaaggctaaagttttaggcattaatcttaatgttcccgtctctctcagccttcttctcaatgtttgtggcaagaaggttccttccggcttcgtatgtgcttgatatatctatccactcttcgattggttataatgttttaaattttctttccatgtttttctttgattaatattctttgaattttcccattttcagtgttgtttctacttcttgtactgtttacattttaaattaaattgctcagaaataagaaaaataaagtgattataaaaaaaaaaaaaaaaaaaaaaaagggcggcc

SEQ ID NO: 94653 - DNA, 522 bp, Arabidopsis thaliana columbia
  unsure (1)..(522): unsure at all n locations
cttctatcttaaaacttcttacctaaaatagaaatttgattttttgagaaatggcttcaaaaatttcagcctctcttgtcattttcctcacattcaacattctttttttcactttaaccaccgcatgtggcggtggctgcagttccacccctaaacccaaacctaagcccaagtccaccggaagctgccctaaagacactctcaagctcggcgtttgcgccaatgttctcaaggatcttctcaaaattcagttgggaacaccaccagtgaagccttgttgttcgctcctcaatggtttagttgatcttgaggctgccgcttgtctctgcaccgccctaaaggctaaagttttaggcattaatcttaatgttcccgtctctctcagccttcttctcaatgtttgtgggcaagaaggttccttccggcttcgtatgtgcttgatatatctatccactcttcgattggttatatggtttttttgggtacaatncttnaggtttcccaattnnagttnggggtttt

SEQ ID NO: 94654 - DNA, 461 bp, Arabidopsis thaliana columbia
cgaaaacacacacccctgaattgattgtgttcgtggatctaccaatgataagattatcacctggatttgcagtcaatcctcgttttcgatccgattcctttgtcaattcccagaaaccgccttttctctccgtccaaatcgggtcacagcggaggaatctctctagaatcggatcggagaacggcgacggcgtcgctttcgatgctgtagcttatgaggctgatcggttgagcctcgacgcggcggcgatggaggatatggcggagactgcaaagaaggaactagaatcggatccagatagtgacccgaaagcgtggaaatgggttatccgaaagaagatgtgggatctcatggaaagctcggaactacgctatgagccctagacctgttcatcatcgaatccctaatttcgtcggtgcatcggctgctgcaagaaaattagccgagcttgatgcttttcg

SEQ ID NO: 94655 - DNA, 482 bp, Arabidopsis thaliana columbia
  unsure (1)..(482): unsure at all n locations
ttancgttgagggaccgggcccgaatttccggggcggcccactcgctccgcccggaagtccccacacaagcaagcattcagatggatcccaagaacctaaatcgtcaccaagtaccaaatttcttgaacccaccaccaccaccgcgaaatcagggtttggtagatgatgatgctgcttctgctgttgtttccgacgagaatcgcaaaccaacaactgagattaaagatttccagatcgtggtctctgcttccgacaaagaaccaaacaagaagagtcagaatcagaaccagctttggtcctaagagaagctctaacaaagacaggcacacttaaagtcgaaggtagaggtcgacgaattcggatgcctgctctttgtgctgctaggatttttcaattgactagagaaatgggtcataaatctgatggtgaaactatccagtggctgcttcaacaagctgagccatcgattattgcagctact

SEQ ID NO: 94656 - DNA, 548 bp, Arabidopsis thaliana columbia
ggggaactatcgaagagctttgacgtcgcatgaccgcgtacgtaagctcggaattcggctcgaggatgtaaccaaagtggccgtcaagaacttgcttaacaataggggtcaagcggagaaggaattcaaagtagaagtggaagtcattgggcgagtacgacacaagaatcttgttaggcttttagggtattgcgtggaaggtgcatacaggatgctcgtgtatgactttgtcgacaatggtgaggtggagcaatggattcacggtgatgttggcgatgtcagcccgctaacttgggatatacgtatgaatattatactggggatggccaaaggattggcgtatctacacgagggtcttgagccaaaagttgttcatcgggatattaaatcaagcaatatcttacttgatcgccaatggaatgctaaggtttcggattttggacttgctaagctcttggggtctgagagccagtatgtgactactcggggtgatggaactttcggttatgtagcaccaaatacccttgcaccggatggtaaacgagaga

SEQ ID NO: 94657 - DNA, 678 bp, Arabidopsis thaliana columbia
ttgaaatttcctctcttcttcttttgcttgagctttaggttttgagagcaaagaaaaacgaagacgcgtcaaaggtgcgtgaaatgtgtctattgcggcttgcttctggtttatgggtccctgcgacattttgagagtgttgtttggtttaggtgtctggtgtattgcttatataactgttgcaatctttgcgtcttttagaatctttcactgtatttgttaatttcaagagcttttgtggagaggttctgcttgcttgctacaatgggttacgcccagctagttattggtccagcaggcagtggaaagtcaacttattgctcgtctttgtatgaacattgtgaaactatcggtcgaacaatgcatgttgttaaccttgatcctgctgcggagatcttcaactatcctgtggctatggatatcagagaacttatttctttggaagatgtgatggaggatctaaagcttggtcctaatggtgcccttatgtattgcatggagtatcttgaggatagcttacatgattgggtggatgaagaattggagaactacagggatgacgattaccttatctttgattgtccaggccagatagagctgtttacacatgttcctgtgctcaagaactttgtggagcatttgaagcagaagaacttcaacgtctgtgttgtttatctg

SEQ ID NO: 94658 - DNA, 380 bp, Arabidopsis thaliana columbia
ctcagatctgaaaccttatctgaattacatttccccgattcgacgttgtgcgaattgatgcagcagagaggacgatccgtcaaccgcagatcacgaagcttctctagatccagactcgccgtcgaaggccactgaattactctctcccctctcttggcagatcttcttcttcgttttttcccgacaaacgacatttccgaaatggctgcatcgtacgaagaagagcgtgatattcagaagaattactggatagagcattccgctgatctgactgttgaagctatgatgcttgactcgagagcttctgatctcgacaaggaagaacgtcctgaggtactctctttgctccctccatatgaaggcaaatcagtgttggaact

SEQ ID NO: 94659 - DNA, 448 bp, Arabidopsis thaliana columbia
cattcttgttttggttatatacaattggaacagaggaagagagagatatccagaaaagctactggatggagcattctagtgatttgactgttgaagctatgatgcttgactctaaagcttctgatcttgacaaagaagaacgtcctgaggtactctctttaatcccaccatatgaagggaaatctgtgcttgaacttggagctggtattggtcgtttcactggtgaattggctcaaaaggctggtgaagttatcgctcttgacttcatcgaaagcgcgattcagaagaatgaaagtgttaatgggcattacaagaacatcaagtttatgtgtgctgatgtaacatctccagacttgaaaatcaaagatggatctatcgacttgattttctcaaactggttgctcatgtatctctctgataaagaggtggaactaatggcagagagaat

SEQ ID NO: 94660 - DNA, 1780 bp, Arabidopsis thaliana columbia
  unsure (1)..(1780): unsure at all n locations
gaaacagtggttgcttctttagtttctaatgaattgagattaggaatatgtgagctgatgtgttgctttgctatataggtactctctttaatcccaccatatgaagggaaatctgtgcttgaacttggagctggtattggtcgtttcactggtgaattggctcaaaaggctggtgaagttatcgctcttgacttcatcgaaagcgcgattcagaagaatgaaagtgttaatgggcattacaagaacatcaagtttatgtgtgctgatgtaacatctccagacttgaaaatcaaagatggatctatcgacttgattttctcaaactggttgctcatgtatctctctgataaagaggtggaactaatggcagagagaatgattggatgggtcaagccagggggatacattttcttcagagaatcttgcttccatcaatctggggacagcaagcgaaagtcaaaccccactcactaccgtgaacccagattctacacaaaggttttccaggaatgtcagacacgtgatgcttctggcaattcatttgagctctctatggttggctgcaaatgcattggggcttatgtgaagaacaagaagaatcagaatcagatttgctggatatggcaaaaagtcagcgtggagaatgacaaggatttccagcgtttcttggacaatgttcaatacaagtctagtgggatcttgcgctatgagcgtgtctttggggaaggatatgtgagcactggtggatttgagacaactaaagaatttgtggcgaagatggaccttaaaccgggacagaaagtcctagatgttggttgtggtatcggtggaggtgacttctacatggctgagaatttcgatgttcatgttgttggaatcgatctgtcggtcaacatgatctctttcgcactggagcgggccattggactcaaatgctcagtcgagtttgaagtcgctgattgcaccaccaaaacatatccccgataattcctttgatgtcatttacagccgtgacactattctgcacatccaagacaagccagctctattcaggacattcttcaagtggcttaaaccagggggtaaagttctcatcactgactattgcagaagtgctgaaactccgtctcctgaattcgcagagtacataaaacaaagaggatatgatctacatgatgttcaagcttacggacagatgctgaaagacgcaggctttgacgacgttatcgctgaggaccgtactgatcagtttgtacaagtcctcaggcgtgaattagaaaaagtggagaaagaaaaggaagaattcatcagcgacttctcagaagaggattacaatgacattgttggaggatggtcggcaaagcttgaaaggactgcatctggtgaacagaaatggggattattcatagccgacaagaagtaaaatccatgtttttatcccaaaactctggtgattcatttcccttcaataaaaccgttcctttggaggacaatatctgcttgtttactatcatggaactgcaaatcaaaagataaactcatgtgttgtttcgattcttactcgagtcgttgtgccacataaaacctgcattgctttgattttccattaaatatctgcataacattcaagggtaatcgatgttttttgttcttagtgtattcaagaacaaagttacatttatgacaaaaaaaaaaaaaaagnnnnnnnnnnnnnnnnnnnnnnnnnnnnnnnnnnnnnnnnnnnnnnnnnnnnnnnnnnnnnnnnnnnnnnnnnnnacat

SEQ ID NO: 94661 - DNA, 441 bp, Arabidopsis thaliana columbia
cccacgcgtccgggagatctccagactacaatcttgtccgtttcatcttcacattggctacatctctcttgattggtacagtcttctggcaaatcggaggtaacaggtcgaacgcaggggatctaacaatggtgataggagcattgtatgccgcgattatcttcgtgggaatcaacaactgttcaacagtacaaccgatggttgcagtggaaagaacagtgttctacagagaaagagcagcaggaatgtactcagccatgccatatgccatctctcaagtcacttgtgagcttccctatgtccttattcaaaccgtttactactcaaccatggcgtacacgacaagttcttctggttcgtcttcgttagctacttctcattcctctactggacttactacggcatgatgactgtttccctcacaccaaaccaacaagtcgc

SEQ ID NO: 94662 - DNA, 1574 bp, Arabidopsis thaliana columbia
ctttatggatgagccaacttcagggctagactctagagcagcggctattgtgatgagggcggtaaggaacacagtggacactggaagaaccgtggtctgcaccattcatcagcctagcattgatatctttgaagcatttgatgaattgatgctgatgaagagaggaggacaagtgatttacgcgggtccattgggtcaaaactctcacaaggtggttgagtactttgaatctttccccggagtgtccaagattccagaaaagtataacccggccacttggatgctcgaagctagctcactcgccgctgagctaaagcttagtgttgactttgctgagttatacaatcaatcagcattgcaccagcgaaacaaagcgttggtaaaagaactaagtgtaccaccagcaggagcatcagatctttactttgctacacaattctcacaaaacacatggggacagttcaaatcatgcttatggaaacaatggtggacgtattggagatctccagactacaatcttgtccgtttcatcttcacattggcaacatctctcttgattggtacagtcttctggcaaatcggaggtaacaggtcgaacgcaggggatctaacaatggtgataggagcattgtatgccgcgattatcttcgtggggatcaacaactgttcaacagtacaaccgatggttgcagtggaaagaacagtgttctacagggaaagagcagcaggaatgtactcagccatgccatatgccatctctcaagtcacttgtgagcttccctatgtccttattcaaaccgtttactactcactcatcgtctacgccatggttggtttcgaatggaaagccgaaaagttcttctggttcgtcttcgttagctacttctcattcctctactggacttactacggcatgatgactgtttccctcacaccaaaccaacaagtcgcttcgattttcgcctcagcgttttacggtattttcaacctcttctctggtttcttcattccaagacccaaaatcccaaaatggtggatttggtactactggatctgccctgttgcatggaccgtgtatggattgatagtgtcccagtacggtgatgtggagacacgtatccaagtccttggtggtgctcctgacttaaccgtcaagcaatacattgagggccattatggtttccaatctgactttatgggaccagtggcggctgtactcatcgctttcaccgtcttcttcgccttcatcttcgccttctgcatcagaactctcaacttccagaccagataaaaccatctctcaaacaacaaagtctctttctttttttgtatcctctgtgttgtttatatgcactataagctttgtatgttctaaatatgtattgtagtgtcataacgaaatttttttgaatatttttatttattgtcttatagatgatgacgaatcggaatcaagtaatataattccacttttttttggggtttaagaaaaaaaaaaaaaaataaaaagaaaaaaaaaaaaaagggcggccgctttaaaggatcccagcttaaggaaggggggaatccacctc

SEQ ID NO: 94663 - DNA, 548 bp, Arabidopsis thaliana columbia
  unsure (1)..(548): unsure at all n locations
atacgactcactatagggaaagctggtacgcctgcaggtaccggtccggaattcccgggcccaaaatggtggatttggtactactggatctgccctgttgcatggaccgtgtatggattgatagtgtcgcagtacggtgatgtggagacacgtatccaagtccttggtggtgctcctgacttaaccgtcaagcaatacattgaggaccattatggtttccaatctgactttatgggaccagtggcggctgtactcatcgctttcaccgtcttcttcgccttcatcttcgccttctgcatcagaactctcaacttccagaccagataaaaccatctctcaaacaacaaagtctctttctttttttgtatcctctgtgttgtttatatgcactataagctttgtatgttctaaatatgtattgtagtgtcataacgaaatttttttgaatattttattaaaaaaaaaaaaaaaaaagggcggcccgctctagaggatccaagcttacgtacgcgtgcatgcgacgtcatagctcttcnnnnnnngtccta

SEQ ID NO: 94664 - DNA, 543 bp, Arabidopsis thaliana columbia
aacaaactcaatcccagcctcctcctcctccgtcttctcccttattccctgtgcgtttaggcccccaattttttcaattaatccctccttttctcctcttaatctgaatccgaagcaacgcataatccataacaaagtctggaaaatttcttccgggataataaagagatccattaggagtaaattatctgacaagagaatacaaagggcaatttcattttagttgaattagggatttgggctcgtcatggctcctggaggcagtgctttgaaagaagtcatggaatctaattcaacgggaatggattacgaggttaaaacggcaaaagtggaagttaataataacaaacctacaaagccagggagtgcagggattggaaaatatgggatccattcgaacaatggtgtttacgagcttcttgaatgtcccgtctgtacaaatttaatgtaccctccaattcatcagtgtccgaatggccacacattatgttcaaactgcaaactgagagtgcagaacacatgccctacatgtcgctacgagct

SEQ ID NO: 94665 - DNA, 394 bp, Arabidopsis thaliana columbia
tccaagcttctttttttttttttgttagctgcgtttttcttctagctagctctctgcttgtcctcgggaataatggaggaggagctgcgtgttcggctgaatgaccatcaagtgtcaaaggttttccctgtgaagcccaaatcaacggcgaaacctgtttccgaatcggagactccggaatcgaggtactggtcctccttcaaaaatcattccacacctaatctcgtctcctccgtagccgctttggctttctctccggtccaccctcactccttggccgtcgctcactccgccaccgtctgcctgttttcctcgcagtcgctttccttctcccgccgtttctccttccgcgatgttgtcttctccgtctgtttcccgtccgacggagcttttt

SEQ ID NO: 94666 - DNA, 2734 bp, Arabidopsis thaliana columbia
  unsure (1)..(2734): unsure at all n locations
nnnnnctaatcgactcacttagggaacagctggtacgcctgcaggtaccggtccggatttcccgggtcggcccacgcgttttaagtagaagaagaaaagttcttacgaagaacccagattttgttaagaaatggatgtgccagaggagacgaggcttcgccacaagcgagattttatccagttcctcgatagtatgtatatggaggaaatcaaggctttggtacatcaaaagcgtcaccgtctcattattaatatctctgacattcaccaccacttcagggaagttgcctctaggatactgaagaatccaaatgagtatatgcagtcattttgtgacgcagccactgaagctactcgtgctattgaccctaaatacttgaaggaaggagagcttgtccttgttggttttgaaggttattttgtttctcgcgttgttactcctagagagcttctctctgattttattggatctatggtctgtgttgagggcattgtcaccaaatgctctcttgtgaggccaaaggttgttaaaagcgttcacttttgtccatcaaccggtgaatttaccaatcgagattatcgagacataacatctcacgctggtttacccactggctctgtctatcccacaagggatgataagggaaacttattggtgactgagtatgggctgtgcaaatacaaagatcaccagaccttgtcaattcaagaagtgcctgaaaatgctgctcctggtcagcttccacgaagcgttgatgtcattgctgaggatgaccttgttgactcatgcaagccaggagatcgagtatctgttttcggtatttacaaagctcttcctggaaaaagcaagggtagtgtaaatggagtctttaggactatcctcatagccaataatatcgctctgctcaataaagaagcaaatgcacctatatacactaagcaagacctagataacattaaaaatattgcacgaagagatgatgcatttgatctccttgctcgttccttagcaccttctatttatgggcacgcttggataaagaaagcagtagttttactgatgcttggtggtgttgaaaagaacctgaagaacggaacccacttgaggggagacatcaacatgatgatggttggtgatccatctgttgccaaatctcaacttctgagagcgataatgaatattgcacctttggctatatcaaccacaggccgtggttcttccggtgttgggttaactgctgctgtgacttctgaccaagaaacaggggaacgaagactagaagctggtgcaatggtcctcgctgataaaggtatcgtgtgcattgacgagtttgataagatgaatgatcaggaccgagttgctatacacgaagtgatggagcaacagactgtaacaattgcaaaagccggtatccatgcatcactgaatgctagatgcagtgtggttgcagctgcaaatcccatatacggaacttatgacagatcactgactccaacaaagaacattggacttccagattcgctgctttctcgttttgatctactgtttattgtgttggatcaaatggatgctggtatcgacagcatgatttcagaacatgtcttgcgcatgcatcgttacaagaacgatagaagtgaggcagggccagatgggagcttgccttacgcgagagaagacaatgctgagagtgaaatgtttgttaagtataaccaaacactacatgggaagaagaaaagaggccaaacacatgataaaacccttacgattaagttcttgaagaagtacattcattacgccaagcaccgtattacaccaaagctcactgatgaagcatcggaacgtattgcagaagcatatgcagatctcagaaatgcaggttccgatactaagactggaggtacgcttccgataacagccagaactctagagacaataattcgtcttgctacggcacatgccaaaatgaagttgagtagcgaggttactaaagctgatgcagaggctgccttgaagcttatgaactttgcaatatatcatcaagaattaactgagatggatgatcgtgagcaagaagaacgtcaaagggaacaagctgaacaagaaagaacaccaagtggacgtagaggcaaccaacgcaggaataatgaagatggagcagagaatgacactgcaaatgtcgacagtgaaacagcagatccaatggaagtagatgaaccttctgtagagcaattcagcggcacggtctctgcagcaaggattgaaacctttgagcgagtgtttgggcagcacatgaggacacacaggctcgatgacatctctattgcagatatagagactgttgtcaacaacaatggggttggagcatctcgttactctgcagatgagattatggctctcttagagaaactgcaagatgataacaaagtgatgatcagcgatggcaaagttcatatcatttgatcatatgaagaaatcaatattgattgcatcatcatcatcatattagaactcaaaaatagtgtagtagtaaactcttggaaaccaaaatatcattttgtaaaatctttattcatacgttatgttttttgcatttactagtgaagtaaaactgatgataaaatgcttaaaaaaacgcatctgattataaaatttggaatttataacgaaaagcccaatccgagaataaaatcctttcatttttttccttnaaaaaaaaataatnnnnngnnnaaa

SEQ ID NO: 94667 - DNA, 630 bp, Arabidopsis thaliana columbia
  unsure (1)..(630): unsure at all n locations
ctctnnnnnnnnnnnnnnnnnnnnnnnnnnnnnnnnnnnnnnnnnntacggtccggattccgggtcgaccacgcgtccgcgagaaagacgacagaagggtacggctgcgagaagacgacagaagggggcgccaaaagaaaaatggatatgtcgcttgcgttatcgacggcaccaatgagtaggacgattatctctgccacgaggcggtcccaagtttcacaacctaaagctaagaaagtcaagccggcgaataagcggccaacgatgtcgacaagcggtttctccggcggaacgacaaaggagttgacttggaagtgcgtagaaggttgtggagcttgctgtaagattgcaaaggacttttcctttgcaacacctgacgaaatcttcgacaaccctgatgatgttgagctgtatcgaagcatgatcggagatgatggatggtgtctaaactacgacaaagctacacgcaaatgctctatttatgctgatcgtccatatttttgtcgggttgagccagaggttttcaagtcactctacgggattgaagaaaagaaattcaacaaggaagctgtcagctgctgcattgacacaattaagacgatatacggccctgattcaaagaattggata

SEQ ID NO: 94668 - DNA, 501 bp, Arabidopsis thaliana columbia
ggaaccctcccttggatggctcccgagctacttagtggaagcagcagcaaagtttctgaaaaggttgatgtgttctctttcggaattgtcttatgggaaattcttaccggtgaggaaccctacgccaatatgcattatggggcaattttcggaggcatagtgaacaatacattgagaccaaccgtgccaaactactgtgacccggagtggagaatgctgatggagcagtgttgggctcctgacccatttgttcgacctgcgttcccgggaataagccagacgtctccgcaccatgtcctcctctgcgggccacacaaaaccacacgctgtcaaccaaccaaatccacaagtaatcctatcaattttattaattcgctgggtacggaaattccgtaaaaaaatggggttggggtttaaaatatttccctgctggggttttttcgggattctgaggggcgacaagtttcaaggatgggtgtggatttgtccaagaaaccctaa

SEQ ID NO: 94669 - DNA, 772 bp, Arabidopsis thaliana columbia
gtcgcctctgacacttcatctctgccgtcttacgaagattttgccagtgcgggaagcggcggagattgagagattagcgacgatggaggaaagcaaacagaactatgacctgacgccactaatagcgcctaacctggacagacacttggtgtttcctatattcgagttccttcaagagcgtcagctttaccctgatgagcagatcctgaagtctaaaatccagcttttgaaccagacgaacatggttgattacgccatggatattcacaagagtctctaccacactgaagacgctcctcaagaaatggtggagagaagaacagaggttgtcgctaggctcaaatctttggaggaggctgctgcaccactcgtgtcttttcttttgaaccctaacgctgtgcaggagctaagagctgacaagcagtacaatctccaaatgctcaaggaacgctacccagattggtccagaccagattgaggctttggaccagtacgccaagttgcagtttgaatgtggcaactattctggtgctgctgactatctttaccaggacaggaccctgtgctctaaccttgagaggagtttgagtgccttgcggcgaaagctcgcatctgaaatattgatgcagaactgggatattgctcttgaagagcttaaccctctcagagagattattagactcatagagtttttcatcgtccgttaaaccaggtgcagaacaggatttggttgatgcattggggtctgtatatcttttttaccatgataatg

SEQ ID NO: 94670 - DNA, 422 bp, Arabidopsis thaliana columbia
ctggttttttggttctctcccaaatttatttgaatttgacatttgatttgatttctcgaacgtagtgatttcctccgtacggcgtctccggtgaatcgaatttcatcatcgccgacatccctaaaagagtgtctatctattgattcactttcttcccaaattcttgttccctcgaattgattgacgaggaagagatttgtatttgatctgatatctcagattccaggatgaaaagaggagcccttagacgaagggctagggatatctctgttatgcttgttgtacttgtttgtgcaactgtagtcatatggacatgggatagaactccaacctcggcctttcttccacctgaaagtcactatctaaagctgcaatcagaagaaaaggttgagaaattacctactgcgctgaatactgaaact

SEQ ID NO: 94671 - DNA, 364 bp, Arabidopsis thaliana columbia
acccacgcgtccgcggacgcgtgggttcaaaaacaaagtcgattaccctagaatccatgggcacgacatcttctacagcaattctcttcttcatccgaagatgaattcgtattgggcgaaacttccggtggttaaagctgcgatgcttgctcacccatttatggattgaagctttagagagaaaatgggtgatgaggcagagatcaaggaacatttaaagccacaagcttcatctgaaacaatagacaagaaacataatgtgaaagggaagaggttatggcagaaagtcaagtatcaattggtggagtttcattcattgcctgcttatttaagagacaatgagtacatcattggtcattaccga

SEQ ID NO: 94672 - DNA, 576 bp, Arabidopsis thaliana columbia
  unsure (1)..(576): unsure at all n locations
cttccatcgtcgtcttctattttttcttctttcttcgatttcataccaaaacaagaactctctgttttcgacaaaaacgaaaccttgagatctattttgattgacttttaagaaagagagagatctttcttagaagattttgtctcgtcggcattgaagatccagggtttgtctttcgaaattcagagagaaaatgggtgatgaggcagagatcaaggaacatttaaagccacaagcttcatctgaaacaatggacaagaaacataatgtgaaagggaagaggttatggcagaaagtcaagtatcaattggtggagtttcattcattgcctgcttatttaagagacaatgagtacatcattggtcattaccgatccgaatggccgatcaaacagattcttctcagcatctttaccattcataatgagactttgaatgtttggacgcacttgattgggtttttcctgtttttggcgctcactatatacactgcaacgaaagtaccgagtgtcgtggatcttccattcggtttaacaccggttaccccgnttttnttgggggaaaanaantctnncca

SEQ ID NO: 94673 - DNA, 1419 bp, Arabidopsis thaliana columbia
gctctatacgactcactttagggaaaggctggtccccctgcaggtcccggtccggatttcccgggtcgaccaaggcgtccgcccacgcgtccgcccacgcttccgcgcgatcctagcggttggccattaccaaagtggcgggggggaaatactctctatggggttcaattctctcaaaccttctcttggttcttggcacttccctcttctttggtggtatcgccaatatccgccgcgagcagcggttcgaccggaaacaagccgatgtgaacttcttcttgctgcttatgggcctgttgggtcatttgctgccattattgttaaaatatgcagcaaccggcgaagtatcgacctctatgattaacaaaatgtcgctcactctgtcgcggacaagcagcatagttatgcttattgcttacattgcttatctcatcttccagctctggactcaccgccaattgtttgaggcacaacaggatgatgatgatgcatatgatgatgaggttagtgttgaagaaactccagtgataggattctggagcggatttgcttggctcgttgggatgacaatagtcatcgcattgctatcagagtatgttgtggacacgatcgaggatgcatcggactcatggggactatcagtgagtttcataagcatcatattgcttcccattgttgggaatgcggctgagcatgctggagccatcattttcgcattcaagaacaagctcgacatatctctaggggttgcgttgggctctgcaactcagatttctttgttcgtggtcccattgagtgttatcgttgcgtggatcctgggaataaaaatggatctcaactttaacatccttgaaactagctctctagctttggccattatcatcacagccttcactttacaggatggaacttctcattacatgaagggactggttctattgttatgctatgtcatcatcgcggcgtgtttcttcgtcgaccaaattccccaaccaaatgatttggacgtgggacttcaacccatgaacaatttgggagaagttttctcagcttaaagttatcaaatgacttgtaaaaaaagaagaagagaagaaatcagcaaattatgatttgattgattcgtcatccaaaaacggagagactttgtcagagggattcctcaagcatgaatgagggagggagcttgatgaagacagaggttcttggtgtttaagaaatgatcacattaatttctgtttgctttctttttctgtttgttgttggcatttttaagtttttcttgtatattatatgttcttttgctgagtaatgtggactatattttctgatatattcgtttaccttaggaaaaaaacaaaagggcgaccgctctagaggatccaagcttacgtacgcgtgcgttcgacgtcataaatcttg

SEQ ID NO: 94674 - DNA, 374 bp, Arabidopsis thaliana columbia
  unsure (1)..(374): unsure at all n locations
aaaagagatagctatagagacacacagtttttncctgnttacacanngaaagcactgcaaaaggagtgtcatccagatggtaggaacgtaatttgcggccactttgctaattgggagctacgttcaatggtcatcgtcgatagaagtatgttgggatcggacagttcggtgactgattatccaggaaagattccaaaggggattgatcttccaagtgatgctgttgtagatgataacaacatcaaagttgagtgattctttatgatggacactgcattgtcttcaacttttctatttatctatacacaaacaccttctttgctggatgccaccctcttattagtattactattgactatcgagttaaagatctt

SEQ ID NO: 94675 - DNA, 1027 bp, Arabidopsis thaliana columbia
aatttggtcgcactgcaggtcccggttcggatttcccgggtcgaccacccgtccgggaagatgttgttggatggtttaacgagcatgctcagaagcttcttgagcttcatttagcttctggttttacaaagtgtcttacttggctcagaggcaacagtcgaaaaaaggaccatcatggtttgatccaagagggtaaagatttggttaattacgctctcatcaatgccgtcgccattcgaaaaatcctcaagaaatatgacaagattcatgagtctaggcaaggacaagcgtttaagactcaggtccagaaaatgcgaatagaaatccttcagtcaccgtggctctgcgagcttatggcgtttcacatcaatctgaaagaatctaagaaggaatctggagctactataacttctcctcctcctcctgttcatgcattgtttgatggttgccctttgactttcgacgatgggaagcctttactttcctgcgagctctctgattccgtcaaagttgacattgacttgacttgttcaatatgcctggacacggtgtttgatccaatacctctaacctgcggtcacatatattgctacatgtgtgcttgctctgctgcatcagtaaacgtagttgatggcttgaaaaccgcagaagcaactgaaaaatgcccgctttgccgtgaggatggggtttataaaggtgctgttcacttggatgagctcaatattttacttaagcgaagctgcagagactattgggaagaaaggcgtaaaacagagagagcagaaaggttacaacaagcaaaggaatattgggattaccaatgccgaagcttcactggaatatgatatagtttgatttgtggcttcttaagtgagattcttgattttgataataagatagtaaaaataatcttaattttgatttgctttcctctgtgagtgtgtttccttgcacagagagtgacgatttctttgtgaaaaaactgaaaactcttaagcattaaatatggtttataagtttgcataaa

SEQ ID NO: 94676 - DNA, 540 bp, Arabidopsis thaliana columbia
  unsure (1)..(540): unsure at all n locations
cctctcctcagccactntgaaccgagtctgcngctatattaacntaacaatggtgcaagactttccccactgagtttccgttgggttaatgtaacaagacgtagccaatgcgcacatccaagcatttgaggtcccttcagctaatgggcgttattgtttggtcgagcgtgtcgttcaccactccgagattgttaacattctacgtgagctttacccaaatctcccactacctgaaaggtgtgtggacgagaatccctacgtgccaacgtatcaagtgtccaaggataaaacgaggagccttggcatagactacatacccttgaaggttagcatcaaggagaccgtcgagtccttgaaggaaaaaggtttcgcacagttctgagaaagcatttgagccaatggatttaatccagattagataaagtatttggaagactatttcagaaataatatttggaacatgtcaatgttctcaaggagatattagtatgttcttgtgtactttattgttgttccatcaaatgagttacttttcctttt

SEQ ID NO: 94677 - DNA, 481 bp, Arabidopsis thaliana columbia
  unsure (1)..(481): unsure at all n locations
ttcctccgtccccttcccctaatccccaaaactcacatataaaaatctctccttttttcatcgaagcatataacacaacaccgacaaggagattcctttaactatggcgaagaaagcaagaattgttataatcggagctggaatggctggtctcacggcggcgaacaagctctacacaagctccaacaacaccttcgagctctcagtcgtcgaaggcggttctagaatcggcggtaggatcaatacctctgagttctcatcagagaagattgagatgggtgccacgtggatccacggaatcggtggaagccctgtttatagaatcgctaaagagactggttctttagtctctgatgagccatgggagtgtatggattccaccattgataaagctaagacctttgctgaaggtgggttcgagattgagccttncattgttgatccatctctggtttggtcactgctctcatggaattagctc

SEQ ID NO: 94678 - DNA, 457 bp, Arabidopsis thaliana columbia
  unsure (1)..(457): unsure at all n locations
atttttcagcaccgaaaatggcaaacatcggcgtagcgacgacggcgactaacaaccaggtgagcctccgtgactacgtgagtggattccctaaacaatccgacctctacattgccgcaaccaccgttgacttacgtgtacctcccggatccatggcggttctagtcaagaatctctacttatcttgcgatcctcatagccgcactcgcatggggaagcctggatccctcgtccccggcttcaatggctcatgctttcactatcggcaagccaatctttgggttgggaggggctaaagcaatagattcagggcacccaaattacaaaacaggggatttactttggggaagagttggttgggagagtataggnntatncntccaactccttcttcanattttaagattcatcacacgggtgttcnntaatntttttacactgggacttntttgggant

SEQ ID NO: 94679 - DNA, 530 bp, Arabidopsis thaliana columbia
  unsure (1)..(530): unsure at all n locations
cnnnnnnnnnnnnnnnnnnnnnnnnnnnnnnnnnnnnnnnnnnnnnnnnnnnnnnnnnnnnnnnnnnnnnnnccacgcgtccgcaatattttcagcagcgaaaatggcaaacatcagcgtagtgacgacagcgactaacaaccaggtgattctccgtaactacgtgagtggattccctaaagaatccgacctctacatcgccgcaaccaccgttgacttacgtgtacctcccggatccatggcggttctagtcaagaatctctacttatcttgcgatcctttcagccgcattcgcatggaaaaacccgacccttcgtcacctgcttccgtcgctcgcgcttactctatcggcaagccaatctctggatttggagtggctaaagcaatagattcatgtcatccaaattacaaaacaggagatttactttggggaagagttggatgggaagagtatagtgttattactccaactccttcttcacatttcaagattcatcacactgatgttccattatctttctacactggac

SEQ ID NO: 94680 - DNA, 485 bp, Arabidopsis thaliana columbia
agagaacgggtgtgctcatcagaagacgaaggttctgattcagttcatgctcaatcgtcttcagcttcagtggtgtttacacctccccagactccaaacacagcaactggcttatcatcccagaaggcgtctcaagtagacaaagcagcaactccggtaaaacggtctgcatgtctaatgaggagtgatagtatctgtgcttcaagatgtgttggtgtctcctctgcagtgtcatagtcagaaaaaaattgatttctcaagttgtttagcagcaaaccattgattgttgtgttctgcctattgtatcatgatgtctctcctgagtgttttcattgttgtaactctcttcttcttcttcttactctctgctcatattggaatctcgtgtgtaatggtttctcttggaacttgaaattcatatatactctataaaaaaaaaaaaaaggcgccgctctagagatccagctacgtacgcggcagcgcgt

SEQ ID NO: 94681 - DNA, 690 bp, Arabidopsis thaliana columbia
  unsure (1)..(690): unsure at all n locations
cnnnnnnnnnnnnnnnnnnnnnnnnnnnnnnnnnnnnnnnnnnnnnnnnnnnnnnnnnnnnnnnnnnnnnccacgcgtccgcgtattttaaggattggcaaatgtggactatgaaccatcgaggcaacctatctcgaaacttgagtttgagtttgagaggaggaaattgactcgcgatgacgtgagggaactcatgtacagagagattttggagtatcatccacagatgttgcaagagtatctacaaggagaagagaacataaactctcattttctatacccaagcggagttgatcagttcaaacaagagtttgcccgactcgaagaacacaacgacgatgaagaggaacacaactccccaccacatcagagaaagtacacttcactccctagagaacgggtgtgctcatcagaagacgaaggttctgattcagttcatgctcaatcgtcttcagcttcagtggtgtttacacctccacagactccaaacacagcaactggcttatcatcacagaaggcgtcacaagtagataaagcagcaactccggtaaaacggtctgcatgtctaatgaggagtgatagtatctgtgcttcaacatgtgttggtgtctcctctgacagtgtcatgtcagaaaaatgttctcagttgttagcagcaacattgatatgtgtctgctatgtatcatgagt

SEQ ID NO: 94682 - DNA, 671 bp, Arabidopsis thaliana columbia
  unsure (1)..(671): unsure at all n locations
gataaaaacagctccnccanattcttcaggnatcattgaanccagtaantcaagttncaaccaccctttgggcttgttcgtcccatgctgccctctcccgcatcttaaaagttggatatcctacctgccacccacctgtggccgacttcacttgcctccttccacaagtgattggaaaccgcacaagagtttgaactccaattcacggagaggcttcctaccaggtacttgaaaccctgaacccaaagagaaaatgggacggaaacctgtcagggaaaagcagagacaatgagccccacacgtggagaggaagacggtaaaagtgaacattacagagattgtatcagtaacaccttgtgctgatctcactctacctcctggtgctggtctctgcattgataccattcatgccccagttttcttggttgcagattcatgggagtctttagatggatggcttgacgcaattcgtttggtttacacaatttatgcgagagggaagagtgatgttttagccggtattatcaccggttaataaatacttcatttaatatgactattttgcttttttatctgtagttttgtgatgtattatgatcttagcgaaatttttttgtcattttcaaacgctttttgggaccctttttcgtattttcatcgaatacatttat

SEQ ID NO: 94683 - DNA, 624 bp, Arabidopsis thaliana columbia
  unsure (1)..(624): unsure at all n locations
cgnnnnnnnnnnnnnnnnnnnnnnnnnnnnnnnnnnnnnnnnnnnnnnnnnnnnnnnnnnnnnnnnnnnnnnccacgcgtccgcccacgcgtccgtacggctgcgagaagacgacagaaggggatcaaccagaacttttattcaaagagatctatacaaacagaactcaccaatcttatctctttccttctccaccttgctttccaatctcaagctttaactctccctgaaaatgatgataaacgcaaagaagctcatgaagttggccaagaaatggcaacaaagagcagccctcaagagaaaaagaatttcatttcagagatcaagtattactactagcagccaaacagctgtagaaaagggttgtttcgtggtttacacggctgataagatccgtttttcatttcccttaagttacctaagcaacactattgtccaagagctcttgaaaatatctgaagaagagttcggtctcccgacggaaggaccaatcacattgccattcgattcggcctttttagagtatctcatcaatctgatccaaagacgaatggatgaagatacagaaaaggcttctgtattggcaatctcaagtgctagaagctctttcaaccacaacaacat

SEQ ID NO: 94684 - DNA, 706 bp, Arabidopsis thaliana columbia
  unsure (1)..(706): unsure at all n locations
tgcgggtcccgtttcggatttccgggttcgaccccccgtccgggtaattgggggtgatgcttcagggatgatagcgtcaccaaataatattaaggcggagaaggatcatgaggaaaatttatcgttggccggagatggattcgacaccgtcattaaagctaaagaagctctcgatgccgtcccaaattgtcgtaacaaagtttcatgcgctgatattctctcgatggccactcgtgacgtcgttaatcttgttagtaactcaagcttatttattctattaaattaaaacattagtataagttattacattaaattcaatataggcgggtggaccacaatacgacgtggaattgggaaggctagatggactatcatcaacagcggctagcgtccggagggaagttgccgcatccgaccgacgatgtcaataaactcacttcaactctttcgccaaaaacgggccttagccttaaccggcatgatcgctctcttccggggcacacaccatttgagggtttgcgtatttnaccaaaaggtgttcaatncgggtattcacttttnaccaaggcaacttaaggtgggncccccgggtnaccaaaggtttcggngcaannnctnaaangggnngtgcccttgaacaatggcccnngggtgggttttccattggcccacaacncctgggaatttgcaccggttttaaaacntt

SEQ ID NO: 94685 - DNA, 1357 bp, Arabidopsis thaliana columbia
  unsure (1)..(1357): unsure at all n locations
taatcgactcactatagggaaagccggtacgcctgcaggtaccggtccggaattcccgggtcgacccacgcgtccgattgagtgaaaatatttttttttaaatggttgtggtgaacaaaacgaatctcttattgcttcttctctctctatgtctcaccctcgacctctcctccgcacaactccgccgtaacttctacgccggaagttgtcctaacgtcgaacaaatcgttagaaacgccgtacagaaaaaagtccaacaaactttcaccaccattcccgccactctacgcctctatttccatgattgtttcgtcaatgggtgtgatgcatcagtgatgatagcgtcaacaaataataataaggcggagaaggatcatgaggaaaatttatcgttggccggagatggattcgacaccgtcattaaagctaaagaagctctcgatgccgtcccaaattgtcgtaacaaagtttcatgcgctgatattctcacgatggccactcgtgacgtcgttaatcttgcgggtggaccacaatacgacgtggaattgggaaggctagatggactatcatcaacagcggctagcgtcggagggaagttgccgcatccgaccgacgatgtcaataaactcacttcactcttcgccaaaaacggccttagccttaacgacatgatcgctctctccggggcacacacattaggattcgcgcattgcacaaaagtgttcaatcggatatacactttcaacaagacaactaaagtggatcccacggttaacaaagattacgtgacagagctaaaagcgtcgtgtcctcgaaacatagatccaagagtggctattaacatggacccaacaacaccaagacaattcgacaacgtttactacaaaaacttgcaacaagggaaaggattgttcacgtcggatcaagtcttattcacggatcgtcggtcaaagccaaccgttgacttatgggctaataatggacagttgtttaatcaagcttttattaactcgatgatcaagcttggtcgtgttggtgttaaaactggtagtaatggtaatatccgtcgtgattgtggagcttttaattgatttaaatatatctgtattagattttgtttattgtatttgggtataggatgggtcatgggtctcataaagctggttcagctaaattgaaaattgtaataaatctctgtcttgggtttcagtttgcaaaacctaaactgtaattatagagtggaggaaataagaagtatcgtatattatttatcaaaaaaagggcggccgctctagaggatccaagcttacgtacgcgtgcatgcgacgtcaagactcttctatagtgtcnnnnnnnn

SEQ ID NO: 94686 - DNA, 583 bp, Arabidopsis thaliana columbia
  unsure (1)..(583): unsure at all n locations
cacagcaacaaacagagaaaatgtgtggcggtgctattatttccgattatgcccctctcgtcaccaaggccaagggccgtaaactcacggctgaggaactctggtcagagctcgatgcttccgccgccgacgacttctggggtttctattccacctccaaactccatcccaccaaccaagttaacgtgaaagaggaggcagtgaagaaggagcaggcaacagagccggggaaacggaggaagaggaagaatgtttatagagggatacgtaagcntccatggggaaaatgggcggctgagattcgagatccacggaaaaggtgttagagtttggctttggtacgttcaacaacggcggagggaggctgtccattggcttatgattgtttcgggccaagcagatcccgtggtgataaagccaaggtcaacctttcccagttcttgaaccatccttcctcctccctaaattttactccttccgccggtattgccacggtttaaccgtttacccttccggggagaaaggtttcggttttttttcagggggggcccggttgagacacccgtttcccggtggggttttt

SEQ ID NO: 94687 - DNA, 806 bp, Arabidopsis thaliana columbia
  unsure (1)..(806): unsure at all n locations
ccaggttttattcgactcaattttggggaaggtggtacccctgccggtaccggtcccgaatttccgggtccgcccaagccttccgaaacagagaaaatgggggggggggctattaattccgaatattccccttttggcaaccaaggccaggggccgaaacttaccggttgaggacttttgttaaaagttgaaggtttccgccgccgccaatttttggggttttaattcaacttccaaattcaatccaaccacccaggttaccgtgaaagaggaggcagtgaagaaggagcaggcaccagagccggggaaccggaggaagaggaagattgtttatagagggatccgtaaccttccatggggaaaatgggcggctgagattcgagatccacgaaagggtgttagagtttggcttggtacgttcaacacggcggaggaagctgccatggcttatgatgttgcggccaagcagatccgtggtgataaagccaagctcaacttcccagatctgcaccatcctcctcctcctaattatactcctccgccgtcatcgccacgatcaaccgatcagccttcggcgaaggaaggtcttgcgttgtctctcagagtgagagcgagttaagtcagccgagtttcccggtggagtntataggntttttgaaatggggccgggtttaagaacctnagttncggnttttanccggtttttntctttaaacanagttttggntttgaatcgtncctttanttggcgggnaaaaggnggaaaccggtaanttattagnccgttccaggnggaatttgggtgc

SEQ ID NO: 94688 - DNA, 655 bp, Arabidopsis thaliana columbia
  unsure (1)..(655): unsure at all n locations
ccccggtgggactttgnaagcnaanttcccccccanatttngggntttttccccccccaaccncacccnccaccaantttccntaaaaggggcccntttaaaaaggcccngnaacaggcccgggaaccgggggagggggaaaaattttttttgnggggatcctaaaccccccatgggaaaaatggccggctaagattcgggaccccccgcaaaacgttttcagagtttgcctttggtccgtttcaacaccgccggaggaaacctccccatggcttattgatgtttccggccaaaccagaccccgtggtgattaaagccaaagctcaacttccccagatctgcaccatcctccctcctccctaaattatactcctccgccgtcatcgccacgatcaaccgatccacctccggcgaagaaggtctgcgttgtctctcagagtgagagcgagttaagtcagccgagtttcccggtggagtgtataggatttggaaatggggacgagtttcagaacctgagttacggatttgagccggattatgatctgaaacagcagatatcgagcttggaatcgttccttgagctggacggtaacacggcggagcaaccgagtcagcttgatgagtccgtttccgaggtggatatgtggatgcttga

SEQ ID NO: 94689 - DNA, 857 bp, Arabidopsis thaliana columbia
gctcgagccgctcgagcggcacgagcggctcgagagtaatttagcagcaacaaacagagaaaatgtgtggcggtgctattatttccgattatgcccctctcgtcaccaaggccaagggccgtaagctcacggctgaggaactctggtcagagctcgatgcttccgccgccgacgacttctggggtttctattccacctccaaactccatcccaccaaccaagttaacgtgaaagaggaggaggcggtgaagaaggagcaggcaacagagccggggaaacggaggaagaggaagaatgtttatagagggatacgtaagcgtccatggggaaaatgggcggcggagattcgagatccacgaaaaggtgtcagagtttggcttggtacgttcaacacggcggaggaagctgccatggcttatgatgtagcggcgaagcagatccgtggtgagaaagccaagctcaacttcccagatctggatcatcatccttctactcctccgccatcgtctacttcactaagattatccgatcagccaccggcgaagaaggtttgcgttgtctctcagagcgagttagctcagccgagtttcccggtggagtgtgttggatttggaaagggggaagagtttcagaacctgatgtacggatttgaaccggattatgatttgaaacagcagatatcgagcttggagtcgttccttgagcttgacggtaccacggcggagcaaccgagtcaactagatgagtctgtttgcgatgtggatatgtggatgcttgatgatgtcattgcgtcgtatgagtaaaaggaaaaaaaaacagaagataatgtaatatgtaaaaaaaaaaactaaattact

SEQ ID NO: 94690 - DNA, 1170 bp, Arabidopsis thaliana columbia
gaccataaaacatttattttgcgcctataaaggcatttcagctccaccgtaggaaactttctcttgaaagaaacccacagcaacaaacagagaaaatgtgtggcggtgctattatttccgattatgcccctctcgtcaccaaggccaagggccgtaaactcacggctgaggaactctggtcagagctcgatgcttccgccgccgacgacttctggggtttctattccacctccaaactccatcccaccaaccaagttaacgtgaaagaggaggcagtgaagaaggagcaggcaacagagccggggaaacggaggaagaggaagaatgtttatagagggatacgtaagcgtccatggggaaaatgggcggctgagattcgagatccacgaaaaggtgttagagtttggcttggtacgttcaacacggcggaggaagctgccatggcttatgatgttgcggccaagcagatccgtggtgataaagccaagctcaacttcccagatctgcaccatcctcctcctcctaattatactcctccgccgtcatcgccacgatcaaccgatcagcctccggcgaagaaggtctgcgttgtctctcagagtgagagcgagttaagtcagccgagtttcccggtggagtgtataggatttggaaatggggacgagtttcagaacctgagttacggatttgagccggattatgatctgaaacagcagatatcgagcttggaatcgttccttgagctggacggtaacacggcggagcaaccgagtcagcttgatgagtccgtttccgaggtggatatgtggatgcttgatgatgtcattgcgtcgtatgagtaaaagaaaaaaaataagtttaaaaaaagttaaataaagtctgtaatatatatgtaaccgccgttacttttaaaaggtttttaccgtcgcattggactgctgatgatgtctgttgtgtaatgtgtagaatgtgaccaaatggacgttatattacggtttgtggtattattagtttcttagatggaaaaacttacatgtgtaaataagatttgtaatgtaagacgaagtacttataacttcttaaaaaaaaaaaaaaaaaaaaaactcgagccgaattccgagcttacgtacgcgtgcatgcgacgtcatagctcttctatagtggcaccta

SEQ ID NO: 94691 - DNA, 543 bp, Arabidopsis thaliana columbia
  unsure (1)..(543): unsure at all n locations
ctcttatgcgactcactatanggaaagtctggtacgcctgcaggtaccggtccggaattcccgggtcgacccacgcgtccgcggacgcgtggggaaaagctaaccacaagaggaggagagaaactcgataacaaacaagagaaagagaaagcgagattctaaaatctaatctcgtgcttccaattcaaataattttgtctccttagcggatcgatcgtagattataaagctccgccgtcgcctccgccgcaatcgacggcggtgtctacgtcgctttcgtttcgtgcgtaacaggaggagcagcagcaaaataagtcagcttaagtaacgccgtctttgatttgacttgagataagtattttggtgatatggcattgatgatgtttccgcatttgctcgacgttgacgaaaagtaaattgctggcgaatttggagaaaccacatacagattgatgctctcttcagtcgacctcttttgtaaatttgttgaacctacggggtcgaaggtgtgtaccatatatgctataagaagattttaaagta

SEQ ID NO: 94692 - DNA, 846 bp, Arabidopsis thaliana columbia
  unsure (1)..(846): unsure at all n locations
aagcaggctaatactcctggnttcaaggtctacgcaaaacaagtgaaagccaatgctgttgcccttggaaactacctaatgagcaagggttaccagattgtaaccaatggaactaagaaccaccttgttctctgggatcttcgccctcttggattgaccggaaacaaggttgagaagctctgcgatctgtgcagcattacattgaacaagaacgcagtatttggagacagtagtgctcttgctcctggaggtgtaagaatcggtgcacccgcgatgacatcgagaggattggtggagaaggactttgagcagataggagaattcctgagccgtgcagtgacactgacgttggacatccaaaagacatacggtaagttgttgaaggacttcaacaagggtttggtgaacaacaaagatctcgatcagctcaaggctgatgtcgagaagttctcggcgtcttatgagatgcctggattcctcatgtctgagatgaagtacaaggattagagatctttctctatatgcaagagtaatcttctattattatctaccatatatataaaatatgcttttgtaggatcgccttaaaggcgaagagatgaagatgcaaacagtaaaaaaaaagggttttcttttcagctatttcttcttgaatgttttttttctttttcttttggtttcttattgaaattgttgtatttttgttggcttttttctaataatatcagcgagtttttcttaaaaaaaaaacaaaaagnnnnnnnnnnnnnnnnnnnnnnnnnnnnnnnnnnnnnnnnnnnnnnnnnnnnnnnnnnnnnnnnnnnnnnnnnnnacaatnnnnnnnnn

SEQ ID NO: 94693 - DNA, 372 bp, Arabidopsis thaliana columbia
tcgtccacgcgtccggtgagttctgctgaagatgcttgtatccgcgtctggagctttactcctcaataagacttgacgtaaattataaagatctctggacaagtcctatcttgtctctttggaaagcttctactacttttgaaggctttttttgtgaatcttccgtttggccgtggctgtgttgatgtgtgtgtctgttttttttttttgtctgcatatcttttgtcaaaaatgaatgctctgttttggtctgaaactgagatcttgagtcagattttttttcattatcagaagattactgatacagaatgggacttgagattgtgctttctctcaatgatttttgggctctataatatttgttcttcttac

SEQ ID NO: 94694 - DNA, 514 bp, Arabidopsis thaliana columbia
  unsure (1)..(514): unsure at all n locations
ccactacttactactacccaatccccaaaagctttctactttcttctcctcgtcacaaacgaaacgctaatctcatcttctgctccaccaaacccatttgctctcctcctcctccttcgtcttcttcttcgtctcctctgcaaacgacgacaacccatcgaagccaaaagcagaatctgcgtctacccacgtttgaagattcgtttcttctttaccaatttagctctcccaccgaagacccaggattctctaaccggatcccggaacaattcgacggagagccacgcgaattggtgttgccgagagtagaagacaacaacaaaagggttggcaatttcgtcgaacatgtggtgggcagatcttgaaagcggctcttgggcaacgaatcaatatttgagggtatcggttttcttcggtctcccgttggttgttaaagatcggcaatttttttcttccgaantttttctgttnaaannntttaagacanatttantnggaagcntttagaaaaagg

SEQ ID NO: 94695 - DNA, 374 bp, Arabidopsis thaliana columbia
cccaagcgtccgaaaaccagagagattaaaatggaagacgatgaagcgacgaaacagcgaggaatacttgaagaagaagaagaaaattttactggaagaagagaagaaagtgaaaacgagtttccctcacatcatcctcctcctccgcctgatgagttgtttgacatttcgactacagttgatcctagctatcttatttcactgataaggaaactccttccaattgattcgggaagtgacgaacgacataatgatcatatgaatacggataatgtggttcaaggtgtagtagctatatctggaaatggggttgttgagacttccaatggtgatccagagagcatggacattggagataatcatgatgaatccac

SEQ ID NO: 94696 - DNA, 684 bp, Arabidopsis thaliana columbia
  unsure (1)..(684): unsure at all n locations
tttggcaccttagattctagtaaagtttctgcgccaggtcaaccaacgatcaaggatctgttggatctttacaactttagaagaatttgccctgacacaaaggtatatggaattattggcaagcctgtcagccacagcacatcacctattgttcacaatcaagctttcaactcacttgattttaatggagtatatgtccacctgttagttgataatcttgtaagctttcttcatgcatactcatcctctgatttcgctggattcagctgtacaattccgcacaaagaagctgcattgcaatgttgtgatgaagttgatccattggcaaagtctataggagctgtgaacactatactaaggagaaaaagtgacggaaagttgttgggttacaacacagattgtattggttccatttctgctattgnggatggcctacggagttcaggtgatccnagcagtgtacctncttcttcttttgncatttgccantaaaanagtggtggttattggtgctngtngggcaaggcaaagntctttctttatggggcaaaaaggaaaaggggggcccaaatttttaatttcttaaccgnnnctttcggggcgggcccttggncttcccngaggcaatttggggggcaaaaagggtttttttttnccanattttgggaaccttttcncccccaa

SEQ ID NO: 94697 - DNA, 517 bp, Arabidopsis thaliana columbia
  unsure (1)..(517): unsure at all n locations
cctgccccgancatggggccaccgttccctgcagttggtacttcccccccgaggtggcatggtttggcaacccccacatctttgggttgcacccaaatgttgnggggcccccatttcctagggatgcattgaagccctatgcactggtctttgatgcggtatacacctccgagaatcaccagactgttgagggaagcagaagaaagtggagccataactgtctcagggtcagagatgtttgtcaggcaggcttacgagcagtttgagatcttcaccggtttacccgctccaaaggaactctactggcaaataatgtcaaagtactgagacatagcttaagtgtgtgtgtgtgtacttccatgaaaagtcgtcgattcaataaagctttagattgccatttgtatgttccgagaatgtccttttttgaggccataagccgaatgactggttctctctttgtatttatatatatgtataaactattaagcctaacattaatcttttttaagtttctttg

SEQ ID NO: 94698 - DNA, 1188 bp, Arabidopsis thaliana columbia
ctgcaggtaccggtccggatttcccgggtcgacccacgccgtccgaagcatactcatcctctgatttcgctggattcagctgttcaattccgcacaaagaagctgcattgcaatgttgtgatgaagttgatccattggcaaagtctataggagctgtgaacactatactaaggagaaaaagtgacggaaagttgttgggttacaacacagattgtattggttccatttctgctattgaggatggcctacgaagttcaggtgatccaagcagtgtaccttcttcttcttcgccattggccagtaaaacagtggtggttattggtgctggtggagcaggcaaggctcttgcttatggtgcaaaagaaaagggggccaaagttgtaattgctaatcgaacttacgaacgagcactagaactcgcagaagcaataggaggcaaagcgttatctctgacagatttagataactatcacccagaagatggcatggttttggcaaacacaacatctatgggtatgcaaccaaatgttgaggagactccaatttctaaggatgcattgaagcccctatcccctggtctttgatccggtatacactccgagaatcaccagactgttgagggaagcagaagaaagtggagccataactgtctcagggtcagagatgtttgtcaggcaggcttacgagcagtttgagatcttcaccggtttacccgctccaaaggaactcttctggcaaataatgtcaaagtactgagacatagcttaagtgtgtgtgtgtgtacttccatgaaacacccgtcgattcaataaagctttagattgccatttgtatgttccgagaatgtccttttttgaggccataagccgaatgactggttctctctttgtatttatatatatgtataaactattaagcctaacattaatcttttttaagtttctttgatttgatgagtctactagaaaaaagaagggttaagttgcatactagtcactttttaaaacttaattggaaaagtagtcactttactattcataatttgtaaaatagtcatttttcactgtttgattcgtacacttagtttgtacactatttttagtgtacagatgtatataaaaaatacacagcgtacactttacatttgcacactaaaagtgatgtacaatccaagtgtacgaatcaaac

SEQ ID NO: 94699 - DNA, 787 bp, Arabidopsis thaliana columbia
  unsure (1)..(787): unsure at all n locations
accggnnggaannccggggcggcccacgcgtccgaacaaaacaaaaatgtatttcgccgccatagcttcttcacgacaaagctttttgtcaaacaatttcagtttccaacacagttttaaacccaaatccaatgttaacctcactcgtcctaattcaatctgttgtaaatcttcacaccacgacgacgaaactgattcttctcggaaaaatgaaaaatcagctggcgaagttggcaatcgcgacgctagcggttggcgttttggctttgggaagtgttggggatgcgtttgcggccaaaagcggtggaagaatcggcggtcaagcgtttcggtcttcagctcctcgtcctcctcccagaattaacaatcgatcaaggaccaacatctacgtgaatcctcaggttgcaccacctttgatcggtggctatggatatggttacggaggttacggatggtcaccgttttccttttttgcccctggtcctgcggtggcagtaggtgttggcggtggctttgacctcctacttctcttcatgttttttggagccgcttcagccgtcgctagaaactttttccgatcaagaaatgatgaagatgacgaagccgactattagaggagaaaaaggagagaggcttatgtaacaatagtcatacatacgattgtgtaaaaaaatatgatggaagaagccggatatatgtggaattcttgnatttagtaaaaaaaaaaaaaaaagggcggggcggccgctctagaggatccaagcttgcgtacgcgtgcaatcatagt

SEQ ID NO: 94700 - DNA, 661 bp, Arabidopsis thaliana columbia
  unsure (1)..(661): unsure at all n locations
aaaagtataattcaaacatttattattattattataggaattgaaagaaaattaaattttcaaaaagaccgcttacttgtttattatatacacagagaagagaacagtctcactcgccactttcctcgagaaaacgaaaaaaaaagatggtaggaagaagaaaagctttactcttttctctctgtttcttcttcctctctcttccttccttctcttcccttccatccttccaaaccctattccccaattctcattcccttccttgtgcttctcccgtctccttccaacccgactccgactccgagtcacggctagaatccgaatttgaatccgggatccgactccgagtcttcttcttgccatctacctctatatatcctcgtaccatcatcgatgcctnnctctcctccaacaattacatcctcatagatgctattcatgtctcccgtcttccaatcgtgactctccggcgcagtgtgatcatatcgccacacatcgtccgctcaaatccccggtaagaaacgtgtctcacgcgccacgacccggtggattcagcagctcagtcgtctctggtctctctcaaggaagcggcgaatacttcacgcgcctgggtgtctgtactccggcgagatatgtttacatggtgctcgacaccggcagc

SEQ ID NO: 94701 - DNA, 1016 bp, Arabidopsis thaliana columbia
  unsure (1)..(1016): unsure at all n locations
ctaatacgacttacttagggaaagctggtacgcctgcaggtaccggtccggaattcccgggtcgacccacgcgagaaaacgaaaaaaaaagatggtaggaagaagaaaagctttactcttttctctctgtttcttcttcctctctcttccttccttctcttcccttccatccttccaaaccctattccccaattctcattcccttccttgtgcttctcccgtctcattccaacccgactccgactccgagtcactgctagaatccgaatttgaatccggatccgactccgagtcttcttcttccattactctaaacctcgaccacatcgatgctctctcctccaacaaaacacccgacgagctattcagctcccgtctccaacgtgactcccggcgcgtgaaatctatcgccacactcgccgctcaaatccccggaagaaacgtgactcacgcgccacgacccggtggattcagcagctcagtcgtctctggtctctctcaaggaagcggtgaatacttcacgcgcctcggtgtcggcactccggcgagatatgtttacatggtgctcgacaccggcagcgacatcgtctggctacaatgcgctccttgtcggagatgctactctcaatccgacccgatattcgacccgagaaaatccaagacctatgccacaatcccctgttcttcacctcactgccgccgattagactccgccggatgcaacacccgtcgtaagacttgtctctaccaagtctcttacggagatggttctttcaccgtcggcgatttctccaccgaaacgctaactttccggcgaaatcgcgttaaaggcgttgctctcggatgtggccacgacaacgaaggtctcttcgtccggagccgcccggtttattatggactcggtaaaggtaaattaattcgttccccgggtcaaaaccggtcaaccggtttaattaaaaattntcttactgtttagtcganagatccgcttcttcgaaaccttcctcggtcgtctt

SEQ ID NO: 94702 - DNA, 1888 bp, Arabidopsis thaliana columbia
  unsure (1)..(1888): unsure at all n locations
cagctccatacgactcactttaggaaagctggtacgcctgcaggtaccggtccgagattcccgggtcgacccacgcgtccgatcatattctttttgttatctttgtttcgtttttctggtagaagagagaagaaggagagacgaattggcagctaagcgattctctctctttctctctttctcttctcgtgtgtgtaatcttttggtgttcttgaaaccacttttttttttgttaattcctctgtttccttggaattgttttctgcttttttaagaagaaaaaaacgatgaatgtggtgcggagattaacgagtattgcctctggacgtaatttcgtttcttctgataacgtaggagaaactgagacgccgagatcaaagcctaatcagaatcgtgaagaaacagagtctacggaaactacgtcgtacgagaaagattctgtctcttcctcagagaactctgatcatttaccaaaggaaatccgtgaggatatggactgtggaatcatcaagggaaatggaacagaatctggacggattattaccaccaaaaagaagggtttgaatgatcaaaaagacaagacaatctcttacagagctgaacatgtaattggcactggctcattcggtgttgtctttcaggctaagtgcttagagacggaagaaaaagtagcaataaagaaagtgttacaggacaagagatacaaaaacagagaacttcagatcatgcgaatgcttgatcatcctaatgtcgttgagctcaagcattctttcttttccacgactgagaaagacgagctttatcttaaccttgttcttgagtatgtacccgagactatttaccgcgcttccagatcttacaccaagatgaatcagcatatgcctttgatttatattcagctctacacctatcagatttgccgtgctatgaattatctgcatcaagtggttggagtgtgtcaccgtgacattaagccgcagaatctgttggtcaataatgttacgcatgaagtaaagatatgcgattttgggagcgccaaaatgctgattccaggagaaccaaatatatcttacatatgctcaaggtattacagagctcctgaactcatatttggagcaaccgaatacacaagtgcgatcgatatgtggtctgtaggttgtgtcatggctgagctttttcttggacatcctctattccctggagaaaccagtgttgatcaattggtggagatcattaagattttagggacaccagcaagagaagagataaagaacatgaatcctcgttacaatgattttaagttccctcagatcaaagctcagccgtggcacaagattttccggagacaggtatctccagaagcaatggatcttgcctctagattgctccagtattcaccaaacctgagatgcacagcgcttgaagcatgtgcacacccattcttcgatgatctgagagacccgagagcatccttgcctaatggaagagcacttcctccattgtttgatttcacagctcaagaacttgctggggcatctgttgaactgcgtcatcgcttaatacctgagcatgcaaggaaatgaccatttgggttaatggctgcttctctacgcagatgttgatatataaatctttttttattttgagagtttcttgttcacaagtatagcattgtgctggttatgaaccctcactgacctctgcaaccacatcgactagcagtttgaaagtgtataattgtaagtttgtaactttgtagctttcattgttgcagacagaaatgcagaattttccgagttaaaaaaaaaacaaaaagnnnnnnnnnnnnnnnnnnnnnnnnnnnnnnnnnnnnnnnnnnnnnnnnnnnnnnnnnnnnnnnnnnnnnnnn

SEQ ID NO: 94703 - DNA, 1041 bp, Arabidopsis thaliana columbia
  unsure (1)..(1041): unsure at all n locations
ggcccttctgcagtaccggtccggaattcccgggtcgacccacgcgtcccaaaaatggagtcatcagtgaaacccaatcctttcctctccttctcttctttcattcaccaccagtgtacccgcttcagctccgacctctccgcccgaatcgaagacacgaaacgattcgccgaaaccctagctactcgacgtttctctcttcctactccgccgcctttcgcctccgtctcacaatccaagtctggaaccccgacgacgacgttgagtccatctcttgtcgctaaagctctcgctgggacgtcggtgtttacagtcagtaacaccaataacgaattcgttcttatctcggatcctaccggaggcaagtctatcggtttgctctgttttcgacaagaggatgctgaagcttttcttgctcaggcgcgacttcggagaagagaattgaaaaccaatgcgaaggttgttcccattactctggaccaggtgtacttgctaaaagttgaagggatttcctttcgcttcttgccagatccaatccaaataaagaatgcgttagagctcaaatcctcaggaaataagaatgggtttgatggagttccggtttttcagtctgagcttcttgttgtgaggaaaaaaaatagacgttactgccctgtatatttcagtaaggaagatatagagagggaactttctaaatatacgagagcatcaagaggagatcaacaaattatggttgggagtctggaagatgtgttgaggaaaatggagatgagcgagaagaattcaggttgggaagatgtaatattcattccaccgggaagaagttatgcacaacacatgcaggatttgatcaaagagtaaaaccataatagacacaatgtgtgtatttttacttgataaaaaaaaacagcctcttttgagattttgcaatattatcaattgcccaaagaaaaaaaaaaaaaaagnnnnnnnnnnnnnnnnnnnnnnnnnnnnnnnnnnnnnnnnnnnnnnnnnnnnnnnnnnnnnnnnnnnaacggaatt

SEQ ID NO: 94704 - DNA, 562 bp, Arabidopsis thaliana columbia
  unsure (1)..(562): unsure at all n locations
ccacgagtccggccacgngtccgcgactttaaacatcttccaatctctgaaagcccctctcttttctccatttcgtgcttcatcatattcgtcgtcgcttcgggtcttacctctcatggaagggaacttcttcatcaggtctgatgctcaacgagcacatgacaatggcttcatagccaaacaaaaacctaatctcaccacggctccaacagcaggtcaagctaatgaaagtggctgttttgactgcaacatctgtttagacacagcccatgatccggtggtcactctctgcgggcaccttttctgctggccttgcatttacaagtggttacatgttcagttatcttctgtctccgctgatcagcaccagaacaattgccctgttttgtaaaatccaacattactatcaccgctttcggtcctctctatgggaggggcattgtcttcgccctcttccacggtttgggttcaagaacatgcagactttncnctggaannccgganacttntcaatagccttcggatncgttncntnggataantttncccagtttaaaaaaac

SEQ ID NO: 94705 - DNA, 516 bp, Arabidopsis thaliana columbia
  unsure (1)..(516): unsure at all n locations
nnnnnnnnnnnnnnnnnnnnnnnnnnnnnnnnnnnnnnnnnnnnnnnnnnnnnnnnnnnagtgatgagagaaatatcactggaccccgaaccagacagtttctgatcttcttctccttagaggatctctcggagaagattcaaaaccaagaacaatctcagtctctatctctctctctgggtgcatttagatggctggagttgtgcgattaacgacgacgtcggttcaagccattcgtgtctcctcgtccttcagctcctttgccaccgctcttaatcctctgcaaccttgcttacctccaaactcgaatctgaattccgacaagagattgcgtcttctctcatcttctccttcctgctcgtcttctcattaccacccatcttctggtctcggaagccatctcccccttagacgacccaagagccaagtggttcgtgtcaaggtagatgaaaatgtagccgagacagagccaccgatatggtgggagaggaatgctccagacatggtcgatattca

SEQ ID NO: 94706 - DNA, 709 bp, Arabidopsis thaliana columbia
  unsure (1)..(709): unsure at all n locations
ccnnnnnnnnnnnnnnnnnnnnnnnnnnnnnnnnnnnnnnnnnnnnnnnnnnnnnnnnnnnnnnnnnnnnnccacgcgtccgatttaattagaacccccaaaatctcttcacaactgtaaaaccccaatcacctctttacatgtgacttccttattactctcttcttcttattttcctcctcttcttcttcgctctagtttcccccaacaatcgccatggcagcttcgtctctcaatctcctcctcattctctctcttctcactttcatttctctccagagatctgaatctctttccgataatccatctctcactcttctacccgacggattcgactggccgatctctcactccgatgaattcgatatcatcgacggtgaagaaagcttcgaagttacggaggaagacgacggcgtaacagatcgacggtcattgtactggcggaggacgaagtattacatatcgtacggtgcattgtcggcgaatagagtgccatgtcctcccagatctggaagatcgtactacactcataactggttcagagctagaggccccggtcaaccggaaagccgnggtggtggcgatactcggtgcggggatngntgaagnaagnttaaacncatggggatttcgaattttgcaacatgggtatatanggnggtgnattgaaggcgnngttgttnggggggnatcntgaacccgggggggc

SEQ ID NO: 94707 - DNA, 763 bp, Arabidopsis thaliana columbia
cttcccgcggggggggggggggcgcgccggggggggagagaatcccgggggacaacccccactgatttgggggaaagccggtgcgccttcaggtaccggtcccgaattcccttttccacccgggcgtccgaaatgatctaacaggagaaggaaatattgaaagtatgctctctgtggaaatgggtctaaaggagctaacttctttaaaggttgaagttgccattactattacattagcccagctaaggttggccaatactactcgactgtctgatatcgagttaaaatcaccaggtggtcctaagattacggagacacttgaattgagtcaagaagagtctgaggatgttctcttcaaggaggcttggctcacgtacttctggagaagagcacaatcccttggcatagaagtggacactgcgagagaacgtcttagattttggatcagcaggagcgcacattctccatcttcacatgacgccatggaagttgagcaaggactaacagagctaagaaagctgcggatagaacgtagattgtgggaagcctccaggtccagccagtaagtagtgaccttggggacctcgggatcccagaacagtcttgctaccacagctttaacagtactgtatatcgtacatgctttcttctcgtgtggttggggtactttgcagtcagaaaaatgtttccagttttgtaaaccgaagaattgtattacacgccctacttttgacatataaaaaatccacggttttcccgtcct

SEQ ID NO: 94708 - DNA, 524 bp, Arabidopsis thaliana columbia
  unsure (1)..(524): unsure at all n locations
aacagaaagaccaagaagacgactgcttcctccaatggttacgtcgtgaatacggcgccattaaaacgctgcgttttatcgtcgtcacctccttttcctttgcctaattcccctaagtcatcgtctcttgaacggttcctgccattaatgtcgaactcttcctaaaccctttttgttcacatttccttctctttctcttcctccgtctctctctgaaaaaccctaattgactcgttgcgattgagatggatccttgtccattcatccgtcttacaatcgggaacctagctttgaaagttccgttagcggcgaagacaacgagctccgtcgtgcatccgtcgtcttctccttgtttttgtaaaatcaaactcaaaaacttcccgncgcaaaccgccgcaatcccgtacattcctttggagacgncttagtttccggagatccaaaaccctaggcggcacgntttatcttagcagntncgntaattaaaggttaggttccagatctatatttaacttcnaggcttt

SEQ ID NO: 94709 - DNA, 533 bp, Arabidopsis thaliana columbia
  unsure (1)..(533): unsure at all n locations
nnnnnnnnnnnnnnnnnnnnnnnnnnnnnnnnnnnnnnnnnnnnnnnnnnnnnnnnnnnnnnnnnnnnnnccacgcgtccggagagaatcaaaaatcaaaatgtcttctcctactgcgactaagtacgacgtctttctgagtttcagaggactcgacactcgtcgcaacttcatcagttttctctacaaagaactcgttcgaaggaaaattcgaactttcaaagacgacaaggagctcgagaatggccggaggatttctccggagctcaaacgcgccatcgaggagtcgaaattcgccgtcgttgtggtctctgtgaactacgctgcgtctccttggtgtctcgatgagcttgtgaagattatggatttcgaaaacaagggttccatcaccgtgatgcctatcttctacggcgtggatccttgtcatttgaggaggcagatcggagatgtcgctgaacagtttaagaagcacgaggctagagaagaagatcatgagaaagtagcttcgtggagacgagcattgaccagtttag

SEQ ID NO: 94710 - DNA, 670 bp, Arabidopsis thaliana columbia
tgcgtccaaattttgatctttgttcttctcaaagcgaatatgggtgtcatggtttctgccgtatccacatctcctattgatggccagaaaccaggaacttctggtcttcgtaagaaggtgaaagtgttcaagcaacccaattatctagagaattttgtccaagcaacattcaatgctcttacggcggagaaagttaaaggtgccacacttgtggtctctggtgatggtcgttattactcaaaggatgctgttcagatcataattaagatggcagcagctaatggtgtacgacgtgtgtgggttggtaaaaacactctgttatcaactcctgctgtatcagctgtgattcgtgaaagatcaggggctgatggatcgaaagcaactggagcatttatcttaacagcaagccacaatcctggtggccctactgaggattttggaatcaaatacaatatggaaaatggaggacctgctcctgaatcaatcactgataaaatttacgagaacactaagacaatcaaggagtacccaatagcacaagatctgcccaatgttgatatttctgctgttggtgtaaccagttttgaaggacctgaaggaaaatttgatgttgaagtttttgatcccgcagatgactacgttaaattaatgaagtcaatcttcgattttg

SEQ ID NO: 94711 - DNA, 453 bp, Arabidopsis thaliana columbia
  unsure (1)..(453): unsure at all n locations
gtaatttcaaaagtacaatcatggaccagactcttacacacaccggatcgaagaaggcttgtgtcaggggtggcgacgggaaacttagcctctattctcatcaagcatttgcttcaaagtggctacaaagttaacactacagttagagatccagaaaacgagaagaaaatagctcaccttaggaaacttcaagagcttggcgacctgaagatcttcaaggcagatttgactgatgaagacagtttcgaatcctcattctccggctgtgaatacatcttccatgtcgcaactccgatcaactttaaatccgaagatcccgagaaagacatgatcaagccggcgatacaaggagtgatcaatgtgttgaaatcttgcttaaaatcgaaatcagtcaagcgtgtgatctacacatcttcagctgctgctgtttccatcaacaatctntctggaacc

SEQ ID NO: 94712 - DNA, 432 bp, Arabidopsis thaliana columbia
ctcaaatgttcttaagaaatttcgaaacttttcacattcaccactcgattgaaccgggcccggttattcaatggatccagaggaggggtccgagattgccttcttcgacgttgagacgactgtaccaaagcgaggtcaacgcttcgcgattctagaattcgggtcaatcctcgtttgcccgaagaagctaacggagctccgaagctacacgactctcgtccaacctgcagatttgagtctcatatcttccttgtccgtgaggtgcaatggtatcaaacgtgacgacgtcgctttggcacctctgtttgccgacatcgctgatactgtcgacgacattctccatgggaggatttgggcaggccataacatattgaggtttgattgtgcacggatcagagaagcatttgcagagattggtcgtaaccacccgag

SEQ ID NO: 94713 - DNA, 463 bp, Arabidopsis thaliana columbia
ctctctctctctctgcaatggactctctggtagcgagctacgcttcgtcggacgaagaagaagatcttcaaccacgtcgagaagctttcactgtaaaatcctcagaaccttccgcttcgtctctattctcagctattcctcaacctaaagaactcaaatcctccgaagatggtgatttaggctcatcttcctctcgaggaaaatcttcttctttcctctcatctctccctcctcccaaatcctcaatttcacggaaaaaaaaatcccaatccgtcgtcaattccgaaacgtgtcgtccagaattcaggcttccagtaaaaaccctagaccgggcaaattcttgccgacgaagacgacgaagaagaagagaaagctaggaagaagcgtaaacagatggaatctgcttccgcatctcacgattcatcagtaagatcgttcttatccgccatgcctgcacctaaat

SEQ ID NO: 94714 - DNA, 1104 bp, Arabidopsis thaliana columbia
cgtctctctctctctctctttcgcgtccgctcatcttcttcttatctccctccaaagacggcgactgtataatctatcatttcttcacagtaacgctttcatcggaagatctcgccggaaaaaaacttctctctgagatcagatctcttacgattctcagctcaatcttatcttttcctttgttgtgctgcttttcactctcttctgcgcgacgaatttggccttgttttttgtttgtttgtcgtatccgacgcggaggtattgagaaaccgtggcttaagacggaggaagaagatggaagctaacgggattgagaacttgacgaatccgaatcaggaaagagagtttataaggagacatcataagcatgagcttgtggataatcagtgtagctctacgcttgttaaacatatcaacgctcctgttcatattgtgtggtcacttgtgagaagatttgatcagccacagaagtataagccgtttatcagtagatgtgtggtgaaaggaaacatggagattggtacagtaagagaagttgatgtgaaatctggactaccagcaactagaagcactgagagattggagttacttgatgacaatgagcatattctcagtatcagaatcgttgggtggtgatcatagacttaaggacctattcttcaatcatctctcttcaccccgagactatagaaggaagaataggacacttgtgattgagtcatttgtggttgatgtaccagaaggaaccacaaaggatgagacttgttactttgttgaagctttaatcaaatgcaatcttaaatctttagctgatatctctgaacgtcttgcggttcaagacccgacagaatcgagagtctaaagatcaaaggagtaagaaactattgaatcagagaaattttggttgccatggatgaagctctcaaagggaaaaagagagagtgggtgagtttctttgaggatggacaaggcaaaaaaagtatcatcatttatccagttacataataagtttctcatttgctatttttggggtcatttcactttcaaaccctctttttaatttcatgtgtctaatttaatgaatgtgtttttggttttttcccc

SEQ ID NO: 94715 - DNA, 795 bp, Arabidopsis thaliana columbia
  unsure (1)..(795): unsure at all n locations
aaattcncaaagtcagagctaaagcaaccgaggtattgtttaaaagtcccagtagtgtagcctctttggaacctaaatacaggggctagggtataacaactgatatgctcaaaggaaatgcttcgtctttgaatgctgatggagctgtactgaatgaacaaagcagagctctaccaaattcagccatacctacctctgagcacaatcagactacggaagctaatcaagccgtcaaagaaacaggagttttacacactagatctcgtggagttggtttggaggagacatttatctccacacaaggagtcaagccatctgaagatacgaataccgctcctcaaagtggaactgctgtagatgacttcaatgatcaagatggcgattttatccaacctacttctactatcggaaacaccacaaatgctgtcttggctcttggggcaactttggatcctactgggaactcttgcatccctaaagatgtgtttgaaacatcaaaagaagctgatgaaataggcgcatcacgtcatacttctaacggtttcccatcttcatcacctagttcaccagcggttatggaaggtcaaccaaaacccacaccaccagaagaaaccaaggcttctaagcctatagctgaaattnatggtgatgatatgncagtagggaatggctcanatggtgcaattaataacggaagcaaatgncagccacttaaagtgcctctaaacagttnaaaggaccccntttangaagagttggttcccaggggggcccnnttttttcctnactttnaaa

SEQ ID NO: 94716 - DNA, 335 bp, Arabidopsis thaliana columbia
cctgatttccccactcgacgctgatttcttctctgcttctgtaatttctccaattcattgatcagatcagccatggaagacgaggcactgcttcactcggtacatcgagtttcacaggtgtacaactgcaaagggagaggagtctaatgactgtgaaaggtttgccaagtattaccgtgccctctgtcctggagaatgggttgacaagtggaacgagcagagggagagtggaacttttccaggtcctctttgaaccaagccttcaatcttgatgaagaggcaatcaggtccgtaataatacatggtttcaaagttaatttcttgcttgcgtgtgt

SEQ ID NO: 94717 - DNA, 466 bp, Arabidopsis thaliana columbia
aatttctccaattcattgatcagatcagccatggaagacgagattgaattgaaaactgctccggctgattgccgggttcctacaacaaatcagagactaggcactgcttcactcggtacatcgagtttcacaggtgtacaactgcaaagggagaggagtctaatgactgtgaaaggtttgccaagtattaccgtgccctctgtcctggagaatgggttgacaagtggaacgagcagagggagagtggaacttttccaggtcctctttgaaccaagccttcaatcttgatgaagaggcaatcaagtccgtaataatacatggtttcaaagttaatttcttgcttgcgtgtgtatgttttggccttattatttcctctctagtgtaagtgttttattgggatgtctaagaaaggccaatcaaattataatatgaaaacattcgcttaataaaaataatttatcttata

SEQ ID NO: 94718 - DNA, 835 bp, Arabidopsis thaliana columbia
  unsure (1)..(835): unsure at all n locations
ggactggcaaaggatggtccaagaggagaccaaacacatgtgtctacacgtgttatggggacttacggatacgctggtgcagaggatgtcatgacagggcatttgacatccagaagtgatgtgtatggattcggtgtacttctccttgtgatgctccttgggaagagggcaatggacaaaagcagagcttgcagggagcattcccgggtcgacccacgcgtccgggcacgacctcttttgaatcacaacaaaaagcttttgaggatcatagaccctcgaatggatggacagtacggcactaaggcgttgatgaaagtagctggtttggcataccaatgcctaagccaaaacccgaaaggaaggcctctcatgaatcatgttgtagaagttcttgagactctcaaggacgacggagatgctcaggaggaagtcatgactaatcttcatagtaggggaaagtctgtaaccttatatgaagcttctagcgattctcaaggcacaagagatgggaatggacagaggaggagaagaccggaaagtggtagaagcaagagcgaagccgcggtcgacactgaaaaatatgtttctactctttcggaaccggatactaccaaaatttaagactcaagacagaatgattccccagtgatttgagcctgtaagatcacaaagtaccccagttggcttaaaatgtataaataagttgcgtcctagaaagatgattgctaaagaattgggggggcggccnnnnnnnnnnnnnnnnnnnnnnnnnnnnnnnnnnnnnnnnnnnnnnnnnnnnnnnnnnnnnnnnnnnnnnnnnnnnnnnnnnnnnatt

SEQ ID NO: 94719 - DNA, 2070 bp, Arabidopsis thaliana columbia
caaaaactataagtcccacactcaagtcaattaaagcactccaatggtccaacaagtttcgtcgtctaccttgaaactcaacctttggatgattgatatacataaagacaggatctaaaaacacctaccgaacttgaatagtaggtgtgttgtgtttgagtgtctctctaggtaaacatggtagcagaagaagcaagaaaagaagccatggctaaatcagtatctggcgggaagattacttattttgtggtggcttcatgtgtcatggccgccatgggcggtgtcatcttcggctacgacatcggggtttcaggtggagtgatgtcaatggggccatttctaaaaagatttttcccaaaagtgtataagctccaagaagaagatagaagaagaagaggcaatagcaataaccactactgccttttcaatagccaacttcttacatccttcacatcttctctatacgtttccggtctcatcgctactctgttagcttcgtccgtgactcgttcatggggtcgcaagccctctatatttcttggcggtgtgtcctttctcgccggcgctgctcttggtggctctgctcaaaacgttgctatgctcattattgcgcgtctcttgctcggcgtaggagttggattcgctaaccagtcggttcctctgtatctctccgagatggcgccggcaaaatacagaggagcaatcagcaatggtttccagctctgtatcggaattggatttctatctgcaaatgtaataaactacgaaacccaaaatatcaaacatggttggagaatctctttagccacagctgcaatacctgcttcaatcctcactttaggatcactgtttctcccggaaacgccgaatagtatcatccagaccaccggagatgttcacaagaccgagcttatgcttcgccgtgtccgtggaactaacgacgttcaagatgagcttactgatctcgttgaagcgagttctggttctgatacagattcaaacgcgtttttgaaactgcttcaaagaaaatataggcctgagttagtgatggctttggtgatacctttctttcagcaagttactggaatcaatgttgttgctttctacgcaccggttttgtatagaaccgttgggtttggagagagtggttcgttgatgtcgaccctcgtgactggaatcgtgggaacctcgtcgacgttgttgtcgatgcttgtcgttgacagaatcggtagaaagactctgtttttgattggagggttacagatgctcgtgtcgcaagttaccattggtgtgatcgttatggtggctgatgttcacgacggtgtgatcaaggaagggtatggttacgcggttgtggttttggtgtgtgtctacgtggccgggtttggttggtcttggggtccattaggatggcttgtaccgagtgagatttttccgttggagataagatcggtggcgcagagtgtaactgtggcagtgagttttgtgtttacttttgcggtggctcaaagtgcaccaccgatgttgtgtaagtttcgagctgggattttcttcttttatggagggtggttggtggtaatgacggtagcggtgcagctgtttttgccggagactaagaatgttccaatcgagaaggtggttggactttgggagaagcattggttttggaggagaatgacgagcaagcgtgatatccaagaaaccaccattcttagccattgaaaacaataaaaaaaccagcacctcatgatttgagatgagacgcatcttttgttgccaaaaaaattattgcatataagttttaaaattttcaaagttcaaactaaattaaggatatttttttactattcacgtaacaataatcaaatcacatgatccaagattcgattattgttcaaattattttgtaaatttagccatagtttcattttttcacttatatgtttgtgaaataacgatttgtgtttggaattaaaattaggggtgttttataaatatagtaaaactaggatagtgataatgtaatatattgaacgttaaaggacaaagatgggaaaaaaaaaaaaaaaa

SEQ ID NO: 94720 - DNA, 445 bp, Arabidopsis thaliana columbia
  unsure (1)..(445): unsure at all n locations
cttctcaggctcccattatctttctctattttgcaaatcagtatgggtaagttcacaaccattttcatcatggctctccttctttgctctacgctaacctacgcagcaaggctgactccgacgacaaccaccgctttgtccagagaaaactccgtcaaggaaattgaaggagacaaggttgaagaagaaagctgcaacggaattggagaagaaggatgtttgataagacggagccttcttcttcacaacgattacatttatactcagaatnancaaggcccaaggttctggaattagaggcatttaatttacntaattaccntttaccaaacctaacccnggangaancttccnggttttccgggnccgggccttttttggtntggggtttgggttaagggaaaccnncgaattttnaaaggtccatggggaattttggaanggc

SEQ ID NO: 94721 - DNA, 496 bp, Arabidopsis thaliana columbia
  unsure (1)..(496): unsure at all n locations
tttagttagtaactccacgactactcgtcaaagacatcgggcaaaccaaggccaatcaagattgggacagaattcagagagtttagttagtaacaccacgactactcgtcaaagacatcaaacaaatagaagtgcaactcctggttctcctcaagcttggccagcactaaaccgaggcccggcagaaatatcaattacaagcagggtacaatcttctggtgcttctgctcaatctcaatctaggcaccatgacagagttgaaagtactagaactcttgcttctgcagttccacaagatgctcgtaccacagttggtggatgctcatctggttctcctctgagttccgccaatgcaacaaagagggataatcatcactcgtcttcaacccctaaaatgtctgaaacaagatcactgggganttnctaattctagttctcctcaaatttccgctgtgaaaatngnnggnnatcatccccngtgaantgcnggggcctt

SEQ ID NO: 94722 - DNA, 461 bp, Arabidopsis thaliana columbia
gaccggaccggaatgccggcgctcgacccacccgtgacatctaatctccgtagacacttgagcgcaagtcgcctccgcttaaaccgcttcatctctacttcttcttcttatcaggcacatcgccgtgttgttgtcactggtctaggcatggtgactccacttggtagaggcgttgaaacaacgtggaggcgtttaattgatggagaatgtgggattagaggattgactcttgatgatctcaagatgaagtcttttgatgaagagacaaagttatatacttttgatcagctttcttctaaagttgctgcttttgtgccttatggatcaaaccctggtgaatttgatgaagccctttggctaaactctaaggcaggtgcgaattttatcggatatgctgtatgtgctgccgatgaagctttgagagatgcagagtgggtaccaacttgagaagaagaaaaaga

SEQ ID NO: 94723 - DNA, 485 bp, Arabidopsis thaliana columbia
taatgctgcagtcatcagaggtgcattgagagcagtgagaccagagctgcttacagtaattctaccccaaagtttgaaaaaacaacctcctgagagccaagaactattgtctaaagtacaaaacgtggtagaaaagccacataatgaccatttgccattgttagaagccagcaggttgtgtaatatggacatcatatcacaagttcaacaagtgatctgcttcgcgtttcatgacagtaagcttcttatggagacatgtcaagaagccaaaaatctgcgcaagattgtcactctcttctacctcgattgattcacattcactctttattttcttctcgttacaaaacagagaagataatcctccttgtaaattatgaatcttgattaaacaaacacacacaaccacaattatattcttttgtctaaattttgaaacacatcaaaaaaaaaaaaaaaaaaaaaaaaaaaaaaaaaagggcggccgc

SEQ ID NO: 94724 - DNA, 488 bp, Arabidopsis thaliana columbia
caacaatcacgcgtcttctcatttctagtttctcagcctcctcctccttctcttccttcttatatataaatatatccacaaaatcatctcttttgcttcgctgtttctctcattattccatctctcttatcgccgctacaaacgtttcttcttcaacctcgttcagagattatcctcccttcttttctcatcttacaaggaagttgggcagttaaagctgctgggatcaccagttttgtcaaaagtggagtgtgaagaatcttttatgtctgaacaggcttctctctttcaatcatctatccggcttttaggagagtactgtcctatatctaggaaaaagtccactcataaagttggtggtttgcgttttgaggaggacatcacgagctgtattggatttcagtttatgcaactgagtgattatcactgcctcttctgacatcccttgtttgtttacgtttgttgaatcaagatggctttgcaaaaca

SEQ ID NO: 94725 - DNA, 648 bp, Arabidopsis thaliana columbia
  unsure (1)..(648): unsure at all n locations
atccaaattaggtaaagtaggtcactttgtggtagctgtcttctacacaagaccagaagagaggcaaacagaggaatacgcttctgcacaatgacagaagaatacgaggttgatgagcagaagcaagctgctgctgatgtgttgtttagttattccaagtttgcaatggcctgcattggtaaccatactcgtcctactgacatgaggttgcatttgatgaaggagatctctggaatgccaacttctctgaaaggaagagactcttctagagcagcttctcctgatccacttggcgaatcatcaagctccggtactgccaggctagatataacggatagtttcagggcactttgattttagtttttctccacttgtcagggtctcataagatatatgctagtggattacaggataagtatctgtggccgaggaacctacttatcaagttttaacttttgatttcgcccatgatagtgtcaaatgttattaatgctgtattcccagatgtgngttctgaaaaaataaatgctatgctgcnactcgaggcggcccgaattcngcgaatttccnaccggatgtggngccgccaagaagaatccccccgggtgacccccctacccangggtctaaaaacgggagtcacctggc

SEQ ID NO: 94726 - DNA, 640 bp, Arabidopsis thaliana columbia
  unsure (1)..(640): unsure at all n locations
tccgctnggtccncagggncntgccnctttgacncaacctggaagcaggtcaaaggcaactgcnttncncaagaaggggcncggtagagggttcagacccggaaccttagggctgaaaaggactatttctactttgaacggtttgatcaagacggtcggctggaccggagaccattttctataactcctccataccatacccggtcgatacagtctccggatgagattatcaacgctagtggtaattatcaggatcgtgctggtgcacctaaaggtttgcttctagcaataaggtcaccgtttgatcggttatttactgggaagaaaaatgccggtgagcgttcgtaccttcaatccggcgatgcgagccctgtctaggcgaattactactattggggttattaagaatattctgaaataaagaaaatctgtatatgtattttctttcttctagtttctttatgttatatgagaaattcaattccttcaccaatataatgcatctgttactgaaatagtaataaaggaaaggaccatttcgttttatcaaaaaaaaaaaaaaaaagggcggccgctctagaggatccaagcttacgtacgcgtgcatgcgacgtcatagtcttctataggtcgtacctaa

SEQ ID NO: 94727 - DNA, 410 bp, Arabidopsis thaliana columbia
gtttttgaatcaacagtcgcggcaaaaggtagatcgaagcagatctctcgctggaaaacgtcacattgaggtatctatcgccgccaatggtgaaggcactgcaaggcgcggctcagaatctaccggcggatgtcaaccaattgatcgatcagttagagcgtcactgtttggctcccgatggatctcttgttaccaaatctgtctactccgatctccaactcgcgagagaggagatgtctcgggagagacttcggtatttggaagctatggctatttattgtgaagctgtagctatggttgaagaatatcagcaagctatttcagtagctaaccatgggggaattcgtgatgttcaaggtctataccctcaacttggcttgaagaattctcctcaggtttatgagactcta

SEQ ID NO: 94728 - DNA, 486 bp, Arabidopsis thaliana columbia
  unsure (1)..(486): unsure at all n locations
ggtacgnacggtgatacgcatnaagcttgnatcatcgcaattacgcgcgccgctgaagtagttggtggtggtttcggacacaaatcttggaacacaagctttgatcccgaccaagcttatgatgagttctgtcttttattccttagagcgctctttgatcccacacttgactatatcctcggtgtcaagtggagttcctgagtgagagtatctccaggatcccatccgccagaataattcatacagagagatgctttgcttgcttcataggtttctcatagtcgatactagtgttgtgttcctgtacttgaatgtgtgtactgctttgggttgtacccattcggttgtggaagaaatgttttatactcaagcaaggtcacgagagtgagaatttggggattaagtacaacctgaatgatgttttagcctatcccctagnatcctgccngcttgaatcttaagccgnnnntnanggggaanttcaat

SEQ ID NO: 94729 - DNA, 910 bp, Arabidopsis thaliana columbia
taaacacaaagagttgaaaacattaaatcgatatatcagaaactaaaccggatctgaaaaatggcgaacgaccaagtgattcttcttgattactggccaagcatgttcgggatgaggacgaagatggctttggctgagaaaggagtcaagtatgagtacaaggaaacagatccatgggttaagactcctttactcatagagatgaacccgattcacaagaagattccggttctcatccacaacggtaaaccgatttgtgaatctcttattcagcttgagtacattgatgaggtttggtccgatgcatccccaatccttccctctgatccttaccagaagtctcgagctagattttgggctgaattcatcgacaaaaagttttacgacccatcatggaaggtatgggcaacaatgggcgaagaacatgcagcagtgaagaaggaattgttggaacatttcaagacacttgagacagagctcggagacaaaccttattacggtggtgaagtatttggatacctagacattgcattaatgggatactacagctggttcaaggccatggagaaatttggtgaattcagtatcgaaacagagtttcctatattgactacgtggaccaagaggtgtttggaaagagagagtgtggtcaaggcattggctgattctgataggatcattgagtatgtttatttcttgaggaagaaatttggagcagcgtagcaaaatggtttgggtttcaagaagactgtaattttctgtcttttataatgtttcatgtgaggtttgtaattgttatttctgtcgttttgttgaaagtatgataaaccgtaataacaaaatgtctactgtacccttttaaaatcggcgacaaaacaactcaatttaaataaaccggattagcttcagt

SEQ ID NO: 94730 - DNA, 743 bp, Arabidopsis thaliana columbia
acttttatttccggaacgacccacgcgtccggatctaaaccggatctgaattatggcgaacgaccaagttgatgctccttgatcactggccaagcatgtacgggatgaggacgaagatggctttggctgacaaaggagtcaagtatgagcacaaggaaacagatccatgggttaagactcctttactcatacagatgaacccgattcacaatgaagattccggttctcatccacaacgggaaaccttttagcgaatctcttattcagctagagtactttgatgaggtttggtcccatgcatccccaatccttccctctgatccttaccagaagtctcgagctagattttgggctgaattcatccgacaaaaagcttctactacccatcatggaaggtatgggcaaaaaatgggcggacgaacatcgcggccagtcatataaatgaatttcttcgggaaccacttcatatgacgcgttacatacctggagcctgtggacgaccaaaccctttatttaccggtgggttgaaagtcatttctggaataaccctatgagcatatcgcaatttacatgggtgtatatcctcaccagccttggtgctacaaaccgtctcactgggcacaaaaaatctttgggtggaaatgtccacgtcattcttgataaagccaggaaagtatctccccttaatacttttggaccttcaccgtgtgggttaccccaaaaaaagagggtggtgtttcttg

SEQ ID NO: 94731 - DNA, 925 bp, Arabidopsis thaliana columbia
  unsure (1)..(925): unsure at all n locations
aaagaagctgaattgattcaccaaatacacattataaagtttcaatctgtttcttcttttagggtttgggagatttttaatcggagatctcgaaaagatgatagatttcagtcgaatccagaaagagcttcaggactgcgagagaaaccaggattcttcgggtatccgggtctgccccaaatccgataacctcacccgactcaccggaaccattcctggtccaatcggtactccttacgaaggcggtacatttcagatcgatatcactatgccagatgggtatccatttgagcctccaaagatgcagttttcaactaaagtttggcatccgaatattagtagccaaagcggtgcaatatgcttggatatcttgaaagaccagtggagtccagctcttactctgaagacagctcttgtttcaattcaggctttactctctgcacctgagcccaaagaccctcaagatgctgttgtagctgaacagtacatgaagaactatcaagtgtttgtatcaacagctcgttactggactgaaactttcgccaagaaatcttctctagaggaaaaagtcaagagacttgtggagatgggttttggagacgctcaagttaggagtgcaattgaatcaagtggtggtgatgagaatctggctctggaaaagctctgttctgcttaggatctatcaactcaagcctcattggcgctagatatgttatttatttggtttataactcttatgtgctatgtttctgctcttgcctactgataagagtgaaactactttataaagattattaaatgcaaaaaaaaaaaaaaaaggnnnnnnnnnnnnnnnnnnnnnnnnnnnnnnnnnnnnnnnnnnnnnnnnnnnnnnnnnnnnnnnnnnnnnnnnnnnnnnnnnnnnnnnnngagagctgaagtatca

SEQ ID NO: 94732 - DNA, 436 bp, Arabidopsis thaliana columbia
ctatctttctcctctgtttcatcaaactcttcatcagtgcttcttattttcttcaaagcttcaaatttctttttttccttcttgcaatggcaaaatcgaagaaaatttctacaggtcaaatatttggttgtgagagtctccttgggtgcattttccagagctggagccctcgccgtcgaaaaccctctttaccggaaaaggatcatcgggcaaaagataacttgtcttccaagtcatcaacaaccgttacaaaccctaaaatcctcccaagaaaatccaccgatacttcttctcaaccaaagaaatctgactcccagaaaccccaacaaaagccaaaaccagatgagaatcacccgcgaaaatcatcggaatccgccagaaaatcatctgattccgcaagaaaatcgatttcgtcaggctcatcaagaacagagag

SEQ ID NO: 94733 - DNA, 547 bp, Arabidopsis thaliana columbia
agaaagtggatggatgtcttatagaatgaacaaaacatcctctgtttctcttgtccttgtccctttttccagatcttaaggttttccacattttatcatctgggtcctctccttaatgatttgaagacactcaattccgagctgatcggggactagaaggcggattctgtttcagacaaaagtagatttccctgtctctttcccgtttgattttcaataagatgaatccggaggagcaaaagatggaatctgcatcggatctgggcacgctcttcattggcgggatttcatgggacacagatgaagaacgactgcaagagtattttggcaagtatggagatttggttgaagctgcgatcatgagagaccgtactaccggacgtgcccgtggctttgggtttatcgtttttgcagatccttctgttgctcgagagagtcattatggacaaatacatctattgatggtcgcacggtcgaggctaataaagctgtctccttgtatgatcagcaattgctcaaacgacacgccatttcatgcaccttattt

SEQ ID NO: 94734 - DNA, 2328 bp, Arabidopsis thaliana columbia
  unsure (1)..(2328): unsure at all n locations
nnnnnnnnnnnnnnnnnnnnnnnnnnnnnnnnnnnnnnnnnnnnnnnnnnnnnnnnnnnnnnnnnnnnnnnnnnnnnnnnnnnccacgcgtccggccatattttgataagagaagaagaacccttatagagaaagagaaagagagagacagagagagtggatggatgtcttatagaatgaacaaaacatcctctgtttctcttgtccttgtccctttttccagatcttaaggttttccacattttatcatctgggtcctctccttaatgatttgaagacactcaattcctatttgatcggggactagaatttggattctgtttcagacaaaagtagatttccctgtctctttcccgtttgattttcaataagatgaatccggaggagcaaaagatggaatctgcatcggatctgggcaagctcttcattggcgggatttcatgggacacagatgaagaacgactgcaagagtattttggcaagtatggagatttggttgaagctgtgatcatgagagaccgtactaccggacgtggggtcgacccacgcgtccgcgtttttgcagatccttctgttgccgagagagtcatcatggacaaacacatcattgatggccgcacggtcgaggcgaagaaagctgtcccgcgggatgatcagcaagtgctaaaacgacacgccagtccaatgcaccttatctcacctagccatggtggtaatggtggtggagcacggacaaagaagatctttgttggaggtttaccgtctagcattactgaggccgagttcaagaactactttgatcagtttggtacaattgctgatgttgtggtaatgtatgatcataatacacagaggccaagaggctttggcttcatcacttttgattccgaagagtctgttgatatggttctccacaagacctttcatgagctaaacggaaaaatggttgaggttaaaagagcagtgccaaaggagctctcctcgactactcctaaccgaagcccacttattgggtatggtaacaactatggagtagtccctaataggtcttctgctaatagctacttcaatagttttcctcctggttataataataataatctaggctctgctggccggtttagtcctattggtagcggtagaaatgctttctctagcttcgggctcggattgaatcaagaactgaatttgaattcaaactttgatggaaacactcttgggtatagccggatccctggcaaccaatacttcaacagtgcttcaccaaaccgttacaactctccaattgggtacaacagaggagactctgcttacaacccgagcaacagagacttgtggggaaacagaagcgattcctctggtccaggttggaacttgggagtttcggttggtaacaacagaggaaactggggactttcttctgtggtgagcgataacaatggctatggaagaagctatggggctggttctggactttcggggttatcattcgcgggtaatacaaacggttttgatggctctataggggaattgtatagaggcagctcagtttatagcgactcaacatggcagcagtcaatgcctcatcatcagtcttctaatgagttagacggcttgtctcgctcttatggctttggtattgacaatgtaggtcagacccatcagcaatgcctcagaaggtactccggaactacaatgtcggaaatagacaaacacatagaggtattgaagcatagaaagaaatcgacgaagagaagtgagaattgtagatcaagaagaacagccatttccgttgcagagtttgaagagttgttatttcgatatcaagtagagaaagaaaccaactttcttcatcacagtgagtttcttgttttgtttttttcgtcgttagcatcacaaacacaaaaaagagaagtttatttttactttaaaaattcttacataagataagatcagattggtagctgcaaagatacaacatggatgataaaaaaagatttggtttcgtctccatagcaataaccagagatcgttgattctcgatcactattctttaggtttctctccttcttcttccatgatttcttgatgttgtgtgctctgtttgtaactctaattgttaaaattttttatgttacagattttttttttcttttggtttttaaactttggattcgaattgttcatgggaacttttggatttttctattagcgtgagagaaaacacattgtgcaaaaggctccaaaaagaaagnnnnnnnnnnnnnnnnnnnnnnnnnnnnnnnnnnnnnnnnnnnnnnnnnnnnnnnnnnnnnnngtacctaannn

SEQ ID NO: 94735 - DNA, 730 bp, Arabidopsis thaliana columbia
gtcaatgaccttcagcatgtaaacttgtctgaggaagctgatgaaataacagggtacgatgatgagttgccaagagaacccgtcgtgttgaatgagcaagcaacatcttctgctaaagtagatgccatcttgttttctcctggaatggaagctgcgaaaaaggatatatcctctctaagtgctgctgcaaccacagcccagctggttagtcatggtctggttgcgataccattcctcagtgcatttgttggtctgagagttctcaatctctcaggaaatgctatagttagaataaccgctggtgctcttcctcgaggtttacatgcattgaatttgtcgaagaacagtatctcggggattgagggcctacgtgaactcactcggcttcgagtattagatttgagttacaaccgaatactgagacttggtcatggtctggcttcgtgctcctctctgaaagaactatacctagctgggaacaaaatcagcgaaatcgagggtcttcatcgacttttgaaattgacggtcctggatttacgcttcaataagttttcaaccaccaaatgtcttggccagctcgctgcaaattacagctctcttcaggctataagcttggaaggtaaccctgcacagaagaatgttggtgatgaacaactggcaaagtacctcttggcacttctgccaaatttgctatactataatagacaaggcactaaagatgctcggctcg

SEQ ID NO: 94736 - DNA, 1022 bp, Arabidopsis thaliana columbia
  unsure (1)..(1022): unsure at all n locations
nnnnnnnnnnnnnnnnnnnnnnnnnnnnnnnnnnnnnnnnnnnnnnnnnnggatagattttacaccaccgaagccgaaaaaatgccggcggcgaagaggactcccaaggttaaccgtaaccctgacctaatcaggggagttggaaaatattcgaggtctcagatgtaccacaagagaggtttgtgggctatcaaggccaagaacggtggcgttttccctcgtcacgatgctcagccaaaggtcgacgctccggttgagaagcctgccaagttttatccggcggaagacgtcaagaagccgcttgttaacagacgcaagcctaagcctaccaagctaaaagccagcatcactccaggaactgtgttgatcattcttgctggtagattcaagggtaagagagttgtcttcctcaagcaactttcttctggtttgcttcttgtaacaggaccattcaagattaatggtgttccattgagacgtgttaaccaagcctatgtgattggaacctccacaaagattgacatttctggagtcaacactgagaaattcgatgacaagtattttggaaaggttgctgagaagaagaagaagaaaacagaaggcgaattcttcgaagctgagaaagaggagaagaaggagatcccacaggagaagaaggaagaccagaaaaccgttgatgctgctctgatcaaatccattgaagctgtcccagagctcaaggtttaccttggagccaggttctcattgagtcaaggaatgaaaccacatgagcttgttttctagatttcgtattgtttctcaaattttaagaatatctgtttccctgagtattttcatctttaatcgtccttggatcttaaagactattttctctgattttatatatcaaattttcgagcgctcaagcttttntngnnannaaaaannnnnnnnnnnnnnnnnnnnacnnnagnnnnnnnnnnnnnnnnnnnnnnnnnnnnnnnnnnnnnnnnnnnnnnnnnnnnnnnnnnnnnnnnnnnnnn

SEQ ID NO: 94737 - DNA, 658 bp, Arabidopsis thaliana columbia
acaagagattgatgtgttagctcatcaacaagtgaggaagattctatggggtggtcttggttactcagtggttcaaattggaatctttgttaggctaactttttgggagttttcttgggatgtgatggaaccaataacgtttttcactacagctactgggattattgtgggttatgcttatttcttgatgacttctagagatccaacgtatcaagatttcatgaaaaggttgtttctttccaggcagaggaagttgcttaagagtcataagtttgatgctgagaggtttaaagaactggagaacaagtggaagataacgtcttgctcttcttcttcgtgccacgctaatgcatcgattcggaatcgtgttggtgttgatcttgatttggaggattctttgcagagtcatcacagagattgattggttctaaccatttttcacttttgatgatattacttaaccagattttcttctctctggaggttgatcaagtttgattatttggtgttgattgatccaaagagttggagtagtcatggtgatttttatttgataatcttgagctactcttatttaaatcagctcatgtgttaatcttttctatggttaaggattttgacggattataatagtctagtaactatgattttggctctt

SEQ ID NO: 94738 - DNA, 1279 bp, Arabidopsis thaliana columbia
  unsure (1)..(1279): unsure at all n locations
cagnnnnnnnnnnnnnnnnnnnnnnnnnnnnnnnncacgcctgcaggtaccggtccggaattcccgggtcgacccacgcgtccgaaaagctctcacacaaccaccgttctccgtcacggtggcgctttattctctcatcggagcgcctcaccggtggcagacggtgtcgttgttcctctcctaaaacctccatcaatcaccatctctttacacagagctctaaccaaaatcttcgagagatggggcagagtatgagctgtggaagtcgaccggagcacggaatattcgcctctgtacagtgcggcgatatcatcactatccgtcgtgtgatggcgacggagcctagtctgttgaatcaaactactccttatgatcgtcactctgttcttcatgtcgctgctgctaatggtcagatcgagattttgtcattgcttttggaacgatttacgaatccagatttgttgaatcgtcacaagcagactccgttaatgttggctgcgatgtatggaagaatctcttgtgtgaagaagctagctgaagttggagctaatattttgatgtttgattctgtgaatcgaagaacatgtttgcattacgctgcttattatggacatgctaattgtgttcaagctattctctctgctgctcaatcaagtcctgttgctgtccattggggatatgcgagatttgtgaacataagagatgataaaggagcgactccgttgcatttagctgctcgacagagacgacctgaatgtgtgaatgttttgttggatagtggttctcttgtttgtgcatctactagtgtatatggttctccaggaagcacacctcttcatttagcagctagaagtggatctatagattgtgtcagaaagttgcttgcttggggtgctgatcgtcttcaacgagacgcttctgggagaataccttatgtggttgcgatgaagcataagcatggagcatgtggagccttacttaatccgtcctctgcagagccacttgtttggccatcaccattaaagttcatcagtgagcttaatgacgaggcgaaacttctcttagagcaggctttaatggaggctaacagggagagagagaaaaccatcctcaaaggaacagcttattccttaccatcaccctctttctctgacacggatgataacatgtccgaggtgagtgatactgaactgtgctgcatttgctttgagcaagtttgtacaattgaagttaaagactgtggtcaccaaatgtgtgcacattgcacactttcacctgt

SEQ ID NO: 94739 - DNA, 503 bp, Arabidopsis thaliana columbia
aatgttttaggtgacactatagaagagttatgacgtcgcatgcacgcgtacgtaagctcggaattcggctcgagcgagacgcttgggggagaataccttatgtggttgcgatgaagcataagcatggagcatgtggagccttacttaatccgtcctctgcagagccacttgtttggccatcaccattaaagttcatcagtgagcttaatgacgaggcgaaacttctcttagagcaggctttaatggaggctaacagggagagagagaaaaccatcctcaaaggaacagcttattccttaccatcaccctctttctctgacacggatgataacatgtccgaggtgagtgatacggaactgtgctgcatttgctttgagcaagtatgtacaattgaagttaaagactgtggtcaccaaatgtgtgcacaatgcacacttgcactgtgctgtcacaacaaaccaaacccaacgacctcaaccgtgactccaccggtctgtccgttc

SEQ ID NO: 94740 - DNA, 455 bp, Arabidopsis thaliana columbia
tttgtgttttagaaatgaagattctgctcccgtgaatccggagcattttgtgcctgaggaatgagttaagccagatcaagattctccatgtacagataaaacagattggaaggcaacttttcaaaaggctgcagatgcagttttgaaggccattgggactcgttggaaggtaccatggactgtcgagaccattgtgcaggtaatgcttctgtgggtagccgctttctggttcattggttcatggatgatcccattcatggctcatatatcaggtttccacaaagaatccctaacatttagaggccaagctttgttcagtctgataaccgatgtaacagaaggcctagccgggattgctatcctccaccgttgcctctccatgttccgtccacttgcaagtgattgggtccgctttacccttaaaggaaactggcaactagatgttatcataggct

SEQ ID NO: 94741 - DNA, 573 bp, Arabidopsis thaliana columbia
  unsure (1)..(573): unsure at all n locations
nnnnnnnnnnnnnnnnnnnnnnnnnnnnnnnnnnnnnnnnnnnnnnnnnnnnnnnnnnnnnnnnnnnnnnnnnnnnnnnnnnccacgcgtccgcggacgcgtgggcggacgcgtgggtgctgccgctactcgtttcatatctccgtctccggctcgatccgccaagtagagtaagcagcaatgactaaaaagaagaatcctaatgttttcttggatgtatcaattggtggggatcccgttcaacggattgtcattgagctttttgctgatgttgtccccaagacagcggaaaacttccgtgccctctgcacaggtgaggcgggcgttggaaagtccactgggaagcctctacatttcaaaggatcatctttccatcgggttatcaaaggattcatggctcagggtggtgatttttccaatgggaatggcactggtggggagagcatctatggtggggaagttttcagatgagaactttagattggaccatgatggagctggagtcctttcaatggcaaattgtggcccaaataccaacgggtcccaatttgttatacgttttaaacgccaacc

SEQ ID NO: 94742 - DNA, 793 bp, Arabidopsis thaliana columbia
  unsure (1)..(793): unsure at all n locations
ggaagctcttctttcctatgacccaaacctcagggagcctctgtgtgctcttcaaaagaagaagccaaaacacagatcatgagcatttgggacaaagctgagatcatcaaggtgagcgatgttgagcttgagtttctaactggaagcaacaagattgatgatgagaccgcgttgaccttgtggcatcccaacttgaagctgttgttagtcactcttggtgaaaagggctgtcggtattacaccaagactttcaaaggagccgttgaccctttccatgtgaacgctgtggacacaaccggagctggagattcctttgtcggtgctcttctaaaccagattgtcgatgatcgatccgttctcgaggacgaagagagattgaggaaagtgctgagattcgcaaatgcttgtggagcaatcacaacgaccaaaaaaggagccattccagctcttccctcagatgctgaagttcggagctttctcgaaaagaaatagaaacaaaacaactcaagcttctattacgtaatctgtttccgcgattatcttctctttttgtattcttgttttcggatggttgaatcgagaagagaaacaaattcggcattccgctctgtttttgtttctcttcttcaaatgtaatgatttagaaaagacgtatgttgcaatttaaggcttcacttgctaataaaatgataaggtttttccaagtttaacaaaaaaaaaaaaaaagnnnnnnnnnnnnnnnnnnnnnnnnnnnnnnnnnnnnnnnnnnnnnnnnnnnnnnnnnnnnnnnnnn

SEQ ID NO: 94743 - DNA, 1072 bp, Arabidopsis thaliana columbia
  unsure (1)..(1072): unsure at all n locations
atgatattgccnnnnnnnnnnnnnnnnnnnnnnnnnnnnnnnnnnnnnnnnnnnnnnnnnnnnnnnnnnnnnnnnnnacgcgccacgcgtccgcctaacttaggttttatcaatctctcatttccaaccatggcttcctccgccgcccaaattcacatcctcggcggaatcggattccctacttcgtcttcttcctcctccaccaaaaacctcgacaacaaaaccaattccattccacgaagcgtcttcttcggcaacagaacaagtcctttcactactccaacctccgccttccttcgtatgggacgaagaaacaacaacgcttcccgatacaccgttggtccagtccgtgtggttaacgagaaagtcgtcggaatcgatttaggcacgacgaattcagctgttgctgctatggaaggaggtaaaccaacgattgtgactaacgctgaaggtcaaagaactacaccttctgttgtggcttatactaagagtaaagatagacttgttggtcagattgctaaacgtcaagctgttgttaatccggagaatactttcttctctgttaagaggtttattggtagaagaatgaatgaagttgctgaagagtctaagcaggtttcttatagagttattaaagatgagaatggtaatgttaagcttgattgtcctgctattggtaaacaatttgctgctgaggagatttctgctcaggttttgaggaagcttgtggatgatgcttcgagatttttgaatgataaagtaacgaaagctgtcatcactgtgcctgcttacttcaatgattcacaaaggacggctactaaagatgctggtcgtattgctggattggaagttcttaggattattaatgagcctactgctgcttctttggcttatgggtttgagaggaaaagcaatgaaactattcttgtttttgatcttggtggtggtacttttgatgtctcagtccttgaggttggtgacggtgtttttgaagtgctttcgacttctggtgatacacatttgggaggtgatgactttgacatgagagtcgttgattggcttgcttcaacct

SEQ ID NO: 94744 - DNA, 475 bp, Arabidopsis thaliana columbia
gtatttggagtatcggcgaagtcaatgcaatgctcttacgacgacagaggaaatagtgtcccaacaatccttctcaggatgcaaaaacgtctatacactgaaggaggtcttaaagcagaaggaattttccgaataaatccagacaacggcaaagaagagcatgtccgtagacagttgaactgtggtgtggtaccacgtggaattgatgttcattgcttggcgggtttaataaaggcgtggttcagggagctacctacaggagtgcttgatgtgttgacaccagagcaagtaatgaggtgtaacacggaggaggattgtagccggctagtgatacttcttcctccggttgaatctgcgattcttgattgggccatcggtctaatggcggatgtggtggagcatgaacagtttaacaaaatgaatgctcgcaatgtagctatggtctttgctccaaatatgactcaaatggcagatc

SEQ ID NO: 94745 - DNA, 2171 bp, Arabidopsis thaliana columbia
ccaacactcacaaattctcttaaagctcacagacgaattctttctatttttaatctttccggcgaacaattctgatctctaataatggcgggtaaaggtgaaggtccagctatcggtatcgatctcggtacaacctactcttgcgtcggtgtttggcaacatgaccgcgtcgaaatcatcgccaacgatcaaggcaaccgcaccactccttcctacgttgctttcactgacagcgagcgtctcatcggggatgctgccaagaatcaagtcgccatgaaccctaccaacaccgtcttcgatgctaagcgtctaatcggaagaagatacagtgatccctctgttcaagcggataagagtcactggccttttaaggttgtttccggtccaggtgagaagcctatgattgtggttaaccacaagggagaggagaaacagttttctgctgaggaaatctcgtcgattgttcttattaagatgcgggagattgcagaagctttccttggttctcctgttaagaacgctgtcgttatagttcctgcttatttcaacgactctcagcgtcaaggcactaaggacgctggagttatctctggtctcaacgtgatgcgtatcatcaatgagccaactgctgctgctattgcttacggtcttgacaagaaggcgtcgagtgttggcgagaagaatgttttgatctttgatttgggaggtggtacttttgatgtgtctttgcttacgattgaggaaggtatctttgaagtcaaggcaactgctggtgacacacatcttggtggtgaggacttcgacaacaggatggttaatcattttgttcaggagtttaagaggaagaacaagaaggatattactgggaacccgagagctttgaggaggcttaggacagcttgtgagcgggcgaagagaactctttcttcgactgctcagacgactatagagattgactctctttttgagggtattgatttctacactaccatcactcgtgctaggttcgaggagctcaacatggatttgtttaggaagtgtatggagccagtggagaagtgtttgagggatgctaagatggacaagagcagtgttcatgatgttgttcttgttggtggctctacaaggattcccaaagtgcagcagcttttgcaagacttcttcaatgggaaagagctctgtaaaagcattaacccggacgaggctgttgcttacggagcagctgtgcaagctgcaatcttgagcggtgaagggaatgagaaggtccaggacttgttacttcttgatgtcactcctctgtccttgggtttggaaactgccggtggtgttatgactgttttgattccgaggaacaccacaattccgaccaagaaagagcagatattctctacctattcagacaaccagcccggtgtactgatccaggtctacgaaggagagagggcacgaacaaaggacaacaaccttttgggaaagttcgagctcagtggtataccacctgctccacgaggtgtaccgcagattactgtctgtttcgacatcgacgccaatggtatcctgaatgtgtcggctgaggacaagacgactggtcagaagaacaagatcacaatcacaaacgacaagggaaggttatcaaaggaagagatcgagaagatggtacaagaggcagagaagtacaaggctgaggatgaagaacacaagaagaaggtggatgcaaagaacgctctcgagaactatgcatacaacatgaggaacacgatcaaggacgagaagatcgcatctaagcttgacgcagctgacaagaagaagattgaggatgcaatcgaccaagctattgaatggttagatgggaatcaactggctgaggcagatgagttcgaggataagatgaaggagctcgagtctctttgcaaccctattattgcaagaatgtaccaaggagctgggcctgatatgggtggtgcaggaggaatggatgacgacacacctgctggtggtagcggcggtgctggcccaaagattgaagaagttgattaagccttttggcttttgtttactctgtttgcttgagattctagttggtttcttgttcttagttttatctttctatgtcactctgaaactggtgtgtgatcattttgatgttttaagaatttagctttaccgttttt

SEQ ID NO: 94746 - DNA, 1093 bp, Arabidopsis thaliana columbia
tacggctgcgagaagacgacagaaggggactcttgtcgtcgttggaagaagaggaagagagaggacaagagaatcataagaagaagacatagtcatgggagaggtgaaagtagacgacgatgcgattcttaaatccttcctcgccgaggtcggagaagttgagagagataacgaagtcggcaggattctctcatgcttcaagctgaatccgtttgagcatcttaacctctctttcgattcttccacggatgatgttaaaaggcagtacagaaagatttctttgatggttcatcctgataaatgcaaacatccacaagcacaggaggctttcggagcattggcaaaagcgcaacaactgctgctaaacgaccaagaaagagattatattcttacccaagtccatgctgcaaaagaagagcttaagatgaagagaaagaaacagttaaagaaagacaccgcctctaaaataaagtccttggttgatgagggaaagcatgagcacatatatgagcaatctgaggagtttcagaaggagctcaagttaaaggtccgagagatattaacagaccaagagtggcgtagaagaaaaatggcaatgagaatatcagaagaagaggggagactgaagaaggatgaagcagaacaaaaggagatatggaagaaaaagcgtgagcatgaagaacagtgggaaggaacaagagaaaaaagggtatcaagctggagagactttcagaaagcaggaaagaaggccaaaaaaggagagacgcgacctccaaaattgaagacagaggatccgaacaaatcatacgtccaaaggccggtcaagaaaggctgatctctgccttcatttgtttttgctgttgttgacattgatagatattggtcttctcgaggataatctcagactctctcttcttgtgtctgtgtttcttccctttgtacatcaccaacttcattcgtctttccaaatacatcagagacagggaagcgatatctcacttctcacaaaaaaaaaaaaaaagggcggccgctctagaggatccaagcttacgtacgcgtgcatgcgacgtcaaaatcttctataggtcaccta

SEQ ID NO: 94747 - DNA, 422 bp, Arabidopsis thaliana columbia
  unsure (1)..(422): unsure at all n locations
tatttgggggtgacgaaaagagcccgcctttgttttctaatttttggtaccagaatttttgaaaatccccaaatttttttggttctcttcttcataatcgttgaattagggttttacaatttcgagtttccccaaatctgaaatttgagtttttttttttttcttgacttttcacgttttgattcgcctgttgtttgggtttgaaatggcgactgaaaccctagatgagaagacaccggaagtgaattctccggcgaaggaggaaattgatgttgttccgaatgaggagaaggaggtagagaaagaaaacgtggattcgccgagaattggcgaanggacggaggagaagaaggaagatgatgaagagggtgaagcggaanaaggagaattnggtgngaaagataannaagacgatgtagaaa

SEQ ID NO: 94748 - DNA, 499 bp, Arabidopsis thaliana columbia
aagatcaacttcttcttcttaccaaaactgtcggcgtcgtctcctctaagctcctcccatggaagcagaagaaggtcatcagcgtgaccgcctctgcgactattgcgactcctccgtggctcttgtctactgcaaagctgactccgccaagctctgcctcgcctgcgacaagcaagtccacgtcgccaaccaactcttcgccaaacacttcaggtcacttctctgcgactcctgcaacgaatctccctcttcccttttctgcgagactgaaaggtctgttctttgccagaactgcgactggcaacaccacaccgcctcttcctcccttcatagccgcagaccccttttgaaggatttaccggctgtccctccgtgcctgagttgctggccatcgttggcctcgatgacctcactctcgattccggattgctttgggagtcacctgagatcgttagcctcaacgaccttattgtttcgggcgggtcgggtactcataact

SEQ ID NO: 94749 - DNA, 498 bp, Arabidopsis thaliana columbia
  unsure (1)..(498): unsure at all n locations
ttttccgctttcttgtctctctccctttcctctttcgtctcctacgtgtttaaaccttgcaaaaaatcaagtcttttttggtgtttaaatcacccatttttgtcaatctgtttttcgagcaaaacaccaggaggaaaccaaaaagctagaggctttgtggagtgagaagaagagtctcagtgaaaacagaaagcagcatttgagattccactgttaatctttgaattaaaaatgagtgcagcagctacaatgcctatgccccgagaagcgtctaattacgatgagatctctatgcaacagagcatgctcttctctgatagtctcaaggatctgaagaatctgagaacacagttgtattcagcagctgagtatttcgaactatcctacacaaacgatgaacaaaaacagatagtcgtggagacactgaaagattatgcaataaaggctctggtgaatacagttgaccatttggggtctgttacatataaagtanatgac

SEQ ID NO: 94750 - DNA, 429 bp, Arabidopsis thaliana columbia
ctttttatttcttttatcgttttttatgttgggaagtaaaatgaaaggcaattcttaatctaatctaatattgattgaatgtctgagcattccgagactttcatgagtatatatccaaagtatcttaggtccttttcaaaactattaatttaaatctctctccggctatccaatctaattgaagactcagtaagtggaactaaattagtagtggcaagtaaagatttacagatttccctccactactttaagttttccttgaatctgataggcaaaactttaggttagagaatagaacctcgcgagccaggggcttagaataatgaaaagaaagtataaagagtcttttcctacgtttgttatttaaagtttgttgctgaggcggcacccggatttgaactggggaaaaaggatttgcagtcccccgcc

SEQ ID NO: 94751 - DNA, 1137 bp, Arabidopsis thaliana columbia
  unsure (1)..(1137): unsure at all n locations
tgatacttcnnnnnnnnnnnnnnnnnnnnnnnnnnnnnnnnnnnnnnnnnnnnnnnnnnnnnnnnnnnnnnnnnnnnnnnccacgcgtccgcccacgcgtccgcccacgcgtccgcccacgcgtccgcgattttcttgggaaaatttctgatttcgagaaaaaacaaaaatccgcaaactcgacgatgatcctgaagaaagtatggggatcggtgtggaaccgatcgaatagtggcaaggatttggtgaatcatcagagagcgatcgatgttcctcctctgttattgtcttcttcatcgtctcttggtgcgtttgatcagctaccgatggatattctagtccagatactgatgatgatggagccaaaagatgctgtgaaattgggcttaacgtgcaaagcctggaaatgcgtagctagtggtaatcgtctctggatattttatctccagtgttctcaagagccatgggactccattttcttcgctgaaactagtttgcgttctggttatcctctccgaatgatttctagtcaatcaggagagttgtcgtttatgcacatttatagtcagagggcacaagttcctggttctatcattattgatggtggttctggatattgtaagtttggttggagcaagtatgcgtctccttctggacgttctgctacttttttggaatttggtaacattgagtcaccgatttatgctagacttcaacagttctttgcaaccattttcaccaggatgcaggtaaagccctctatgcagccaatagtggtatcactacctctctgccattttgatgatactgaatcagccaaggcatcaaggcggcaacttaagactgctattttcaaatgtcttggttgacatgaacgtccctgcagtgtgtgcagttaatcaggctgtgttagctctatatgcagcacggcggacatctggaattgtngtcaacattggtttccaagtcatcaccattcttccgnttttacattggtaaggtgatncgncaggtaggtgnggaggcattgggttttggggcatttaaactnaanggggttccctaaggggnaggtncaggaacaacatttccctttaatnaatnncactgtnngnctntaaagggactttgtntnng

SEQ ID NO: 94752 - DNA, 539 bp, Arabidopsis thaliana columbia
ggccggtcaagttctggcttgaaagcttatgctgaacttagtttctgatttccaggagaataaaccgttggctctagacccaaaatttgtgcaaggtctcggcagtgtgctttctgactcaagcttggacaaggaatttatagccaaagcaataacactacctggggagggagagataatggacatgatggccgtggcggatcctgatgctgttcatgctgttagaaagtttgtacgaaagcagcttgcatctgaacttaaggaggagcttctaaagatagtcgagaacaataggagcacagaagcttatgtctttgaccactcaaacatggcgaggcgtgctttgaagaatacagctctagcttatcttgcatctctcgaagatccagcatatatgggaacttgcactgaacgaatacaaggtggccaccaatttgaccgaccaatttgctgctttggcactctatcccagaaccctggtaaaacccgtgaacggacattcttgcccgacttctatgaacaagtggcagggacgatta

SEQ ID NO: 94753 - DNA, 803 bp, Arabidopsis thaliana columbia
  unsure (1)..(803): unsure at all n locations
gtcaatattgtgaagaacaaagtcgacctatttctagtagaacacgttggagaagggtcagacctcatattccgtttgttaaacccagaccctgatttacgtcctagcgcaactgaagtgctactccatcctatgttttggaactcagagatgagactgtctttccttcgtgatgctagtgaccgagttgagcttgaaaatagagaagctgattctgaaatcttgaaagcaatggagagtacagctccagtggctataggagggaaatgggatgaaaagctagaacctgttttcatcacaaacatcgggcgctacaggcgttacaaatacgatagcatccgtgacttgttacgagtcatcaggaacaaactgaatcatcatcgagaacttcctccggaaattcaggaacttgtcggaacagttccagaaggattcgacgagtactttgctgtacggtttccgaaattgttgattgaagtctatagagtcatctctctgcattgtagggaagaagaagtattcagaaagtacttcaaatgcgacatcatctaaaagactgtttcgcttccagcactttatatgttagttattgtatgtttgtcattgttatataacataacttaactgatatctaaatgtttaacgtataacttaaactgcaacatatgtagtatttatatatgtatatatctcttcaagtaaaaaaaaaaaaaaaaaaaagnnnnnnnnnnnnnnnnnnnnnnnnnnnnnnnnnnnnnnnnnnnnnnnnnnnnnnnnnnnnnnnnnnnnnnnnnntttaatcg

SEQ ID NO: 94754 - DNA, 462 bp, Arabidopsis thaliana columbia
  unsure (1)..(462): unsure at all n locations
gggggacccacgcgttcggatttgaagccaggatgcagtttatgaccaatccaacctacaccgccatggggcancgcgccattaacaagatgccggctattgaaatcgtcccaacccgtaaacatgtccgcttggctgctgtggatctgttggcttattctcacatggataacccgcagagtcctgatttcttgttagggaagctggaagaactggacccttttgttgaacaaatccgcgaggaaacactgaaggagacactgtgtcatggtattggatacttgcatgagggtttaagcagtctggatcaggagattgtgacacagctctttgaagctggacggattcaggtttgtgtgatgagcagttcattgtgttggggcactccattaactgcgcatttggtggtcgtaatgggaacgcagtattacgatgggagggaaaattcacattctgattatc

SEQ ID NO: 94755 - DNA, 418 bp, Arabidopsis thaliana columbia
ggaacatgctagacagttgttggtttctagaccttagttgctaaaagctgttttcctggcgcaggtaatgcttgggattgtgagtccgcaagtgttacagtcgccaaatattgttcaggccccaagtcatatgacagggtcttcaattcaagatgcgcaattatctggtcaaaaccttttaccgccactggcacaaaggtcacagcagctaagtcgtgctccccatagtcagtatcctgtccagcaatcttctaaacaaccttttagtcagattccacaactagtagcacaaccaggtccttcttctgtgaatcctcctcctagatcccaagttaaagtcgaaaacgctccattccaacgccagcaagtggttccagcttccaccaacataggttatagtagtcagatttcagttccg

SEQ ID NO: 94756 - DNA, 628 bp, Arabidopsis thaliana columbia
  unsure (1)..(628): unsure at all n locations
gagccaacgagatgcggcgaggagaaagagaaggttaaggttatggagaaggagaagaaggcgttgaagaagaaggcgaaagttcttaaaagtctttctaagaacttggatatgttctctagtatagggtttggtcttgatcctgaagctggtttggttggtgagattcagaccaagacaatctcggaagctacagagatattggttaagcagctggagcagttgaaagcagaggagaagatattgaagaaacagaggaaagaagagaaggctaaagccaaagccatgaagaagatgactgaaatggactctgaatcatcttcttcgtctgaatcaagtgatagtgattgtgataaaggcaaagttgtggacatgagctctttaagaaacaaggctaaaccggttcttgagccgttacaaccagaagccacagtagcaacccttcctaggatccaagagggtgcaatttcttgcaagaacaccagtgaagcattgcagattgctctacaaacatccacaatttttccttcaatggccaatcctggacagacattgaagacggtagaagcggtttcagtggttggattaccattgaatagagtaggagtttttttggggggaantttag

SEQ ID NO: 94757 - DNA, 940 bp, Arabidopsis thaliana columbia
tactgggcaccccccccgaggtcgacggtatcgataagcttgatatcgaattcgcggccgcgttaagcagctggagcagttgaaagcagaggagaagatattgaagaaacagaggaaagaagagaaggctaaagccaaagccatgaagaagatgactgaaatggactctgaatcatcttcttcgtctgaatcaagtgatagtgattgtgataaaggcaaagttgtggacatgagctctttaagaaacaaggctaaaccggttcttgagccgttacaaccagaagccacagtagcaacccttcctaggatccaagaggatgcaatttcttgcaagaacaccagtgaagcattgcagattgctctacaaacatccacaatttttccttcaatggccaatcctggacagacattgaagacggtagaagcggtttcagtggttggattaccattgaatagagtagaagtgtgtatgggagggaagtgtaagagatcaggaggagctttgttgttggatgagtttcaaagggcgatgacgggtttcgaaggatctgctgtggcttgcaagtgcatggggaagtgtcgtgatggcccaaacgttagagttgtgaaggagactgatgctgtgatgactgattcagttaggacaccatccaagaccctttgtgtaggagttggattgcaggatgtggaaactattgtgacaagtttctttgatgaagaatgtagcagagaaggactcggttctgtctcatattgaaagtgttttgaaacggctaatgttttatatagtgtggtgctttctcattgtacatatttaccttctcgataagtcattgatataagccatgtaattgcgataagacctgtaaagatcaacttaaaaaaaaacatctgcaaaaaaaaaaaaaaaaaaaaaaaaaaaaaaaaaaaagggcggccg

SEQ ID NO: 94758 - DNA, 728 bp, Arabidopsis thaliana columbia
ctcaaaagaagatcgatcaactattatggagaacaaatcgccctccaagaaaaacaaaccgccatcgtgcggatcactcgtaaccatcctcagccttgatggtggtggagtcagaggaatcatcgccggagaactcgatggagaagaggcgaggcttgcggattacttcgacgtgatagctggaactagcaccggtggtcttgtgacggcgatgttgactgtaccggacgagaccggtcgacctcatttcgcggctaaagacattgtgccgttttaccttgaacattgtcccaagatatttccccagcccacaggcgtgcttgctctgttaccgaagcttccaaagcttctgtctggtccaaagtacagcggaaagtatctgcgaaatcttctgagtaagcttcttggagagacaaggcttcacccagaccctcacaaacattgttattcctaccttcggtatcaaggaacttcaacccacttttttctcctcttaccagctgttggttgaccctagcttggatgtcaaggtatcagacatatgcatcggcacttcagctgctcccactttctttcctccccattacttttccaacgaagacagtcaaggcaataagacggagtttaatctcgttgatggcgcggttactgctaataacccgactttggtggccatgacagctgtgtctaagcagattgtgaagaataatcctgatatgggtaagctc

SEQ ID NO: 94759 - DNA, 1494 bp, Arabidopsis thaliana columbia
  unsure (1)..(1494): unsure at all n locations
tttataatcttaactcaaaagaagatcgatcaactattatggagtaacaaatcgccctccaagaaaaacaaaccgccatcgtgcggatcactcgtaaccatcctcagccttgatggtggtggagtcagaggaatcatcgccggagtaatccttgcctttctcgaaaaacaacttcaggaactcgatggagaagaggcgaggcttgcggattacttcgacgtgatagctggaactagcaccggtggtcttgtgacggcgatgttgactgtaccggacgagaccggtcgacctcatttcgcggctaaagacattgtgccgttttaccttgaacattgtcccaagatatttccccagcccacaggcgtgcttgctctgttaccgaagcttccaaagcttctgtctggtccaaagtacagcggaaagtatctgcgaaatcttctgagtaagcttcttggagagacaagacttcaccagaccctcacaaacattgttatacctaccttcgatatcaagaaacttcaacccactattttctcctcttaccagctgttggttgaccctagcttggatgtcaaggtatcagacatatgcatcggcacttcagctgctcccactttctttcctccccattacttttccaacgaagacagtcaaggcaataagacggagtttaatctcgttgatggcgcggttactgctaataacccgactttggtggccatgacagctgtgtctaagcagattgtgaagaataatcctgatatgggtaagctcaagccgttaggtttcgaccggtttctcgttatatcgataggaacaggatcaacaaaaagggaagagaagtacagcgcaaaaaaggctgcaaaatgggggatcatatcttggttatatgacgatggatctactccgatattagacattaccatggaatcaagccgcgacatgatccattatcacagctctgttgtgtttaaagccctacaatctgaagacaagtacctccgaatcgatgatgatacattggaaggagatgtaagcactatggatctagcgacaaagtctaacttggagaatcttcaaaagattggagagaagatgctgacaaacagagtcatgcaaatgaacatcgacactggtgtatatgaacctgttgctgaaaatattaccaatgatgaacagctaaagaggtatgcaaaaattctctcggacgaaaggaaattaaggagactaagaagcgacacaatgattaaagattcatcaaatgaatcacaagagataaaataaaaggaaatcattcgtgcttttgtgtgaaattgtttgttgcatatgttttacgtggtgacgtccattactttatatgctgtgagatgaaattttttaaataaaattggttatctaaaaaaaaaaaaaaaaaaagaagggcannnnnnnnnnnnnnnnnnnnnnnnnnnnnnnnnnnnnnnnnnnnnnnnnnnnnnnnnnnnaacnnnnnnn

SEQ ID NO: 94760 - DNA, 1202 bp, Arabidopsis thaliana columbia
  unsure (1)..(1202): unsure at all n locations
tgtaccccctccggtacccggcccgaatttcccgggtcaaccaacggtgccggggtctcccaaaaactcatctctcaccaccgtctcaaaccaagttcgatctaaaagccttttcctttagattctctccaacaacaaatctctttgaatcactcagtcatgtcggttttacttcctctctgtctgattatctccatgttcacctattcaaacgcagcgtattgtctttgcaaagaggggaacgagcaagtgcttcagaaggcaatagactacgcttgtggaaatggagctgactgtacccagatccaacccaccggagcttgttaccaacctaacaccgtcaaaaaccactgtgacgtcgccgtcaacagttactaccagaaaaaagcttcttccggtgccacctgtgactttaacggcgccgcctccccctctactacccctccgtcaactgcttcaaactgtttaactggttcaagctctagtggcactcctaccacaggaacaccaactactgggacaccaaccagtgggaccccgactaccggaactccgaccaccggaacccccaccactggaactccaaccagtgggactccaactagtggcttcccaaataccgggactccaaacacagggactaacactgggatgccaaattccaacgggatgccaacttcatcgtcatcttcggtgttcccggggactactcttggcccgactgggagcgggggactaggcgatccaaatgctggagagaagctgtctgttcgaactaacacagtggtcttcttattaaccggtgtagcagcaatgcttgtcatatgagggcttagaagtcacacgcggttatggttgtaattgagttgctgagagatcagatcttgccaacggctcatggttgatagagtcatcttttttttcactcgtctttctaggatttggacttaggttggccgagagacgtaatgctggtagtagctagtattttgggttatgtacaactttaactaagagctttacttttgtaaatccggaggatgagatgctcttttgtttcttatattctttttaatccgtttacttggatcaaaaaaattataaaagaaaaaaaaaaaaaaaaagnnnnnnnnnnnnnnnnnnnnnnnnnnnnnnnnnnnnnnnncacnnnnnnnnnnnnnnnnnnnnnnnnnnnnnnnnca

SEQ ID NO: 94761 - DNA, 436 bp, Arabidopsis thaliana columbia
gttactttagaaaaccaattataaaattctcctctttcttcatcaaattccacagagcatcagtttcttctccttctccaagctctcgcatcactttcatcgatttttcctctctgcgtcgatccttcagacatcggcgtcggagtttccgacaggaatctaaaaatgtcacgtggaagaggagttcctatgatggacctgaaacgaagttatgatgttgaagacagggtggtgtccgtgtctataccatcaataatcgaagctgatgaggctgatctgtggccactacctgagattgataccaagaagtcgaaatttccttgctgtatagtttggactcctcttcctggtgtctcttggttggctcctttcattggtcatattggactttgcagagaagatggagtcattttggactttgctggatctaacttca

SEQ ID NO: 94762 - DNA, 815 bp, Arabidopsis thaliana columbia
ttcgaaacacacttgcggtcttatctaaatcacaaaccaacaaaaagaaaaaatgggcttggtgccgatcatttgctttgggcatagtcttccttagttgtctcatcgccgtttatggccaaggtacgaggatcgggttctactcgactacgtgccctaatgccgagacaattgttcggaccactgtggcatctcactttggttcagatccaaaggttgcacccgggttactgagaatgcacaaccatgattgctttgtccaaggttgtgatggttcggtgcttttatcgggacctaactctgaaagaaccgctggcgcaaacgttaacctccatggttttgaggtcattgacgatgccaagaggagctcgaggcagcatgtcctggtgcggccgcttgtgctgatatcttggccttagcggctcgtgattcggtttctctcacaaacgggcaaggttggcatgttccaacaggacgtagagatggaagagtttccttggcatcgaacgttaacaatcttccttctccaagtgactctctagccattcaacaaaggaaattctccgcttttcgcctcaacactcgcgatctcgtcactcttgttgggaggaggacacacgatcggaacagctgcatgtgggtttatcacgaacaggatattcaactctagcggaaacacatcagatccaacaatggaccaaacatttgtaccacaacttcaaagactttttccccaaaacggcgacggatcatcacgtgttgatcttgacaccggaagtggaaacacttttgacacatcttatttcatcaatctc

SEQ ID NO: 94763 - DNA, 729 bp, Arabidopsis thaliana columbia
  unsure (1)..(729): unsure at all n locations
cgcctacgtaagctcggaattcagctcgagctttgaggcgaggaggaaacggatgcacatcgtcttctctgtcgatgatttgaccgaatccttctggcctgttcccgctccggcgccgtcagcgggatcgtcatctactccgtcaccgacgcaaaacgtgggggatgggatgactctaaatcaatcgaaatgggcctgccggagggttatcattgagtggtctggttccgaaaaaaaccctacgactaacacaatccgaaagaataccttccaccgggtgaatctttttttaaaattaaaagaaaaccgtgggccaaacacaaaaatgttggttaaaattcagaaacccgcagaatcatcggcggctccctgggtgatgatcaagggaagaatcggaatcgtgctccgtcgtctgatccggttgattcttcagctcctgttgttgttgatcctaatcagtatcatgcgattnttaagagcaagctcgagcttcttgcncngctgttgctcgtcgtgtggggactntgaaaccggaagattcgagtgcttcaactagcaaatcaaaaacaaggtcaaggctccattgtgggaaaaaactnancttggngcttcaaactgtaagattttttccccaaaaaagacggaaaaggaaaccttttnttccngcccggcaaactttgntttttattccgggggtnntttttttnttcnggngtcttttttggggnc

SEQ ID NO: 94764 - DNA, 597 bp, Arabidopsis thaliana columbia
  unsure (1)..(597): unsure at all n locations
gtcgcaactctctatagtgagtcgtattatagactgcctggtcgatacaacagagtccagaatacgaagaatttgaggcgattgggtaagcgatgcacatcgtcttctctgtcgatgatttgaccgaatccttctggcctgttcccgctccggcgccgtcgccgggatcgtcatcgactccgtcaccgacgcagaacgtggcggatgggatgactcgaagtcaatcggagtgggcgttccacaggcttatcaatgagttgtctggttccgattcgagccctacgactaacacaatcgagagatcacctccaccggttcagtctctttcgagattagaagaaaccgttgacgaaaccgaagatgttgttgagattcagaaaccgcagaatcatcgacggctccctgttgatgatcaagggaagaatcggaatcgtgctccgtcgtctgatccggttgattcttcagctcctgttgttgttgacccaaaccagaaccatgggatcttaaaaanaaancngncgttgttgcgtcgtgttgccgcngtgtggaactgtaaaccgaaanttaagcgtnanatcaannaaanaancaaggnnt

SEQ ID NO: 94765 - DNA, 615 bp, Arabidopsis thaliana columbia
tttaacccatccttctccttcctctaatttttttgtttcctgcccctggcccttccttactctctatatttttctcaattctccgatttgatccaacgatttcacagatctctgatctaaatggcatccaacggtgataaaggactgatcgttagcttcggcgagatgctaatcgatttcgtccctaccgaatcaggcgtctctctcgccgaagctcctggattcctcaaagctccaggcggtgctcccgctaacgtcgcaatcgctgtttctcgtctcggtggacgatctgctttcgtcggaaaacttggagacgacgagttcggtcatatgttggctgggattttgaggaagaacggtgttgatgatcaggggattaacttcgatactggagctagaactgctttagctttcgttacgttacgtgctgatggagatcgtgagtttatgttttaccgcaatcctagcgccgatatgcttcttcgtcctgatgaactcaatctcgacctcatcagatccgcgaaagtgtttcactatggatcaataagtttgatagtggagccgtgtaggtcagctcatttgaaggccatggaagtggcgaaagaagcaggagct

SEQ ID NO: 94766 - DNA, 514 bp, Arabidopsis thaliana columbia
  unsure (1)..(514): unsure at all n locations
ccggncggattcccgggggggccacgcgtccggccgggtatggtatctcgcaccactgatcagcttcatcctcttctcaaagtcccaggtaacgaggagcataaacaaattatgggcattggttttcagcaggaaggaaacaacaatatgatggtgggcaatcaattttctggtcagttccaggatcagattcctgcatctcatgcatttccccaggaccagcagagacaggttgacgcctttggccaaggaagcatgtcagacaacatttaccgtggattcttgatgcagcggccagactggaaccccaattgtactcagataggagttaccgcacagcccctgttgagcaccgggcctttgttaaatcagaattggcaatttaggagcatgtggggcaaacacaaacggtgtcggatgtacaagccaaggcagtcaaaccggggcccgngaggantcccgggcttnnnaagnggttcttantaacgggngggcaaatnatttctttggggga

SEQ ID NO: 94767 - DNA, 492 bp, Arabidopsis thaliana columbia
gcaaattcatctatccatcatatttctctgctgctctctgctttcttcttcttcttcttcttcttcttcttcttcttcttcttctgcttagtttgattcaaaaaatctccttcctcttcttactttatctcgtattatccattaatccgtgaccctttagtctctccatcttccgcttcaacaatcagaatttgggtttggcgaaagatgctaactttgaaagtgagactaatcgtttgagtaaaaaacatgcgaattttgtgtgatgcttgtgagagcgccgccgctatcgtcttttgcgccgccgacgaagctgccctctgttgctcctgcgacgaaaaagttcataagtgcaacaagctggctagtcggcatcttcgtgtaggctgagctgatccgagtaatgcaccaagctgtgacatatgcgaaaatgcacccgcattcttttactgtgagatagatggttgttccctttgtctacaatgtgatatg

SEQ ID NO: 94768 - DNA, 433 bp, Arabidopsis thaliana columbia
gtagtggtggtggcattaataatggcgtatgtggaagaaaggaacctagccgttagatcggctcaatcgctacaaacattcagtgttcaccgatcgattctctctctttcttcttccccattgctccttccttcgtacccctctctctgtcttttgaggtttccgggtcgggttggtgagaaaactccagcggcttaacggatcttccactggtagttttctgttcctcacaaggaaatcgaaaatttgataaagcgaaagtgaaaaaggcgtgtgttttctttgtaaaggctccaacttttttgatgaacagcttgtgcttgttgtgaaggttgttactttttgtgtattggaatttgggttttttctttatgttctgaggaggagaaaggaggaagctttcttgaattggattcaaatttgagctcatatg

SEQ ID NO: 94769 - DNA, 419 bp, Arabidopsis thaliana columbia
accacgcgtccgcggcaaacttgagcttgacgctgcttcaaggctattcttctgctgaagaagaagaagcagaggagagagcttttggggattacgacaactccgacgaagatggggataatgatgttcggagatatgaatcgtcttctgtgtttgatttctctgcatctgcctcctccgctaaaaacgccggccttccttcagctgacgacgttttctctcagatttcagggccaccggagtttctaaacaaccgcacagaagcagataatgaagcttcagctagagatgcagaacatgcaaatcgtattagtcgcaaaaagaagaaagttaaaccaaaaggtgttgtcatggaagcaaaacctcaactagtaggaatccatgagagagtaagaaacgatattgatgcacccccatcc

SEQ ID NO: 94770 - DNA, 943 bp, Arabidopsis thaliana columbia
gttattccagctctatacgactcacttatgggaaagctggtacgcctgcaggtaccggtccggaattcccgggtcttcccacgcgtccggtttgtgaagccacttgtttttaaggaagtggaaaaaactgaagggataccgaaaagggaaaggggtaatgtaggaggaggaaaagatgctaattttggaaatgtgggtgtaagaaaggaaacagaacggtgtttgagtcagactgaggttgagaaggaggcgtggaagctgcttcgtggtgccgtggtgaactactgtgggttccctgtggggactgtagcggctaatgatccaggggatacgcagactttgaactatgatcaagtgtttattcgtgattttgttccttcggcgtatgcgtttatgcttgatggagaaggggagattgttagaaactttctccttcatacattgcagttgcagagctgggagaaaacagtggactgtcacagccctggcccggggctaatgccagcgagttttaaagtgaaatctgcgccacttgagggaaatgatggttcatttgaggagtttttagatccagactttggtggatcagccattggacgtgttagccctgttgactctggtttgtggtggatcatattgctgagagcttatggaaagctcacgggtgactacacgttgcaagagagaattgatgttcaaacagggatcaagttgatactcaagctttgtctagccgacggttttgacatgttcccgactctacttgtcactgacggatcatgtatggttgatcgaagaatggggattcatgggcatccacttgaaatccaagcattattctactccgctctccgttgtgctcgagagatgcttattgtgaatgatggaaccaagagcttagttactgcagtcaacaatcgcctaagtgctttatcattccata

SEQ ID NO: 94771 - DNA, 908 bp, Arabidopsis thaliana columbia
cgcctgcagtgtaccggtccggaattcccgggttgacccacgcgtccgtacggctggagaagacgacagaagggatgcaaagtacgaaaaggcgaagattgtttacgagaagctatggaatggttcttacttcaattatgacgatagtggtagtggctcgagctcttcgattcttgctgatcagttggctggacaatggtatgcacgagcgtgtggattgaagccgataacgaaagaagaatggataaagaaagcactagagacgatctatgagttcaatgtgatgaaagttaaaggagggacacgaggcgcagtgaacggaatgtcaacggaaggaaaagtggatgcaaattcgttggtttcaaaggaagtttgggctggtactacttactctgttgcagcttgtatgattcaagaagggcaaagagaaaaagggtttcagacagcaagtggaatctacgaggctatttggtctgatcgtggtctcagttgctcgtttcagaccccactagcgtggaccatgaatgatgaaccccgttctctgtgttttatgaggcctcttcctatatgggctatacaatgggcattgacccgccccccatcttttggagaagggaagccaaagttagtggcaggagatgaagcacaagaacgtcatttgttgttaagtcaacccaaagggttcaaacatgtggctccttccctcaaagggagggacacccccctaatgtgcataaaagccgtctccaacacacgtacgagaccgttctcaaaactctccgcttgtaagcccaggatgcaccaattatatacatcataagttattctttgtcttgtgtatccaaaaaaaaaaaaaggaattaacccacccagcgaacgctctagaggatccaagcttacgcacgcgt

SEQ ID NO: 94772 - DNA, 1096 bp, Arabidopsis thaliana columbia
  unsure (1)..(1096): unsure at all n locations
gcnanttaggggcccggccccttccggntccccgnaggaaggggtcnaatccgttggttcaaggnagttggctgtcctcctcccctgttncgcttgtttggttcagggnggcccaaaggggaaacgggtttccagccacccaagtggaatcttccgggggctttttggtctgatcgtggtctcagttgctcgtttcagacaccagaagcgtggaacatgaatgatgaatacagatctctgtgttatatgagacctcttgctatatgggctatacaatgggcattgacacgaacacaatcttttggagaagagaagcaaaagttagtggcaggagatgaagaagaagaaagtaatttgttgttaagacaacacaaagggttcaaagatgtggctcgttttgtgaaaatagtaccaacgagcaatgtgcatagaagccgtctccaacacacgtacgagaccgttctcaagactctccgcttgtaagcacaggatgcaacaattatatacatcataagttattatttgtcttgtgtatcattagcgtttcttgttaagtgaggaacaaaatctaaaattctgatagtaagacgtcacaagtcacactattatctctggttttgggaagacaaatcttttgaagcatgaacaacgaaaataaatataatagcttaactatcagcaacagttcaacagcttaaggtcaacagcgattacaatgaagcattcaaggagaaagagtcagattaagatccaccttttcataagaactgtcttaccctccaactgcgtgagtgcagcaggtctagcaactttgcaacatttgatgattctcttaacgtggagttgcgtaaacctggcttgcatcgtattgagcatacgcggactggggtgattgggttttcactggtgcggtccctggagcagtcgcatacactgcagcttgagttgcaggctgttgctcatatcctgtttgagtaggtgctgcttgtgaataagcggcttggcttcctggttccgnaccatatccgtnagtaaggancttganagcttgtggtgaaccanagttttgggctnagatgaccntaagcaggtgngt

SEQ ID NO: 94773 - DNA, 1009 bp, Arabidopsis thaliana columbia
  unsure (1)..(1009): unsure at all n locations
atttgttggaggtcaatggattgtgggaattattgacgagcttagaaaggcgtatgcagaagagtcttctgatagcggaccaatattgatagatacaaagactcgactccgtgatacacttccagctgagccacagaggaggaatggaaggcttcagctaatgctttacaagcttctatgggacactattgtgaaagaagggtttccaacgggaccttttttcgactacttttctttgaatcgcaattatgtcttatcccaagatgtcagagatcacattgctaatgcaggtatcaaagctcagacacttgaagagatagttaggtactatgaaaacacttttcagatgcttccgatagcaaataatcaactattactaaagtacgagtttcagaaggaccaatctataatagctgaaattagattcaaccatgatcatgaatgggtgatgagcaaatatagagaagtcattgagttctggagaaatgaacgagaagctgggtacactcctgaagaagaacgttggaaatgtcggtattgccaatttgctaagtcttgccctggaaacccgagtttcgaatctcctagcacaagctcaccaacaagagaggctcctcctttaccaagctaaaaagaagatgaaaagttgattctttcaccgaaagctgctaaatgctaacatatatgtttgtgttgtctttaatttccacatttgcttcccttaaattgcatagcagttaagtgattaaaccgtggtttgattagggttggttaggcgtaccaagattgatttgtaccgggatgccgcaatttgattattgtgtatcgtttccaacacacgctttgtatgtatcatcattgttggaatctctaaggtaatcgacaatagcatttttacgttctgtaaaaaagnnnnnnnnnnnnnnnnnnnnnnnnnnnnnnnnnnnnnnnnnnnnnnnnnnnnnnnnnnnnnnnnnnnnnnnnnnnnnnnnnnnnnnnnnnnnnnnnn

SEQ ID NO: 94774 - DNA, 671 bp, Arabidopsis thaliana columbia
  unsure (1)..(671): unsure at all n locations
actcccatacctatanctaagcgcctgcacgtgccggtccggaattcccgggtcgacccacgcgtccgcaggctgccgtgtaccttctacatccaaagatggccactatagctactggtcttaacattgcaacccagcgtgtcttcgtcaccagcgagaatcggccagtttgtctcgccggtccggtccatttgaacaattcgaggaatcttgggtcaagaacaactaaccggatgatgaaacttcagccgattaaagcagcaccggaaggagggatatcggacgtagtggagaaaagcattaaggaagctcaggagacttgtgcgggcgatcctgtgagtggagagtgtgtagctgcgtgggacgaggttgaagaacttagcgcagcagctagccatgctagagacaagaagaaggctgatggttcggaccctttggaggaatactgcaaagacaatcctgagaccaacgagtgccgtacttacgacaactgaagcgatcaagatcctgttccggattcatacgtatacgacaaatctttgttccggtccatttggtaatgtcaggttatataaatcatgtctttgaatcctgaattagctcctaaaaacatttgggatttgtggtacagtcccaataaatcggatttgccaaaaagccnnnaaanttnc

SEQ ID NO: 94775 - DNA, 736 bp, Arabidopsis thaliana columbia
gggatattttcccgggggtcgacccccaacgcggtcccaaaaacttaatttatattcacaggctgccgtgtaccttctccatccaaagatggcaactatagctactggtcttaacattgcaacccagcgtgtcttcgtcaccagcgagaatcggccagtttgtctcgccggtccggtccatttgaacaattcgtggaatcttgggtcaagaacaactaaccggatgatgaaacttcagccgattaaagcagcaccggaaggagggatatcggacgtagtggagaaaagcattaaggaagctcaggagacttgtgcgggcgatcctgtgagtggagagtgtgtagctgcgtgggacgaggttgaagaacttagcgcagcagctagccatgctagagacaagaagaaggctgatggttcggaccctttggaggaatacttgcaaagacaatcctgagaccaacgagtgccgtactttcggcaactgaagcgatcaagatcctgttccgggttcatacggtttcggcaaatctttgttccggtccatttgggaatttcaggttatataaatcatgtctttgaatctgaattagctctaaccacatttgtaatttgcagttccataaacagaaggaaagcccagctttcataaaaaaaaaacgaaagaataggtcggccgctctagaggatcccagcttacgtacgcgtgcaagcgacgtctagactggtcttatagtgt

SEQ ID NO: 94776 - DNA, 630 bp, Arabidopsis thaliana columbia
cccacgcgtccggaaaaaaaaaaaaaagtagctgctttggcgacatctgttgcgactctatcgtctgcaccaccagtatctctgcctcgcctctcatcatctcgctcttccttcttctccaattgcttcacagtcacgacccgaccaaacactcgttctctggtagcgattggacgcagaatccgacaagaaccaacgagaaagccactgacttgtaatgctttgtttggtctcggtgtgcctgagcttgctgtgattgctggcgtcgctgcgttgctttttggacctaagaaacttcctgagattggcaagagtattggcaaaaccgtcaagagctttcaacaggctgcaaaagagttcgagtctgagcttaagacagaacccgaagagtctgttgcagaatcatctcaggtagcaacgagtaacaaagaagaggagaaaaaaactgaggtttcttcaagctcaaaggagaatgtatgaagatgagagacttcagtgtttgcttttccttgtagctacaacaattttatgtcatgaagagtttagatcaaatattattgtctggaggaaacaaaatagccttccaatgaaaagtataaattaaaaaaaaaaaaaaaaaagggcggccgc

SEQ ID NO: 94777 - DNA, 1654 bp, Arabidopsis thaliana columbia
  unsure (1)..(1654): unsure at all n locations
ctgttaagccactaaaaccctaaaggcgtctccttttctcgccaccactctccacaatacccatttctgcaaaatggcttcttctcgtatttctctccgccttgttcgccgatttgcctcagccgccgctgacggtacgaccaccgctccctcttcaggcaaaatctctgtctccaaagctaagtccactctccggaaagaacacgatcccgacaaagctcttaagatctacgccaatgtctccgatcactcagcctctcctgtttcatctcgctacgcccaagagctcactgttcgtcgcctcgccaagtgtcgccgtttctcagacatcgaaaccctaattgaatcccacaaaaatgatcccaaaatcaaagaagaacctttctactctacgcttatcagatcttacggccaagcctctatgtttaatcacgccatgagaaccttcgagcagatggatcaatacggcacacccagatcagctgtttccttcaacgccttgctcaacgcttgtctccattccaagaatttcgataaagtcccccaactgttcgacgaaattcctcagaggtacaataagatcatccctgacaaaatctcttacggtatattgattaagtcatactgtgactctggtacccctgaaaaagccattgagattatgagacagatgcaaggtaaaggcatggaagttactaccattgctttcaccaccattttgagttcattgtataagaaaggtgagctcgaggtagctgataacttgtggaatgagatggtgaagaaaggctgtgaattggataatgcagcgtataatgttcgtataatgagtgctcaaaaggaaagccctgaaagagttaaggagttgattgaagaaatgagtagtatgggattgaaacctgatacgattagctataactatcttatgactgcgtattgtgagagaggaatgttggacgaagctaagaaagtgtatgaaggacttgaaggtaacaactgtgctcccaacgcagctacttttaggacattgatatttcatctttgttatagccgattgtacgagcaaggctatgcgatcttcaagaagagtgtgtatatgcacaagattccagatttcaacactttgaagcatttggttgtgggattggtggagaacaagaaaagagatgacgctaaagggttgattagaacggtgaagaagaaattccctccgagtttcttgaatgcgtggaagaaactcgaggaggaactcgggctgtattcgaaaaccgatgcttttccatcttctgcaaaagaggctgctgctgcttaatagctcaagagcatttcgattgaacatcttattttgttgcttgaagacttgttgaaaactatgatctagtatgcaggtttatttataagctgctcctgcatttttctttcctcataaattagcttgtaaaagcttgaaggtttgttgttggaatctctagaattccatagtcaacaattttcaggttcatatagttcactgctttgttctacacacttgtgcttcatgatgaattcaagtttctttcagtttaaaaaaaaaaaaaaagnnnnnnnnnnnnnnnnnnnnnnnnnnnnnnnnnnnnnnnnnnnnnnnnnnnnnnnnnnnnnnnnnntgtcctaa

SEQ ID NO: 94778 - DNA, 443 bp, Arabidopsis thaliana columbia
actattggcctattttcaaacctttcctttaacgcatggagcatctcagcgtgagtcctgccagaagcgcaaataatgaagataaagcccaacttccttttgtaaagtacattccattcggcaagctcctgtaaagcagaagcagaagttgtggcaaaggcggttgactgttctgatacgctccgacgagcaaaatcggagttgatagaaggtgaaggagtattcccaatctgaggatgagcagagaaagcttcaagccaatctgtcacagtaacttggttgaaccagatgtctcttgcagtatatagtgcttcttgagaagttaacggtccagacgtagacatctgcttcgcgaattcggagcttccccagccaaccttccaatcatcttctccggtctccatcgcccatttttccggacgggtggggcggacccggaaatc

SEQ ID NO: 94779 - DNA, 421 bp, Arabidopsis thaliana columbia
cggacgcgtgggggaaaaaaaaaagtgaagatccatcacctgtaaagcagaagcagaagttgtggcaaaggcggttgactgttctgatacgctccgacgagcaaaatcggagttgatagaaggtgaaggagtattcccaatctgaggatgagcagagaaagcttcaagccaatctgtcacattaacttggttgaaccagatgtctcttgcagtatatattgcttcttgagaagttaacggtccagacgtagacatctgcttcgcgaattcggagcttccacagcaaaccttccattcatcttctccgatctccatcgccattttttctctcttttctccaatcctcacttctgttgactggtgtaagatcaaaagtcatctaattgggccttttcataaacgggcttttcaaaaatgggcc

SEQ ID NO: 94780 - DNA, 1103 bp, Arabidopsis thaliana columbia
  unsure (1)..(1103): unsure at all n locations
nnnnnnnnnnnnnnnnnnnnnnnnnnnnnnnnnnnnnnnnnnnnnnnnnnnnnnnnnnnnnnnnnnnnnccacgcgtccgctttgagattcctaagatatgtcttcacttgcagatttaatcaatctcgatctctccgattccactgaccagatcatcgccgagtacatatggattggtggatcgggcttggatatgagaagcaaagcaaggactttgcctggaccagtgacggatccatcgcagttaccgaaatggaactacgacggttcaagcaccggccaagctccgggcgatgacagtgaagtcatcatctaccctcaagctatcttcaaagaccccttcagaagaggcaacaacatccttgtgatgtgtgacgcatatacaccggcaggagagccgattccgacgaacaaaaggcatgcggcggctaagatctttgaagaccctagtgttgtcgccgaagaaacatggtacggaattgaacaagagtatacccttgttgcaaaaggatattaagtggccggtaggttggccggtcggcggtttcccaggtcctcagggaccgtactactgtgggagttggagcagacaaaagcctttgggaggggcaatcgttggttctcaatttacaaagcttgtttttacgccggattcaatgtcagtggggctaaccggcgaagttatgcctggccaatgggggttcaagtcggtcccaccgttggattcttcccccgttcaggtctgggttgctcgttacattcttgagaggatcacagaattggctggagttgttctgtctctagaccctaaaccaattccgggagattggaatggtgcaggggcacacacaaattacagtacgaagtcgatgagagaagatggagggtacgaggtgataaagaaagcaatagagaagctttgattgcgtcacaacggncacatttgctgcttttggtgaaggcaacgagcgtcgtctcaccggaaaaacatnnaacccnccggttatcaacaacttttntttaatgggggtntttggcaaaccnttgggggcatcgnttaggggttngggcgttnccactttagcaaggccttggaaaaaag

SEQ ID NO: 94781 - DNA, 749 bp, Arabidopsis thaliana columbia
  unsure (1)..(749): unsure at all n locations
cttcactttctcgcactttccctctcattttcccgatcatagaaacagcattgtacagagatttcaaagaatggcacggggctcttccttcaacgtattcgcttcctactcaccaaaacccaaaaccatcttcaaagattccaaattcatttcacaatttcaggtaaaggtcgtctcctttagcttcaacattccacacaaatgaatcctcaacgagtcttaagtataagagagcgagactcaaaccaatttcatctctagactcgggaatttcagaaatcgctacatcaccttcattcaggaacaaaagccctaaagatataaacgttttagtggttggttcaactgggtacataggtagatttgtagtgaaagagatgatcaaaagagggttcaatgtgattgctgttgcgagagagaagagtgggattagaggcaaaaacgacaaggaagagactttgaagcaattacaaggcgccaatgtgtgtntctctgatgttactgagttagatgttccttgagaaatctattganaatcttaggatttggtgtttgatgtttgttgtttccctgttctcgcctagtccgtaatggaagggattaaaagattccgtggaaagattgattatgaagctacccaaaacagtccttgttncttggnaaaaatttgggtgcctaaacattttggttttgccccccngccnaattgtttttccaaaaccctttactggnatttncccnaaaaccaa

SEQ ID NO: 94782 - DNA, 604 bp, Arabidopsis thaliana columbia
  unsure (1)..(604): unsure at all n locations
aatacgactcaccttagggaaagctcgtacgcctgcaggtaccggtccggaattcccgggtcgacccacagctccgcggacgcgtcggaaagagtaatagcgcggcggagccatggttctcaagactgagctttgccgattcagtggccagaaaatttaccctggtagagggatcagatttatccgatcggactctcaggtgtttttgtttctcaactccaaatgtaagaggtatttccacaacaagttgaagccatctaagctttgctggactgctatgtaccgaaagcagcacaagaaggacgcagcacaagaggctgtgaagagaaggagacgtgcaactaagaagccttactcaaggtcgattgtcggtgctactttggaggttattcagaagaagcgagcagagaagcctgaagttcgtgatgccgctagagaagctgccctacgtgagatcaaggagagaatcaagaagaccaaggacgagaagaaggcaaagaaggtcgagttttcattaaagcaacaggagtcacaagttaagggaaattttcccaagggtccttcccccaaggttttaagatgggtgtgtggggcanncgttatc

SEQ ID NO: 94783 - DNA, 803 bp, Arabidopsis thaliana columbia
  unsure (1)..(803): unsure at all n locations
ccaatggggttttttccacaaggaattaaaggtttttgccccgaatttccaggttggcccaaaaagaaaatttttacctctgggttaagagggattcagaatttttttccggatcggaactcgtcagggtgtttttgttttttcaacctccaaatgttaaagggtattttccactacaagtttgaagccatctaaagctttgctggactggctatggaccgaaagcagcacaagaagggcgcagcacaagaggctgtgaagagaaggagacgtgcaactaagaagccttactcaaggtcgattgtcggtgctactttggaggttattcagaagaagcgagcagagaagcctgaagttcgtgatgccgctagagaagctgccctacgtgagatcaaggagagaatcaagaagaccaaggacgagaagaaggcaaagaaggtcgagtatgcatcaaagcaacagaagtcacaagtgaagggaaatatccccaagagtgctgcacccaaggctgctaagatgggtggtggtggaggcagacgttgaatggagctatagagtagcccactcttctctcttcacttatctttctttcttgttttgacattgttttgttttgtcagccattttttagttttgcaccagatctaatatattcagtttatgaaaactttttgtttggtaaaaaaaaaaaaaaaaaaaaaggccggacgctctagtggatccaagcttacgtacgcgtgcataagacgtcannnnnnnnnnnnnnnnnnnnnnnnnnnnnnnnnnnnnnnnnnacatatcat

SEQ ID NO: 94784 - DNA, 1037 bp, Arabidopsis thaliana columbia
  unsure (1)..(1037): unsure at all n locations
cagcactaatacgactcactttagggaaagatcgtacgcctgcaggtaccggtccggaattcccgggtcgacccacgcgtccgcttagagagctttggagataacgagaacaagaaagaaagagaagattatatacatagaaaaggagagatcaaatggagtgggagaaatggtacttagatgcggttcttgtgccaagtgctttacttatgatgtttggttaccacatctatttgtggtataaggttcgaaccgatcctttctgcaccattgttggtacaaattcccgcgcccgtcgatcttgggtagcagccatcatgaaggacaacgagaagaagaacatcttagcggtacaaacactacgaaacacgataatgggagggacgttaatggcaaccacttgcatcctcctctgcgcaggtctcgctgccgttttaagcagtacttatagcatcaagaaacctttaaacgacgccgtatatggagctcatggtgacttcactgttgcactcaaatacgtaaccatcctcacaatcttcctcttcgccttcttctctcattctctctccattcgcttcatcaaccaagtcaacatccttattaacgctcctcaagaacctttttctgatgatttcggcgaaataggaagctttgtgactcccgagtatgtctctgaactactcgagaaagctttcttgctcaatacggtaggtaataggctgttctacatgggcttgcctttgatgctatggatctttgggcctgtgcttgtgttcttgagctctgctttgataatccctgttccttataacctcgacttcgggtttttgttgagcaataaagagaagggtaaagtcgattgcaatggaggttgtgatgacaacttctcgcctttattatctgttgatgtgaattgaaataatgataaagctgtttgttattaaaaaaaaaaaaaaaaaaaaaaggannnnnnnnnnnnnnnnnnnnnnnnnnnnnnnnnnnnnnnnnnnnnnnnnnnnnnnnnnnnnnnnnnnnnn

SEQ ID NO: 94785 - DNA, 566 bp, Arabidopsis thaliana columbia
cagagagagaacgattagcccagttccgatatcgttcggtggcttcttcatctgaagctacgatgatgtcggtgagagcaatcaatggttgctccatcattcgcaccgccacttccgccggcggtcctcccgtctctctattccgccaccgtattcagcgcctcagagcttctcatctccgtgaattctcgaaattacgtttaaattttccactaatccgcgcggataggcggtttctcggaaatagtgatgctccgagctgttcgacttgcatacatagtctggtcgaaagtgtttccgaagagctcgaatccatcagcagacgcaagggaagccgaatgagagttcgcgccagtgtaaaggtgaaattaacaagctacggagaggttctagaggataagctagtaaaccaggagctagaggctggtttgcttctggagtttaagaaggacgcaaacagagtgttgttggcagttcttcatagacgtgatggcaagaagaattggatggtgtttgatcaaaatggtgttagttgttccatcaaaccacagcaaattacatacatc

SEQ ID NO: 94786 - DNA, 539 bp, Arabidopsis thaliana columbia
attttagggaaggctggtccgccggcaggtcccggtccggatttccggggtcgacccaggcgtccgttcttttttcttccgtttttccacacattgtctctacctttccctttttcagatttgaccctttgttttcaaaagaaacgatttttagtagccgccggggaatcaggagaatggtgtctccggagaatacgaactggcttagtgattaccctttgattgaaggtgctttctctgatcagaaccccactttcccttggcagatagatggctcagctactgtcagtgttgaagtggatggcttcctttgtgatgcagatgtgatcaaagaaccaagttcaaggaagaggatcaaaactgaatcttgcactggttctaactcgaaagcttgtagggagaaacaaagacgtgatagactaaatgacaagtttacggagttgagttccgtattggaacctgggagaactccaaaaacagacaaggttgctattatcaatgatgcaattcgcatggtgaatcaagcaagagatgaagcg

SEQ ID NO: 94787 - DNA, 1073 bp, Arabidopsis thaliana columbia
  unsure (1)..(1073): unsure at all n locations
cacacacaatcaaaagaagatcaagccaaattcataggcattgcgaattttaattgatcactctctctctctatctctgttcacacatctctcccaaagatattttggaatttgattagtaggtagaagaagatggggacgacgttagatgtatcaagagcagagctagcacttgtggtaatgtatttgaacaaagcagaggcaagagataagttatgcagagctatacagtatggttccaagttcttgagtggtggacaacctggtactgctcaaaatgttgacaaatctactagcttagcaagaaaagtcttccgtcttttcaagtttgtgaatgacttgcatggtcttatcagtcctgtgcctaaaggaactcctcttcctcttgttttacttggaaagtcgaagaacgcacttttatctacattcttgttcctggatcaaattgtctggcttgggagatcaggaatatataagaacaaagaacgagctgagttacttggacgtatatctctcttctgctggatgggatcttctgtctgcacaactttagtcgaggttggtgagatgggaaggctttcttcatcaatgaagaagatcgaaaagggactcaagaatggaaacaagtatcaggatgaggattatcgtgctaagctaaaaaaatcaaacgagaggtcacttgctttgatcaaatcagctatggacattgttgtagcagctggtcttcttcagttagctccaacgaagatcactcctcgtgtcaccggagcttttggattcatcacctccatcatttcttgttaccagttgcttccgacacgccccaagatcaaaacaccctgaagtcaatcgaggaagctggtgttaaggagaaagtcatttcagaaagtttctgttcttcttattattaaggaaattcactgctgttataaaacgcggccgnnnnnnnnnnnnnnnnnnnnnnnnnnnnnnnnnnnnnnnnnnnnnnnnnnnnnnnnnnnnnnnnnnnnnnnnnnnnnnnnnnnnnnnnnnnnnnnnnnnggaagtgcaattcaaatttgggcccggggggc

SEQ ID NO: 94788 - DNA, 416 bp, Arabidopsis thaliana columbia
gttcttgactgtccggtttgcttcgagccgcttactattcctacctttcagtgtgatgatggacatatagtttgcaatttttgctttgccaaagtgagtaacaagtgccctggtcctgggtgtgatttacccattggtaataagcgatgcttcgcaatggagagggttctcgaatcagcctttgttccatgtcaaaatactgagtttggctgcacaaaaagtgtctcttatgaaaaagtgtcaagtcacgaaaaggaatgcaactactctcaatgctcttgccctaacctcgaatgcaattacactggctcatataacatcatctacggtcactttatgcgtcgccatctttacaatagtacgatcgtttcctccaaatggggatattccactgttgatgttctaataaacatcaa

SEQ ID NO: 94789 - DNA, 1064 bp, Arabidopsis thaliana columbia
  unsure (1)..(1064): unsure at all n locations
atgatcttnnnnnnnnnnnnnnnnnnnnnnnnnnnnnnnnnnnnnnnnnnnnnnnnnnnnnnnnnnnnnnnnnnnnnnnnnnnccacgcgtccgcggacgcgtgggcggacgcgtgggcggacgcgtgggcttttaatcaccccggagtagtaagcttgcggctgatcagagctgagtgaaaaatggtgtctggatcaggaatttgcgcgaagcgcgtggtggttgatgctcgtcaccacatgctaggtcgcttggcttcggttgtagcaaaggatctgctcaatggccagaatattgtggttgtccggtgcgaggagatttgtctctccggcggacttgttcgtcagaagatgaagtacatgaggtttctccgtaagcgtatgaacactaaaccttctcacggacctattcacttccgtgctccctccaagatcttctggcgtaccgttcgcggtatgattccacacaagactaagcgtggagctaatgcacttgcccgcttgaaggtctttgaaggagttcctactccatatgacaagatcaagaggatggtcgttcctgatgctctcaaggtcttgaggctgcaggctggacacaaatactgtctgttgggtcgcctttcttctgaagtcgggtggaaccactacgacaccatcaaggagctggagaacaagagaaaggaaagagctcaagctgtttatgagagaaagaagcaacttagcaaactcagagctaaggccgagaaggttgctgaagagaagcttggatctcaattggatgttcttgcacccgtcaagtactgaattcaatcagtttatcgtatttgaatgtttttgcaagttttgctcagacattatactattatattacgaggttttgttgtatgcgattttgacttagtttatttcttgaattcggcttttcttagtttatttcttgaattcgtcttttgtcatgcgcctcctccaaaacgtttcgtgatttatttttcctctgcataaaaaaaaacaaaaagggcggccgctctagaggatccaagcttacgtacgcgtgcgtgcgacgt

SEQ ID NO: 94790 - DNA, 974 bp, Arabidopsis thaliana columbia
  unsure (1)..(974): unsure at all n locations
atgannnnnnnnnnnnnnnnnnnnnnnnnnnnnnnnnnnnnnnnnnagccgctcaagctctcaccacagtttgagaagcgaaaatggtgtcaggatcagggatatgctcgaagcgcgttgtcgtcgacgcgcgccaccacatgcttggccgtcttgcgtcgatcaccgctaaagagcttctcaatggccagaaagttgtcattgtccggtgcgaagagatttgcctctccggcggactcgttcgtcagaaaatgaagtacatgaggtttcttcgcaaacgtatgaacactaaaccttctcatggacctattcacttccgtgctccttccaaaatcttctggcgtactgttcgcggtatgattccacacaagacgaagcgtggagctgctgcattagcacgtctgaaggtatatgaaggtgttcctactccatatgacaagatcaagaggatggtcatccctgatgctctcaaggtgttgaggcttcaagctggtcacaaatactgtctattgggccgtctttcttctgaagttgggtggaaccattacgacaccatcaaggagctggagacaaagaggaaggagagagcccacgtggtttacgagcgaaagaagcaacttaacaaacttagagttaaggccgagaaggtcgctgaagagaagctcggagcacagctcgatattcttgcgccagttaagtactgagcttgtcagtagtagttttttttttttttggtaaggagcttgtcagtagtagtttgtcttggcatgttttgagccaacccaatacttttttactttttatcttttacttaggtcttgtatcgaaatttgtactcctaacattttatgcttgagttttatttattagattgtgtggctaaaaaaaaaaaaaaagnnnnnnnnnnnnnnnnnnnnnnnnnnnnnnnnnnnnnnnnnnnnnnnnnnnnnnnnnnnnnnnnnnnngtctcaatt

SEQ ID NO: 94791 - DNA, 656 bp, Arabidopsis thaliana columbia
caaaaaaagattgaaaaggtaccattaagggttttcctccggtaaaggcgtaataaaccactaaaccctttttcaggggcccaatttaacttccggtgctcccttccaagtttctttggcggtaccgttcgcggtatgattccacacaagactaagggtgaagctaaagcactttgcccgcttgaaggtctttgaaggagttcctactccatatgacaagatcaagaggatggtcgttcctgatgctctcaaggtcttgaggctgcaggctggacacaaatactgtctgttgggtcgcctttcttctgaagtcgggtggaaccactacgacaccatcaaggagctggagaacaagagaaaggaaagagctcaagctgtttatgagagaaagaagcaacttagcaaactcagagctaaggccgagaaggttgctgaagagaagcttggatctcaattggatgttcttgcacccgtcaagtactgaattcaatcagtttatcgtatttgaatgtttttgcaagttttgctcagacattatactattatattacgaggttttgttgtatgcgaaaacgaaatacctgcagcccgggggatccactagttctagagcggccgccacggcggtggagctccagaatttgtaaacgttagtt

SEQ ID NO: 94792 - DNA, 646 bp, Arabidopsis thaliana columbia
aaagaaagtgctaatattgatctttgtacatcaccagttaaggctgaggcattgtcaccacttacggctaaggcatcatcacctgttaacgctgaggatgctgacatagtatcgtcaaagcctagttctgatttgaaatccaaaactacatctgttttcatacctgatggtgaacgtttatgggaaggtgtgctccagctgagtccttctactgtgagctctgtcatcggcattctaagaagtggcgaaaagactactacaaaagagtggcctattttgctcgagattaagggtagagtctgattagatgcatttgagaagtttgttcgagagctcccaaattccaggagtcgtgctgtaatggttatgtgtttcgtctgcaaagaagagtgctcaaagacagaacaagagaacatttccgaggtggtggattcatacgctaaagatgggagggtgggttatgcagaaccagcttcaggagttgagctatacctatgcccaacccgtgggagaactgtcgagattctaaacaagattgttccgagaaaccaactcgatttcttgaaatatataaatgatgatggtcttataggtgttgttgtatggagaagaccacaatttaaaaaatcaccactatctaacaact

SEQ ID NO: 94793 - DNA, 513 bp, Arabidopsis thaliana columbia
cggacgcgtggggagtctctgagtgtgtaaatgaagcgcctttttctctcctccatcgtaatgcgcagagaagacacactacattgactgagagggaacaaacacaaagcgatgtcgcaactcttatcgactcctctaatggcggtcaactccaatcctcgctttctctcttcgtcttcagtactcgtcaccggaggttttgcagtgaaacgccatggattcgccttgaaaccgacgacgaagacggtgaagctcttctcggttaagtctcgccagacggattacttcgagaagcagaggttcggtgactcttcttcttcttccttcacctgctgaaggattgcctgctagattttacgggggtcattcgatatacaaagggaaagctgcgttaacagtggacccaagagcaccagagtttgtggctttagactctggagctttcaagttgtcaaaagatggtttcttattgctccagtttgctccttctgctggtgtacgacaatatgattg

SEQ ID NO: 94794 - DNA, 941 bp, Arabidopsis thaliana columbia
gggagctactacgcctgcaggtaccggtccggaattcccgggtcgtacccacgcgtgccgccacgcgtccgattttttgaaacttcttctcttttgcggtttcgtgttccactcctctcttcttggcccacgtgttcatcaatctctccctccgcatgtaatcgcttcgccgtcaatatcacatctttcttcttctttatctttaaaatctctttagatcgattcttttgtggattcttgaaatctccggagaaaaccactatggagacggcgactgaagtggccacggtggtgtcaactccggcggttacggttgcggcggtggcgacgaggaagagagataagccgtataaagggataaggatgaggaagtgggggaagtgggtggcggagataagagagcctaataaaaggtcaaggatctggcttggctcttactctactcctgaagcggcggcgcgtgcttacgacacggcggtgttttatctccgaggtccttctgctcggcttaacttcccggagcttttagccggagtgacggtgacgggaggaggcggaggaggagtgaacggtggtggagatatgtcggcggcgtatataaggagaaaagcggcggaggttggagcacaagtggatgcgttagaagcggcgggggcgggagggaatcgtcatcatcatcatcatcaacatcaacgtggtaatcatgattacgtagataatcatagtgattatcgtattaatgatgatcttatggagtgtagtagtaaagaagggtttaagaggtgtaatggatcgttggaacgggttgatttaaacaaattacccgatccggaaacttcagatgacgattaggaaagcaaaaaatagaaaccaaaaaaaaaaaaaaagggcggccgctctagaggatccaagcttacgtacgcgtgcatgcgacgtcatag

SEQ ID NO: 94795 - DNA, 593 bp, Arabidopsis thaliana columbia
  unsure (1)..(593): unsure at all n locations
tgttttaggtgcactatagaagagctatgacgtcgcatgcacgcgtacgtaagctcggaattcggctcgagcgaattatataaacttaataacaaaaacaattatccttccttaatcctattttgtttttacttgattcttcattctcagaaatcttgaccatgaaggaggatcgtcgtcttcctcacaaacgcgacgccttccaattcttgaaaaccaaggctgcgtacgttatcgtcatagttctaacctacgcctttggttacttctccgcctaccactatcatcaaccgctgcagcagcagctgccaccgtctacgacagccgtggaaacgacaaaacctcaagtttgttcaatcgacaacttccgagttacgactccatgcggcaatcttgttccgccggaattgattcgccagactgttattgaccggatctttaacggaacttctccgtacatcgatttcccaccaccgcacgccaagaagtttctccggccaaaaagaatcaaaggttgtggatcatacggngccgttttcgagaatctaatccgccgagtcaaacctaagacgatcgtcgaagtcgggagtttt

SEQ ID NO: 94796 - DNA, 563 bp, Arabidopsis thaliana columbia
  unsure (1)..(563): unsure at all n locations
cgctctgctggcttagcacgtgtttacgcattgtggaacttcatgtccttagtcaatgtgggggtggcttttctctgcggatatgttcattatcatagtgaatcatcagctagcaagaaaatcccatttcagccgtggaatataaacatgggtgaaagtgaatggtggatattcccagcaggactggtcgtgtgtaagataatgcaatcgcagctcataaatcgacatgtagcaaacctggagatacaagaccgctcgttgtatagtaaggattatgagctgttttggcagtcgtgacaaagtcttgtcaggtaatttttctcagaacaactaaaaacagtcctgccccaagtttggagtggggatttcagtttgttttttttgttcttttgtttctcttcttgtaattctattactccaggtgaatagaattaggatacaaaagagaaggaactctgattgttaaaaaaaaaaaaaaaaaagnnnnnnnnnnnnnnnnnnnnnnnnnnnnnnnnnnnnnnnnnnnnnnnnnnnnnnnnnnnnnnnnnnnnnnnnnnncattc

SEQ ID NO: 94797 - DNA, 570 bp, Arabidopsis thaliana columbia
acgaagcagcatagatgatcctgcgaaagcgagtttcttcgagtcataccacacacctgtccccatccataacaccattgctacgaaattggggataaaagaatctccaatcaagatcaacagccagactaagtatgcagctttatctagaggagatggagaggtttacttgaggtttactcgcaaagcaagacccgaatcaatatggaatcacgctgctggctcaatcattgtttcagaagcaggagggaaagtgactgatgcagcagggaatccattggacttttcgaaagggaagtatcttgattacaagagaggaatcgtcgttacgacgcagaaactgttgccaaggcttttaacagcagtaagagaatcaattaaagaagaagaagaggaagaagaaaaagctgcttctctaaaacttcactaacacgcaactgtaatatacttattattgttgtctttgggtatactctgttgtctctgtgtttttcacagtctatttattgaaaaccagaaacaaaaaaaaaactcacctttgatatatataagaaacactaattctctttc

SEQ ID NO: 94798 - DNA, 779 bp, Arabidopsis thaliana columbia
cccacgcgtccgaaaaagggtaaagcagcaaaaccctaataaaatcacaacaaattaacacaaaaaaaccagatcttaaaactctctctacccaccaagaggatcaaccagtctcttccccttcagattctcctttccacagtgaatggatcaacaagaccatggacagtctggagctatgaactatggcacaaacccataccaaaccaacccgatgagcaccactgctgctactgtagcaggaggtgcggcacaaccaggccagctggcgttccaccagatccatcagcagcagcagcagcaacagctggcacagcagcttcaagcattttgggagaaccaattcaaagagattgagaagactaccgatttcaagaaccacagccttccccttgcgagaatcaagaaaatcatgaaagcggatgaagatgtccgtatgatctcggctgaggcgcctgtcgtgtttgcaagggcctgtgagatgttcatcctggagctgacactcaggtcgtggaaccacactgaggagaataagaggcggacgttgcagaagaacgatattgctgctgctgtgactagaaccgatatttttgatttccttgtggatattgttccccgggaggatctccgagatgaagtcttgggaagtattccgaggggcactgtcccggaagctgctgctgctggttacccgtatggatacttgcctgcaggaactgctccaataggaaatccgggaatggttatgggtaatcccggtggtgcgtatccacctaatc

SEQ ID NO: 94799 - DNA, 455 bp, Arabidopsis thaliana columbia
atatattgagaatgagagagaattaagaaaaagagagagaaaacaatggaggaaaagcaagtgaaggagacaaggatagtgttggttccagttccagctcaaggtcatgtaactccgatgatgcaactaggaaaagctcttcactcaaagggtttctccatcactgttgttctgacacagtctaatcgagttagctcttccaaagacttctctgatttccatttcctcaccatcccaggcagcttaactgagtctgatctccaaaacctaggaccacaaaagtttgtgctcaagctcaatcaaatttgtgaggcaagcttcaagcagtgtataggtcaactattgcatgaacaatgtaataatgatattgcttgtgtcgtctacgatgagtacatgtacttctctcatgctgcagtaaaagagtttcaacttcctagtgtcgtctttagcacgac

SEQ ID NO: 94800 - DNA, 704 bp, Arabidopsis thaliana columbia
acttgcatgactctcggaggccgtgcagctgtttttttattgataggtaaaatctcaacgggtgggcataacgatctagagaaggtgacgaatatgacttacgcgcaagtagctgtgtatggtttcagtgacaaggttgggctactctcgtttccaccaagggatgatggctacgacttctctaaaccatacagcaacaaaaccggtgctatcatagacgaagaagttaggggctgcgtggccaaagcttatgagcggaccgtagagctggttgaggaactcaaagtgagagtggctgagatcgccgagcttttactagagaaacaggtgttgcatcagcatgatctctttaaaaattttaggtgaacgtccctttaagtcagctgtaggtcactaattatgaccggttccagtctgggtttgaagagactgataaggactcagccgccacccctacagtggagcctgtggtggatgatgaaaaaaacccgccgtttgaaccccaggttgttcccacgtaagagaaacgtcactgttacaactgtaaatttgatccagtatgcaattactcaattccaaaaaagcaatctcctgttcctcaatgtttttagtgaaaatcgaatttgttagccaataaccttttttgtttttcgcggcccccaattcgatatccagcctttggtttctcccttcagccagggggg

SEQ ID NO: 94801 - DNA, 789 bp, Arabidopsis thaliana columbia
  unsure (1)..(789): unsure at all n locations
gcnccacctttngnnagttccaanttncttcccccaattncttnatggttccagtgcaaggttggctaccctcgttccccccaagggttgatggctccgacttctctaacccatccggcaccaaacccggtgctatcataggccgagaagttggggactgggtggccaaagcttatgaccggcccgtagagctggttgagcaccccaaagtgaaagtggctgagatcgccgagcttttacttagagaaagaggtgttgcatcaggatgatctcttaaaaattttaggtgaacgtccgtttaagtcagctgaggtccctaattatgaccggttcaagtctgggtttgaagagactgagaaggactcagccgccacccctacagtggagcctgtggtggatgatggagctcccccgccgtttgaaccccaggttgttccgacgtaagagaaacgtcactgttacaactgtaaatttgatcaagtatgcaataacacaattcaaaaaaagcattctcttgttcttcaatgtttttagtgacgacggaatttgttagcaatgaacattttttgttttctaaattattgcttctaataagatttttatttgcttttcagtctcattctaaaagtttgcgttttgtaataaaggattgaatatgatgatgatattgttacatcttcccagnnnnnnnnnnnnnnnnnggaacnnnnnnnnnnnnnnnnnnnnnnnnnnnnnnnnnnnnnnnnnnnnnnnnnnnnnnnnnnnnnnnnnnnnnnnnnnnnnnnnnnn

SEQ ID NO: 94802 - DNA, 518 bp, Arabidopsis thaliana columbia
  unsure (1)..(518): unsure at all n locations
actnnnnnnnnnnnnnnnnnnnnnnnnnnnnnnnnnnnnnnnnnnnnnnnnnnnnnnnnnnnnnnnnnnnnnnnnnnccacgcgtccgatcacattaaccatcttcgtagcaactttactctcaatcggttttcttctaagcatagttctgatcttctctaccgttttcagtgttggaaagagaaaggaaaaggaatggagagacttccacaagtgaaagtaaaagagggggaagaaagattgataaatgaagaagtggtgaatgttacattaagaagaagtttgagattctactcaatacttcaatcacaagatggtttttggcctggtgattatggtggccctttgtttctcttgcctgctctggtgatcggcttatatgtgacggaagttttggatggaactttaactgcgcaacatcaaatcgagattcgtcgttatctctataaccatcagaacaaggatggaggatggggactacacgtagaagggaatagcaccatgttttgtacagtgct

SEQ ID NO: 94803 - DNA, 528 bp, Arabidopsis thaliana columbia
ccgaagcgagtctgactctctgagtcgtcaccaccgagtcaactctgtctccgccatggctgctgcttcactccacacttcaatctcaccacgtagcttccttcctctctccaaaccatctctaaaacctcaccgttcccaaattctactgagaaacaaacagaggaattgcgtttcgtgcgcattgatccgtgacgaaatcgacctgattccggttcagagccgagatcggaccgaccatgaggaaggttcggtggtagtgatgagcactgagacggcggttgatggtaatgaatcggttgttgtaggttttagtgctgcgacgagtgaaggtcagctttcgttagaagggtttccttcttcttcttcttcgggagctgatttaggagatgaaaagagaagagagaacgaagaaatggagaagatgatcgatcgaaccattaacgctacgattgttttagctgctggttcttacgctattaccaaattgcttaccatcgatcatgattattggcatggatggactct

SEQ ID NO: 94804 - DNA, 409 bp, Arabidopsis thaliana columbia
aaagcagacttggtcttcttcttcctctttctctacttcatacataatttcatttctcaggtttctatatattttcttctccactttttataatttatccgcttgtctgctatctcttacattaaatctaaacctaaatcattagaatctctaatccagtttataatatacttttcatttttatcaatttttttttttctttttgtgtttggtgttggcatggctggtctcgatctaggcacaacttctcgctacgtccacaacgtcgatggtggcggcggcggacagttcaccaccgacaaccaccacgaagatgacggtggcgctggaggaaaccaccatcatcaccatcataatcataatcaccatcaaggtttagatttaatagcttctaatgataactctggac

SEQ ID NO: 94805 - DNA, 466 bp, Arabidopsis thaliana columbia
  unsure (1)..(466): unsure at all n locations
gcgtccgggacgcgtggctattttctacggctgagcttattttagaatccctgaatccgattactgcgattcacattttcccgatgacttccactctaatctcctcaaacctctcttcctctttcttcccaacccaaaatatccaccgaattcgaatcccgacgacttcaattcccggaagtttcaacattcgcgcacgccgttcaaaaatcgtcgccaaatctctcgatcttcctcttcttccttttagcatgagcgaggttcttgtaccaacggagagtaaaactttgcatttatatgaagctaggtacttagctttactcgaagagtctatgaaggggaaggaggatatgtttgttccatttnantcttgganccctntttggtttnggggggctgnnaaanaaaaaggttttttttncgncnggnaaaanggggcttgggnctttttttaaaagggttgggg

SEQ ID NO: 94806 - DNA, 507 bp, Arabidopsis thaliana columbia
gtaacgccttatatgctgggcatttggactattgttcttttccagttggtacgcggatggattacctatcagagttgacagtcactatgcccatattgtgtttcattgggacaaatgatcctccagaagaacccattgttaaggtttattgtgttcagactctagcaatccagcagtatacattagacttgtgcttatgcttgccaccacctatagaaaatatgggtttggagaagtcagattctagtgtatcacgagaggcaaatcttgttgaaggcatgtcagaaccatctggacctaaacctactgacttaccttcagttgattcagtgccaaaaccttcgattatagtgaatagatcagaaagtgctaataagttgagttttccatcagcggaagccacatcacaagcaattgttccacccaacggtgaacctaaaacttctggcctgccatcttaaaccagtggtgcaggttctgcgtatgctactttaccccaactttctc

SEQ ID NO: 94807 - DNA, 717 bp, Arabidopsis thaliana columbia
  unsure (1)..(717): unsure at all n locations
ctaatttcgaatctttattcttcagaatggctttctgtaacaaactcggtggtctattgagacagaacatttcttctaacggaaatgttccggttacgtctatgctcggatctctccggttgatgtctaccaagcttttcatcggaggtctctcatggggaaccgatgacgcatccttaagggatcctaatttcgaatctttattcttcagaatggctttctgtaacaaactcggtggtctattgagacagaacatttcttctaacggaaatgttccggttacgtctatgctcggatctctccggttgatgtctaccaagcttttcatcggaggtctctcatggggaaccgatgacgcatccttaagggatgcttttnctcacttcggtgacgttgttgatgctaaagttatcgttgatagagagacaggaagatcaagggggtttggatttgtcaacttcaatgatgagggcgctgcaactgctgccatatcagagatggacggaaaggaactgaatggtcgtcacatccgagtgaatcctgctaatgataggccaagtgctccacgggcttatggaggcggtggtggtncagcggaggaggttggttggtngctattgnggaggaggttgcagctacggtggtgtaatngtggtggtactaacaanggatttggtttaaanagggtaatggtctcttaggtggttntctttnatc

SEQ ID NO: 94808 - DNA, 791 bp, Arabidopsis thaliana columbia
  unsure (1)..(791): unsure at all n locations
tcnnnnnnnnnnnnnnnnnnnnnnnnnnnnnnnnnnggtaccggttgngagtcccgactcgacccacgcgtccccccgccttttctcagatcacaaaaccctaatttcgaatctttattcttcagaatggctttctgtaacaaactcggtggtctattgagacagaacatttcttctaacggaaatgttccggttacgtctatgctcggatctctccggttgatgtctaccaagcttttcatcggaggtctctcatggggaaccgatgacgcatccttaagggatgcttttgctcacttcggtgacgttgttgatgctaaagttatcgttgatagagagacaggaagatcaagggggtttggatttgtcaacttcaatgatgagggtgctgcaactgctgccatatcagagatggacggaaaggaactgaatggtcgtcacatccgagtgaatcctgctaatgatagaccaagtgctccacgggcttatggaggtggtggtggatacagtggtggaggtggaggctacggaggaggtggtggtgggtacggaggaggaggtggtggctatggaggaggtggtgatggtggtggtggtttctaaacagaggaggtgcttgtgaagaagaagagttaatggttctgtttagttggtttcttctattgaatcttatgttagtacaaaacctgaatgggatttgctgaaaactccttactcttttttttttggttaccaatcaatttggttgaaatattttattgccaaaaaaaaaaaannnnnnnnnnnnnnnn

SEQ ID NO: 94809 - DNA, 463 bp, Arabidopsis thaliana columbia
cgcgtccgctctctctctctctctctctctcgctcgtgttgtgatccgcgtagagagattggatttgctgaggaacggtgcaatgtctcgctaccagtctcattcctttgatgacggagaaattaatccttttgcgaatcctacaagtgtcccagctgcaacgtcaaagctttctcctcttccccctgagccgtacgaccgtggtgccacaatggatattcctcttgactctggaaaggatctgaaagctaaggagaaggaactccgggaaaaggaggctgaattgaagaggcgggagcaggaaatcaagcggaaagaagatgctatagcacaggccggaattgtgatagaagagaaaaactggccaccgttttttcctctcatccatcatgacatttcaaatgagatacccatccatctgcagagaatccaatatgttgctttcacatcaatgctgggtctt

SEQ ID NO: 94810 - DNA, 660 bp, Arabidopsis thaliana columbia
  unsure (1)..(660): unsure at all n locations
aggtagacactatagaagactatgacgtcgcacgcacgcgtacgtaagctcggaattcggctcgagtttttttgtctgtgcaaagatatcccttcttcttcttcttctcccagacatcagcaagattcaggagattaaaaccttaaattaaaacaatacaaactccaaattcaccggaggaaataacttaaaacttgaatctgaaaagatgagctgcaatggttgccgtgttctccggaaaggttgcagcgagaattgtatcctccggccatgtattcaatggattgaaaccgccgatgctcaaggccacgccaccgtcttcgtcgctaaattcttcggccgtgctggtctcatgtcctttatctccgctgttccggattctcaacgtcctgctttgtttcagtccgttgctctacggagcttgtggaaggacctgtcaaatccagttaaccggagcaatcgggaattgttatggccttggaacctggaatatctgtcaagcggctggttgaaccagtgctttcgggggggttttttaagncngtnccggngtttttactacgggggngggtttcntgggtttcnttngctaaatttangnggatttnggnttnccgaattttnattccgaaaatnttcccgtgaaaattntnnttgggt

SEQ ID NO: 94811 - DNA, 1133 bp, Arabidopsis thaliana columbia
gccgtctgcggtaccggtccggaattcccgggtcgacccacgcgtccgctcttctcttttttttgtctgtgcaaagatatcactttcttgctcccaaagcaaaatcaactcttcttcttcttcttctcccagacatcagcaagattcaggagattaaaaccttaaattaaaacaatacaaactccaaattcaccggaggaaataacttaaaacttgaatctgaaaagatgagctgcaatggttgccgtgttctccggaaaggttgcagcgagaattgtatcctccggccatgtattcaatggattgaaaccgccgatgctcaaggccacgccaccgtcttcgtcgctaaattcttcggccgtgctggtctcatgtcctttatctccgctgttccggattctcaacgtcctgctttgtttcagtcgttgctctacgaagcttgtggaagaactgtcaatccagttaacggagcaatcggaatgttatggactggaaactggaatatctgtcaagcggctgttgaaacagtgctttcgcggcggttctttaagaccgatcccggagcttctcactcacggcggcggtttcgctggctttccttcgcctccatctgaagaagcatctgagatctgcaccgaaatgttgaatctccagcaaaatgattccaccgatcgtaacatctatcatcattcacgattctcaagctctagatctagatctactatggattcttcttctccgacgaaacgtaagagattatcatcggaagaccaaccatcttcggagcttgatctatctctcatccctaattttcccattaagcaaacaacaccttcttctacacggcggcgatcagtaacaccgtcgatgaactcagaggactccggggacgacggacgactacgacggcgttttgtgacaagggtgatgtgtacggtaacggaggaggagaaacgaccaagttgcttaacctttttgtttaatgcaaaacggcgtcggttttctcagagttagtctagggttttaaatgtaattttacacattttcttcctaaaaaaaaaaaaaaaaaagggcggccgctctagaggatcccagcttacgtacgcgtgcatgcgacgtcaagatcttctaag

SEQ ID NO: 94812 - DNA, 407 bp, Arabidopsis thaliana columbia
gcacgttacgcgtgggtttgcatttctttcgttatcttagtccccaacattttcactgccgtgaaaaggacgagctttctctaatggctgctttgaggtacgagcttccatcacaaggacttctacataaacgacctcttatagtcagaggcgatgatatggaattcagcaagtttggttcagatacagcctatgatctgatatacgcaagtgcagtctttctccacatgcctgataaactcgtgtggactggactcgaatgattagtagacaggttaaaaccttacgacgggagaatcttcgtgtcacatagcgtaaagttttgttcacggttaggacaagacaagtgttctcagaagctagcatgtttaggacttgagtatcttggaaaacaaacacatgatagc

SEQ ID NO: 94813 - DNA, 699 bp, Arabidopsis thaliana columbia
gtggtgatgcttggaacttcctgttagtcgactaatcctgctttcacatccatagactgggttcattttcaaaggcgaattcggccctcgcggccgctagagatttcatcagcagtttgcctgatgaggttcttggcaaaaaaatcttatctttacttccgacaaaactcgttgtatccacatctgttctgtccaagaggtggaggaatctgttccattttgtagacagctttgatttggaagactcaacacctatcagaaatgctgatagcttctctgatttcatgaaagatacagtggctctgttaagcaattgtcccatcaagagactcactctcaattcccactatgaaaaatctagtgttaaccgttggattcgcagtgccctcaaacgcggctgcttggaacttaacttgcaggcccaatatgatccattatcctgggtataggggttttccttccgcaataatacatgggttaaactcacattatctagttatcgaacttttcttcgaggcaatgttccacctgagggcagagtgtttttccctgcgctcaagacactttccctcggtgctgttgttgctaagccagctctgtataactggctcatctctggatgccctgtgctcgaggaattattcatacttgatgttggtagtggtgatgaccagccaacttggacgaggtctgtggtta

SEQ ID NO: 94814 - DNA, 505 bp, Arabidopsis thaliana columbia
  unsure (1)..(505): unsure at all n locations
gctcgccagaaacaactccttcagaatcatgctaaagagctagctggcttgaagagcggggataactggaatgatagcattcaatcaaaggagaaagttgaagcgaatttgctaagcaagtacgaggcaacaatgagaagggaaagggcattggcttattcatactctcatcagcaaaactggaagaacaactctaaatctggaaacccgatgttcatggttccaagcaacccgacatggggttggagctggttagagagatggatggctggtaggccactagagagttccgagaaagaacaaagctacagcatcaatgacattgctgcctcggtcaagggctctattaaccgcaacggagctgcaaaatctttaacccgcaattggctcaactcaaccaaacacaccttatccgnaggggggccccaggnaccaaaacagntttttttacctccanntccttagggtnaccattcctgggggnttccttgngggggtttaaagg

SEQ ID NO: 94815 - DNA, 432 bp, Arabidopsis thaliana columbia
gtcatcatctctcaacaatgcccgttgccaatcttctccgcgtcctcttggtagctggagaagctcgtttgattccattttgtctctaatggctgccctcgcttctccctccctcatcccctcttctctctgcttcgctgccgccgccgatggtccccgttccctctcttctaatttctctgccttttccgacggcggttccaatttcaggtatcacaagagcttcttgtcgctttcatcttcgtcttcttcgtctacgccttatcgaaatcgacggggccgttccctcgtcgtatttgctgcttccggagactactacgccactctcggtgtctctaaatctgccaataacaaggagatttaagctgcttatcgacggctcgctcgtcagtatcatcccgatgtgaacaaggaacccggagcaactgaaaa

SEQ ID NO: 94816 - DNA, 521 bp, Arabidopsis thaliana columbia
  unsure (1)..(521): unsure at all n locations
atgatttgccnnnnnnnnnnnnnnnnnnnnnnnnnnnnnnnnnnnnnnnnnnnnnnnnnnnnnnnnnnnnnnnnnnnnnnccacgcgtccgcccacgcgtccggggaaacaagggaaatatgatgaagtgaagaaagttttcactgagatgaagcgagagcatgtgttgcctaacttactgacttattcaactttgatcgatgggtactcgaaggggggtttgtataaagaggcaatggagatatttagggagtttaagagcgccggattaagagctgatgttgttttgtacagtgcattgattgatgcattgtgcaagaatgggttggtgggttctgctgtttctttgatcgatgagatgacaaaggaaggaattagtcctaatgttgtaacttataattccataatcgatgcctttggtcgttctgcaactatggacagatcagccgattatagcaatggtggatctttgcctttctcttcttctgctctgagtgcattgactgaaacagagggtaatc

SEQ ID NO: 94817 - DNA, 800 bp, Arabidopsis thaliana columbia
  unsure (1)..(800): unsure at all n locations
agagggtaatcgggtaatacagttatttgggcagttatcaactgagagtaacaaccgaacgacgaaagattgtgaggagggtatgcaggagctctcctgtatattggaagttttccgcaaaatgcatcagctggaaattaaaccaaatgttgtaaccttttcagcgattctgaatgcttgcagtcggtgtaactcatttgaagatgcatcaatgctactagaggagctcaggctgtttgataataaggtatatggtgttgttcatggacttctcatgggccagagagagaatgtatggctccaagctcagagcttatttgacaaagtaaatgaaatggatggttcgactgcttctgccttctacaatgccctaactgacatgctttggcactttggccagaaacgaggtgcagaactggtggcacttgagggaagatctaggcaagtttgggaaaacgtgtggtctgattcttgcttggacttacacctcatggtcttcttggagctgcacgtgcaatcggtccatgccgtggctactaaacatacgctcccattgtctatgaaggtcatgagttacctaaaagncttgagtaaaattnacctggctgggggggaaaccccagncnaaagtgggnttggaaaccgggggcacctaagaccgaccgggttnaagtncttttttaaggggaaatgggattncccccatcccncctggncaaaaatcnaaccatggggncgggtccacatccaaaccgggtnccggnggnaacaancttnggctnggggaancnnccnccctg

SEQ ID NO: 94818 - DNA, 715 bp, Arabidopsis thaliana columbia
tatagggacaagctggtacgcctgcaggtaccggtccggaattcccgggtcgacccacgcgtccggcgagagcatgtgttgcctaacttactgacttattcaactttgatcgatgggtactcgaaggggggtttgtataaagaggcaatggagatatttagggagtttaagagcgccggattaagagctgatgttgttttgtacagtgcattgattgatgcattgtgcaagaatgggttggtgggttctgctgtttctttgatcgatgagatgacaaaggaaggaattagtcctaatgttgtaacttataattccataatcgatgcctttggtcgttctgcaactatggacagatcagccgattatagcaatggtggatctttgcctttctcttcttctgctctgagtgcattgactgaaacagagggtaatcgggtaatacagttatttgggcagttaacaactgagagtaacaaccgaacgacgaaagattgtgaggagggtatgcaggagctctcctgtatattggaagttttccgcaaaatgcatcagctggaaattaaaccaaatgttgtaaccttttcagcgattctgaatgcttgcagtcggtgtaactcatttgaagtgctattgttctaaagggctaagctgttaatatagggtatggggtgtcatggctttatggccaaaaaaaatgtttggtcaactaaagttt

SEQ ID NO: 94819 - DNA, 892 bp, Arabidopsis thaliana columbia
agcaaaagcttttggtagtcgtaaccattacgccaaatcattaccgttcaactgaaagctaacagagagccctcttttcttgggaattcgattccttgtacgttatcttcttcttcttcttctctttctcaaaattcgtgtatcttctgggaaattttcagatttagatggagaaaggggttggatttgagaaagacatgaagacagtcagtgatgggtttgtcggaggttttttccctgtctctaccaccaagatcgcgtggaaatcaagaaaaagatcagcattgttgaacctagacatagcaccggaggctgttacggaggtcacaccagagaagtacgagattacagctttggataccgagtaagttggggaaccaatgaccacaactcctcttctgtccgagaaaaggaaagctctgttcgacccacttgaccccattacggacttgaccggaaaccgcccaactgcggctgatccattgttccccccgccggatttcgagactgcaaactacccaaaaggctggttgatcggtaagaagaggaagcttgtgaatgttgatgtagttgagagcatgcgtagaatagctgtcccaagaaatgaacagaaaggatcgagagatagatgggttaaacgagcagctagaagaggattcccggtgcttagagcatctacagcttcagctgctgcaagagagaagcaagagaccagagattgaaagagagaacccaatgttgaaagagcaagttgatatgcttgtgaacatgatacaagaagatgacgaagaaggagctgaagacccctaagctagttctcatcaaatttatgtctcccctataatagcggtgttctgttttttttattctttggtagatttgtctcgtcccc

SEQ ID NO: 94820 - DNA, 707 bp, Arabidopsis thaliana columbia
cgtaggacgtcgcaacaccctatagtgagtcgtattaaccacagaaaggggctgtcgctcgtctacatttacactcggagcttagaccttccaatctaccggcggcgaaaatgggtttcaagaggtacgttgagatcgggagagtagcacttgtgaactacggagaagatcatggaaagctcgtcgttatcgtcgacgttgttgaccagaacagagctttggtggatgcccctgatatggagaggatccagatgaacttcaagaggttgtctcttaccgatattgtcattggcatcaaccgtgtgccaaagaggaaggctttgatcgaggcaatggaaaaggttgatgtaaaaacaaatgggagaaaagcttatggggtagggagcttatcgtgcagaaacgtagggctaaccttaagggctttgataggttcaagatcatgttggccaagatcaagatatttggtgttgtcaggcaagagcttgcaaccccccagaaggagatccctgcctgatcaaatattatttacaagtctggtgtctttcttttttgattttggattcggaaattagtgtttttggaactatcaatatcagtatgtggtcaattatcagacattattcaagtttggtattattaaaaaggcccgaaaccatagagcgaccgctctagaggatccaagcttacgtacgcgtgcgtgcgacgtc

SEQ ID NO: 94821 - DNA, 686 bp, Arabidopsis thaliana columbia
aaagatgttatgaaaaagcaagaagagcttcctgtgtgtaaagaaggagacttgataatggatcaattagtggagctaaccagcaaaggatgtggttgtttgcttgtggttgatgaacattctcgtttgatcggtacgtcctcccatggggatctccgtcggcctctcaaggctagtggagaagcaatattccaactcagtgttggagaaatgtgcaccaggaagccgaggacaattggaccggaaccaatggcagttgaagctatgaagaagatggaatcaccgccatcgcctgtacagtttctaccagtggtcaatgaagacaacacattgattggaattgtaacattgcatggtttggtttcagctggtctctgaacacgaaggtgcctctatattgagttttatatagttgattcttttacagaaacccaaatcgagaatattggtgtaatttgattgattttcaccgccagtgaattgtattgtgtctagtagtacttcatgtattgtccatcatttactcaaagatgtgtatagagtataagaagatttcttgtatctttgtcctgccttaccttcattttcttctactaaaaaaaaaaaaaaaaaaaaaaaagggcggccgctctagaggatccaagcttacgtacgcgtgcatgcgacgtcatagctcaacgatagtt

SEQ ID NO: 94822 - DNA, 775 bp, Arabidopsis thaliana columbia
  unsure (1)..(775): unsure at all n locations
atacgactcactttagggaaagctcgtacgcctgcaggtaccggtccggaattcccggaccgacccgggcttccgctcgtctacatttacactcggagcttagaccttccaatctaccggcggcgaaaatgggtttcaagaggtacgttgagatcgggagagtagcacttgtgaactacggagaagatcatggaaagctcgtcgttatcgtcgacgttgttgaccagaacagagctttggtggatgcccctgatatggagaggatccagatgaacttcaagaggttgtctcttaccgatattgtcattgacatcaaccgtgtgccaaagaagaaggctttgatcgaggcaatggaaaaggctgatgtgaagaacaagtgggagaaaagctcatggggtaggaagcttatcgtgcagaaacgtagggctaaccttaacgactttgataggttcaagatcatgttggccaagatcaagaaagctggtgttgtcaggcaagagcttgcaaaactcaagaaggagatcactgcctgatcaaatattatctacaattctgttgtctttcttttttgattttggattcggaaattagtgtttttggaactatcaatatcagtatgtgctcaattatcagacattattcaagtttgaaaccttgtttgcaaaactcaaagaaaaaaagaaaatttaagnnnnnnnnnnnnnnnnnnnnnnnnnnnnnnnnnnnnnnnnnnnnnnnnnnnnnnnnngttcctagtaacgaaatccatccgggg

SEQ ID NO: 94823 - DNA, 483 bp, Arabidopsis thaliana columbia
aaagcacaaaacttttgcattgtcttgcaaaaataatagaacaaagaagtcgcagttgattttatggacggctaaggctgatgttgacctgacacaaaactccgatcgtgttcgattacgggtttagatttttctgagaacccttataattgtttcaacttttggatcttcacacgcataaattttcgcttcgtctttcatcatctgttctcaagtttagagtctatagtcaggaaacttggaactttaggatttgattgaaaaagcaatcttgcgatggcgaataatgcggctgcttgtgctgagagggctacaaacgatatgctgatcggtccagattgggctatcaacattgaactgtgtgacattatcaacatggaaccaagtcaagcaaaagaagcagtgaaggtgctcaagaaacggttaggaagtaaaaattctaaagtccagattcttgcttcttatgctttggaaactttgagt

SEQ ID NO: 94824 - DNA, 337 bp, Arabidopsis thaliana columbia
gaaaaacaaaaaacaaaaaactgataatatttctctctctctctctcgttgagtgtgtccgggaaataatactctgccagagacagagagaaaggctgtaacggaggatgtggtggcgaagtggccacactgacacactggtttcatgatggtgaaccacaacaatggccagcgacccactgatattgattctcgtctccgacagacagaacaagataagctcttcgttccatgactttttaggctccaagaatcctactttagcatccacttccatggctgaccataggctaccaccggataataaggcggctaaagcggcgatgactcctttcac

SEQ ID NO: 94825 - DNA, 407 bp, Arabidopsis thaliana columbia
gaaaagaaaaaaaaaaccgttcttggaagatgggtttcaaactcaactctcttttccttcgtcgtgcgcttctcatgcgtcacaatcttgtccggagccgaccaagccttggcttacgtcaagaaaccacatgtgagccaacgcaacataacggcgttagcagccgtcgccggaagaggaggaggaaaagagatgttgaaagggaggaagcagacgtgtggttgtaacttgtttcaagggagatgggttttcgatgcttcttaccctttctacgattcatccacgtgccctttcatcgacggtgagttcgactgtctcaaattcggccgaccagacaaacagttccttaagtactcttggcagcctgattcatgcacccgtccaagggttgatggggaagcgttttt

SEQ ID NO: 94826 - DNA, 489 bp, Arabidopsis thaliana columbia
  unsure (1)..(489): unsure at all n locations
nnnnnnnnnnnnnnnnnnnnnnnnnnnnnnnnnnnnnnnnnnnnnnnnnnnnnnnnnnnnnnnnnnccacgcgtccgatttactgcgctgtcaggaataatggctcgtcattatgctctcagagatggctattcagagcagatagcagaagctttgctggaaattacacttcctagattttctggagacgtcctcccaaaaacagatgctggaatggttttggcaatacgtgataggttaattgaaagcctaaagctttgctgtctctcccatttctttctacgccaaacggttcgtcctgtggaacacaaaaccttgtatctggattgcgcggagctaaattgtgtatgcttctgatatgataatgtttgttcgaattcgtgatcctatttactaacacctatgcttggccctatgactgtagaattggatacccccgttggtttatttgctgctggttgccagccaagttcaacaaatgaccctttt

SEQ ID NO: 94827 - DNA, 3438 bp, Arabidopsis thaliana columbia
actctcttctacaaagagtctggtcacactcatggccatcctccatttctctcttcctcttatcgtctctttccttcgtcctcacgcctctcctcgcttcttcctcctccctcgctctctttctcagtcccctttcctctcccgccgccgttttcaccgtacctccgccgtttcctccgccgctgttcatcaccaatcctatcgtaatcccgacgatgatgttacccgcgcggtgtctgttcctacattccaacaagcgattcaacgcctccaggaatattgggcttccgttggatgtgccgttatgcaaccaagtaacactgaggtcggagctggcaccatgaatccttgtacctttttgagggttcttggtcctgaaccatggaatgttgcttatgttgagccaagcatacgtcctgacgactctcgctatggagagaatcccaataggcttcaaagacacactcaatttcaagtcatattgaaacctgaccctggaaactctcaacagctctttatcaacagtctttctgctctaggtattgatgtgactgcacacgatatacggtttgtagaagacaactgggagagcccggtgcttggtgcttgggggttgggctgggagatttggatggatggtatggaaatcacacaatttacttacttccagcaggctggaagtcttccgttgtctccagtatctgttgaaataacttatgggcttgagcgcatcatcatgttacttcaggaagttgaccatttcaaaaagatcttatatgctgatggaatcacctatggggagcttttcttggaaaatgagaaggaaatgagctcatattatttagagcatgctagtgtggatcgccttcaaaagcatttcgattattttgatgaagaagcacgttccttgcttgccttaggacttccaatccctgcgtatgaccagcttctgaagacatctcacgcttttaacattttagacgctagaggtttcattggcgtaactgaacgtgctcgttatttcggtcgaatgcgtacgttggctcgccaatgtgcccaactgtggttagcgacacgtgagtctcttggacatcctcttggtgttgcctccgaaccagttcctcccgtttgtcacagagctgctctggaaaaagtggctgaaaaggtttctgaagatccaagatcgtttattattgagatagggactgaagagatgccacctcaagatgttatcaatgctagtgaacaactcagggtcttagtgctagaattactagagaaccaaagattgcggcatggtgctgtgaaagcatttggcacacctcgcaggctagtggttttagttgatgctatgtcctcgaagcagctggaagaggaggttgaagttcgaggaccccctgcttctaaagcttttgatgatgaaggaaatcctacaaaggctgctgagggttttagccgcagatatggcgttccattggaaaaattgtacagaaaagtttctgggaagacagaatatgtacatgcacgagttacagagccagctcgacttgctttggaggttctgtcagaagatttacctggtatactggctaaaatatcgttcccaaagtcaatgcggtggaactcttcagtaatatttagcaggccgattcgctgggttatggccttacatggtgatctggttgtgccattctcctttgctggcatctcaagtggaaatgtatcttgtggacttcgcaacactgcttcagcatcactgttggtacagaatgcagaatcctatgaagatactatgaggaattctggaatcaatattgagattgaggaaaggaagaaaatcattcttgagaagtcaaatgcactagcaaagagtgtgaatgggcgccttgttgttccgcagaacttacttaatgaagttgcaaatctcgtcgaagctcctgtgcccttaattggaaagttcaaggaatcattcttagaacttccagaggagctattaactattgttatgcagaagcaccagaagtatttttccattattgatgagagtggacagctattgccttactttattgctgttgccaatggtgcaataaatgaggatgtggtgaagaaaggaaatgaagcagttctcagggcacgttatgaagatgcaaagttcttctatgaggtggacacaaggaaaagattttctgaattccgagatcagctacagggaattcttttccatgaaaagctggggacgatgctggataagatgaaccgcctcaaaaagatggtatctaaactttgtttggccctcaaaattgatgaagatctgcttccggttgtagaggatgctgcctcacttgctatgtcagatcttgcaactgctgtagttacagaatttactgcgctgtcaggaataatggctcgtcattatgctctcagagatggctattcagagcagatagcagaagctttgctggaaattacacttcctagattttctggagacgtcatcccaaaaacagatgcaggaatggttttggcaataggtgatagattggatagccttgttggtttatttgctgctggttgccagccaagttcaacaaatgacccttttggccttagaagaatatcatatggcttagttcagattttggtcgagaaggataaaaatgtcaacttcaaacgtgttctagaacttgcagccagtgtacaaccgaggaaggttgaggcaaacactgtagaagatgtgtatcaatttgttactcgaagactggaacagctattggttgacaacggagtaagccctgaagtagttaggtctgtcctagcagagcgtggaaacaatccttgtctggcagcacggactgcatacaagacggaaaagctaagcaaaggtgagatgtttccgaagatagtggaagcatattctcgtcccacacgcattgtccgtgggaaagatgttggtgttggagttgaggtggatgagaatgcatttgagactccccaagagagaacgttgtggagtacttacacctctatcaaagatcgaattcacactggcattgaaatcgaggagttcaccgagatatccatgcaattggtggagccactcgaggatttcttcaacaatgtatttgtaatggtggaggaagaaagagtgaggaagaacagactcgctctgcttaataacattgccaatcttcccaaaggagtcattgacctctcatttttgcccggattttgatctttacttgtttcataatcccactccggaatcatcaattcattgacctctcattttttcttgtttcataacctcatatagttttgtgttcactgagcaaaaattcaaactaaaacttgtgcaatggaatactttaaaaacagtttcaaaacctcaataaaaagatttcaaaagatttttagataaaaaaaaaaaaaaaaaaa

SEQ ID NO: 94828 - DNA, 542 bp, Arabidopsis thaliana columbia
  unsure (1)..(542): unsure at all n locations
ttgatggatccatttcgaagcaccagggaatccgttacttgtttgaagacggatcacgacttgttttccgtctctctggaactggctcagaaggagcaaccatccggctttacatcgaacagtacgaaaaggatgcttcaaaaaccggccgagaatcccaggaagctttgtctcctctggttgacttagctctaaagctgtcgaagatggaagagttcacaggccgcattcagcccccccaccgtcattaacaataagaagggctcaagcctcaacgacctcaaaaccattcaccttttccgtctatatgatgtttccttcttatactatccaagttacattataagaataattagtctcagggagaatttgtatttctcatcagaattctgaacaaccaagactgatttcttgagttgttgtgaggcttatacttgtacggatttggctttctcagttttgttactactgcggccgcgtaattncgatgatgnnnnnnnnnnnnnnnnnnnnnnnnnnnnnnnnnnnnnnnnnnnnnnnnn

SEQ ID NO: 94829 - DNA, 774 bp, Arabidopsis thaliana columbia
  unsure (1)..(774): unsure at all n locations
gctcacaagaacaagggaaatattgacggtttcgctaaactggtgtcagttgaagacattggccgccagaatggggttgcctacggtcgtcactattccactcgttccgtctattagaatgtagacgcaggtaaagctaaggaactgatggagcatttggtcaaattgcaatcttcaattcctgaagttaacaagattgtgaaaggaattcgttcggacgtggcaagccgtcgccagtgctgatgaattcgagtacaaagatccaggtgatggatccatttcgaagcaccagggaatccgtcacttgttggaagccggatcccgacttgttttccgtctctctggacctggctcagaaggagcatccatccggctttacttcgatcagtacgaaaaggatgcttcaatcaccggccgagaatcccaggaagctttgtctcctctggttgacttagctctacagctgtcgaagatggaagagttcacaggccgatcagcccccaccgtcataacataagaagggtcaagctcgacgactctaaccattcaccttttcgtctatatgatgtcctcttcttatagctatccctagttccgttataagaataattagtctcagggagaatttgtatttctcatcagaattctgaccaaccaagtctgatttcttgagttgttgtgaggctatatacttgtcgcgatttggcggccgcgaattcctgcaggacggggcagcctctagttactagagcgtccgcccccgcggtgcngctc

SEQ ID NO: 94830 - DNA, 396 bp, Arabidopsis thaliana columbia
ttcatgattggaccgatgaagattgtgtcaagattcttaagaattgttggaaatcactaccagaaagcggtaaagtagttgttatagaattagtcactcctgatgaggcagagaatggagacatcaacgcaaacattgcctttgacatggacatgttaatgttcacacaatgttccggaggaaaagagagatcaagagctgagtttgaagctttggctgcagcttctggctttacccattgcaagttcgtttgccaagcttatcactgctggattattgagttctgtaaataaaatgtgtgaaatgtaaaacaaaatcgtcgttaattatatatttccatctttgttgccattctttcttgatatctttgtcttcgagtaataaaagtgttttaat

SEQ ID NO: 94831 - DNA, 445 bp, Arabidopsis thaliana columbia
catgattggaccgacgaagattgtgtcaagattcttaagaattgttggaaatcactacctgaaaacggtaaagtggttgttatagaattagtcactcctgatgaggcagagaatggtgacatcaatgcgaacattgcctttgacatggacatgttaatgttcacccaatgttctggtggaaaagagcgatcaagagctgagtttgaagctttagctgcagcttctggcttcacccattgcaagttcgtttgccaagcttatcactgctggattattgaattctgtaaataaaatgtgtgatacaaatctaaatcgtcgtttctagtatttttcttttttgttgatatgtgattatcgttgttatttcttattttcatatttgtttgaaatggtcatgcatgtctttgtcttcaagcaatctagcaataaaaataaggttttatat

SEQ ID NO: 94832 - DNA, 1049 bp, Arabidopsis thaliana columbia
ccggaacctcggggcgttccacgcgtccgcgaacaatcactttcaggatattggatcccttgcttctcaagtttttgtcaatttcgacagtgtcttccttaatacctgggcacaattgaaagatgtggtgctagaaggaggagatgcgtttgggcgtgcacatggtggcatgaaactctttgactatatgggtacagatgagagattcagcaagctttttaaccagactggattcacaatcgcggtggtgaagaaggctcttgaagtttaccaaggcttcaaaggtgtgaatgtgttggttgatgtgggaggtggagttggtaacactcttggtgttgttacttctaaatatcccaatattaagggtatcaactttgatctaacttgtgccttggcacaagcaccctcttatcccggtgtggagcatgttgccggagatatgtttgtggatgtcccaaccggagatgctatgatcttgaaacgtatacttcatgattggaccgacgaagattgtgtcaagattcttaagaattgttggaaatcacttccagaaaacggtaaagtggttgtaatagaattagtcactcctgatgaggcagagaatggggacatcaacgcaaacattgcctttgacatggacatgttaatgttcacacaatgttccggaggaaaagagagatcaagagctgagtttgaagctttggctgcagcttctggcttctcccattgccagtttgtttgccaagcttatcactgctggattattgagttctgtaaataatatgtctaaaattataattaaaactaaatcctcataattgttaatttcatctgtatttcagttttttgtttgaaatggtcatgcctctctttgtctttcgaggcaatatgaaataaaaatcttttctatttttgtatgaatagtaccccttttattttatgggtgtgttggtaaaatagtcattttttcaaacttaatttagaaaataggcattttactattcatatttcccggcacaagatgctctatgttatgtctgcctcatcca

SEQ ID NO: 94833 - DNA, 583 bp, Arabidopsis thaliana columbia
  unsure (1)..(583): unsure at all n locations
aaaacaaggaggagatggaacaagcccccaaatttttcagattttgtcaagctttagaaaataaaggtttctttgttgccgtagaacgccctgagacactcatcaaccaagaaactgccgttgaagacccgccagatgactccccaataccttactacccaagtggcaaccctcaaaagctagcgttctggttcaaagaagattctgaagcttccagagctaaatataaacaagttagaggtccaaaacgcccaatctgaaaacaaacccagtatccttagttaatcacatgccctatttatgctatatatgatgcttcctttctatctttctctggacttactcaacgcctatccttccctccaatttccaccgcttgcggcttctatttttttggtgttagatttggatatataagatccccctttaaaagaaaccattatgaagtggttataatacccatataattccctccgtnnnnnnnnnnnnnnnnnnnnnnnnnnnnnnnnnnnnnnnnnnnnnnnnnnnnnnnnnnnnnnnnnnnnnnnnnnnnnnnnnnnnnnnnnnnnnnnnnnnnnnnnnn

SEQ ID NO: 94834 - DNA, 431 bp, Arabidopsis thaliana columbia
cgttccgttgtgtttcaggacgacgcataggggaaaaaaaattgaattctttctctccaagcgaaactagggtttcgaaagtctctgtctcatcaaagcttcgaaaagaaagtgattgcattaagagaaacattgggataaaagatgagctttactcaggctaattgttttcgaccatcctactatcctgcaaggataacacgaccaaattgcatctccagtgtacctattaggtcttcagtacgctttgatcacttcccgcgtacctcgtttactcttcgagctactgctgcagtgtctactcagttttcgcctcttcttgatcatcgccgtcgtttacctactgggaaatcgaaacaaagttctgctgtgtgcttatttggtgggaaagataaacctgatggtagtgatgagatatcgccatggaaagc

SEQ ID NO: 94835 - DNA, 466 bp, Arabidopsis thaliana columbia
  unsure (1)..(466): unsure at all n locations
gtcttcaattcgntccaaccngccccgatagccgcagctttgtttcaactattcgatcaaaacgataccctgtgaccgccttccaatggcatccagagaaaaatgcattcgaatggggatcatctgaaatcccacactctgaggacgcaattcaggtgactcaacatgctgcaaattatctagtcagtgaagccagaaagtcaatgaacagaccatcttctgagaaagtgctgagcaatctcatctacaactacaagcctacgtactccggatacaaagggagcggtgacgacgaggtttatattttcacgtaacaaagatcccttctctgtgtgttttcgccaaaacatagcaatttatattagttactaagagcaatacagtgtttctccttatccaccattgattgtaagttgtaaccaacgtgttgaactataatttaaaaaaacacagtatagatcacatg

SEQ ID NO: 94836 - DNA, 610 bp, Arabidopsis thaliana columbia
  unsure (1)..(610): unsure at all n locations
agttgaactaaaggagaaagatgcagagaagtcaaaggaggaagctgctaggggaggtttagatactcttcaaaaggttgaggagctcgagaagatgctggaacatgcgaaggagagcaaatgacatgcatgctggagaagtatatggagagaagtcaattttggccactgaagtaaaagagcttgaaaaccggttgctcaacttatcagaagaaagaaacaaatctcttgctatccttgatgagatgcgaggaagtctcgaaataagactagcagcagcactggagttgaaaaagactgctgagaaagaaaagaaagacaaagaagattctgcacttaaggcacttgctgagcaagaagccaacatggagaaagtggtccaagaatcgaagcttctacagcaggaggcagaggaaaattccaagcttcgagattttcttatggatccgtggtcagattgtttgataccttacaaggggaaatttctntnatctgtcaagatgtgaanctnttgaaagaaaantttgaaaccgngtgccttnanccaatcggttctcctnaagcttcnctnagttncttncgggtcatnttttgaaaanttttggtcccg

SEQ ID NO: 94837 - DNA, 333 bp, Arabidopsis thaliana columbia
cgcgaaccagcgatttaagcactcccaactctcactttctcccttctcccttctcggggggggcattcactgaaatcagcagatttggggcttggaacgagaggagatggatcgtgttggcagtctaccaaacgagcttctttctcatatactgtcattccttaccacaaaggaggctgctttgacttctcttctctccaagaggtggcgctatctcattgcttttgttcctaatcttgcttttgatgacattgtctttcttcatcccgaagagggcaagccgcaaagggatggaaggtggcggagctttatttattttgttatagggtgttg

SEQ ID NO: 94838 - DNA, 690 bp, Arabidopsis thaliana columbia
cggggcgaccgcacgcgtccggcacacacgactgtatttttttctttattctgattgtttctacatatttgcagtacgttcgtttttgtgttggggggggttgcgaactcaacggtagagtactcggcttttaagtgcgactagcatcttttacacatttgtatgaagaaaaggattcgtccagatctgcggtagagtttgtaagaccacgactgatcctgaaaggaatgaatggaaaaaatagcatgtcgtatcaagggagaattcagataacatttttttttgctttcctgatcggtacaatcttattttgatgtcgaaaaaaaaaaaagaattccaatttgggtcaagtgaataaatataaatggatggataaaaaaaccagttttccttattccaggaaaaaaaaagaaacgagcttccattcgtaatttgaaaaattaccccaactaattaaatgttaaaaatagattagtgcctaatacgggtatgggaaggcatttttttcttgcgtgttattatcaattttttcatgagtcctaattattgttttaactagtccatttggattaggttggagtgtgtaaaagaagcagtatattgataaaaaatatatatatttccaaaatcaaaagagcgattaggttaaaaaaataaaggatttctaataatcttgttttgttattctat

SEQ ID NO: 94839 - DNA, 835 bp, Arabidopsis thaliana columbia
  unsure (1)..(835): unsure at all n locations
caagaaagttcccattgtcgtctccgagaccggatggccttccaacggtgacccgcgggaagtcggagccacctgcgacaatgctcgcaagtacaatgggaatctgatcaagatgatgatgagcaagaagatgaggacgcctattcgacctgagtgcgatctcaccatcttcgtctttgctctctttaacgagaacatgaagcctggaccaacctccgagaggaactacggtctcttcaaccctgacggaactccggtttactcacttgggatcaagacctcttccactcatagtagtggtagtggtagcagcaactccactggtggtagtagcagtggcggtggcggtaacactggtggctcttccagcggtggtggcatctatcagccagtcacgggtaacccatcaccggattacatgtccatttcctccgccgggggaaaaggcagattcgttgagtgtgtgttgttcttcttcttgctttgcatcatcaagcttcggttgtaaaagcttctccactagatctcgtcggctttgtacttttactcggttgatgacgtgatatagcccccaaatttaatttaattagttttgtgttggtgttttggtcggaggatgatttaggagacataccatctttgttgtgccgacctcctctccaactcttttcttttttccttttccatcctcctttttcttgtttaagcatagattatttaaataatgaatcttagttgattaacaaaaaacaaaaagnnnnnnnnnnnnnnnnnnnnnnnnnnnnnnnnnnnnnnnnnnnnnnnnnnnnnnnnnnnnnnnnnnnnnnnnnnnnca

SEQ ID NO: 94840 - DNA, 502 bp, Arabidopsis thaliana columbia
cgactcactttagggaaagcacgtacgcctgcaggtaccggtccggaattcccgggtcgccccacgcgcccgcaaaatctgagaacaaggtctgcttcgattgtagtgcgaagaatccaacttgggcatcggttacatatgggattttcctctgcatcgattgttcagctactcaccggaatcttggtgttcatatcagcttcgtcagatcaacgaatttagactctgggagcccggagcagctcaggacaatgatgtttggtggtaacaaccgtgctcaggttttcttcaagcaacatggatggactgatggtggcaaaattgaagctaagtatacttcaagagccgctgatttggatcggcagaattcttgctaaagaagttcgccgaagcgattgcggaagacacgaattccggtctttgtgagatgtgggggggggggctggtaagagtggccgagagaggggatggggggcggagggcggttggctggagggcgggg

SEQ ID NO: 94841 - DNA, 1633 bp, Arabidopsis thaliana columbia
atcaatatcgatacccccaaaaaaaaaaaaaaacagctacaaagaagtgagaattgacacagcaaatgggtcttccgggaaaaaataaaggtgcagttttgtcgaagatagcgactaacaatcaacacggagagaactcagagtactttgatggatggaaagcttacgacaaagatccttttcatctttcccgtaacccccatgggatcatccaaatgggtcttgcagagaatcagctttgcttagatttgatcaaagattgggtcaaagagaacccagaagcttctatttgcacccttgaaggtattcatcagtttagcgacatcgctaatttccaagactaccatggtcttaagaagtttagacaggcaattgcacatttcatgggaaaagctagaggtggaagagtgacttttgatccggagagggtggttatgagcggaggagccaccggagccaatgaaacaatcatgttctgccttgcggatcccggcgacgttttcctcattccctccccgtactatgccgcatttgatagagacttgaggtggcggacaggtgtcgagataatcccggttccttgttcaagctccgacaatttcaaattaaccgttgacgccgcggaatgggcttataaaaaagcccaagagtccaataaaaaagtcaaaggtctgattttgaccaacccatcaaatccactcggtacaatgttggataaggacacactcacgaacttggtccggtttgtcacgaggaagaacattcacctagtcgtcgacgagatctacgccgccacagtcttcgccggaggagatttcgtgagcgttgctgaggtggtcaatgatgtggacatctccgaagtcaacgttgacttgattcacattgtctatagtctttctaaagatatgggacttcctggttttagagtcgggatagtctattctttcaatgactcggtcgtgtcttgcgcaagaaaaatgtcaagtttcggacttgtttcgtctcagacacaactcatgcttgcttcgatgttgtccgatgatcagtttgtggataattttctaatggaaagctcgagaaggttggggataaggcataaagtttttaccacggggatcaagaaagcagatattgcttgtttgacaagcaacgctggtttatttgcgtggatggatttgagacatctactgagagatcgtaactcgtttgaatctgagatcgagctttggcatataatcatcgatagagttaagctcaatgtgtctcctggctcttccttccgttgcacggaacctggatggtttaggatttgctttgccaacatggacgatgatactctccatgtggcgcttggacggatccaagatttcgtgtctaagaacaagaacaagatcgtcgagaaagcatctgaaaatgatcaggtaatccagaacaagagtgctaaaaagctgaaatggacgcagaccaatcttcgactaagtttccgacgactttacgaggatggtctctcgtctccagggataatgtcaccacactcacctcttctccgagcatgaaaatcttaaggcataacagttgagagattggattaactcgttcgcgtttcactccgggtgaaataatcttaaattag

SEQ ID NO: 94842 - DNA, 422 bp, Arabidopsis thaliana columbia
tatcggaatgatttttgaggaatggagatttgccgactcttactgttctatcagctggccatgctatgcatgtgtttatcaatggtcaattatctggatctgcatatggtagtttagactctcctaagctaacttttcggaaaggtgtgaatctaagagctggtttcaacaaaattgcgatactaagcattgctgttggtctcccgaatgtgggtccacattttgagacatggaatgctggagttttgggtccagtttcattgaacggtctcaatgggggacggagagatctatcatggcagaaatggacttataacgttggtcttaaaggagagtctctgagtcgtcattcacttagtggtagctcatcggttgagtgggcagaaggtgcatttgttgcacagaagcaaccacttacttgg

SEQ ID NO: 94843 - DNA, 440 bp, Arabidopsis thaliana columbia
atttcattaaatattagtattcatttataatgcacatgcgttgattggtgttacttcttttcatgatctttttttgtttgattattttactctgttctgactcttagaatagtattcaatcatataagcaattcttcaatgtgttctgttgctgaagtcaacgacaaaccatgtggatcatttatgtgttcagtcactttctttttgcattttgataacttgtttaatttatggtttgctctttgctagatcaatgcttgcaatggcttctactgtgattacttctccccaaacaaggcttacaagcctaaaatgtggaccgaagcctggactggatggtttacaaagtttggaggcccagttccttaccgcccagctgaagatatggccttttccgttgcatggtttatccaaaagggtggatctttcatcaactacta

SEQ ID NO: 94844 - DNA, 1684 bp, Arabidopsis thaliana columbia
  unsure (1)..(1684): unsure at all n locations
atacgactcactttagggaaagctcgtacgcctgcaggtaccggtccggaattcccgggtcgacccacgcgtccgcttgtttgctctgtttctggttctgtctcttacgatagcagagccattaccatcaatggcaaaagaagaatccttatctctggatctattcactaccccagaagtactcctgagatgtggccagatctaattcggaaagcaaaggatggaggcttagatgtgattcagacttatgtgttctggaatgggcatgagccatctcctggaaaatattatttcgagggcaactatgatttggttaagtttgtcaagttggtccaacaatctggactctatcttcatctaaggattggtccttatgtctgtgctgaatggaacttcggaggatttcctgtttggcttaagtacattccagggattagcttcagaacagataacggtcctttcaaggctcaaatgcaaagattcaccacgaagattgttaacatgatgaaagctgagaggctttttgaatctcaaggcggtcctataattctctctcagattgaaaatgaatatggaccaatggagtatgagcttggtgcaccgggccggtcatacaccaactgggcagctaagatggcggtggggctaggcactggtgtcccttgggtcatgtgcaaacaagacgatgctcccgaccccattatcaatgcttgcaatggcttctactgtgattacttctccccaaacaaggcttacaagcctaaaatgtggaccgaagcctggactggatggtttacaaagtttggaggcccagttccttaccgcccagctgaagatatggccttttccgttgcaaggtttatccaaaagggtggatctttcatcaactactatatgtatcatggtggaacaaactttggtcgaactgctggtggtccgtttatcgcaactagctatgattatgatgctcctcttgacgaatatggacttgaaaggcagcctaagtgggggcacttgaaagatttgcatagagcaattaagctgtgtgaaccagctttagtatcaggagagcccacaagaatgcctctcggaaactatcaagaggctcatgtgtacaaatcaaaatctggagcttgttctgcattcttagcaaattataatccaaaatcttacgccaaagtttctttcgggaacaatcactacaatctccctccgtggtctataagtattctcccagactgcaaaaacacagtttacaacacagccagggttggtgctcaaacttctaggatgaaaatggttcgggttcctgttcatggtggtttatcttggcaagcatacaatgaagacccatcaacttacatcgatgagtcattcacaatggtcggattagtggagcagataaacactacacgagacacttcggattacctgtggtacatgactgatgttaaagttgatgccaatgaaggatttttgaggaatggagatttgccgactcttactgtcctatcagctgggccatgctatgcatgtcgtttatcaactggtcaattatctggatctgcatatgggaggtttagactctcctaaggttaactttccgggaaaggttnttaantntaagggctgggtttcaaccaaatttcnggtantaaggatttnntgttgggttnccccaatt

SEQ ID NO: 94845 - DNA, 1238 bp, Arabidopsis thaliana columbia
  unsure (1)..(1238): unsure at all n locations
ttaggtacaactatagaagagtctatgacgtcgcctgcacgcgtacgtaagctcggaattcggctcgagggccatgctatgcatgtgtttatcaatggtcaattatctggatctgcatatggtagtttagactctcctaagctaacttttcggaaaggtgtgaatctaagagctggtttcaacaaaattgcgatactaagcattgctgttggtctcccgaatgtgggtccacattttgagacatggaatgctggagttttgggtccagtttcattgaacggtctcaatgggggacggagagatctatcatggcagaaatggacttataaggttggtcttaaaggagagtctctgagtcttcattcacttagtggtagctcatcggttgagtgggcagaaggtgcatttgttgcacagaagcaaccacttacttggtacaagacgactttctctgctccagctggagattcgccattggctgtagacatgggaagcatgggaaaaggtcaaatatggataaatgggcagagcctgggacgtcactggcctgcatataaagcagttggttcttgcagcgagtgttcttataccggaacattcagagaggacaagtgcttaagaaactgtggagaggcttctcaaagatggtaccatgtcccaaggtcgtggctaaaaccaagtggcaatctattggttgtctttgaggaatggggaggagacccgaacggaatcacgttggtcagaagagaagtggacagtgtatgtgcagatatctatgaatggcaatcaacgctggtgaactaccaattgcatgcttctggaaaagttaataaaccattgcatcccaaagcacatttacaatgcgggcccggacaaaagatcaccaccgtgaagtttgctagtttcgggacacctgaagggacttgtggtagttaccgtcaaggaagctgtcacgcccatcactcctatgaccggctttcaaccaaactttggtgtttgggcagaaccttggtgttctgtaactgtagccccccgcaggagttgtttggtggagatccgtgtccaaatgtgatgaagaaactcgcgggtggaagccgtttgtgnttaaatgnaagcagacgnaaccagcaattcaaaaggctttaaaggtgggtacttnngggnttttttnccaggtttntgatgganttgggatnttttttgtnggcaacccanaggngntngggntttttnntggg

SEQ ID NO: 94846 - DNA, 652 bp, Arabidopsis thaliana columbia
  unsure (1)..(652): unsure at all n locations
gcccccnnccccatgccctncacaaccttnnttgccaaccggttccgnaactnnncccccgggatttttggtggaacccngtcccnaaatgtgntgaggaaccccccggtggaacccgtttgtncntaaatgaaaccagccncaaccagcaatccaaaggcctggtaaaggtggtaccttacgcattcttaccagggtccctgatgggattaggtatgtttttatgccgaccaccaagaagaagttggggtttttctagctccttattttctcccggtggaggttgttcaaagggacgcagcacgccgttcaccaattttgcagagttgtgatttatatgtaaataagcttgggaagggtttgttattgtaacccgagaaagaagatgaagaagaagaagaagctctttgagactgcagaatctaagtccacccccacactcttttaggtaggagcaaaactgggattagtttattctctgagttttgctttgaacgtgtttgttgttcctgttgttgtagtcgatactattagatgagacattctctgcaattatctcagtgctaaatttatgtaaaaaaaaaaaaaacaaacaccaagggcggccgctctataggatccaagcttacgtacgcgtgcatgctacgtcata

SEQ ID NO: 94847 - DNA, 908 bp, Arabidopsis thaliana columbia
  unsure (1)..(908): unsure at all n locations
cagcactatacgactcactctatggaaagctcgtacgcctgcaggtaccggtccggaattcccgggcccaaagcacatttacaatgcgggcccggacaaaagatcaccaccgtgaagtttgctagtttcgggacacctgaagggacttgtggtagttaccgtcaaggaagctgtcacgcccatcactcctatgacgctttcaacaaactttgtgttgggcagaactggtgttctgtaactgtagcaccggagatgtttggtggagatccgtgtccaaatgtgatgaagaaactcgcggtggaagccgtttgtgcttaaatgaaagcagacgcaacagcaatcaaaagactgtaaaggtggttacttacgcattcttacaggtttctgatggtattagtatgttttatgaagacaacagaagaagttggtatttttctagctccttattttatcacggtggaagttgtacaaagggacgcagcacgccgttcaacaatttgcagagttgtgatttatatgtaaataagcttgggaagggtttgttattgtaacccaagaaagaagatgaagaagaagaagaagcacattgagactggagaatctaagtccatgtgtagattcttttggtaggagcaaaactgggattagtttattctctgagttttgctttgaacgtgtttgttgttgctgttgttgtagtcgatactattagatgagacattctctgcaattatctcattgctaaatttatgtaatggtttttctttctttctatggaatgaagcatatcagtcttgaagtaaaaaaaaaaaaaaaaagaaacaaaagnnnnnnnnnnnnnnnnnnnnnnnnnnnnnnnnnnnnnnnnnnnnnnnnnnnnnnnnnnnnnnnntgcaacccgnnnnntt

SEQ ID NO: 94848 - DNA, 923 bp, Arabidopsis thaliana columbia
acccgtcaaaaaaaaaacaagttttcttctttttacactcaagaatataaattccctgttctccagatcttttctcaagaaaatttaaagctttaacttaagaaagcttgaacctttctcttccaaccacatcttccttctttttatcctctagctcaacttagaaagaatagaataaagtggcaaaaccgaaagtgaaccaacttgtagtaaattaatagttatgggttcgaaacctaatgccatgaagaatgtggtggctatggcggcagtttctgctctgttccttctagggtttcttgtttgctctgtttctggttctgtctcttacgatagcagagccattaccatcaatggcaaaagaagaatccttatctctggatctattcactaccccagaagtactcctgagatgtggccagatctaattcggaaagcaaaggaaggaggcttagatgtgattcagacttatgtgttctggaatgggcatgagccatctcctggaaaatattatttcgagggcaactatgatttggttaagtttgtcaagttggtccaacaatctggactctatcttcatctaaggattggtccttatgtctgtgctgaatggaacttcggaggatttcctgtttggcttaagtacattccagggattagcttcagaacagataacggtcccttcaaggctcacatgcaaagattcaccacgaagattgttaacatgatgaaagctgagaggctttttgaattctaaggcggttctataattctcttttagatataaaattaatatttaccatattatttattatcttgttgcaccgttcctttcattcaccaactttgctttcttatttttctgttttttctaatctatctttatatctttatttctattatcaattctatatctttttctt

SEQ ID NO: 94849 - DNA, 423 bp, Arabidopsis thaliana columbia
  unsure (1)..(423): unsure at all n locations
aaaacaaaaccaactcagacgaatgtaattttttcttcttgagtgaattgttgtaaaaaaatgatgatcggagaatctcatcgtggttttaatccaacggttcatattcctccatggccactttctgaagatctaacggtgtctgatatttacggaagtccagacggaggaagtagtatgatggaagctttggctgagttacaacgttatcttccgtcaaacgaaccggatccggattcagatccggatctctcgggtccggattcaccaatcgatgcttatacatgcgatcattttcggatgtatgagtttaaagtgagacgttgtgctcgtggccggagccatgattggaccgggagtgtccttacggtcatcccgggggaaaaagctcgccgtcgtgntccctcggaagtttcattaatt

SEQ ID NO: 94850 - DNA, 509 bp, Arabidopsis thaliana columbia
  unsure (1)..(509): unsure at all n locations
cnnnnnnnnnnnnnnnnnnnnnnnnnnnnnnnnnnnnnnnnnnnnnnnnnnnnnnnnnnnnnnnnnnnnnnnnccacgcgtccgaaggaattagtcttttcacccatttttctctctctgtgtggcttcttcttcttcttcttcttcctatcaaaatcatcatcatcatcttctctatattactaaaatagagagagccaacaaaagagaggagagggcgtaaaacagcagtcgtgtggcgcaccgtagcaccgccccctcctaacctgcgcctttcttccttctctttcattttttttttttccggcttcaggaattattcctctcctcctctctcaggtcgcttcgatcccaaggcaaaatagtttcctgatttttgattcttaccttcgattttggcttcttcttcttcttcttcagatgcattcacctagaaaactctggcggacatcaaaggaaccctagcttttctccggtcttgttatatcgcctctatcgccgccgatcgg

SEQ ID NO: 94851 - DNA, 725 bp, Arabidopsis thaliana columbia
gccgggacgcctgcaggtaccggtccggttattcccggggggacccacgcgtccgtacggctgcgagaagacgacagaagggggaagctaagtccgagtagtcacttaaccggagatcggagactcatcgttgcaacaacaacaaatttcagaagatccgaagacgaaacgatgcctataagtgcgacaatggtcggagctttgctgggtctcggtacccagatgtactccaacgccctccgcaagctcccttatatgcgtcatccgtgggagcatgtggtgggtatgggacttggtgctgtgtttgcgaaccagctcgtgaaatgggatgtgaagcttaaggaagatcttgatgtgatgctcgctaaggctagagctgctaatgagcgccgttactttgatgaagatcgggattaattttgcgtgatctttgaagtcttcagaaaagaaatatcttcccctgaactcatctcaagtgcttgttttgtctgatctttcctgtataagcgtttcttctccttctctttgacttcagctctggaggttcttttcattcactgttttcgaatatgaacctaaagatttgtgttttcacaatctgaatctgtttgtatctggttaataatggcgaaatgataaaccttgcaatccaacccccgtgaaaaaaaaaaaaaaagaaaaccccgccgctctaaaggatccaagcttacgtacgcgtgcatgcg

SEQ ID NO: 94852 - DNA, 580 bp, Arabidopsis thaliana columbia
attattggtgccggaggaatgagaaaccttttgtcgcttgcataaatggtttaacgaagcttgtgggtaggctctcgcaagaggaattaatggatcaattgtcgtcttttttgcctgcggtttttgaagcatttgggagccaaagctcggatgtccgcaagacagtggtgttctgtctagtagacatatatataatgcttgggaaagcatttttcccgtatttggaaggtctaaacagcacgcaggttcgtctagtgaccatctatgcaaaccggatctcgcaggctagaaacggtgcccctatcgacgcagacacctgacgagccgcttgtacttatggttcagtgggtttatcttgtgtcttggggtcatattccttattgtttattttgtatatgggtgtgttttccgcgtttcaattttttgggtgtaattttgcaaattggtttttccatttgttgttgcagtgtgtggtctattttgagttgttttgggggaatgtatttattgctttcctctcgtaggacaagaataaaaaaaaagggcgaccgctctagaggatccaagcttacgtacgcgt

SEQ ID NO: 94853 - DNA, 590 bp, Arabidopsis thaliana columbia
  unsure (1)..(590): unsure at all n locations
tcagncnaaccgtacccccattttgggccgaagaaaaaaaccccttgcccctccaaaaatttttaaccaagctttggggcaccccccccccaangggggtttaaggntccaattgcccccttttttcccccccggttttaaacccattttggggacccaaaagccccggatnccccaaaagcccagtggtgtcctggccaaggtaggccatatataataatgcttgggaaaagcattttttccccgtatttggaaggtctaaaaccagcacgcaggttcgtcttagtgaccatctatgcaaaccggatctcgcaggctagaaacggtgcccctatcgacgcagacacctgacgagccgcttgtacttatggttcagtgggtttatcttgtgtcttggggtcatattcattattgtttattttgtatatgggtgtgttttccgcgtttcaattttttgggtgtaattttgcaaattggtttttccatttgttgttgcagtgtgtggtctattttgagttgttttgggggaatgtatttattgctttcctctcgtaggacaaaaaaaaaaaaatgtattttgacctcgcaac

SEQ ID NO: 94854 - DNA, 360 bp, Arabidopsis thaliana columbia
ctctctcttctcatcttcttctttctctcttctctctctctctctacagcgaagaacaggacacaaattactctgtgaagcttaaaaaggtttattttttaataaaacccagaaactacaatttctaggcggcggagaaaatttggggctacttctttttggttctctttggcttctcggctctttatccccaaacccatcaataaaaaaccctaaaagacttcaaatttcttcaagattttggtcatcggaaggtttcagatttttagttgtgtaaagtctcttcctttttggtcgattctctttggtttgagtcttatcagagacttattcttcaattccaccctctggtggtgagag

SEQ ID NO: 94855 - DNA, 524 bp, Arabidopsis thaliana columbia
  unsure (1)..(524): unsure at all n locations
atcaacttcttcttttctctctctaaatttctcagagtatctaatctctctctcttctctcgttccatattatcatgcgtttcataattcagtaaattttttgaaatctgatctgttctttctgaagcttttgagagaataataaaaaatggaatctggtttctccggcggtggtggtgggtcggatttttacggcggtggtggtggtagatctatacctggaggtccaggaactgttatcaacgtcggtaacaataatcctcagacgacgtatagaaaccagattcctggaatcttctttgatcagatcggaaacagagtcgccggcggtaatggattctccgggaaaaggactttagcagattttcaagcggctcagcaacatcaacaacaacaacaacaacaaccgttttatagcaagagnttnacgntttttttcaaggctttnagcccgaattntcaggatttaattccgcgcgtgttncnnngggggnatnantagtttttggggctggcaccncgtc

SEQ ID NO: 94856 - DNA, 716 bp, Arabidopsis thaliana columbia
  unsure (1)..(716): unsure at all n locations
nnnnnnnnnnnnnnnnnnnnnnnnnnnnnnnnnnnnnnnnnnnnnnnnnnnnnnnnnnngattcctctcaatctctctttcttcttctttttctctcgctccaaattccatgtctgtgtctctttcctcctccgccgtataattcgccggaaaaattatctccctttgattttcgaacacctccgcgaactatgcgcttcttttgcccttatcctccaactacttgtcggatctgcaattcttcttgtcaattcccaaccctaatcggagctaatcacacctctgctcgtttctcttctcgttagtctctgctccatctcctcctcagatttagggatatttgcttccaatttaacaaacaaaccaagagctattctttcgttctttattctctccgtcttgtaaagtagttttagcagtgagatacatacaaatggagacttccatggggaaacccagcttcttacggaatataatggttcgcgtgcttctctttggtgttcttatcatcgttgtgagatttgcttatgttgtcaccatcaccggtgaatcatgcaatcgcggcgacttctgcttcttctctctccctgagantctcaacttttgtaacatccggtgctgcntccgnncttctgcntatcggnggccataagatttnccttcccccnggggggngannttttaaaaccacccnggggttgnttnaaaanccgntc

SEQ ID NO: 94857 - DNA, 643 bp, Arabidopsis thaliana columbia
  unsure (1)..(643): unsure at all n locations
gggcacggccccccctcgtggtcgacggtatcgataagcttgatatcgaattcgcggccgccgaacacctccgcgaactatgcgcttcttttgcccttatcctccaactacttgtcggatctgcaattcttcttgtcaattcccaaccctaatcggagctaatcacacctctgctcgtttctcttctcgttagtctctgctccatctcctcctcagatttagggatatttgcttccaatttaacaaacaaaccaagagctattctttcgttctttattctctccgtcttgtaaagtagttttagcagtgagatacatacaaatggagacttccatggggaaacccagcttcttacggaatataatgggtcgcgtgcttctctttggtggtccttatcaatcgttgtgagatttgcttaatggttggcaaccaatcaccggggaatcatgcaaatcgcggcggcttcctgcttccttctctctcccctgagaacctcaactttggcatccccggggggtggcctccggggncttcnnggaaangnggggcatcaananaaattnccccggggggggngttcnanncccccaggggggtggggnaaaaccggnaaggttaaccccccaacttcaagggnnagncg

SEQ ID NO: 94858 - DNA, 780 bp, Arabidopsis thaliana columbia
  unsure (1)..(780): unsure at all n locations
cccccccttccgggcgacggcatcgattagcttggtgtccaattcgcggccgcctctgctccatctcctcctcagatttagggatttttgcttccaatttaacaaacaaaccaagagctattctttcgttctttattctctccgtcttgtaaagtagttttagcagtgagatacatacaaatggagacttccatggggaaacccagcttcttacggaatataatggttcgcgtgcttctctttggtgttcttatcatcgctgtgagatttgcttatgttgtcaccatcaccggtgaatcatgcaatcgcggcgacttctgcttcttctctctccctgagaatctcaactttgtcatctccggtgctgcctccggctcttctgctatcgacgccatcagatctacttcccctggggatgatctctacaccaccagggattggatcaaatccgttcagttttactcctccatcttccaggatctgatcgccgacggttatctatcgcctgaatcgaagacgctttgtgtagagacggcgattggacaagaggttcactcgctcagagagattggggtgaagaactccgtcgggatctctaagaaagcttctaggccgttggtggttagaggcgaaggacatgcttttccctttgaggataacgctttcgattttgtattctccggtggtgaccgccttgggaagtcgttgaagcagttggaaattcgccgatgagattttattgggctcacttgaaaccccggnaggttttccngggtgggt

SEQ ID NO: 94859 - DNA, 688 bp, Arabidopsis thaliana columbia
  unsure (1)..(688): unsure at all n locations
cttctccataactctctctctctctccctaaacacaaccaaatacttttatctctcaggaaccccaaaaacaaatggctataatgaagaaaacttcaaaactcactcaaacagcaatgctgaagcagattctgaagagatgctcgagcttagggaagaagaatggaggagggtacgatgaagattgccttccgcttgacgtaccaaagggacacttccctgtctatgtcggagagaacagaagcagatacattgtcccaatctccttcttgacacatcctgagttccaatctctcttacaacgagccgaggaagaatttggattcgatcacgacatgggtctcaccattccttgtgatgaactcgtttttcaaaccctaacatccatgatccgatgatattttatcaatttgaagaagaaagcagaaggaggatggttaaacgaagaagccggagagcgtctcatacaaaaaaagcatctcttctctttttttaagattttttttcctttatttttaagcccatctagggttttttttacgngttaattgactcgtctaactagaaataaccccgtatgagatagngattctatgggtttngatctgtaaataaagtttgtnatgttttcctcacngatcttcgttctgtgagagangttatttaatgcaagngaangtnttcctccg

SEQ ID NO: 94860 - DNA, 1207 bp, Arabidopsis thaliana columbia
  unsure (1)..(1207): unsure at all n locations
nnnnnnnnnnnnnnnnnnnnnnnnnnnnnnnnnnnnnnnnnnnnnnnnnnnnnnnnnnnnnnnnnnnnnnnacgcccacgcgtccgctcagtcaccaaagaaaacaaaatcatgtctcgatttgctatcttagtaaccttggcacttgccattgccactgtttcggtggttatagctcaagtccctccggagaaacaattcagagtcgtcaacgaaggagaattcggtgaatacatcactgagtacgacgcaagttacagattcatcgaatcatcaaaccagagcttcttcacatcaccattccagctcttgttttacaacactacccctagcgcctacatcttagctctccgagtcggactcaggcgtgacgagtctaccatgcgttggatatgggacgcgaatcgcaacaaccccgtcggagaaaacgctacactctcactcggccgtaacggcaacctcgtcctcgctgaagctgacggacgagtcaagtggcagactaacacagccaacaaaggcgtcaccggattccaaatcttgcccaatggaaacatggtgctacacgacaaacatggaaaattcgtttggcagagtttcgatcatcccaccgatacactcctcgtcggccaatccctaaaagttaacggagttaacaaactcgttagccgtacatctgatatgaacggctccgatggtccgacagcatggtgttggacacaaaggctaaccatgtacgtaacaaaccggtacgccgtagttacggcggatggcggtcacgactccgcgtaccgtacgttcgccgttacaagagaattcgataatttaacggagccgtcagcttacgagcttctcttagaacccgcaccacaacccgctacgaacccgggtaataaccgccggttactccaagtcagaccaatcggaagcggaggaggaactttaaatctgaacaaaatcaattacaacggaacgatttcgtatctaagactcggatctgacgggagtctcaaggcttactcgtatttcccagcagctacgtatctcaaatgggaagagagatgctcattcttatccacttactttctncggcaaagaaagttgaccgcgcttagcggcgaatacagatactgccatcgtgggatgtgcaacgcatgtcctacaccaaaaggaataactcacatgagtgataaatgcgcaccacctaaaa

SEQ ID NO: 94861 - DNA, 445 bp, Arabidopsis thaliana columbia
ggaggttccaagctctgaggaactacttcagtttctgagttcttgcctctctcagatcaaatggagactcaagagcaattccaaacgccgtctcgaaatagatgttctggcattatgcacaggaatgagaccagttgtgatgattgactatggtggaaagatgcctgagctacagaatcgtttgctgtcacttcttgagctcatccgagagggtttaccagtttttaaagatctgaaggttatggttatagaggatatgatatacctcataaatgtaagaagcctgcccaagtttgtaagctccagcttagattcagaacccgagttgttcttcattgacttggaacaagatcctccaaagatggtaacacaaagctaggaaagcaatcttgggatgcagcttagatcgattcagaagctattctcttcgacatttcctttagat

SEQ ID NO: 94862 - DNA, 438 bp, Arabidopsis thaliana columbia
cgagtctctctctggaccactttttcgttcttgtaaaaaaaaactcattgggtacggttttcttagaaagctgtccgaaaagcttaaacactaaaacacatctggaataataacccaaagatcataacttttaaacctcgtacatcatcagattcattcaaactgagctttttctatgtgggcagagcaactaggggtttggtcattggatccaaccttctctgaatctctaaacggctttgggtattttggtgggtaaccctaattggcttactgatccaatggaagatcagtatccaccaccatctgatactctgttgaaatacgtgagtgagattcttatggaagagagtaatggagattataagcaatctatgttctatgattcattggctttacgaaaaactgaagaaatgttgcaacaagtcattactgatt

SEQ ID NO: 94863 - DNA, 866 bp, Arabidopsis thaliana columbia
  unsure (1)..(866): unsure at all n locations
cccacgcgtcagaaaccatctcacaaactcatcaaacctctttctcatctcatcttcaagccatctccgatcatcatcagacaatggcagcagctatggcaacagcaaccaagtgcatgtctctaaacccatctcctcctaaactccaaaaccaaaccaaatccaaaccattcatctccctaccaaccccaccaaaaccaaacgtctctctcgccgtcacaagcaccgccctagccggagccgtcttctcttccctcagctactctgagccagctttagccatccaacagatcgctcagctcgctgcagcaaacgccagtagcgacaaccgtggcttagctcttctccttcccatcgtcccagccattgcatgggtcctttacaacatcctccagccagctattaaccaggtcaacaagatgcgtgagagtaaaggtatcgttgttggtctaggtattggtggtggtcttgcagcgtcagggcttttgactccacctccggaggcttatgctgcggcagaagcggcggctgctagttcagacagcagaggacagttgttgttgattgttgtgacaccggcactactttgggttctgtacaatatcttgcagccagctttgaaccaaatcaacaagatgaggtctggggattaaaatcttatatatatataatattattataaatcatctttgggattcaaatgtaaaattaatcctttgttttatggacagttttatgtttacatttttggactaatatcgtttctcttatcggcataaaaaaaaaaaaanaanaaaaannnnnnnnnnnnnnnnnnnnnnnnnnnnnnnnnnnnnnnnnnnnnnnnnngagacctgaagtatcat

SEQ ID NO: 94864 - DNA, 530 bp, Arabidopsis thaliana columbia
ctaccactccactctttccgtctctctctctttttctctctatatacgtcgccattgttgttgcattcgaagcttttatagaagaagtaatctctctttttctctatttctctgtattactttctcttttttttttcgtgatggagaaaaacacaccggtgaggaaaccacacatgtcgacggcggatctactcacttggccggagaatcaaccgtttgagtctcccgccgccgtatcttctcgctccgccgccagatcgcaccagccgtcggatggaataagcaaagtcgtatttggaggacaagttacagatgaagaagttgagagcttgaacaagaggaagccttgttcaaattacaagatgaaagagatcacagggagtggaatattctctgtgtatgaagaaaatgatgattctgagttagcaagtgctaattccgccacatacggcagatcaagaactttccagcaaccaccagcagcaattatgagtcacatttcatttggagaagaagagattgttacaccg

SEQ ID NO: 94865 - DNA, 476 bp, Arabidopsis thaliana columbia
agaaaaaaagtttcccaaaaaacaaaaacatactcaagtttagatatggatcttgaattactgcaggatttgtccaaattcaatttcccaacacccatcaagatccgatccaaaacctcaaaaacaaagaaggacgaaggtgatgacgacgaagatgacctccgctgcagcacacccacatcccaagaacacaagattcccgccgtcgtagactctccacctcctccgccgagaaaaccccggccaccaccgtcagcaccgtcggctacggcggctctgatgatcagatcgtgcaagaggaagcttttagtgtcgacttgtgagataatcatgaatcgggaagagattgaccgtttcttctcctccgtctacaatgagacgtcgactacggctaaacggcggaagaagatacccttattgttctcgaagatgaggcttaattcaatatttaacattttttacagttttactggaaa

SEQ ID NO: 94866 - DNA, 519 bp, Arabidopsis thaliana columbia
accggctattttatatgggcaatggttgcctatggattaggtcttttaattacttacgtggctttgaacctaatggatggacccggccaaccagcattgctatacattgtccctttcacacttggaaccatgttaacgctggctcgaaaaagagacgatctttggattctatggaccaaaggagaaccagaaagagcttgtcctcaccatgtccggcttgaacagtgttttgagaaatgagacgacctggccaaaaaatgcaacactgagatatttacagggaaaaaaaaaaaaaggctttgggggttgtaacgtaagttgtaagattaattttctcttcaaatcctttttttaatcttaagttgtttatgttacttacttacatcatcattattgaagaagaatccatgatcgtcgttctttgtctaaaaaaaaaaaaaaaaaaaaaaaaaaagggcgaccgctctagaggatccaagcttacgtacgcgtgcgtgcgacgtcatagctcttctatag

SEQ ID NO: 94867 - DNA, 1132 bp, Arabidopsis thaliana columbia
  unsure (1)..(1132): unsure at all n locations
atgatcctgnnnnnnnnnnnnnnnnnnnnnnnnnnnnnnnnnnnnnnnnnnnnnnnnnnnnnnnnnnnnnnggcaattggtaccacgcgtccgcccacgcgtccgtctgcatggagtgcccgagaagcagctattgaacatgataagctactgaaggatgctatagatgaaatccctaacacaaatgatgggggtagtggtgttgtagagatcaattctatttcagctatttttttcgtagttcttgcttcgggattcctggtgattctttacaagcttatgtcttattggtttgtggagcttcttgtggtcgttttctgcattggtggtgttgagggtttgcaaacttgcctcgtcgcgttactatcaagatggttccaacgtgctgcagatacttatgtaaaagtccctttccttggacctatctcttacctcactcttgcagtttctcctttctgcattgtctttgctgttctatgggctgtataccgaggtcactcctttgcttggattggccaagatgttcttggtatcgcattgatcataactgtactacagattgttcatgtcccaaatcttaaggtcgggacagttcttctcagctgtgccttcttgtacgatatcttctgggtgtttgtctccaagaagttgttccacgaaagcgtaatgattgtcgtagctcgaggtgataagagtggagaagatggcatcccgatgctactgaagattccgcggatgttcgatccgtggggaggctacagcattattggatttggtgatattcttttgcccggtttgctaatcgcatttgctctcagatatgactggctagctaacaagactcttagaaccggctattttatatgggcaatggttgcctatggattaggtcttttaattacttacgtggctttgaacctaatggatggacacggccaaccagcattgctatacattgtccctttcacacttggaaccatgttaacgcttggctcgaaaaagagacggtcttttgattcctatgggccaaaggggaccngaaagggttnncctaccatgnccggnttaacagtgttttggaatggcggcctgccaaaaatnaacctgggntttccggaaaaaaaanggggcc

SEQ ID NO: 94868 - DNA, 334 bp, Arabidopsis thaliana columbia
cccacgcgtccggcccttttttttttttttttttttttttttttttttttttttagtcaataacaaataatttcattacatactgattaaagcggacgcgtgggaaaacgataaggagagcacgaagattgctccttcattcgatcccgccagtgagcttaaagcgtccgttgagacgaagactggtgcgaaacgactcgttgactctggaatctcaaagattccacgcattttccatcactcatctgtcgaactagcaaaccctaaaccacttccctcggacctgctacatctcaagacgatcccaacgatcgatctcggaggacgggacttc

SEQ ID NO: 94869 - DNA, 1000 bp, Arabidopsis thaliana columbia
atgatactccaggctttattccactcactttaagggaagcttgtacccctgccaggacccggcccgaatttccgggtccacccacgccttccggttaaccaacctcttgagtggaggaagaattggaccagccgcaattccggcgaaaggttattcatattaagtaattccaacctttacactgctgcagctgcaaattgaagagaccatcctatgtgtacatgcttccagatcctccagaaccacaggatctgccagagatttgtagggatgttatatggaatattcaaagcaagtgatgaattggggtaaatttctcttcgagcttttatcagaagctctagggttgaaacctaatcacccaatgacatggactgctctaagggtttgctcatgctctcccactactacccaccgtgtccagagcctgacttaactttaggcacaagtcagcactccgacaactcttttctcactgtccttcttcccgatcagatcgaagggcttcaggttcgtcgtgaagggcactggttcgatgttcctcatgtttccggcgctctcatcatcaacatcggagatcttttacagcttataacaaacgacaaattcatcagtttggagcacagagtattggcgaacagagcaacaagagctcgagtgtctgtcgcatgtttctttaccactggagtaagaccgaatcctagaatgtacggaccgattagagagcttgtgtctgaagaaaatcctccaaagtacagagagaccacaattaaagactacgctacttacttcaatgccaaaggacttgacgggacctctgctttgctccattttaagatatgaaacatggtgagctactactgtttcacacatatacgacatgaccatatatttaataattcatttgcagaaaaaaaatacttcaaaaaaaaaaaaaaaaggccgtccactgtatccaagcctaggtacgcgtgcgtgcgaagtcatgctgttctatagt

SEQ ID NO: 94870 - DNA, 467 bp, Arabidopsis thaliana columbia
  unsure (1)..(467): unsure at all n locations
cggacgcgtgggctttgaacttgcgaaaaatgtttcattcttgctctgtgattcgagaagctttggctggggagaccacgaagattgctccttcattcgatcgtgccagtgagcttaaagctttcgatgagaccaagacgggtgtgaaaggactcgtcgactccggaatctcacaggattccacgcatcttccatcactcatctgtcgaacttgcaaaccctgaaccacttccctcggacctgctacatctcaagacgatcccaacgatcgatctcggaggacgggtcttccaggacgcgcttaagcacaagaacgcgattgaaggggattaaagaagcaagctgccaagtggggtttctttccaaagtgcatcaacccatgggtgtttnngcttcggagctttnttttaggaagnttgaaaagnttggagttccgttnactttaaatgggnaaacctcctnnaagg

SEQ ID NO: 94871 - DNA, 1478 bp, Arabidopsis thaliana columbia
  unsure (1)..(1478): unsure at all n locations
ggtagcaactggtccaatctttgaacttaagaaaaacgtttcattcttgttttatgtgtgattgttgttctgtttttgatttgagaaacaaaaacgatggagagcacgaagattgctccttcattcgatcgtgccagtgagcttaaagctttcgatgagacgaagactggtgtgaaaggactcgttgactctggaatctcaaagattccacgcattttccatcactcatctgtcgaactagcaaaccctaaaccacttccctcggacctgctacatctcaagacgatcccaacgatcgatctcggaggacgggacttccaggacgcgattaagcacaagaacgcgattgaagggattaaagaagcagctgccaagtggggtttcttccaagtgatcaaccatggagtttcgctcgagcttcttgagaagatgaaagatggagttcgtgactttcatgagcaacctcctgaagtgaggaaagatttgtacagccgcgatttcggcagaaagtttatctatttaagtaatttcgatctctacactgctgcagctgcgaattggagagacacattctattgttacatggctccagatcctccagaaccacaggatctgccagagatttgtagggatgttatgatggaatactcaaagcaagtgatgattttgggtgaatttctgtttgagcttttgtcagaagcactagggttgaaccctaatcacctcaaggacatggagtgcttaaagggtttgcgcatgctttgccactacttcccaccgtgtccggagcctgacctaacttttggcacaagtaagcactccgacggctcttttcttaccgtccttctaccagataacatagaagggcttcaggtttgtcgtgagggatactggttcgatgttcctcatgttcccggcgctctcatcatcaacatcggagatcttctgcagcttataacaaacgacaagttcatcagtttgaagcatagagtattggcgaacagagccacaagagctcgagtctctgtcgcatgtttcttccatacccacgtaaaaccaaatcctagagtgtacggacccattaaagagcttgtgtccgaagaaaatcctccaaagtacagagagaccaccatcagagattacgctacttacttcaatggcaaaggacttggcgggacctctgctttgctggattttaaagtatgaatcatgccgagctactactttctcacagatatacgacatgacattatatgtaacatgttggagatgtgtgaaccaaatgtggaatttatgtattgaacattgtcatcaaggtttggtccaaataaagtgtaatcggatatggttaatcaattggattacgcacaaaaaaaaaaaaaaaaaagggcgagccgctctagaggatccaagcttacgtacgcgnnnnnnnnnnnnnnnnnnnnnnnnnnnnnnnnnnnnnnnnnnnnnnnnnnnnn

SEQ ID NO: 94872 - DNA, 741 bp, Arabidopsis thaliana columbia
  unsure (1)..(741): unsure at all n locations
anttaacaatactgaccaaacacaacctcaactgcttcaacattattccaatctgtcatctctgcttgtcttcacatgtttttaataacttcttctcttccttcttcattcctttaatccatttttctcgatcttggctaatccatcatgactgtcaagaaagttgagatcaaggtggatataaactgtggaaaatgcaacagcgcaatcatggaagcagtcacagagatagaaggtgtgaatcatatttcattagatgaaggaaatagtatacttaccgtggtggggacaatggatccggtctgcgtagcaacaaggctgaaaaagattaaacagaaacctgtgatcattagcgttggaccaccaccaaaacctcctgagccaccaaagcctccagagcctgaaaaaccaaagactccaccagcacctgaaccaccaaagcatgtatgcaagccaccttactgcaacagttgtgatgttgtgtctgttactacctatgaaagtggaagcggctgcaccattctttgagtcatatatcgcgtaccatagccttcatgttaagtcctgtatttagccaatactaattcatcatgttctcatgcttttttgtttatttctttttctcaaatatgaatctctgttgtttgtccctcccctgaaaaaaaagggcggccgctctagaggatccaagcttacgtacggcgtgcatgcgacgtcatagctttctaatagtgtcaccct

SEQ ID NO: 94873 - DNA, 485 bp, Arabidopsis thaliana columbia
  unsure (1)..(485): unsure at all n locations
cagaggttaactctggaaaattcccagcagtgcggagaaggaagtttattgttgtgatgggtcttgattttgatggggaagaagacacgctagaggctacaaaaagaattcttgatgcggttgaaaaggaaagagcagaaggatctgttgggttcatactgtcgacatctctaacgatctctgaggtacaatctttcttggtgtcaggaggcttaaacccgaatgatttcgacgctttcatatgtaacagcggaagtgatctccactacacatccctcaacaacgaagacggtccttttgtcgtagacttttactaccactcccacatagaatataggtggggcggtgaagggctgaggaagactttgatcccgtgggcatcttcgcttaacggggaaaaggctgacaatgacgggcagattntcactctttcttngnatctttcaactggcttcntgttaaacattttcaggcaaaaaagcctt

SEQ ID NO: 94874 - DNA, 531 bp, Arabidopsis thaliana columbia
tcgtgggtcgacgcaagactctatactgattcgagataacgacagaaggggacttgagtgttgactgttgaccgcgacgaatccgtcggaaaccggaatcaccatggattttcctccgacgaagcttgattatcatgtagacatgttcaatcttcagtctcattccagatttctctccttatttaaggcgcaagatggacgcatagctctaatactagaatcaacggtgtttcatccacaaggtggtggccagccgtcagacaccggtttaattgttttctccggttcggatttgaaattttccgttcaagatgttcgatcgaaagacggaattgttctccattacggagttttcgaaggttcgaatcctgaaagtggaattgatagtgagaaagggaaagaagtttacttaactgttgatgaatcaaggcgtaaactcaattccaggttgcactcagctggacacttgctagatatgtgtatgcagaaagttgggttaggacatttggagcctggaaaagggtaccattt

SEQ ID NO: 94875 - DNA, 639 bp, Arabidopsis thaliana columbia
  unsure (1)..(639): unsure at all n locations
gttctccnnnnnnnnnnnnnnnnnnnnnnnnnnnnnnnnnnnnngcgtccggagaaaacctaaaggttgagtagagattaggcaaaaacaaaattctcgatccccaaatttcgaaaacttgttcttagggcgattcttctctttggtcatttggcgaatttgatttatatccatcggtgatcggatttttttcagtcttctccgtctcgtcgttaccggcgtttgatcggatcatcgttttgtttcaggcgaaatatggtggtgatctccctgaagattttgaattcaaaatttcttcggttgcttcctcttgactttatcgcgatttcgattacgtgtagactttcttcttggctttgtcttcgaatcaattaggattgtgaataatcgtgtctgtgtatataagactggtgattgattattagggcatcggttggcaggagaatagattgttttttttttttggtgtgtgttggatctttagatctttgactgaggaatatgtatatcaaagaactgccggtcgcagttgctgagaataggctgagatcccttgaggataacgttgatgatccagataaggccgtatcggtgagcacaggaatcgtgattgagttgactacaaatacggcactcgat

SEQ ID NO: 94876 - DNA, 561 bp, Arabidopsis thaliana columbia
tgctggtgatccgccgctccatgcgactcactattgggaaagctggtacgcctgcaggtaccggtccggaattcccgggtcgacccacgcgtccggttaatcgtagcaaagaactacactcagtggtgaaaatggagaatcaagagcctgatatcgagaaattgcctcgagacgatgttcctgatagagaaccagaccataagaagctcaagatttcgaccaccggccaggaaactgattcctcggctgttaccaccggcggaagcaatgtcgctgagcgtagagcgccgaaatacagacgccggaaagtcgcaatcgtgtttgcgttctgcggagtagggtatcagggaatgcaaaagaatcccggcgccaaaaccattgaaggcgagctcgaagaggctttgttccatgccggagcagtacctgatgctgatcgggacaaaccaagaaattacgaatgggcacgatccgctagaactgataaaggagtgagtgcggtgggacaagtggtttctggtcgtttctatgttgatccgcctggatttgtggagcggctcaatt

SEQ ID NO: 94877 - DNA, 606 bp, Arabidopsis thaliana columbia
  unsure (1)..(606): unsure at all n locations
cagaaagttaaatgctactgacatttatggtgccaatacaattgaaacatcactcgattggcggtttgaaaacttgctggctctcanatgttctgttcaggaacaccatatatttgaaaatgttggggagaaacgaagaaaaatcagcaaaatcatgttgctaaaggatgaaaaagagcctcctctccccggaacaattgagaaagatctaacagagctggaagcaaaagagcgattgattagggaagagtttgaagataaattatatctgtggctcatccataaggtgactgaagagggcaagggtccaaatatattagatgaagatggacagggtgttctacacctagccgcagcgctggggtatgattgggcgataaagccaatcttagcagcaggagttagcatcaacttccgcgatgcaaattgggtggtcttctcttcactggggctgcnattcagtggcagggnggntactnttcgctgtacttgtctcactgggntnttgattctnggagcatttgggggnccnttttncaanacaatcctttttnggnaaaacanctgctgacttttggttttttgnaancggccananggggatat

SEQ ID NO: 94878 - DNA, 579 bp, Arabidopsis thaliana columbia
  unsure (1)..(579): unsure at all n locations
aacccatgtttcgtttcgttttggaatgataagagagataaagggtttgtgtgagtttattgtctttctgatgcgaggaagatcaagagttatagaggatcgttagagtgatcaaaatcccacgaattcacaaaggatccgtcttcatagatccgtcagatctgttcagcggaggtacatacttcttcgtcattcactgctttctggattagttggtgagaataaacggctggtgggtctcggtgggaagctgaattggatgtagagttcatcagactatagcttagagaagaaaatcgaagttttttgaatcgttttgctccagttgaggtttggaagctgcataccagctcaatggaaagagatttcacctgcaagttgcactttacttttggggtttagctaaatacgattgtgtgacctctgggaatctcatcntactttcggtnatctccgagcttgngaattttaactgatgcaagctnncatgttnngtaatcangaaaagcaatggtattngtaatggnggtgggggttttanttttnggaaggttttcananngggangctttttntnaa

SEQ ID NO: 94879 - DNA, 588 bp, Arabidopsis thaliana columbia
atcaacttcagatcctttcaccagcaacacaagttattttcaaaagatgatgccaaattctagatcggcgacaataactccgacgacagaatcaaccaccacaacaacaacaacaacaacgactctaacgacgtcgtattggtgttacagttgtacacgattcatcagcgtttgggaagatcaagacgcaaacgctggagtcttatgtccttattgcaacggtggattcatcgaagagattgaagattcttctaattccaccgtcgcggcgattccggcttcgactccggaagttagatcggttgaggaaacacatagatctataattagacgtcgtagatctaatcgccggacgtcctttaatccggtaatcgtcttacacggcggaggaggaggaggagccggtgagagagttgagaacgaagaaggtgacggagctactagagaacgacgagcttatgagttttattacgatgatggatctggttcaggtctaagacctcttcctgattctgtatctgagatcttgatgggatctggattcgaacggttacttgaacaattgagtcagatcgaagcgtcaggtaa

SEQ ID NO: 94880 - DNA, 2596 bp, Arabidopsis thaliana columbia
agagaaagagaaagagagagaaaaacagagaggttgtcttcttcgtcaaatatccgattatctggtatcgtgattcggaggtgtaatgggaggtagtagcggcggcggagtttcttatcgtagcggcggcagatcagacgtggaattagaggattacgaggttgatgatttcagagatgggattgtagaatcgcgaggaaacagattcaatcctctcaccaatttcttagggttagacttcgccggcggtagcggtggaaagttcaccgtcattaatggaatcagagatatctccagaggctccattgttcatcccgataaccggtggtacaaggcgtggacgatgtttatattgatatgggcactttattcttccttcttcactccattggaattcggattcttcaggggattaccagagaatctgttcatcctcgatatcgctggccaaatcgctttcttagtagatattgtcttgacattcttcgttgcttatcgtgatagccgaacttatagaatgatctataaacgcagctcaattgctttacggtacttaaaatcaacttttataattgacttacttgcttgcatgccatgggatatcatctacaaggctgcaggcgaaaaagaagaagtgagatacctattgttgataaggctatatcgagttcatagagtaatcctgtttttccacaaaatggagaaagatataagaatcaattacctttttacaagaatcgtcaagcttatattcgtcgagctttattgcactcacaccgcagcttgtatcttctattacttggccacgacgcttcctgcttctcaagaagggtacacttggattggaagcttgaagttaggagattacagttactcgaagtttagagagatcgatctctggactcgatacactacttctatgtactttgcagttgttactatggcaactgttggttatggagatatacacgcggttaatatgcgggaaatgatattcgcgatggtctacatttcattcgatatgattctaggagcttacttgattggtaacatgacagctttgattgtaaaaggttcgaaaacagagagattccgggataagatggctgatatcatgcggtatatgaaccgaaacaaactcggtaggaacatccgtggtcagattaccggacatttgcggttgcagtacgaaagcagctacactgaagcagctgttcttcaagacattcctgtctctatccgtgctaagattgcgcaaactttatacttgccgtatattgagaaagttcctctctttcgcggatgctcatctgaattcattaaccagattgttataagacttcatgaagagttctttcttcctggagaagttataatggagcaaggaagcgtcgttgatcagctctactttgtttgtcacggtgtattggaggagataggtataacaaaggatggatctgaagaaatagtggcagttctacaaccagatcattcttttggagagatttcaatcctctgcaatattcctcagccttacacggttagagttgcagagctatgtcggattctaaggcttgacaagcaatctttcatgaacatactcgagatatttttccatgatggacggaggattctcaacaatctgcttgaagggaaagaatctaatgtccggattaagcaactagaatccgatataacctttcatatcagtaaacaagaggcagacgtagctctgaagttgaatagtgcggctttctacggtgatctttatcagcttaagagtttgattcgagctggaggtgacccgaataagacagattatgacggaagatcgcctttgcatcttgcagcctctagaggatatgaagatattacattatatcttatacaagaatcagttgatgtaaatatcaaagataaattggggagcacacctttactagaagcaatcaagaatgggaatgatcgtgttgcggcgttgcttgttaaagaaggagctacgttgaacatagagaacgcagggactttcctttgcaccgtggttgcgaaaggagacagcgatttcttgaaacggcttcttagtaacggaattgatcctaattccaaagattatgatcacagaacacctcttcatgtagctgcctctgaaggattttatgtcttggcgatccaattggtagaagcaagtgctaatgttcttgcaaaagacagatggggaaacacacctcttgatgaagctttgggttgtgggaacaagatgttgataaagttactcgaagacgctaagaattctcaaatctcttcgtttccgagtggctccaaagagcctaaagataaagtctataagaagaaatgtacagtgtatttttcacatcctggtgattcgaaagagaaaagaaggcgcgggattgtactgtgggtacctcgaagcatcgaggagcttataagaacagcaaaggagcagctgaatgttccggaggcttcttgtgtattatctgaagatgaagccaaaattattgatgtagatttgataagtgatggacaaaaactgtatttggctgttgaaacataatgattcgagcaaatttcaaaaaaa

SEQ ID NO: 94881 - DNA, 1255 bp, Arabidopsis thaliana columbia
  unsure (1)..(1255): unsure at all n locations
nnnnnnnnnnnnnnnnnnnnnnnnnnnnnnnnnnnnnnnnnnnnnnnnnnnnnnnnnnnnnnnnnccacgcgtccgcttgtttcttcatcatcacctacttcaatcaaaaaacattccaactttcttctcaatttcattccaggatagtattatgtgcagtggaccaaagagcaatctctgctcttcaagaaccttaacagaaatcgaatcaaggcaaaaggaagaagaaacaatgcttctcctcgaattcgctgcttgtgatgatcttgactcgttcaagagagaggttgaagagaaagggcttgatttggatgagtcagggttatggtattgcagacgtgtcggttctaagaagatgggtcttgaagaaagaacacctttaatggttgcagctatgtatggaagcataaaggttttgactttcatcgtttccactggaaaatctgatgtgaacagagcttgtggtgaagagagagttactccgcttcactgtgctgttgctggctgttctgtgaatatgattgaagtcatcaatgtcttgcttgatgcttctgctttggttaactctgttgatgctaatgggaatcaacctttggatgtgtttgttcgagtttcgaggtttgtggctagtccgaggaggaaagcggttgagttgttgctgagaggaggaggtgttggaggattgatcgatgaggcggttgaagaagagatcaagattgtctctaagtatccagctgatgcttctttaccggatataaacgaaggggtttatggaagtgatgagtttaggatgtatagctttaaggttaagccatgttctagggcttattctcatgattggaccgagtgtgcttttgttcatccgggagaaaatgcgaggaggagagatccgaggaagtatccttacacttgtgtcccctgtcccgagttccgtaaaggatcatgcccgaaaggagattcttgcgagtatgctcacggggttttcgagtcgtggcttcaccccgcgcagtataaaacccggctttgtaaagatgaaacgggttgtgcaaggaaagtttgtttctttgctcataaacgcgaagagatgagacctgttaatgcttcaactggctctgccgtggctcagtctccgtttagcagcttggagatgatgccagggttgtctcctcttgcttattcttcaggagtttcgactcctccggtttctccaatggctaatggtgttccttcctttccaagaaacggcggatcatg

SEQ ID NO: 94882 - DNA, 387 bp, Arabidopsis thaliana columbia
  unsure (1)..(387): unsure at all n locations
tgaagagcaagacgatgccagaagtaagaagaacactgccgtaaacagctaaaaccttgtactcttgtctcttttccatctgttgtcgaaacgagaaaccgtatgctaaaggtgggatcaatccgaagatgacgaaagaagagattgcgatcactctgtgaatcctcgaatactctcttctcccgagtacttcctcgtatcgatcttcttctccttctccttcttctggagaatcatcagtgttgggttgttttctggggttctcgtttattagttcttggaggctgtgaacagtcagaagaagaccgcttgacaaattggcaactncccaaggctaaaacgttcagagttgaagcaccagnantgccgcagatgttaccgtnatag

SEQ ID NO: 94883 - DNA, 354 bp, Arabidopsis thaliana columbia
  unsure (1)..(354): unsure at all n locations
atcaactgcaagaaaatggctcttcctctcgagctcgaaagcctcactgaagccatctcagctgggatgggaatgggagttgatgagaatgcattgataagcacactggggaaatcgcaaaaggaacatagaaaattgtttaggaaagcaagcaaaagtttctttgttgaagatgaagaaagagcttttgagaaatgttcatgatcacttcgtcagacacctcaagcttgaatttctccccgcttccaatactgccggtgggtgaatgttgggcaatgccatcccttgggaaaaaaaaattcccaggttnggtggaaaaaaacttttgaaagaaaaagggaaaaaaaaagcttt

SEQ ID NO: 94884 - DNA, 449 bp, Arabidopsis thaliana columbia
caagagccggaaatcaaaaacagtaataaaagatcaactgcaagaaaatggctcttcctctcgagctcgaaagcctcactgaagccatctcagctgggatgggaatgggagttgatgagaatgcattgataagcacactggggaaatcgcaaaaggaacatagaaaattgtttaggaaagcaagcaaaagtttctttgttgaagatgaggaaagagcttttgagaaatgtcatgatcacttcgtcagacacctcaagcttgagttctcccgcttcaatactgcggtggtgatgtgggcaatgcatccatgggagagagatgcagggttggtgaagaaagctttgaagaaaggagaagaagcttacaacctcatcgttgaggtctcatgcacacgctctgctgaggatcttcttggtgcacgtaaagcttaccactctttctttgaccaa

SEQ ID NO: 94885 - DNA, 424 bp, Arabidopsis thaliana columbia
tgcggatgagcagatctcgagttttaggcttaaactcccaactcctgagctggaaagagctctggggattaaagaagctttggagacaaaagggtatttgaaaactcttcttttgcttttagtcctaatgggaacttccatgattattggcgatggaattctaacaccagctatgtcagtgatgtctgcaatgagtggtctacaaggtgaagttaaaggatttggaacaaatgcattggttatgtcttcgattgtgattctcgtggctttgttcagcatacaacggtttgggacgggtaaagttggttttctatttgctccagttctggcgctctggttcttctctcttggtgctattggaatctataatctgttgaagtatgacttcactgtcataagagcactaaacccgttttatatcgtt

SEQ ID NO: 94886 - DNA, 551 bp, Arabidopsis thaliana columbia
  unsure (1)..(551): unsure at all n locations
ccgaatttctcaacttctctgattcgtctttctcctctgtctctgactcttcgcgaaaaccctaattagctttgtggtcttgttgttttcgccatggaagacgacggcaagagcagccccaagttaccgatccctggaaagagaaatatactaatcaccagtgctttgccttacgtcaacaacgttcctcatctcggaaacatcatcggatgtgttctgagcgctgatgtgtatgctagatactgtcgtctccgtggctataatgcgatttacatatgtggaaccgatgaatatgggactgcaactgagaccaaagctttggaggagaattgcacccccaaggaaatctgtgacaagtaccatgccattcataaagaagtttatgactggtttggtataagttttgacaagtttgggcgaacttcaactccagaacagactgcaggtgtgccaagcaatttccacaagttgtggggcacaaagtggctttncagannanaccatgnangnanctttcnngggancatncaanagttcttgntggccggntt

SEQ ID NO: 94887 - DNA, 731 bp, Arabidopsis thaliana columbia
  unsure (1)..(731): unsure at all n locations
tctnnnnnnnnnnnnnnnnnnnnnnnnnnnnnnnnnnnnnnnnnnnnnnnnnnnnnnnnnnnnnnnnccacgcgtccgcccacgcgtccgctttcctttctttttggctgtctccggcgagaagagattttccgggggaaaatagcaaaagctcggttttagtttctgtttagaaagaggatacagaatagtgattactaacatcttctccgatggcggttgcgccggcaagagctcgttcagactatgattatctcatcaagcttctcctcatcggtgatagcggtgtgggaaaaagttgcttgttactgcgtttttcggatgatactttcaccacgagtttcattactaccattggaatcgacttcaagataagaacagtcgaacttgatgggaagcgtatcaaattgcagatatgggacactgctggacaagaacgttttagaactataaccacagcatattacagaggagcgatgggtatattactcgtctatgatgtaacagatgagtcatcattcaacaacattaggaactggatgaaaaacattgagcagcatgcgtccgatagtgtcaacaagataattgtcggtaacaaagccggcctgggccgaagccaaagggcggtcccacctcaaaaggacaagccctcgctggtgggtattggagcaaattctttggccggcgaaaacaaccngatnccggcggtccttcnnngaanntaaaaagtc

SEQ ID NO: 94888 - DNA, 1035 bp, Arabidopsis thaliana columbia
  unsure (1)..(1035): unsure at all n locations
ctaaaaactataaaaacatgaaaataatatttttcagcagctaatcaacttgttttctctagcgagcgacattttggaaggaagcattccattagcttttttgctgtctccagaaaataaattttcaatctttcgtcggaaaaaagaagaagaagaagcagagctgggtttagttttttcacgagaagcaaagagatcaataagtcagtgagcttttttctcgtttctgacgatggcggttgcgccggcaagagctcgttcagactatgattacctcatcaagcttcttctcatcggcgatagcggtgtggggaagagttgtttgttacttcgattctcagatgatactttcactacaagtttcattactaccattggtattgacttcaagataagaactgttgaacttgatgggaagcgtatcaaattgcagatttgggacactggtggtcaagaacgtttcagacctatcacttactgcgttttacagggggagcgatggggattttggcttgtctacgatgtgaccggatgaaatatttttttaaccaatgtttaggaaactgggtctgaagaaacaattggagtcaagcattgcccttcaagatttattggtgcaaaccaaaaacttatttgggttttgggtttaactaaaaagactcgggatactgtggtattgggataagtccaataaagcgtggtttggttttctccaaccatagccataaagcggggacccataatcctcttttggtgccttggatatcatagcctcttggtgagaatatctcacagtatttcttcttgtgggagacacgtagtttggtccaaaataaaacccacaaacccttcttagttgtgaagcaaaaaatgtgggtttntatcaactggggccacaatatgtcgcaccgcagctactcttctaatatctcctgagcacattgtagcctggaaccatccgtaacattggatattggtatataatgcccccgaagggggttactaaaggaactttctttaaaaccaaaagattat

SEQ ID NO: 94889 - DNA, 779 bp, Arabidopsis thaliana columbia
  unsure (1)..(779): unsure at all n locations
agaatattcacagagaagagagagcgttatttttggcgtttaagggtttcgcgtgtggtgcgattcttttgttgtgggctctattcgtttcctctatacgaagcgaggagacgaaggaatttgtcttgactctcgatcactctaacttcaccgaaaccatctccaagcacgatttcatcgtcgtcgagttctacgccccttggtgtggtcactgccagaagcttgctcctgagtacgagaaggctgcatcagagtttgagtagtcataaccctcctcttgctctcgccaagatcgatgctagtgaagaagcaaacaaagaatttgctaatgagtacaagattcagggtttccccactcttaagattttgagaaatggagggaagtcggttcaagattacaacggacctcgtgaagctgagggtattgtcacttatttgaagaagcaaagtggtcctgcttctgttgaaattaagtcagctgattctgccactgaggttgttggtgaaaagaatgttgttgctgttggagtgttccctaaattatccggggatgagtttgattctttcatggcccttgctgagaaattgcgtgctgactatgatttcgcacacactttggatgctaagtttcttcctcgtggggagtctgtggaaggaccctccagtgaggctgttcaaagcccttttatatgtaatttttttntttncccnccaaggggctntaaattgggggaagccctnnggggaaatttttcaaaaagggtcnaagtntccccctt

SEQ ID NO: 94890 - DNA, 705 bp, Arabidopsis thaliana columbia
  unsure (1)..(705): unsure at all n locations
cttggaatttggattcttgtgataacataatggatgttggtcttagctctcgtgtctatgagaccgagacgtgtcgtcaatgtggtcccgagtaaagtagctaagaagtgtttgaaacgaggggatagtatgtggggagcttggtttttctttagcttctacttcagaccggcgttgaatgagaaatccaagtctaaggtcattagggaaagtggtggtggtggaggaggaggaggtggatgttttactgggtttgataaatctgatctcaagctcgatgtttttcttgttcagcatgatatggagaacatgtatatgtgggcttttaaggataaacctgagaatgcgcttgggaaaatgcagttgagaagctatatgaatgggcattctcgtcaaggtgagcgtccgtttccgtttagtgcggagaaagggtttgtccggtctcacagaatgcagaggaagcattacaggggactctctaatcctcagtgtcttcacgggattgagtttgtggcttcgccgaggtttgtttggtgtcggtgaagaagataagaagagatggatggggctcacggggtccgagatttgaagttcactatccctcctgatgctagtgatttcggttcatgggagaaatcttnccaacacagacatcgagctagnagagaccagctcatgttactaaagcagcaccgaataaacgcc

SEQ ID NO: 94891 - DNA, 550 bp, Arabidopsis thaliana columbia
aggagagaaataagcagagacgtgtaaaccaaagaacaacgaaggtttcgtttcgtggggaagaagatgaagtcgcttgtggctcatttctcaacgcctttaatcaccgctagattagttcctagatgtatcatccatcgagcttcaatctccgccgtctctttttccaccgtccgccgtcgattttctcctctcaccatggcctcagcagctcagtcttcttctcaggctgtgtcttacgggagtggcaacagtgatacagatgtttttaaattgattcaagctcacgaggagaaggctgctcgtctttccccagtcgaagaaatccgaactgtgcttaatggtagcatatgcggtatgctttccactttttctcagaagtatgagggttatccttcagggtcaatggttgattttgcatgtgatgctgatggttctccgattctggcagttagtagcttggcagttcatacaaaggatctcttagctaatccaaaatgctcattactaattgctagagacccagaggataggactggtttgaggatca

SEQ ID NO: 94892 - DNA, 397 bp, Arabidopsis thaliana columbia
aattttcgtcatcatttcttgagatgtatatggcctcactgtctccgagactccacaaagcgtacaaagctagatgtgttagcttaccggttcggtctcatccgagtgttaggaggattcaagaagtggtctccaaggttagagctttggggtcttcttcgttagactcgaggacaatagtccgtgacagtctctctggtctcaccgagctttacagatgtttaagtgaagatctcttcaagtcttcttctgaaactcaacaagcccttcttaatggtgatggtttgatggaagagcttcttgaagtatcactgaaatacttagaggtttgtggaggagctaaggacgcagcttcgaggatcaagaagattgttgtcgagcttcagtctgctttgag

SEQ ID NO: 94893 - DNA, 417 bp, Arabidopsis thaliana columbia
  unsure (1)..(417): unsure at all n locations
gtttcgccgctcaggtttcgtgaaaagaatctatcttgagcaatgtctctctcagctaaagttgatgtcaccaagggagccgaccctaaggctaaggctgtgaaagctgcgaaagcggtgaaatctggccaaatcgttaaaaagcctgcgaagaagatcaggacaaaggttactttccacaggccaaagacattgaccgttcctagaaagcctaagtacccaaagatcagtgctactccaaggaacaaattggatcattaccagatcctcaagtaccctctcactactgaatctgccatgaaaaagattgtggacaacaacacctttagtcttcattgttgaccatccgtggctgacaagcaaaaagttcaaaggttgcttttcaagaaggnttgttttgtccnttttggcccccgg

SEQ ID NO: 94894 - DNA, 439 bp, Arabidopsis thaliana columbia
gtttcgccgctcaggtttcgtgaaaagaatctatcttgagcaatgtctccagctaaagttgatgtcaccaagaaagccgaccctaaggctaaggctttgaaagctgcgaaagcagtgaaatctggccaaatcgttaaaaagcctgcgaagaagatcaggacaaaggttactttccacaggccaaagacattgaccgttcctagaaagcctaagtacccaaagatcagtgctactccaaggaacaaattggttcattacctagttcctcatggtccctctcactactgattctgccatttaaatgattgttgacattctctctcttttttttttgttgatcatcttttctgtctagtaaatttccatatatgctttttttttatttatattatatttatttctctatatatttaaattttttttttatgctctttttttt

SEQ ID NO: 94895 - DNA, 807 bp, Arabidopsis thaliana columbia
  unsure (1)..(807): unsure at all n locations
ggtnnnnnnnnnnnnnnnnnnnnnnnntaggtgcactatagaagagctatgacgtcgcatcgcacgcgtacgtaaccgccgaagttgatgtcaccaagaaagccgaccctaaggctaaggctttgaaagctgcgaaagcagtgaaatctggccaaatcgttaaaaagcctgcgaagaagatcaggacaaaggttactttccacaggccaaagacattgaccgttcctagaaagcctaagtacccaaagatcagtgctactccaaggaacaaattggatcattaccagatcctcaagtaccctctcactactgaatctgccatgaaaaagattgaagacaacaacaccttagtcttcattgttgacatccgtgctgacaagaaaaagatcaaagatgctgtcaagaagatgtatgacattcagaccaagaaagtcaacaccctcattaggcccgatggaacaaagaaggcgtatgtgaggttgactcctgattatgatgctttggatgtggctaacaaaatcgggatcatctaatctgatcattgtcgctctgtgattttactttttctggtttttctcttccatagtctcagttttgctagagaagttaagatattactatcaccatctctttgttatgcttttatctttggattcaaaaagattatatgtttggtatttgttgatgcgtcatagtttctattaaaaaaaaaaaaggattcttnnnnnnnnnnnnnnnnnnnnnnnnnnnnnnnnnnnnnnnnnnnnnnnnnnnnnnnnnnnnnnnnnnnnnnnnnnnnnnnnnnnn

SEQ ID NO: 94896 - DNA, 875 bp, Arabidopsis thaliana columbia
  unsure (1)..(875): unsure at all n locations
nnnnnnnnnnnnnnnnnnnnnnnnnnnnnnnnnnnnnnnnnnnnnnnnnnnnnnnnnnnnnnnnnnnnnnnnnnnnnnaattcctcgtccgcccaagagacaaaaatccttcgcaatcgagcaacggaagctcctgcatccaccgtccaaatctcttctaacgtcgccggagatcggtaaaccggttcttcatcccgtattcatctcttattgagatcgttggggaagtagagaatggcgacgtttgagctgtacaggagatcgacgatcgggatgtgtctgacggagactttggacgagatggttcagagcggtacgctgagccctgagctagctatccaagtccttgttcaatttgacaagtccatgactgaagctctggagagccaagtgaagaccaaggtgtccatcaagggacacctgcacacttacaggttctgtgacaatgtctggaccttcatattacaggacgcaatgttcaagagtgacgatcgtcaagagaatgtgagccgggtgaagatagtggcatgtgattccaagctgctcacacagtgagatgcaaattgtctgcagggaatttactttcctttgtactagattttgagttttttcactttgtaaactcagcacttgctatatatgttgagcacttgctatatgttgagctccatctgcagccatcaatttagcctatatgtaaattctcggcccaaggacataaggatacattctgttgctatgagaaagttcttgagcttccnnnnnnnnnnnnnnnnnnnnnnnnnnnnnnnnnnnnnnnnnnnnnnnnnnnnnnnnnnnnnnnnnnnnnnnnnnnnnnnnnnnnnnnnnnnnnnnnnnnnnnnnnnnnnnnnnnn

SEQ ID NO: 94897 - DNA, 721 bp, Arabidopsis thaliana columbia
  unsure (1)..(721): unsure at all n locations
cagagttcctccaaacacttcattttaactcgttccggctcgaagacggctccgtcgtcaacatgtcggttccgatcgtcctcgctatcgacgacgatcagaagtttcgtatcggggattccaaccgagtcacgctcgttgactcggttggtaatcccatcgcgattctcaacgatattgagatttacaagcatccgaaagaagaacgaatcgcgagaacatggggaaccacggctcgtgggcttccttatgcggaagaagcaatcaccaaagctggaaactggttgattggaggtgatttacaagttttggagccgatcaagtacaatgatggtttagaccggtttcgtttatctccgtcgcagctgcgggaggagtttataaggcgcggtgcggacgcggttttcgcgttccagcttaggaacccggtgcataatggtcatgcgcttcttatgacggatactcgtagaagacttcttgagatgggttacaaaaaccctgtcttgttgttgaatccacttggtgggtttactaaggctgatgatgtacctctcagctggcgtatgagacaacacgagaaggtgttggaggatggtgtactggatccagagacccacctgtaggctctatctttccccatcttccgatgctattacgctggcccaactnagggttcaattggaatnccaaaagctangatncaacccnnggnntnaatttt

SEQ ID NO: 94898 - DNA, 601 bp, Arabidopsis thaliana columbia
  unsure (1)..(601): unsure at all n locations
cccaggcgtccgcccacgcgtacgaaactgattaatcaatgttctcttaaagattaagagagccaaaacgaagcaaattaatctgccttcaatggcttcttcagcagcagccatcgtctccggttctccatttcgttcttcaccattaatccataaccatcatgcttctcgttatgctcctggatccatctccgtcgtatctctcccccgtcaagtttcccgccgtggcctctccgttaaatcggggttgatcgagccagacggaggaaaactcatgaacctcgtagtcgaagaatcacggcggcgcgtgatgaaacacgaggcggagacggttccggcaaggatcaagctgaaccgtgtggatctagagtgggtacatgtgcttagcgaaggctgggcaagtcctctcaaaggtttcatgagacagtcagagttcctccaaacacttcattttaactcgttccggcttcgaagacggctccgtcgtcaacatgtcggttccgatcgtcctcgttatcggcggcggtcaaaagtttcgttttcgggggttcaaaccaggtaaaaattctttttccttgggttgggaaatccattnncgatt

SEQ ID NO: 94899 - DNA, 775 bp, Arabidopsis thaliana columbia
  unsure (1)..(775): unsure at all n locations
ttttgtagagatggctcgtgtcttgtctaataaattccagaaaagagtggtgataattgatacaagcaccgaaatagagggagatggtgatattccacactcagctattgnaggttcgcgtagaatgcaagtacctaagccatctttgcagcataaagtgatgattgaggcagttgagaatcatatgcctcaagtgatcatcgttgatgagattggcacagaagctgaagcacttgcttgtcgttccattgctgaaagaggagtgatgctaattggcactgctcatggagagcagctacagaacatcataaagaatcctactctttcagacttgattggtggtattgagactgtaacgcttggagatgaagaagcgagggcgagaaggagtcagaagagtattctcgagagaaaagctccaccgactttttattttttgatcgagatgagagaaagagattattggattgcacatcaaactgaaaagagtgttgatatgttgcttcgcggaagaaatcccatggttgaggtgaggagaagggatgaagagtacaaggtggtgatagaaagatggaaggcatacgacgggcaaggcatttgagtttccttcatcgttgtcaaacttatgacactaacagtaaatgtgtctttctcgaatgatcccccatttgtgtaaaataatcaaaaaaaaaaaaaaaaaaaaaaaagggcggccgctctagaggatccaagcttacgtacgcgtgcatgcgacgtacatagctgttctatagtg

SEQ ID NO: 94900 - DNA, 420 bp, Arabidopsis thaliana columbia
gcgtccgacgaaactagccagagagatgacgagcaagattctagttatcggagctacaggtctcatcggaaaagtcctcgtagaggaaagcgccaagtctggccacgccactttcgctctggttagagaagcctctctctccgatcccgttaaggcccaactcgttgagagattcaaagatctcggcgttaccatactctacggaagtttaagtgataaagagagcttagtgaaggcgattaaacaagtcgatgtcgtgatatcagctgttggtcggtttcaaactgaaattcttaatcaaaccaatatcatcgatgccatcaaagaatctggaaatgttaagagattcttaccgtcggaatttggtaatgacgtggatcgtacggtagccattgagccaacgctatcagagttcatcac

SEQ ID NO: 94901 - DNA, 393 bp, Arabidopsis thaliana columbia
gaggaatgagagaattcatcctcgattttgaagacatcgccgaaggattttgttggtactttcttcttctctttgactttctctctgactccatcatctcaatttctctcttcttctttgctctaatcacagacttctcttctttcctcttctgtctcaatttgatttcttaaaaaaacaaaaaaaaagatgggtttaatcaagaacacagttcattactgttgtgtctcaagagacaatcagattctttactcttacaacggtggagaccaaaccaacgagagtcttgctgctctgtgtttagaaaagtctcctccttttcatacttggtactttgaaactattggtaaaagaagatttgggtttttaattggagatgggtttggttatttc

SEQ ID NO: 94902 - DNA, 465 bp, Arabidopsis thaliana columbia
  unsure (1)..(465): unsure at all n locations
agaaagcttcctgctaatgatcaagaagctgttggaaacaatgaacctgcagagaggcgccgatggaactctaatagtattaaagttcctgaagcacagatcactaatagtgctacaccgactacaacaccaaggtcgactggtctgaagcgcgacttctcaaggtctgactcttcgtttagtgaagatggacccaaggaacgtgtggttcctccatctccaaaggagcctacaaattccctcaggattgaccgtttccttaggccgttcacactgaaagctgttcaggagctcctgggtaaaaccggaaacgtcactagtttctggatggaccacattaagacccactgctatgtatcgtatccctcggtttgaagangnatgnaggaatcaagagaagcagtgtatnacctccantggncaacttaattggngggncngtnatcttattanctnaattttttt

SEQ ID NO: 94903 - DNA, 677 bp, Arabidopsis thaliana columbia
  unsure (1)..(677): unsure at all n locations
gtttacttgtaccaaacatttgacaagcggtttcactccaaaattgactttgaaaggctttctttgaaatgctttgcggggaggttcatcgtttgaggcttggagactatcaccaccaaacccgtattgcttttgttgagtttgcgatggcggaaagcgcaattgctgcgcttcactgcagcggtattgtcttgggggcactcccaataagggtaagtccatcgaagacaccagtaaggccgcattttccccgcgctgagttcaagtgaaactctagccggagatcttaaaattatatagcaaacgagagagagagagagaaagcagaagaagaagtctaaagaagaaggtacttgaggcgttttgtgtttatatataaaactctttctagatttattttaagttaatgcttcgcggtcgcagagcctgcccggtatctttgaacaactcaacaactttggtctaaacctttctcctttctttagtctccaaacacacaaaaatttgattatttttgttgttgttgaaataccctttggatatttttatgacttatttaagacatttggagaaattttattaaaaaaaaaaaagaaaaaaaaaaaaaaaaaaaagggcggccgctctagaggatccaagcttacgtacgcgtacatgcgaannnnnnnnnnnnnncg

SEQ ID NO: 94904 - DNA, 867 bp, Arabidopsis thaliana columbia
agaaggaagcttcaaaatgaagctaaagatttctctaatcgctccgattcttcttctcgtctcattcttcttcgccgtggaatctaagtgcaggactagctgtcctttagctctagcttcgtactatctcgagaacggaacaacactctccgtcagcaaccaaaacctcaattcttcaatcgcgccttacgatcaaatcaatttcgatccaatcctcaggtacaacagtaacattaaagacaaagatagaatccagatgggctctagggttcttgtacctttcccttgcgaatgtcaacctggtgatttcctagggcacaatttcagctacagtgttcgacaggaagatacttacgaaagagtcgcgattagtaattacgcgaatctcacgacgatggagtcgttacaggcgaggaatccttttccggcgactaacatacctctctctgcgacgcttaatgtattggtgaattgttcttgtggtgatgagagtgtttcgaaagattttggtttgtttgttacgtatccgcttcgtcctgaagacagtctcagttctattgcgagatcgtccggtgtatcggcggatattctgcagagatataatcccggtgttaattttaactccgggaatggaatcgtttatgtgcctggaagagatccaaatggtgcatttccaccattcaaatcaagtaaacaagatggtgttggtgctggagttattgctggtatagttataggagtgattgtggctttgttgttgatcttgtttatcgtatattatgcttaccggaagaataagtcgaagggtgattcgttttcttcttctattccgttgtctactaaggctgatcatgcttcttctactag

SEQ ID NO: 94905 - DNA, 571 bp, Arabidopsis thaliana columbia
gtaaattcacaacaaaaccaaaaaaaaaaaaagagaagaagaattagcttacgtgttcatcacatctgcattacgcgcaaacgaaacagattcaaattctccggcgaagttttcttattcatcaatcaatctctggattcatcaatcatgccagagatcgagattgccgccggcagcggcgacaacaacgacgccttattcggtaaatatgagctcggaaagcttctcggatgcggcgcattcgccaaagtcttccacgcacgtgatcgtcgtaccggccaaagcgtcgccgtgaaaatcctcaacaagaaaaaactcctcacaaatccagctctagccaacaacatcaaacgcgagatctcaatcatgagaagattatcgcatccaaacatcgtcaagctccacgaagtaatggcgacaaaatcaaagatcttcttcgcaatggagtttgttaaaggaggagaactattcaacaaaatctcaaaacatggacgtcgtagcgaagattcaagccggagatatttccagcaactgatctccgccgttggttattgccacgctcgcggtgttt

SEQ ID NO: 94906 - DNA, 466 bp, Arabidopsis thaliana columbia
  unsure (1)..(466): unsure at all n locations
nnnnnnnnnnnnnnnnnnnnnnnnnnnnnnnnnnnnnnnnnnnnnnnnnnnnnnnnnnnnnnnnnnnnnnnnnnnnnnnnnnnnccacgcgtccgggatggccgtgatgagcctgagagaggaaactctaatcagcagtttacgcaggatttatttgtgccatcttctgggaaacgaaaacgtgatgattcatctgcacactatcaaaatggtggatctatacctcaacaagatggtgcaagcgatgctatccctgaggcaaactttgaatgtgctgcactccgtataacctatgttggcgatagaaagatcccacgagatttgattggctcatcatcgaagattccccaagttgatgggcccatgcctgacccgtatgatgaaatgttgtccacacccatatatacagttatcaaggacccaaatgaagagtttaatgagggcagaactcctgctccaaacgaaa

SEQ ID NO: 94907 - DNA, 562 bp, Arabidopsis thaliana columbia
  unsure (1)..(562): unsure at all n locations
nnnnnnnnnnnnnnnnnnnnnnnnnnnnnnnnnnnnnnnnnnnnnnnnnnnnnnnnnnnnnnnnnnnnnccacgcgtccgcggacgcgtgggcggacgcgtgggctgatctcctcttctctctgtcttctgagttctgtctacgcttcgtcgccgatcccggccagactccgtcttaccggcacaaaccctagattcccggaggacgaaattcgttttttcgccggaactaaattaaggagatttgagaggctatgggtacaacaacgacaacaagcgctgtgtatatccatgttatcgaggatgtcgtcaacaaagttcgtgaggagttcattaacaacggaggtcctggcgagagtgttctcagcgagcttcaaggaatttgggagacgaagatgatgcaagccggagtcttgaatggaccaatagagaggtcatcggctcagaagccaacacctggtggtccactgactcatgatttgaatgttccttatgaaggtacagaggagtacgagactcccactgctgaaatgctcttccctcctacaccattgcagactccc

SEQ ID NO: 94908 - DNA, 794 bp, Arabidopsis thaliana columbia
  unsure (1)..(794): unsure at all n locations
gaaaaacggaaaaaccggggaatgatttttcatttgggcccccacctatccaaaaaatggggggggtttctaataccctccaaccaaaaaatgggtgcaaagcaaatgttattcccttagagccaaacctttgaaatgtgctggccctccgtataaccaatgtgggcgataaaaagatcccccgagatttattgggctcatcatgaaagattccccaagttgatgggccaatgcctgacccgtatgatgaaatgttgtccacacccaatatatacagttatcaaggacccccattgaggggtttaatgggcccaagaactcctgccccaaacggaatcccaacgggccaacccctgtggctgtcccaaaccgttatcattgaagatgatgaagagctcgcgcacaaagagcaggtggaagtgcagtctgaaagacgggatcatgcatataaacgataaggacattctcttcaacaaagcaacaggcgagttcgacttctgatcttgacactagtaatgcttctaggaaagtcagagtccttcaaatgtcggatgtctttctttgtaccttatgatttagaccgacctccgagtgagagacatgattatttatgggaatatgtactctggttggcttgttgtacaaaaagaacagatttttccggccgaagaaggcttatcaactttgacttgtttcatgaaaaaaaaaaaaaaagaaaaagggcggccgctctagaggatccaagcttacgtacgcgtgcatgcgacgtcatagctcgtcggatagtnnacatt

SEQ ID NO: 94909 - DNA, 1568 bp, Arabidopsis thaliana columbia
acgcgtccgacgcttcgtcgccggccgatttctcccagactcgtcttaccgcctccggtcgaaaccctagattcccggaggacgaaattcgttttttcgccggaactaaattaaggagatttgagaggctatgggtacaacaacgacaacaagcgctgtgtatatccatgttatcgaggatgtcgtcaacaaagttcgtgaggagttcattaacaacggaggtcctggcgagagtgttctcagcgagcttcaaggaatttgggagacgaagatgatgcaagccggagtcttgaatggaccaatagagaggtcatcggctcagaagccaacacctggtggtccactgactcatgatttgaatgttccttatgaaggtacagaggagtacgagactcccactgctgaaatgctcttccctcctacaccattgcagactccccttccaacgccgcttcccggtactgctgataactcatccatgtataacatccctaccggctcaagtgattatcccactcctggaactgagaatggagtcaacattgatgttaaagcaagacctagtccttatatgccaccgccttctccgtggacaaatcctagacttgatgtcaatgttgcttatgtggatggccgtgatgagcctgagagaggaaactctaaccagcagtttacgcaggatttatttgtgccatcctctgggaaacgaaaacgtgatgattcttctggacattatcaaaatggtggatctatacctcaacaggatggtgcaggcgatgctatccctgaggcaaactttgagtgtgatgcattccgcataacctctattggcgatagaaaggtaccacgagacttcttcagctcatcatcgaagattcctcaggttgatgggccaatgcctgacccttatgatgaaatgctctctacaccaaatatatatagttatcaaggacccagtgaagagtttaacgaggccagaactcctgctccaaacgagatccaaacgagcactcctgttgctgtacaaaacgatatcattgaagatgatgaagagctgttgaacgaagatgatgatgatgacgagttggacgacctagaaagtggcgaggatatgaacacacaacacctggttttagctcaatttgacaaggtgacgcgcacaaagagcaggtggaagtgcagtctgaaagacgggatcatgcatataaacgataaggacattctcttcaacaaagcagcaggcgagtttgacttctgatcttaacactagcaatgatgcttctaggaaagtccttcaaatgtccagtgtctttctttttaccttatgatttaagaccgaccgagagagacatgagtattcatgggaaagtgtactctggttggcttgttgtacaaaaagaaaagttttttctgtcgaagaaggcgtatcaactttcaccttgtttcatgaactcttattgtctttcacgcaatggaaaattaacttcccaaaaaaaaaaaaaaaaagggcggccgctctagaggatccaagcttacgtacgcgtgcatgcgacgtctagctcttctat

SEQ ID NO: 94910 - DNA, 477 bp, Arabidopsis thaliana columbia
  unsure (1)..(477): unsure at all n locations
tctttctcctttgttccacattttagtccacatatctccatttctgtcggggctccaagctttttctcaagatccaaggtctcatcatctcctccagattcgaattctgcaacaacaatgacaattagcaacggggatgtcaaatctggaacctgcaacaatggctcttctgggaagaaaccattcagggtcttcggtggttaccatccacgagaagagcttgcctaccaagggtgtcatcattcaatcacaaaaagatcttcaatccctgtagagatcacaccaattattcaatcagatcttcgnaagaaaggtcttgtattggagagaaagaggtcagttagagngcacttgggttctctttctctcggtttcttgactcctcacttgtcagatncccaggntgggntatttcggnggctggagtttcccnancttgntggtnttanggnctcccngtttngnccgnggaaaaat

SEQ ID NO: 94911 - DNA, 401 bp, Arabidopsis thaliana columbia
atctctctgctcccaaattcagaaaaaaaggaacgatttttatttccggtgaatgagaattttctctcgaatttgatcgatcacatatttcatctgtgtgttttcattttgaggatgccagcaacggaatatcaaagatcattcgggaggtcttttctgaatttacggcgagacacggcggtgaactcggttgagtcaacgacggttacccccgagttgactcagatggaagcagagcttgtttcgtttcagagaaaagttgctgagaggtttatcgatctcaatgcgtctagttgtgaagatctactgtctctcgaatgggttgggaagcttcttgattcgtttctatcttgtcaagaagagtttcgttccatagtcatcaatcatcgttcgatgattac

SEQ ID NO: 94912 - DNA, 795 bp, Arabidopsis thaliana columbia
acggacgcttgggccgccacttaaggccgtctcctccgcaatctccgtaaccaaaaccaccggcatcgcctgatggggagaactaaggagcaggcaacattaactcggtatccaccctgtcctaggaatcctgctaaattcaatgatataaacaaagcactccaggaaaaaggatatggtaaggctctgaaaagaaaaccttggacgggtgtgacatgccctgtctgtcttgaggttcctcacaactcggtcgtcctcctttgttcatcttaccacaaaggatgccgtccgtacatgtgtgccacgggaaaccgtttctcaaattgtctagagcagtacaaaaaggcatatgccaaggatgagaaaagtgacaaaccgccagagctattgtgcccgctttgtaggggtcaggtgaaaggctggaccgttgtggaaaaggaacgtaagtatctgaattctaagaaaaggtcatgcatgaacgacgagtgtttgttttatggaagctatagacagctcaagaagcatgttaaggagaaccatccgagagccaagccaagagccatagaccctgtgctggaggcgaaatggaagaagcttgaggttgatagggagaggagtgatgtaatcagcacagtcatgtcgtcaacacctggggctatggtatttggagactatgtgattgagccatacaatggttatgatcatcaagatgacagtgacgattacagtgattcgtcggatgaccaaatggaaggtggggtatttcagcttggaacattcgaactgggccgtctt

SEQ ID NO: 94913 - DNA, 373 bp, Arabidopsis thaliana columbia
  unsure (1)..(373): unsure at all n locations
cccacgcgtccgcaaaaccaagtcgaagcttttaaaaccctaaatccccaaatcgggaactgagattccgattcgaagatgtcgtcgtcttctccgagtggaagcggtagtgatttgactgagagaagagggatccctgccgccaaattcatccaagatgtggagacttatctctctcagtctggtctcgatcctaactctgcgctctcgcctttcaccaagaaaggcttcagcaatataaagttgttgagatgaagcttcttgctcaacaaagggatcttcaggctaaaatcccagatattgaaaagtgtttagaggttgttgctactttggaagcanagaagggtactggtgaggcgctcttagctgattt

SEQ ID NO: 94914 - DNA, 506 bp, Arabidopsis thaliana columbia
  unsure (1)..(506): unsure at all n locations
nnnnnnnnnnnnnnnnnnnnnnnnnnnnnnnnnnnnnnnnnnnnnnnnnnnnnnnnnnnnnnnnnnnnnnnnnnnnnnnnaaccacgcgttcgcccacgcgtccgtgagattccgattcgaagatgtcgtcgtcttctccgagtggaagcggtagtgatttgactgagagaagagggatccctgccgccaaattcatccaagatgtggagacttatctctctcagtctggtctcgatcctaactctgctctcgcctttcaccaagaaaggcttcagcaatataaagttggtgagatgaagcttcttgctcaacaaagggatcttcaggctaaaatcccagatattgaaaagtgtttagaggttgttgctactttggaagcaaagaagggtactggtgaggcgctcttagctgattttgaggcgtctgaaggaatatattcacgggcctgcattgaagacacagactcagtgtgtttgtggttgggagctaatgtcatgctggaata

SEQ ID NO: 94915 - DNA, 483 bp, Arabidopsis thaliana columbia
  unsure (1)..(483): unsure at all n locations
atcagtatcagcaaccgtacactgattcttattatgtccctcaagtttcacatccacccatgcaacaaccaaccatgtttatgccacaccaagctcagccagctccgcagccatcttttactccagctcctacaagcaatgctcagccatccatgagaactacatttgttccttcaactccccctgcactgaagaatgcagatcaatatcagcagccaaccatgagttctcattcattcacgggaccatctaacaatgcataccctgttcccccgggtcctggtcaatatgcaccttctggcccttcacaacttgggcaatatcctaaccctaagatgccccaagttgttgctccagcagctggacccataggatttacgcccatggcaactccaggagttgctccaaagatctttgcaaccagcaagtncttcancacagcaggnaagttgancaggnagccccttnggctgaaanntnngc

SEQ ID NO: 94916 - DNA, 566 bp, Arabidopsis thaliana columbia
  unsure (1)..(566): unsure at all n locations
ccgntgcattagccaaggacactatcccggtagctggcttggatgactgaatgtggttgcagccataaacccaatcagaccagatgattgcggtccacgctcggccaaatctttgaacaggtatatcaagattctgcaccatcgccgcaacgcaccgggaagcgatgtctcagccatcagacctgataatgcacgtgatcaactccatgcttatgggttgcaaatgacatctcttatctcgctctctcttcgtgttcgttgcttatataaaacataggaatacaacaatccctactcttctctgtatctctctacatttgttagatttttgtttcatttttggtttgaattttgtttttcttgttttttccatccttcttttaaatgtaaaatctggttgttttatatacgtttactattcactcttcttcacaagaatatcttatgtgtaaaagccaaatcaatgtttggattaaagccctaactttcccataaaaaaacccnnccccgaggggcggccgctctagaggatccaagcttacgtacgcggcagtgcgacgtcannn

SEQ ID NO: 94917 - DNA, 609 bp, Arabidopsis thaliana columbia
  unsure (1)..(609): unsure at all n locations
caagatcgtcttccggcctcaagttcgccttttatctacaatcagctcgttcttactccatctgtgctcgttgaagaaatcatcctttgtaatccgtccaattcgcctaagtcgcgggctcgtattaatagaaagatttttcttccttccctagagatcccattttcgtacttgtgtgattcgtgcatcaacagttggcgcgccaggtagggggatagctcgaagatatctctcaaaactacgacctgatatagcgttctagaaggtcaagctcacacatgtgaagtcagggatgttaagcaaagcacgtgtgttgtgagctggcgagctggcaatgtgaagtcagggatgttaagcaaagcacgtgttgtgagctggcgagctggaaatgtgaagtcagggatgttaagcaaagcatgagccttggcacaggagcaacggaagaggatggagcaattgttgccaaaattgtttggccanggaatgttaancnaagnacgtgtgtgtttgtgancctggcgnanatggnaaatgtgnacccccnngggntgttnaacnaaaagnaccggggtttttnannntggccaaaccntgggaanttgaaaattg

SEQ ID NO: 94918 - DNA, 1694 bp, Arabidopsis thaliana columbia
ttttctcggcattcgtaaaacagaaaagtgggtctccaagaaaattaccctaaattcacaaagattcatacttttctccacctccaatggattccagagagatccaccaccaacaacagcaacaacaacaacaacaacagcagcagcagcaacaacagcaacatctacaacaacagcaacaaccaccgccagggatgttaatgagtcaccacaattcctacaatcgaaaccctaacgccgccgccgctgttttaatgggtcacaacacctccacatctcaagctatgcatcaaagattaccttttggtggttctatgtcaccgcatcagcctcaacaacatcagtatcatcatcctcagcctcagcaacagatagatcagaagactcttgaatctcttggatttgatggatcgccttcttctgttgccgccactcaacaacattcgatgagatttgggatcgaccatcaacaggttaagaagaaacgaggtagacctaggaagtatgctgctgatggtggtggtggtggtggtggtggtagtaacattgctcttggtttggctcctacttcgcctcttccttctgcttctaattcttacggtggtggaaatgaaggaggtggtggtggtgatagcgccggagctaatgctaactcttccgatccacctgctaaacggaacagaggacgtcctcctggctccggtaagaagcagctcgatgctttaggaggaacaggaggagttgggttcacgcctcatgtcattgaggttaaaacaggagaggacatagctacgaagatattggcgtttacgaaccaagggccacgcgcaatctgtattctctcagctacaggagctgtaactaatgtgatgcttcgtcaagctaacaatagcaatcctactggaactgttaagtatgagggccgatttgaaatcatttctctgtcaggttctttcttgaattctgagagtaatggtactgtgaccaaaactggtaacttgagtgtgtcgctggctggacacgaaggccggattgtgggtggatgtgttgatggaatgctagtagctggatcacaagtccaggtcattgtgggaagctttgtaccagatggaaggaagcagaaacaaagtgcggggcgtgctcagaatactccggagccagcttcagcaccagccaatatgttgagctttggtggtgttggtggaccgggaagccctcgatctcaaggacaacaacactcgagcgagtcatcagaggaaaacgaaagtaattctccgttgcaccgtagaagcaacaacaacaacagcaacaatcatgggatatttggaaactttacacctcaaccgcttcaccaaattcctatgcagatgtaccagaatctctggcctggcaacagtcctcaataaacagatggttcatgggtcaagatttgaccgggtttgcttctctgttccttttgacacatctctccatcagaattatctctataaagtagattgagctctcttactctctcatcttcttctcctttactatttctcttaaatttagctttggttttagataaatagagagagagagacatgttaagtaggtttcaaattcaatcttgtttagtttgtttcttagtagtttcttttgattgtgatgatcataaagacttgttctttttctcctaaaaaaaaaaaaaaaaa

SEQ ID NO: 94919 - DNA, 778 bp, Arabidopsis thaliana columbia
  unsure (1)..(778): unsure at all n locations
tgcnnnnnnnnnnnnnnnnnnnnnnnnnnnnnnnnnnnnnnnnnnnnnnnnnnnnnnnnnnnnnnnnnnnnnnnnnnnnnccacgcgtccgattacatcttcaaaaccgtacagatctctgtttcggagcagcttcttcacacgctcaagctcaccgatcgattcttccaatgctcttctaattcatctgcaaaactctcagatcactcatgggtttgatttcaaaccctacccgtttgattctcgtcgccaccatcttcttcctcgtttcttcaatctccggtcaggattctgtcgttgagaacaatgagagacaagaatctgaaggatctggtaaagagcttggtcgtcgtggaatggttggtactgaacgaattggagttgatactgttgtagacaatattggtgctcttggtttgaatctagaccttgatgctactgctcctagtgtatttgatgctttgttttcgagtttctcgatgatacttgtcaccgagattgggggttgaaacttttataataagcggcattgatggctatgcgccaccctaaagctactgttttatctggtgcactctcagctttgtttggtatgactatactntctactggacttggtaggatagtgccaactngatatcgaggaagcacaccaatagtgctgctacagtgctctattgcattttttgggttggcgactactctacattgcttggaagtctactgattcaaggtcaatcagaagaaagaatggaggaagttgagagaagctcgagtc

SEQ ID NO: 94920 - DNA, 857 bp, Arabidopsis thaliana columbia
  unsure (1)..(857): unsure at all n locations
gatatcgccnnnnnnnnnnnnnnnnnnnnnnnnnnnnnnnnnnnnnnnnnnnnnnnnnnnnnnnnnnnnnnnnngcagcttccacgcgtccgcaagctcaccgatcgattcttccaatgctcttctaattcgtaagtaattttccagatccaacctttctcagattcgctctttcccgagaaaatttgaagaaacagagattcatcattttctcttcctctcaaaaatcagatctgcaaaactctcagatcactcatgggtttgatttcaaaccctacccgtttgattctcgtcgccaccatcttcttcctcgtttcttcaatctccggtcaggattctgtcgttgagaacaatgagagacaagaatctgaaggatctggtaaagagcttggtcgtcgtggaatggttggtactgaacgaattggagttgatactgttgtagacaatattggtgctcttggtttgaatctagaccttgatgctactgctcctagtgtatttgatgctttgttttcgagtttctcgatgatacttgtcaccgagattggggatgaaacttttataatagcggcattgatggctatgcgacatcctaaagctactggtttatctggtgcactctcagctttgtttgttatgactatactttctactggacttggtaggatagtgccaaacttgatatcgaggaagcacaccaatagtgctgctacagtgctctatgcattttttgggttgcgactactctacattgcttggagggctactgattcaaagtcaaatcagaagaaagaaatggaggaagttgaagagaagctcgagtcaggtcagggaagacacccttcgtcgttattcta

SEQ ID NO: 94921 - DNA, 545 bp, Arabidopsis thaliana columbia
tctagaagactatgacgtcgcacgcacgcgtacgtaagctcggaattcggctcgagttacagctgttttgtacgccatcattatctattactaataaaaaatctcaacttttgttccttactcttattacttcctaaatccgatcgaaacaactgttgggttagtttctaatttccaagaatggcgcaagatcacgacgagacggagaataaaacctttgccgacgttgtcggtggcgatgatgtcggcgaaattgtcaacggaggaacaaagaatggctatcgtaaaccggactctgtggagaaggaagatgatgaggatttgaagagtctctattccttgatttgtctcacgatcggttcgattctgtttccagattcgaaaaaccgggattgcgtcttcctttctttgaacgtgtaagaaacttccgtcgctgaaaatgggcctaagcttcgagaagcttctgaaagaacaggacgcgagattcttctctggactcgtagaggcagctcgcttcgtgctctgcttgtcatcactatgggaac

SEQ ID NO: 94922 - DNA, 790 bp, Arabidopsis thaliana columbia
gccggccactcccgggtcgacccacgcgtccggcgaaatcgcttgaccactcaagacgagaaaaacgctaacaagtcccatagtttgtgtttattggacttctttcctctcatcttctccagcagaaacaaaaaaagctgaaagatgtggttttttggatcgaaaggagcatctggattctcgtctcgttcaactgcagaggaagtcacacatggtgttgatgggactggtctcactgccatagtcacaggagcatcaagtggtataggagtagagacagcgcgtgttctttcactgcgtggtgtgcatgtggttatggcggtgaggaacactgactctggtgctaaagttaaggaagatattgtcaagcaagtcccctggagctaaactcgatgtcatggagttaggtctcagctcaatgcaaatctcgtcaggcaaatttgccgtctgaggacaaaatcctactgggccttccactcaacctctcggtcaacaattgccggggttatggcatgtcctttcatgcctctctaaggacaacatcgggcttgcatgtcgcaccccaatcattttgggtcatttatctgttggactaaaccttcctgcctagaatgccaactgaaggaaccccaattacgggtgcaaaatccaaaacccaagaaagggacagtaaatttgtttccaaacccttaccccgttcaaggaaagctctccatttcggatatcctctcgtaatccaccagcaaagggcaagttcctcgccgttcttggaacttaagcatcccacaat

SEQ ID NO: 94923 - DNA, 621 bp, Arabidopsis thaliana columbia
  unsure (1)..(621): unsure at all n locations
cagcaacaaatttcccagagtctttggataaggccctggttagacctgggaggtttgatcgtcatattgttgtacctaacccagacgtggaaggtcgacgccagattttggagtctcacatgtcaaaggtacttaaggctgaagatgtcgatttaatgatcatcgctagaggaacgcctggattttctggcgctgatttggctaatctggtcaatgttgctgctttaaaagctgcaatggacggttctaaagatgtgacaatgtctgatcttgagtttgccaaagacagaatcatgatgggaagtgagaggaaatctgcagttatatctgacgagtcaagaaagctaactgctttccatgaaggtggtcatgcccttgttgccattcacaccgaaggtgctcttccagtccacaaagcaaccattgtgcctcgtggtatggctcttggcataggtttctcaactacccagataaaagatgagacggagcatttcttagggaacagattgcttgtctaagggcctgatgtttgtttattgggagggcccgggtaagccccagaggtttgattttttttgggggaaanttgaggtnaccttccggggngcaantttcntnaac

SEQ ID NO: 94924 - DNA, 595 bp, Arabidopsis thaliana columbia
  unsure (1)..(595): unsure at all n locations
ggaagagcctcttgttttcgagaaatgggatgctgattttgcaactggggcatacaggcagcaagtggaagtcttagctcagcaccaggtgagattaattagtgcatctaccatgtcctgcatttcagcttggtcacgtatttacttatgtttgtagttaatggaagatttggaaaatgaagctagagagagggaagcggcagaggtggctgaaatggttttgacacagaacgaaagtgctcatgtactgaagcctaagaagaagaaaaaggcgaagaaagccaaatataaatccctgaagaaaggatcactggctgccgaatcaaaacatgtgaagtcagttgtgaaaattgaagattctactgatgatgataatgaagaattcggctatgtgagtagcagtgactcggatatggttacaccgctttcgcggatgcatatgaagggcaagaaaagagaaagagtagaaaggagaagaggagaaggagtaaaaaaaaaaaaaaaaaggnnnnnnnnnnnnnnnnnnnnnnnnnnnnnnnnnnnnnnnnnnnnnnnnnnnnnnnnnnnnnnnnnnnnnnnnnnnnnnnnnnnnnnn

SEQ ID NO: 94925 - DNA, 555 bp, Arabidopsis thaliana columbia
  unsure (1)..(555): unsure at all n locations
gctcanattnaatgttggccnttctgttgganttgcccatncggaatcccgaanaatgttttccnatggaaanggggaagagatgagaaagaggaagaagaggagagctctcgttacctgtacaggtcctgcttgtaactcaactgatcagttgattggttggcatattttcaatacattgccatatgccggggaagagtgcagtttatatagatgatgttgctgcggttttgcctcaaaaactagagtggtctgggtttgtgttgaactcgagattgctttgggaggaagctgagaataagccagagtgggttaaggactttgggtcgttgaatgagaatgaaggtgtggagagtcctttgtctctgttgaaggatccttcaatggtggagcctcttggaagctgtggaagacaagttctgctatggtggcttcgagtagaagcacgcgctgatagcaaattccctcccggatggataattgatcctccgttagagatcacagttgcggctaaacgcactccatggccagaagttcctcctgagccaccaacta

SEQ ID NO: 94926 - DNA, 417 bp, Arabidopsis thaliana columbia
acgcgtccgcggacgcgtggggctgtgttgtaggcttcttagcattcatttctgtttgctagtgggtgagttagcttatatctgggtacgttatatattagtagctatctgaagtagtaccgatctgtctttgtttgtactttgtagtgaactctatgcaacccaaactactttttttttcctgcagcatttagtttttgctagattgctcctgttcaagttgaaagatttgttgtttgagataacttcaactgaaacttttgaagtaaggagtatttcatggtggcttgtcagagttttactgattcatcaaagagttctacaagagcgatcttcatctttgtttgaaatgttgcaagtttacatggccgaagctatagaccattttggagaattggaaaaagtaaaaagctactg

SEQ ID NO: 94927 - DNA, 676 bp, Arabidopsis thaliana columbia
  unsure (1)..(676): unsure at all n locations
aaatcttagcttaacaccatcgcgaccggatttcaaattccggcccatcgtctcaccggggaagaccccgcctattgccgccgatttcggttccggtctgctcagatctaatcgagtggctttcttctttcttcagatctcttcactttgaatcgggtactcgatctcgattcgcggggggcttttgctagtcgcgatggaggcgatcgatgagttgtctcagctctcagattcgatgaagcaggcggcgtctctcctcgccgacgaagatcctcgacgaaacctcttcttccaagcgccctgccactttcctcaacgtcgttgccttgggaaatgtgggagctggaaagtctgcagttctaaacagtctaattgggcatccagtgctgccgacgggtgagaatggtgctacacgagctcctataataattgaattgagcagggacnagttctttgagcagaaaggnaattatcttgcaaaaccganaataaaatctcaacaagtntctgnaagtgctttgagacattctctgcaagatagacttagcaaaggagctcangggagaatcgtgntgaaataaacttaaaacttcggaccagcacagntccaccattgaatnagttganctgcctgnatgggccagaaattgtggcngcaatnttgngatacgcnagc

SEQ ID NO: 94928 - DNA, 415 bp, Arabidopsis thaliana columbia
ctctctctctccaccattgactctctctctctctctcgctctggaatcatcctttatttctgtgactgtgtgcacttgcagagaggagagagaggcccgaaaccaaaagaaaagaaaaggttgtggcttgcagctgaatcaataccatctccatatatacaatacaccttcactattcccccttttgtatttttattatatttttcccatcaaagtctgtttttttagactccggtttgccgctttgtgtgtgtgtgagagagagaaagagagctatctatcctctgatttatgggctctggatctctgacaatcgagttgagttaattacaacacattcctctctttctcaatcgatctgtgaaatccaagattgttagctgtgtctgttttcagacaaatatgaacaccggtg

SEQ ID NO: 94929 - DNA, 837 bp, Arabidopsis thaliana columbia
  unsure (1)..(837): unsure at all n locations
nnnnnnnnnnnnnnnnnnnnnnnnnnnnnnnnnnnnnnnnnnnnnnnnnnnnnnnnnnnnnnnnnnnnnnnnnnnnnnccacgcgtccgcggacgcgtgggtcttccccagatcctcctctctcttcttcactcttttaacggacacttttcactgatctattcactcactcaaatcgccgccggagctaaatcaatcaacaatgacgtcgacctacacgagattcgataccgtatttctcttttctaggttcgccggcgctaagtattcgccgttattgccgtctccgtcgtttactttatctacttccggcattcatatcagaaccaaaccgaattctcgttttcactcgattatagcatcctcctcatcttcatctgtagtcgccggaactgatagcattgagattaaatcgttgccgacgaagcctattgaaggacaaaagactggaactagcggactccggaagaaggtgaaagttttcatggaagataattatttagccaactggattcaggcattggttaattcattgccacttgaggattataagaatgcaacgttggttttaggaggtgatgggcggtactttaacaaaaaagcttacagatcattatcaaaattggtgctgggaatggagttggccaattttagttggaaaggaggcattttgtaaccccagcggtttccgctgtattcaggaaagaaaggaaatggaggattcatatgagtgcagccatatcctggtggcctgatatgactggggttcaagttcattacagcagggtcagcctgctccggaccttactgacaaaatatggaatacccttcatctct

SEQ ID NO: 94930 - DNA, 496 bp, Arabidopsis thaliana columbia
gcgtcccaaaagttccattctttttcacaaagccattgtgctgttttctccatttggatcaaaatggttgctgagaacaataaaaacaaggacgtaacactctctgcatcaatggacaacaacaacaacaacatcaaaggaactaacattcatcttgaggttcatcaaaaggaaccagctttggtcaaacctgaatccgagacacgaaagggcctttacttcttgtcgaatcttgaccagaacatcgccgtgattgttcgtacaatctactgtttcaaatccgaggagagagggaacgaggaagcagtccaagtgatcaagaaagctctgagtcaagttcttgttcattactatcctctcgctggacgcctcaccatcagtcctgaaggtaaactcacagttgactgtaccgaagaaggagttgtgtttgtggaagcagaagcaaactgtaaaatggatgagaatggtgacattaccaaacccgatcctgaaactc

SEQ ID NO: 94931 - DNA, 529 bp, Arabidopsis thaliana columbia
  unsure (1)..(529): unsure at all n locations
cttgcagttgaggtattgcatggtttgcaacagaaggagcacattgctcaaaagtgcgtgagatacttgacgcgtcagaagtgtggagtgcatataaagaccaaaagcatgacttgttcctgccatcaaacacacaatcagcggcaggggtggctggctttattgagaactcatccaacagtctcacttacgctcttaccgctcctcctccgccttcgcatccttgaccatttcttccttgtatatccttttgtaaagtccaatcattaccgtgcttttttttttctttctatagagaaatactgtcgtttgtaaatgtttgatgagaaagtagaaaatatttgtggtttccttggaccaacaatgaaaactacggtctgatgacaggatttgtagttgttgggtcgtagacgacatccaaacaacttgtccctttatatttttgggattaaacttgttgcccattaaaaaaaaanttnnanannnnnnnnnnnnnnnnnnnnnnnnnnnnnnnnnnnnnnngtaccta

SEQ ID NO: 94932 - DNA, 554 bp, Arabidopsis thaliana columbia
  unsure (1)..(554): unsure at all n locations
actggaggacggggggtaggtatgggctcagttctcacatgaaatggaatgaatcggaagcatcaatcgggcgggtacttgcagttgaggtattgcatggttttgcaacagaaggagcacattgctcaaaagtgcgtgagatacttgacgcgtcagaagtgtggagtgcatataaagaccaaaagcatgacttgttcctgccatcaaacacacaatcagcggcaggggtggctggctttattgagaactcatccaacagtctcacttacgctcttaccgctcctcctccgccttcgcatccttgaccatttcttccttgtatatccttttgtaaagtccaatcattaccgtgcttttttttttctttctatagagaaatactgtcgtttgtaaatgtttgatgagaaagtagaaaatatttgtggtttccttggaccaacaatgaaaactacggtctgatgacaggaagaaaaaaccaaaaaagnnnnnnnnnnnnnnnnnnnnnnnnnnnnnnnnnnnnnnnnnnnnnnnnnnnnnnnnnnnnnnnnnnnnnn

SEQ ID NO: 94933 - DNA, 1137 bp, Arabidopsis thaliana columbia
acgatattaatgaggaagaactgcgaccttacttctcattgccaaaggttatggatgcgttattcggtctagctaagacactatccgcgcgtcctgttgtgccagcagacggtgtagcgccggtctggaacagcgatgttaggttctactgtgtcaaagattcttctggaaatccaactgcttatttctactttgatccctactctcgcccttcagaaaagagagacggcgcttggatggatgaagttttttctcgtagccgagtcatggcccagaagggttcctccgttagactccctgttgctcaaatggtctgcaaccaaactccacctgttggtgacaagccaagccttatgacattccgtgaggtagagacagtatttcatgaatttggacatgctcttcagcacatgcttacgaagcaggatgaggggctagttgctggtatccggaatatcgagtgggacgcggttgaattaccgtcacagtttatggagaactggtgctaccacagggacactttaatgagcattgctaagcattacgaaacaggagaaacactcccagaggaagtatacaagaaactcctggccgcaagaacattccgtgcagggtcctttaagcctccggcagttgaaatttcccagttgttgatcttgagctgcacacaaaaatccgctcccaggaggaccagaggcccatcctatgccgtagatcaaaagggtatcagtaaaaaccccaaagttatcccctccacttcctgaggcatagatttcctctgtagcttccagtcacaatctttgcccgggggatatgcagctggatattacagttacaagtgggcagaagttttgtctgctgatgcattttcagcatttgaagacgctggactagacgacatcaaggctgttaaagaaacaggacagagattcagaaacaccaatacttggcacctggaggaagggaaaccgccccttagggtgttggttgagtttaggggccgagaaccttcacccgagcccctcctcagacacaagggaccctgggctgcctctgctcctgcttaacccttatataaccctcacaacatttggaaactttgaaagacatttataagatggaaaatcaacttttctt

SEQ ID NO: 94934 - DNA, 593 bp, Arabidopsis thaliana columbia
  unsure (1)..(593): unsure at all n locations
cccccaacaaaccggntttgggntttnggggtttggccgtcctgcgttcgaccggtaacagccgctggggacctatgaagtctccatgtggcgtacactttggaacggtccctttccccatgtttttcgtgctgccaggagcatattggaccggtttggtgccattttttgctgcctgtaccagccatcggctttggtacatattaatcacatacaagagtttatggagagagtacatggacgaaccacggagaccagaatctatagactcaagacatggcaagtctgttaagaacaatcaacgtacaggagacgaaacgagaaggaaattgcaccttgcatagaagtcaaaacttaaattcttttgattactttttcttgccagagaatatgataggttagtgtatagatagataggttttacaccacgaaacattgtcccaactcccaactcagccaaatgatgtatataagaaagaaagaaaacacacactcaccactcttcttgcaaatcttctagtgggtcttcctcttcagaattggtaagttttcgatataataacaaaaaaaaagagagaacatttttatgattt

SEQ ID NO: 94935 - DNA, 712 bp, Arabidopsis thaliana columbia
ctacaattcgactcactttagggaaagctcggccgcctgcaggtaccggtccggaattcccgggtcgacccacgcgttcggaagcaagcggcgggaacaatcgatatctcttgtagatcatacatggattggttctttggtggattacagtttcagcttgagcatcatttgttccctcgcttacctcgttgccatctccggaaagtttctccggaggttcaagagctttgcaagaagcataatcttccgtctaggactatgtcgtggtttgaagcaaatgtgttgcccattaacactttgaaggccgcagcttatcaagctagagacgtgggctaatccggtggctaagatcctgggttgggaagctgtgaatactcatggcgtaaatgatcttaatcaaatccaaatatgctcttgcttgggtcaaaattgaaggggctggttgtatgccttattgaatccctgaatttcggtttggtacttacctacctggaagagaggtattagatcggaattggatccagcatttgtttttttaataggacaactcctcggatcggaaagaattaattaataaattaattttgaatttaataaaaaaaaaaaaaaaaaaagggccgcccccggactaggaagctcgtcgaccccgggaataaatcccggcccggtaccgccaggcgtaccagcttcccctatagagagtcgtataagt

SEQ ID NO: 94936 - DNA, 1975 bp, Arabidopsis thaliana columbia
  unsure (1)..(1975): unsure at all n locations
ctctcccgcctccagcggctagtatcgccnnnnnnnnnnnnnnnnnnnnnnnnnnnnnnnnnnnnnnnnnnnnnnnnnnnnnnnnnnnnnnnnnnnnnnnccacgcgtccgcgaagataagcggagagagagagagagacagagagagattcaaaaatccgattccagatccattcctgggcaaacaaaggttggtgtttctctaatctcaaagcttttttcaaattcggaaaaagcaaatcgtgggaagagattcatcttctctctgtgcgttcatcggatctcggagcttttggttcgtcgtcaatggcggaagagacggagaaaaagtacattacgaacgaagatcttaaaaaacacaacaaatctggagatctatggatcgcgattcaaggcaaggtctacaacgtctccgattggattaaaactcatcccggaggcgacacggtgattctcaatctcgttggtcaagacgtcaccgatgctttcatcgcatttcatcccggaaccgcttggcaccatctcgaccatctcttcaccggttaccacatcagagatttccaagtctccgaagtctcacgcgattaccgtcgtatggctgccgagtttcgtaaactcggtctcttcgaaaacaaaggtcacgttactctctacactctagccttcgtcgccgccatgttcctcggagttctctacggtgttttggcttgtacctccgtcttcgctcaccaaatcgccgccgcgcttctcggtctcctctggatccagagcgcttacataggtcacgattctggtcattacgttatcatgtcgaacaaatcttataacagattcgctcagcttctctccggtaactgtctcaccggaatctcaatcgcgtggtggaaatggactcacaatgctcatcatctagcttgtaacagcctcgattacgatccagatctacaacacatccctgtcttcgccgtctccaccaaattcttctcctcattgacctcgagattctacgatcggaaactcacgtttgatccagtcgcgagattcttagtcagctatcaacactttacttattatccagttatgtgctttggaagaatcaatctcttcattcaaacgtttctcttgctcttctccaaacgtgaagtaccagatcgtgctttaaacttcgccggaatcttagtcttctggacttggttcccactcttagtctcatgtctaccaaactggcctgagagattcttcttcgtcttcacaagcttcaccgtcacggcgcttcaacacattcaattcacgcttaaccatttcgctgctgatgtctacgttggtccacccaccggtagcgactggttcgagaagcaagcggcgggaacaatcgatatctcttgtagatcatacatggattggttctttggtggattacagtttcagcttgagcatcatttgttccctcgcttacctcgttgccatctccggaaagtttctccggtggttcaagagctttgcaagaagcataatcttccgtataggagtatgtcgtggtttgaagcaaatgtgttgaccattaacactttgaagacagcagcttatcaagctagagacgtggctaatccggtggttaagaacttggtttgggaagctttgaatactcatggctaaatgattttaatcaaaacaaaatatgcttttgtttgggttaaatttgatgtgttgtttttatgctttattgaatctttgaatttcgttttgttacttacttacatggaagagatgttttagatcgaaattgaatcgagatttgatttttttattagacaactcttcgtatcgtaatgatttattaataatattattttgaatttaaaaaaaaaaaaaaaagggcggccgctctagaggatccaagcttacgtacgcgtgcaggcgacgtcatgcatcttctataggtgcacctatatactagcgaggggggggggggagt

SEQ ID NO: 94937 - DNA, 718 bp, Arabidopsis thaliana columbia
  unsure (1)..(718): unsure at all n locations
ccccccctcgggacgactggatcgataagctcgatatcgaactcgcggccgcttccagttaaaatcttttgcaatgtctaaagcagttctattggtcgctctctgctttttaccggctctagccatcgcggctagaccgaacaagaaccctttcgtcgtgcgaggccgtgtctattgcgacacttgcctcgctggtttcgaaactccagcctctacttacatctccggtgcagtggttagattggaatgtaaagacaggagaacaatggagttaacgtatagccacgaggcgagaactgactcgacaggatcatacaagatcttggttaacgaggatcatgatgagcagttctgtgatgcaatgttggttcgtagctctcagttacggtgttccaatgtgtcccctggtcatgaccgtgcccgtgtgactctcactcgcttcaacggtattgcttctgacgaccgttttgctaacaacatgggatttctaagggatgcagctatgccgggttgtgcggatatcatgaagctataccaagaaaccgaggactagtttctctgttttgttaagtatgtggtattaaaatgtattgcagcttgtgttatgtgcattttatgcggccgnnnnnnnnnnnnnnnnnnnnnnnnnnnnnnnnnnnnnnnnnnnnnnnnnnnnnnnnnnnnnnnnnnnnnnnnnnnnnnnnnnnnnnnnnnngtt

SEQ ID NO: 94938 - DNA, 619 bp, Arabidopsis thaliana columbia
  unsure (1)..(619): unsure at all n locations
ggggganagtncagnngnatgctannccgntcctttnngnacancngccttanntgcccactnttgtgntggcnagctcctagtnaggganctttcctncttagttctggaaccaaagggaaaaaggtccagcctcccaaactcaaggataatgatccatcagccgcttggtggagctcaaggtggccaaaccgacatttgacattcaggcaaatgaaatgctgcatcacaaggcaaacctaaacggttacctcgcataccacactggtcaaagcctggagaagataaaccaggacacagaccgtgatttcttcatgagtgccaaagaagcaaaagagtatggacttatcgacggtgttatcatgaaccctcttaaagctctccagccacttgcagcagcttaatcgcctaaaggtagtggttcagctttagcacttgttcttttttgggcctttgatgaactgagattttccatgaaatatgtttctattctacaaggaaaatcagatttgtttgggatcaaactctgtagttgatacatacatgaagaccaaagtaaagtttcttactgtgctgtttgattgaacaacctatgatcttttaatttgttttactgaaa

SEQ ID NO: 94939 - DNA, 450 bp, Arabidopsis thaliana columbia
  unsure (1)..(450): unsure at all n locations
ctctttccctaaacacactaattattttctatccgacaccnccatattatnacaactacttctgtgaaacttgaaacgggggggtagtccactacacttttaaattcatcatgaaaaatggtggcttaaacactgtgaaatattatccttaccctggattcggccgaaaccgcaatcctttctatcaagaactctacagttgtgagtattgatgggtacgaacatgttcctactaaagacgagactgcgttgaagaaagctatttcataccaaccggttagtgtacctattgaagccggtcgaagaatttttcaacattaccaaacgggtatttttaccggaagttgtggtacaaatcttgatcacgcggcggttgctgtcgggtacggatcataaaacggtgttgactactggattgtaaggaactctttggggacacaatttgggtga

SEQ ID NO: 94940 - DNA, 891 bp, Arabidopsis thaliana columbia
ccgcagttccggcgccgacccacgcgtccaagtaatcctaactatacaaaacacataacaatatggctccttcaacaaaagttctctctttacttctcttatatgtcgtcgtgtcattagcctccggtgatgagtccatcatcaacgaccatctccaacttccatcggacggcaagtggagaaccgatgaagaagtgaggtccatctacttacaatggtccgcagaacacgggaaaactaacaacaacaacaacggtatcatcaacgaccaagacaaaagattcaatattttcaaagacaacttaagattcatcgatctacacaacgaaaacaacaagaacgctacttacaagcttggtctcaccaaatttaccgatctcactaacgatgagtaccgcaagttgtacctcggggcaagaactgagcccgcccgccgcatcgctaaggccaagaatgtcaaccagaaatactcagccgctgtaaacggcaaggaggttccagagacggttgattggagacagaaaggagccgttaaccccatcaaagaccaaggaacttgcggaagttgttgggcgttttcgactactgcagcagtagaaggtataaacaagatcgtaacaggagaactcatatctctatcagaacaagaacttgttgactgcgacaaatcctacaatcaaggttgcaacggcggtttaatggactacgcttttcaattcatcatgaaaaatggtggcttaaacactgagaaagattatccttaccgtggattcggcgggaaatgcaattctttcttggtgtactcttgaaaaaagagttgctctgttttcactttattttcaaaaattgcaaaatctgattatttttcctatctctttgtgtttttgcaaa

SEQ ID NO: 94941 - DNA, 454 bp, Arabidopsis thaliana columbia
gaaaacccgggccggccgacgcgtacgcccacgcgtgcgccgatgacgaagaggagcaaaggagctaacgaagataagctgatagaaaccaaaagcaaaaacgtttctggaaaatctcagaaacagaagaaaccagtagaagcagaaagcttaaaagaggaagaccttctacaagcatccggaactgattctgattacgacggagatagtttgcctggttctttgaattccgacgatttcgactccgatttttccgattcagaggatgatggaacacatgaaggaacagaagatggagatgtagaattttccgatgacgacgacgtgcttgagcatgatgggtcaattgataacgaggatgatgatggaagtgaacatgtaagtagtgacaataatgaggaacatgggagtgatgaaaattttgagtgaggtgaaacggttgaagtgagctatt

SEQ ID NO: 94942 - DNA, 518 bp, Arabidopsis thaliana columbia
gataccccagctcttattccacttaattttagggaaggtggtacccctggcaggaccgggcccggatttccgggtccgcacccagccttccgaaggcttgaaaaatttcttagttcctaaaccactttttggggataaatttatctctaagctgctggattttctttaatatgcaggagttggtcagactgacggtgtaacggaccgggaaaagccaaacgtgagacaaacgctggtcacggcttatgatacattgctagccccacaagtcaaaacttgtatcgaagtgtcacattttcctcaagacaacgcgcgtttcgtgaaaacgcgagtaaacggcggtggaataacaacatgtattgcaacatggtttagccaactctgcattctcctccacagacttttaaaagaacggcgtcacgaatcctttgacttacttcgcattttccaagtcgtcgcggcttcgatcctttgtggtctcatgtggtggcactctgattatcgagacgtacatgacc

SEQ ID NO: 94943 - DNA, 820 bp, Arabidopsis thaliana columbia
gcgatcttaagtccccaaaccttctagttgacaaaaactgggtcgtgaaggtgtgtgattttggattgtctaggatgaaacacagtacatacctctcttcaaagtcaacagcagggacggctgaatggatggctccagaagtgctaagaaacgaacctgctgatgagaagtgcgatgtttacagctacggtgtgatcttatgggaactctttacgttacaacaaccgtggggaaagatgaacccgatgcaagtagttggggcagttgggtttcagcatcgacgtcttgacattcccgactttgtagatccagcaattgcagatctcatcagtaaatgctggcagacggattcaaagttaaggccaagttttgcagagataatggcgtctctaaagcggctacagaaacctgtaacaggttctaacatcccaagaccagtccccagttcctcttcattaccaactgaacatgaacaaaaggattgataacagaagaagacgcccaaagtggcaaacacatttttgacgaattcaatctgtttgaaggaaaaaaaagctacaaatgttccttctctgctactttttgcctcagcttcagtgtttgacacagcttgtgaattgtgaaaaagaaagattcatggaagatgacgattgaagaaggtgaaggattgtgctcgtgtgttttgttgtctttgcttgcaagcgatgttcatgttcatgcgtaatttcctctattttgttttccaatattgaaactgtccaaagagagaaagaaaaaccaattgcccaactcgttgaaacgttgaccgaaaacatatatt

SEQ ID NO: 94944 - DNA, 589 bp, Arabidopsis thaliana columbia
  unsure (1)..(589): unsure at all n locations
cacgtttgcttttagtaaccgaaagaaccaaactgataaatactacttctcctatgagaatagtttttggtaaaacttacataatgggaatggtttttggtaaaatcgctgtagagactcctaaatacacggtgactaaatccggtgacggttatgagatccgtgaatatccaccagcggttgcggcggaggttacatacgatgcgtcggagttcaaaggtgataaagacggaggctttcagcttttggctaagtacataggtgtgtttggcaaaccggagaatgagaaaccggagaaaattgctatgactgcaccggtgatcactaaggaaggtgagaagattgcgatgactgctccggtgattactaaggagagtgagaagattgagatgacttctccggttgtaactaaggaaggtggtggagaaggaaggaagaagttggtgaccggtgcagtttttgttgccgtcgatgtataagaaggccggaggaggcaccaacgtccaacggattagagggttttaattaaggnggaagntgggtggagtttggtgtgnttaaanttnaggggantanngcccgananttt

SEQ ID NO: 94945 - DNA, 509 bp, Arabidopsis thaliana columbia
  unsure (1)..(509): unsure at all n locations
caagcngttttcaaggaggtccagtctagaatcgtcggattatttnaaggagaatagtctcttggttaggtgccgtgtgggtgtggtgaagtcagtnacggagggaccgaggtattacaatatccctgtnccagtttctaacttgggacaacagttggnaaattnattggagagtgggaaaggctgtaatgttgttttccaagttnatggagaaaccttcaacgcacacaaattggttcttgcaacgcgttccccggttttcaacgcacagctttttggccctttaggagaccgaaataccaaatgcataacgatagaagacatggaagcacccattttcaaggattgtctattcacggatgtaccatccgggatcttctcctggggcgctactcctattctcgagtttactcacccgggataaggtattgctccattttatctactgggacgaattgcctgatatgcaagagttaataggaacagactctacattggcgtctactctt

SEQ ID NO: 94946 - DNA, 431 bp, Arabidopsis thaliana columbia
gatcatattaaaattatcgtaattaacaaactaaacaggaatcgcatatctgcaatagtaactatttcacagattggttttatcttttctatgtcttgtccttttttgtccaatttaagaccataaaaggagaaaatcgtgtgaaagacaagacagatagacagacacgaatattcagacgcagaaaatttcttttctctttcgaacaccacagatttcgcaatcgtgttttgatctgattcttccaggattctcccggtggcggagagaagaaacagtggaaacccagaaagcatttttctcaatggcgtcgactacacgagaaaagtttgtagctttcataaacaacagatggctcgtcttcgtggctgccatgtggatacagtcttgtgctgggatcggttatttgttcggaagcatttctccggtta

SEQ ID NO: 94947 - DNA, 743 bp, Arabidopsis thaliana columbia
  unsure (1)..(743): unsure at all n locations
nnnnnnnnnnnnnnnnnnnnnnnnnnnnnnnnnnnnnnnnnnnnnnnnnnnnnnnnnnnnnnnnnnccacgcgtccgcccacgcgtccgacgaatattcaaaaaaaaaaatttcttttctctttctaacaccacagatttcgcaatcgtgttttgatctgattcttccaggattctcccggtggcggagagaagaaacaaaggaaacccagaaagcatttttctcaatggcgtcgactacacgagaaaagtttgtatctttcataaacaacagatggctcgtcttcgtggctgccatgtggatacagtcttgtgctggcatcggttatttgttcggaagcatttctccggttatcaaaagctccttaaactataatcagaaggagctttccagacttggagtcgccaaggatctcggtgatagtgtcggattcatcgccggtactctctctgagatcttgcctctttgggccgctcttcttgttggcgccgttcagaacctcatcggttacggatgggtttggcttatcgtcaccggtcgagccccgattcttcctctatgggctatgtgtgttctcatattcgttgggaacaatggcgagacctacttcaatactggagcattagtctctggtgttcaaaactttcccaagagcagaggtccagtggtgggtattctcaagggttttgctgggctaggtggtgcgatcatctctcagatatatacaatgatccactcatcta

SEQ ID NO: 94948 - DNA, 2145 bp, Arabidopsis thaliana columbia
gctcgttttcaaattaaaaacagggagaaatttggaaattccagtacgacgggagataaaacctaacatacgccatggtgaccgttatctaaactacgccaaaatatttgaagtgtcgtcgtttcataataaaacgcaaacaaaaacccactcccactttctcctttccaaaaaaagaactctcgccactttctctgctcttttctttctctctctctttcttgttttcgccggcgatcatggagaaaagcggcttctctcccgtcggtctaagggttcttgtcgtagacgatgatccaacttggctcaagattctcgagaaaatgctcaagaagtgttcttacgaagtaacgacctgtggattagctagagaggctttgaggttgctgagggagcgtaaagatggatatgatatcgtgatcagcgatgtgaacatgcctgacatggatggtttcaagcttcttgagcatgttggtcttgaattagacctccctgtaataatgatgtcggtggacggcgaaacaagccgagtgatgaagggagtgcacacgggagcttgtgattacctcttgaagccgataagaatgaaggagttaaagattatatggcaacatgttctgagaaagaagcttcaagaagtgagagatatcgaaggctgtggatacgaaggaggagcggattggatcactcgatacgatgaagcacattttcttggaggtggtgaagatgtttcttttgggaaaaagagaaaagactttgactttgagaagaagcttcttcaagatgagagtgatccatcatcttcttcttccaagaaagctagagttgtttggtcttttgagcttcatcataagtttgtcaacgccgttaaccaaatcggatgcgatcacaaagctggtcccaagaagatattggatctcatgaatgttccatggctcactagagaaaatgttgcaagccaccttcagaaatatagactttacctgagcagattagagaaaggaaaggagctcaagtgttattcaggtggcgtgaagaatgcggattcatctccaaaagatgtcgaagtgaattcaggctaccaaagccctgggaggagcagctatgtattctctggaggaaattctctgatccaaaaagcaacagagattgatccaaagccacttgcttcagcttctttgtctgaccccaacaccgatgtgatcatgcctccgaaaacaaaaaagacgcgtataggatttgatcctcccatttcctcctctgcgtttgactctctgcttccttggaatgatgttccagaggtccttgaatcgaagccggttctgtatgagaatagctttctccagcaacaaccattgccaagtcaaagttcctatgttgcaatttctgcaccatctctcatggaggaggaaatgaagcctccttatgagacaccagcaggaggcagtagtgtgaatgcagatgagtttctcatgccacaagacaagatccctactgtaacccttcaagatttggatccctctgccatgaagctgcaggagttcaacacagaaggcgattctgaagaagcttgaactggggaacttccagaatcacatcattctgtttctttagacactgacttagacttgacttggcttcaaggcgagcgtttcttgcaaacaccgactccagtttcaagatacagtagtagcccatcactcctatctgagctcccagcccaccttaattggtatggaaatgagcggctgcctgaccctgacgagtattccttcatggtagaccaaggtttattcatatcttaaccttgttccaataacttcttttcgtatattggttggtgtaatgcagaaagattttgtgggtatacctgaaaataatcttgctttcccaagaaccttccatgatcggatgcattgtacaataatccacgagtgtcgtaggctaattacaccaaacaggttgatgacagtgataaggccacatgtttcacaccgtcgcttaagatctttactgtcacctggaaggaaattagtttgcatgtcatatcgcggccgcgaattcctgcagcccgggggatcccctaggtctagaacggccgccaccgcggtggagctcccgcttttggtccccttaattagagtg

SEQ ID NO: 94949 - DNA, 541 bp, Arabidopsis thaliana columbia
  unsure (1)..(541): unsure at all n locations
ctggcttcttcgttctccagaagctcaactctacctctgacgatcctctcgatgattccttcaccgacgctgaacccgccgacgacgattcagtctctggattctccaaggtgggaatggcaatgaagtctggattttggacatgcgttgacatggcaagtggtcgctatctctggaacaatctctgttcaaatgccaaacgctcttcttgagttttgttactctctatctgtctctctattgtctgtaactgtttaattgaactgcaatcgacggcaccaaatttacatattgtctctgtactatatactatagatcttgtcttcactactaaatctcaataaagtcgaagcctttatcccagtttcaaagagagtggaggatatggcttagattcttgttcttcctgtaatgctgtagagtaagcaattgaagttctcttttccnnnnnnnnnnnnnnnnnnnnnnnnnnnnnnnnnnnnnnnnnnnnnnnnnnnnnnnnnnnnnnnnnnnnnnnnnnnnnnnnnnnnnnnnnnnnnnn

SEQ ID NO: 94950 - DNA, 568 bp, Arabidopsis thaliana columbia
  unsure (1)..(568): unsure at all n locations
cccaggcgtccgaaaagaccgagagaaaatggcgaaaccgttgggaacaaccggtgaatttttccggcgaagggatgagtggaggaagcatccgatgctatcgaatcaaatgagacacgcacttccaggtatcggaatcggtgttggtgccttctgcgtttacctcgtcggtgaacagatctatagcaaactcatggctccttcttctcaatcatcgcatcagaaacaacccgctccatctcactgagagaatcattagattgtttcgatgatgaaaaccgtggcagataaagagctgatggattcacaatttgctgttttttttgtttcttggattgtctcaataagctgtgaatgaaagacaaagactctgatctctatgttgaatgttataatcttgtatgacagtttccagtacatggtttcgttatgtgatttctttgctttatagtagttcttctcagatgacactggagaataaagattgcctcttatgtgatnnnnnnnnnnnnnnnnnnnnnnnnnnnnnnnnnnnnnnnnnnnnnnnnnnnnnnnnnnnnnnnnnnnn

SEQ ID NO: 94951 - DNA, 1143 bp, Arabidopsis thaliana columbia
  unsure (1)..(1143): unsure at all n locations
gtctgttgtaccggtccggaattcccgtgtcgacccacgcgtccgaatcaaaacaagaaagacacaaagatggagatctcaaaaacccttttgctagtgatttctctggtggctgcaacttgtttcttgcaagccaaggcagctggagtttattgtagtaacccttacactcgatgttaccgcaagtacattaggtgtccagaggaatgtccaagcaaaaccgctatgaactccaagaacaaagtgtgctacgccgattgcgatagacccacttgcaaatcccaatgccgcatgaggaaaccaaactgcaacagacctggatcagcttgttatgacccgaggttcattggaggagacggcatttgtgttctacttccatgggaaagagcaatgaagagtttagcctcggctcttgactctgaccttcagatcaattggtagggttcatttggtcacagaccccctgggtcgtgcccagagacttcacatggttccaagctcttggattccttttcaactccaacaaattctccctcgaagccgcgaaaaccgcctcatgggacaacgaaatcgaccatctcaaattcagttacgatggccaagatttatctgttccagaagaaactctctccacctggtactcaccaaacaaggacatcaagatcgagagagtgagtatgagaaacagcgtgatcgtgacaatcaaagacaaagccgagatcatgatcaatgtggttccagtgacaaaagaagacgacagaatccatagctacaaagtaccatcagatgattgttttgcacatcttgaggttcaattcagattctttaacctttcacctaaggttgatggaatcttgggacgaacctacaggcccgatttccaaaatccggctaagcctggagtcgcaatgccagtttgttggtggtgaaggcagcttcaaggcttcttctctactctccaatggctgtaaaacttgcatttcctctgggtcacaagcggggattgattctgttaagccaggggttgattttgcaactttgggttgtcccgtggggggttntggttcgggtttgtttcagggggaaaaagggncntttacctnggttaaaggggtttcccnggggtttgtttnttgggntttt

SEQ ID NO: 94952 - DNA, 797 bp, Arabidopsis thaliana columbia
tttatttaccacttcgttgggagttaacctccaaactcaaaagacaagaggggtactcttatcaaagattttcctaaaatataaagtttgtagttttttttttaaataaaatcagggggttgtaattcggttgagcccaaatcaaaaaggtcaaaaaggcccaaagaattcaatgcatccaaacggtgggtttccaagtgaccgaaaaaaaaatgtcggcagaaattccgataagttaaaaagttaccttcagattgattgttttcaacatcttaagggtcaattcagattctttaacctttcacataaggttgatggaatcttggggcgaaccaacaggcccgatttccaaaatccgagtaagcttgtagtcgcaatgccagtttttggtggtgaagacagcttcaagacttcttctctactctccaatgactgtaaaacttgcatttcctctgagtcgcaagcagagattgattctgttaagtcagagattgaatatgcaactttggattgtacccgtggagcgtcttctggttacggtatcgtgtgcaggaagtaaaaaaagattcatataaacttggcttaaaagaagaataatgccagagagctttagcttctactggagattttccaaagtataatataagtgaaggaataatatgtaaacttgcaatgtatttgtattgtatcatccaccatgtattctaatttgaattaacgtgatcagtgtttttggttggcaaaaaaaaaaaaaaaagaataaagtaagggcggccgctctagaggatccaagcttc

SEQ ID NO: 94953 - DNA, 702 bp, Arabidopsis thaliana columbia
  unsure (1)..(702): unsure at all n locations
gcgtccgataattgttaggctcaggagaattgaccttttgaatttttcatacggttaaaaaattcttctatatataaaggtgctttgaatattttgtagtctctgtatgttcaaaaccgtttaacaataacaacaacaaaaagcttccttttttgttttttgagttttcgtcgatcgattggtttaaatcctgtcgtatcaatttgttctcgattctccgcgaccatgcaaatttagggtcttcgttttgtttgatgggcgcgaatatctcgggaggttcaccggagtttgaccggaacgatgacgtttactcgaggaaactcagattggtggatttacctgagaattgtgtagcgttgattatgacacggcttgatccacctgagatttgccggcttgctcgtctcaacaggatgttccgtcgcgcttcctcagctgatttcatttgggaatcaaagttgcctgcgaattatcgtgttattgcacacaaggtgttcgatgaaattaccctgacggaattaataaaggaagatctttatgcaaagcttagccagcctaaccttttcgacggtggcacaaaggattttgggtaggtaaaaacacggggcgccttttggttaccaattcctctaggccnaaggtactgaatgnnnccgggaacgggcaaccacngtgacnggcngcaccgcatgtaaananggc

SEQ ID NO: 94954 - DNA, 858 bp, Arabidopsis thaliana columbia
  unsure (1)..(858): unsure at all n locations
gcgtaggacgtcgctgtttcagccctcagaaagttaacttctctgaatctcgctgaagctgatgtaaccgatagtggcatgcttgcacttggtaagtcagatgttcccatcacgcaactgtctctccgcggctgtaggagagtcagtgacagaggaatatcctatctgttgaacaatgaaggaacaatcagcaaaacattgtcaacacttgatctcggtcatatgccaggaatctcagacagagccatccacacaatcacacactgttgcaaggctttaacagagctgagtatcaggagttgctttcacgtaacagattcttcgatagagtccctggctacatgggaaagacaagcagagggaggaagcaaacaattgaggaagctcaatgtccataactgtgtgagcttaactactggagcactgagatggttaagcaagccgtcttttgcgggtctgcattggctcggaatgggacaaacacgattcgcgggtcgaaaagagacggttacagctatgatttgtggacagaggccgtggctcacgttgtgcttcgatggatgtgagcttggatgctctgatggttgggaattccacacgccacaacgccactgaagaactcattgtctcactagttcatgtattgtataaaatcgttcagaaacatgattcagtaggatgtgtaattttatttaaaccttttaaaaaatttgattgtaaacttgtaaaagttaaactaattccaagaaactgtattattatctttaaaaaaaaaaaaaaagnnnnnnnnnnnnnnnnnnnnnnnnnnnnnnnnnnnnnnnnnnnnnnnnnnnnnnnnnnnnnnnnnnnnnnnnnnna

SEQ ID NO: 94955 - DNA, 535 bp, Arabidopsis thaliana columbia
tccatacgactcactttagggaaagctggtacgcctgcaggtaccggtccggaattcccgggtctacccacgcgtccgctctctctctctctatctttctctcttcaccatttctttatcttccatggaagaacagtcttcaacaacaaactaaaaacatgtttctaaagttgtttcttctcttatctttggtctccttctcacactcagactcttcttccacagtttcttgtcctaacggcacagacttccatcaactaaccacagtttttcgttacgtctccggtttcaactcttcctggttctcctcaaactgctccgccgttatcactcacgtcgttcttccgtcaagaaaactaaacggcaccgtttcttggaaccctatacgtaatctcacgcgcttacgtgttcttgatctctccaacaactctctcgatggttctcttcccacttggctctggtctatgccaggtcttgtctccgttaatctctctcggaaccggtttggtggctctatacgagtgattccagttaa

SEQ ID NO: 94956 - DNA, 391 bp, Arabidopsis thaliana columbia
aatcacaagccaatcttatgggaattattagcacacagtaagttacttgaacttacaaccacgtattaaaagtaacatagtaaagagaacacacacacacacacactccaatcttattggaagtttcatgtagtatatatgactaactggttttcactcgggggtggtgatgggcacgatagtgactccgatgctgtgaacaacatcactagcttgtccatggaatccaacgatcttgtggccttcctctccaagcgagaacttcttaccagaatccattccaaacggcattgactcccttttgtctggtcttaaactgaagacatacaattattggttcctcaactccgaagatcatatcgtagtagccatctatgttcatgagatattc

SEQ ID NO: 94957 - DNA, 649 bp, Arabidopsis thaliana columbia
  unsure (1)..(649): unsure at all n locations
cgaatgatcnnnnnnnnnnnnnnnnnnnnnnnnnnnnnnnnnnnnnnnnnnnnnnnnnnnnnnnnnnnnnnnnnnnnnnnncttttttggtttttttaaacaaagtttccatctaattccaattcatgcaaaaaacattctgatattacacgaaatgatcatcataattatataaggatagaaaagtaaatcataacacaaaacgatagatagaaaacgaaacagagtagcaacagttacatggtgacccaataccacttaaaggtcttattatgaaccagtacgaagactctgtagtaataatacagagattcaaacaaacacaacaccaacgtcggaagatattatgtagaaaggtatgtgacttagctctttatttagtagatttttgaggctaagcaaacacacattctcattacactctctagcacagagagggtttagtttactcatcgtcttcgtcacgacgcttctggtggtgatgcttgtgacggtgcttcttcttctcctcatcctcatcagagtcattgccaccatatttccttgcggccatagccccgtcctcatcatcaccagaccagaanggtcgaaggtgncacatcacacgcatggcaggcaagcaggnggtccggaaccccctccgtcccaa

SEQ ID NO: 94958 - DNA, 890 bp, Arabidopsis thaliana columbia
  unsure (1)..(890): unsure at all n locations
cgtttagaaaaagctatgacgtcgcatgcacgcgtacgtaagcttggatcctttagagcggccgccctttttttttttttttttctgttattacacgaaatgatcatcataattatataaggatagaaaagtaaatcataacacaaaacgatagatagaaaacgaaacagagtagcaacagttacatggtgacccaataccacttaaaggtcttattatgaaccagtacgaagactctgtagtaataatacagagattcaaacaaacacaacaccaacgtcggaagatattatgtagaaaggtatgtgacttagctctttatttagtagatttttgaggctaagcaaacacacattctcattacactctctagcacagagagggtttagtttactcatcgtcttcgtcacgacgcttctggtgggtgatgcttggtgacggggcttcttcttctcctcatcctcatcagagtcattgccaccatattttcttgcggccatagctcccttcctcatcatcaccagaaccagaacggttcctacgctgctcatcatcatcatcgtcattgccacggccatagctaggctgcttcctgtaactcccctcttcctgttcctcagacctcccataactaggcttcctgtaacttccctcctcctgttcctcagatcttccatagctaggcttaatgtaactctccacctgatcatcagacctcccataactaggtttcctgtaacttccttcctcttgttcctcagttcttccatagctaggcttcctattaccttcctcttgttcctcctcagaatcttcacatacctaggctttctatatccttcttcctgatactaagattttacataacttggcttcctgtaanccggaag

SEQ ID NO: 94959 - DNA, 562 bp, Arabidopsis thaliana columbia
  unsure (1)..(562): unsure at all n locations
agtattctnnnnnnnnnnnnnnnnnnnnnnnnnnnnnnnnnnnnnnnnnnnnnnnnnnnnnnnnnnnnnnnnnnnnnnnnnnccacgcgtccgccaaaccaaattttgtcaatctaatttatcttctcctctcccggagaagaaggaaacttacaatttacaaagaacgagcttcaataaaaatttccaaagaaattaccgtcggcgaatcgttaggctcgagaagaatcaccaaattccaaggggagagagactgaattttcttttgattcacgtaacaacaacgctcagagactatgtcgtcggaggtgaaacagctgatcgtcgttgctgaaggcaccgccgctttgggtccttattggcaaaccatcgtctccgactatctcgagaaaatcatcaggtctttctgtggcagtgagttaaatggagagaggaaccctgtttctactgttgagctatcactggtgatcttcaattctcatggttcatattgtgcttgcttggtacaacggagtggctggacagggatgttgatattttcttgcattggctttcttccata

SEQ ID NO: 94960 - DNA, 461 bp, Arabidopsis thaliana columbia
gttagttctatcgactttcatcaaatcgtccgtcttgtaagcaaagcatcagccatggaagaagatgaaattgttgagcctggaaaggaggtcgaaatggaaatggacgaagaagaagttaagcttgttgcagaaggaatgagagcagcaaacctagaagagaatgttaagattgaaaatgtacatgatgaagaagcacctatgagaattgttaagaactggaagaggccagaagacaggatcccaacagagagagatccaactaaagttgttatatcaccaattactggagagctgattcccattaacgagatgtctgagcacatgaggatttctcttattgatcctaagttcaaagaaccagaaggttcggttgttttgctaagattcgtgagacccactttttgcacatggttttgtgagtttttcttaaaccatagttcggggtttggcccccctgc

SEQ ID NO: 94961 - DNA, 906 bp, Arabidopsis thaliana columbia
  unsure (1)..(906): unsure at all n locations
cgcagatcctattgaaagacaagagaggatcctaggaaaggaaacaacccgatataaagtcccaggtgcagtggaggcattctccagaagacacccgactacaacttcttcgcctcgagatcgttctagatcaagaaactcagacgacggacctttctctaagcagacacatggagactccgaaagagcaagcagttcctcaagatatagagcatcttcttctaggaaagccgttgctgcttcaagctcccggccaagttctgcaggtggaccaagcgaaagccgaacttcaagtcgtctggtttcctcaagcggtggtggtggcagcggcagtggaaatggccgtccctcaactagccagagagtgcaagctggttatgaattccaagactctgtctttctctcgtgcaacagcggcaagaaacactcgggaagatcaattaagaagcttcgagcttctctctcttcggaaataaaggaaaatgatggagagagagacagcaaactccatgaaaacccaaagaaattacctctgaagaaagatgagaatcttggtttgagggaattcatatatttgaacctgatgaaatcctcagatctttttacatgtaatttcagcttcagcttgcagagatctttttcactcgttttgtttatgtaatcgtgatatgtgttagacaaacataacaatcaaaaatgtagagagagtttccatgtaaaaacggtaaaatttctatccgtatattcgattacttcgaacctatctgtactggtactgtaataaacaaaacaatcaactgctaaaaaaaaaaaaaaaaaaaaaaaccaaaaannnnnnnnnnnnnnnnnnnnnnnnnnnnnnnnnnnnnnnnnnnnnnnnnnnnnnnnnnnnnnnnntcgtcctaa

SEQ ID NO: 94962 - DNA, 584 bp, Arabidopsis thaliana columbia
  unsure (1)..(584): unsure at all n locations
nnnnnnnnnnnnnnnnnnnnnnnnnnnnnnnnnnnnnnnnnnnnnnnnnnnnnnnnnnnnnnnnnnnnnnnnnnnccacgcgtccgcccacgcgtccgcggacgcgtgggtgatgaaccaacagcagcaacaacaacaacaacaacaagctgtagctcatggtggctatggcggtggtcacggtggcgacatgtaccatccgatgatgtacgctcggccttatcctgcagttaattatgctcaccctccaccaatgccgcctcctcactcggattcttatactcatatgttcagcgatgagaatccaggtagttgtagtattatgtgatcatcttttgtaatgttatttagaatatggacatgtatgcttgtcttagtcttatgtttttttttttggggatgtccttatcttttttactttggaggattggaaacaaaatgtgctttaattttgttagtggaatgatgtttataatatctcgatttcggaaaaaaaaaaaaaaaaggttggccgnnnnnnnnnnnnnnnnnnnnnnnnnnnnnnnnnnnnnnnnnnnnnnnnnnnnnnnnnnnnnnnnnnnnca

SEQ ID NO: 94963 - DNA, 473 bp, Arabidopsis thaliana columbia
attcaaagagtattacaatggagatactttgtcttcttatgattaccctctcttccctaattacatggctaatactcagtcttctaaagccaaggctcggtctcaaagtgcgccgaagcagagacctcctgagatctatgagaagcagatgagtgggaggagaagatcttcgctggaagcaccgaggaataacggtgtcccgagagctgtaaggatgcagagatcttcatctcaactagggtcaaacacagccaaggaaagtcaacaacatcatcatcatcagtactatccgtggatggcgataaagctcgatagatctaatatttcgcttatggagagcgaatgcggatctacaagtaccgttatgactaataccaactacggtagacatgttgatgttcagggaaacaacaacatgtactgaacactgtgctttagaatttgagagattgctggaaaaataggcaagccta

SEQ ID NO: 94964 - DNA, 451 bp, Arabidopsis thaliana columbia
cctaacgataatggtggctatgagatctccgtcttttctccgtcgtgtttctcaccgccgattataaaatacttatctactaccatctccttgtcggaaacggcgagctaagtcgattagggttttaattgagaagaaataaaaaggatattttggtatggaggtgaaggaatcgaagatagatatggatgattcagtcaataaggagattggggaattaccaaaagatatgccttgtactagtaactatgaggaccatagttttcataatcatgttgaagaagaatgtcactgaggatcttccttgtggtggtgatgatattgatgctgatgcttctattaaaaaagaggttgcagagttcgacgaggacgaggttgatatattggaatgcaatgataacattgagattcaagtctcaaggtgtgatgatgggactgatggatattcgag

SEQ ID NO: 94965 - DNA, 516 bp, Arabidopsis thaliana columbia
  unsure (1)..(516): unsure at all n locations
cagctcnnnnnnnnnnnnnnnnnnnnnnnnnnnnnnnnnnnnnnnnngcgtccgggagaattaagatttttaactttaaacgagagtttcgtttatttactcaaaaatttacttctgaaatctctatttgaatttcggggaaaaaaatcctaagtaagggaatgcagagagatggtcggagtatcgccggtgaagactaagctgtgtgatcggtttaaccgatccgtcggcggcaggaattgccaccggaaacacgtcgaggacgggtgatccagttttctaaactctcgtctctcgaattcttcgaagatatcgaaaaactgtaaatcttttttttcttctacttttttacaaaattctctaatcatcgttgtaaagtaaaaaaccatggtcggagcaaaaccggtggagaatggatctgacggtggtagtagtacggggctgcttcacggccgttacgagctagggcgtcttctaggtcacggaacattcgcgaaggtgtaccacgctcgtaac

SEQ ID NO: 94966 - DNA, 646 bp, Arabidopsis thaliana columbia
  unsure (1)..(646): unsure at all n locations
nnnnnnnnnnnnnnnnnnnnnnnnnnnnnnnnnnnnnnnnnnggatgtaaccatctaatcagaaacagggatctaaagataatattattggtatgatgcaacaacatctaatgatcttgaaccagctaagttctagatcaaccagattctaaacaatccaactcatagtttcacgaatcagaaccacagaccaaagaaaagaaagcaaaaccaagcagccgaattgatgcaatgcattcgcctggcttaactaagattcacagtccatttcatgttgtcttcaatcagacccatctgcaagcttgtcagaacggtgtagagttgcttcgacacagttccgaaggtaccttctccgtaagacactcttttgcctttgtaagtgacgcttccaacaggagagacaaccacggcggttcctgtgcagaaaacctcgtctgcttctaacaattcatccactgtcacattccgttcctccacctgaaacccttgtgttcgagccacgtctatcatactttttcgagtaataccgggtaaaatggttccttttatttcaggagtagatatcacattgtccttcgcgatgaaaatattgcaagacgagacctnctcaagatatcttttgtaaatgcaatcaaggtacaaaaca

SEQ ID NO: 94967 - DNA, 549 bp, Arabidopsis thaliana columbia
  unsure (1)..(549): unsure at all n locations
atctgttcactgctacggctcctttcctctcactctcgaagccattcaccaaaacggcatcgtaccaccagtgttacgcctcttcttccaagccgccggagcctgagtcttcttctcctcctcctcctccgcctccgcctcaaccgctggcatcgcaacagaagaggaagaagaacgttgagacgacggattgggtcgcttcttccttgacccggcggtttggaatcggcgcgggtcttgcctgggcgggctttctggctttcggtgtaatctccgagcagatcaagactcggattgaggtttctcaggaagtagctaacaccagagatgtagaagaagagaaagagattntnttgcccaacggcataaggtactatgatcaacgngttggaggaggagcaacaccaagagcaggagactttgtagtgatttatcttaaagggggcaagtcaaaggaacccgncaagnatttgtggtacatttgnnccanggcaangagnagntaagccatttggacttttggtgggtcaaacatttngaaaggtttgt

SEQ ID NO: 94968 - DNA, 497 bp, Arabidopsis thaliana columbia
gtggctacaggtttcagaggcaaaagaatgcccggtttgtaaaggggaggtatctgtgaaggcagggactccaatctatgggcgtgggatacagaaaagagaatctgaggaggtttcaaacaccaagatcccttcgagaccccaagcacgacgcacagagagtttgaggactacacttaacaggtcaggtcatataccaacggaaatatttagacatttgcaggataggcttgaaagggaatctagtacaggagaaagacgcgccagaccatctcttaaccggtttatgacttcgaggggagttagagcagaggagaaccagtctagtgaagcactggttgaaccttcatcagatgagattaacgatattgatctgatcttaaataatgcccctgaaaatgaagaggaaaacgaaaaccttaagctcgtcacgtgctttggcaacccagagacgatgggcacagatgtatgggagggtgtcggcgtttactttgagc

SEQ ID NO: 94969 - DNA, 494 bp, Arabidopsis thaliana columbia
  unsure (1)..(494): unsure at all n locations
agagtcttgacgaagcaagaatctttacttggagattagtgagagagaaatatgttgaagagatcaaagatctgatatctgagagagataatgggagaaatgacggcgaggtcttcggttttatcgtcggggatgttcagaagttaccaccggccggtgacgacggaggtgagatcactattacggtccagagtgatgtgccaagtgtcatccgtaaaacccgccacgtattcatcgagactctccacagatattcctctcaacgagtctcctcaggctttggtcgatgagtatttagaggataaatcaagagtattcggagcaaatgtttncagataagcccagaagtcataggcttaacgggggaagnattgagaattcagatgtttaccaataaactttcctctttccttacntgtgttggcctnttggtgggtattaggttnannttncaaatccacgggcaagnttttncnccnatgttncttttnggt

SEQ ID NO: 94970 - DNA, 527 bp, Arabidopsis thaliana columbia
  unsure (1)..(527): unsure at all n locations
agcaaaaaaactttgaagattgatttgaagaagaaagctctctctcaggttcttgttctcaaccagacattgatttcttcgatttgcatatttcccttcttcgtcttacgaattttacttcctttagcgatggatttgatactacgttgacttttatcttccttttggaaatggcagcgtcgtcttctcttcttcttcttcttcactgtcccacctgcaatttctactttgactcttcctcgtaccttaaaagatcgagactttcgagctatagttcgattatctctcgtgggtctcctttgtttgtctctagctttggatctatgaccgttaaaagattcctctagcagagtcggaagcaggagcaatgacgggtaaacgaaccaatttggacgcgttggagcaagaatctttnatcaaccaacttcattggggntancgggaaagacttgggcanccggcgggggggntttaagccatttttnaacggctnagcaaatgggntgngcntnccatttgngnannaa

SEQ ID NO: 94971 - DNA, 1911 bp, Arabidopsis thaliana columbia
  unsure (1)..(1911): unsure at all n locations
nnnnnnnnnnnnnnnnnnnnnnnnnnnnnnaggacgaagctacgcacgcctgcagatgctgggcacccaatacagcggtcgacccacgcgtccgccaaaacggaaagtcccaacgatcccattttactccttttcaccacctctagtagcagagagagagagagagtatggcgattacggtgccgagacggcaactcttcatcggcggtcaatggactgagcccgttctccgtaaaactctccctgttgtcaatcccgccaccgaagacatcatcggttatattccagctgcaacttctgaagatgtggagcttgctgtggaagctgctaggaaagcatttactaggaacaacggaaaggattgggctagagcaactggtgctgttcgtgccaaatacttgcgcgctattgcagctaaggtaatagagaggaagtctgaactagctaatcttgaggctattgattgcggtaaacctctagatgaagcagcatgggacatggatgatgttgctggatgttttgaatattatgctgacctagctgaaggcttggatgcaaagcagaagactcctctttctcttccgatggatacttttaagggttatattctcaaggaacccattggcgtagttggcatgattactccatggaactatccgttattgatggctgtctggaaagtcgctccttcacttgctgctgggtgcacggctatactgaaaccttcagagttggcctccctgacatgtttggagctcgctgatatttgccgcgaggtgggtctaccacctggtgttcttaatattctgactggtttaggaactgaagcaggtgctccactggcatcgcatccacatgttgacaagattgtattcactggaagcacaacaactggaagcagcattatgacttccgctgccaaattggtgaaaccagtttccttggagcttgggggtaaaagccctatcattgtctttgatgatgtcgatattgataaagctgtggaatggactatgtttggttgtttctggacgaatgggcagatttgtagtgccacatctcgacttcttgtgcatgaaaggattgctgacgagtttttggacaagctggtaaagtggaccaagaacattaagatttcagatccttttgaagaaggctgtaggcttggtcctgttgtcagtaaaggacagtacgagagagttctaaagtttgtctcaaacgctaggaatgaaggtgcaactgttctttgtggaggagttcgtcctgagcatttaaagaagggatactttgttgaacctgcgattgtttcaaatgtgactacttcaagtggaaatctggagagaggaagtctttggtcctgctctgtgtgtgaaaacattctccaccgaggatgaggcaattcagcttgcaaatgactctcaatatggattagcaggcgcagtattatcaaatgatctggagcggtgtgatcgtgttagtaaggctttccaggcgggaatagtgtgggtcaactgctctcagccatgcttctgccaagctccatggggtggaaccaaacgcagtggatttggccgtgaattgggagaatggggacttgagaactacttgagtgtgaagcaggtgactcagtatatctctgatgaaccatggggatggtacaaacctccttccaagctctgagacaaacactagttcctgatatttccttaaaacatgtactcatgagaatataccaataaagcaagagacccttctgtaagagaaatggtattgctactttaaattcttgaaaaaaatgaaaaataagatgagataaaaattcttaaaaaaaaaaaaaaagaaaagnnnnnnnnnnnnnnnnnnnnnnnnnnnnnnnnnnnnnnnnnnnnnnnnnnnnnnnnnnnnnnnnnn

SEQ ID NO: 94972 - DNA, 360 bp, Arabidopsis thaliana columbia
ccacgaggcaaaagttacttgcggatgttgatcggaaatgcaagttggtggattttgggaatgcttgttggacttataaacagtttacgagtgatattcagacaagacagtaccggtgtcctgaggttgctcttggctcaaaatactcaacctcagcggatatgtggtcatttgcttgcatttgttttgagcttgccaccggagatgttctattcgatcctcacagtggtgaaaactttgagcgagatgaggatcacttggcattgatgatggagcttctcgggatgatgccacgaaagattgcattaggtggacgccattcgcgggatttcttcaaccgacagggtgaactactggaca

SEQ ID NO: 94973 - DNA, 764 bp, Arabidopsis thaliana columbia
aaagaaataaaagagtgtgatgagatcctcaagaacaatgggattaatgaattgcatggtttatgttgtggtcctaagtgctattgcggctacagtgacatcatacccttactcatctcctcataccccagcttacgattctcccagctatgaacacaaaggcccaaagtacgcaccacatccgaaaccatatgtttacagtctctccaccaccaccatactatactccatcaccaaaggtaaactataaatctccaccaccaccatacgtctataattttccacctccaccgtactactctccttcctccaaaggtttactacaagtccccacctccaccatacgtttacagctccccaccaccaccgtactactctccttctccaaaggtttactacaagtctccaccaccaccatacgtctacagctccccaccaccaccatactactctccttctcctaaggtttactacaagtccccacctccaccatacgtctacagctccccacctcctccatactactctccttctcctaaagtcacttacaagtctccaccaccaccatatgtctacaagacgccttactattgattttgaattgtttccttaacaagaagcatgagtgctataattttatttatgattggttttggtttgattcttctgattttgttctttgtttaactatcttgttatgctttttttaactaataaaatttggctatctttttaaataaaagaatatttattttatttctatt

SEQ ID NO: 94974 - DNA, 568 bp, Arabidopsis thaliana columbia
atcggagcttcagagagatccaaagagagagatttaggatgtctcacagtcacgggaacgcggggggggtgaacgatccacggggggcttcggcggcaaagccttacattccacggcctgtagcgccggaggatcttcccgttgactactccggattcatcgccgttatcctcggcgtctccggcgttatgttcaggtacaagatatgctcgtggcttgcaattatattctgtgcacaatctctggccaacatgaggaacttggaaaatgatttaaagcagatctccatggctatgatgtttgctataatgggattggttacaaactacttagggcctaacagacccgcgacaaagaaataatcctcatgtcttaagagtagtatgcttttttttgataaaccttgtatggctcttgtttccgcaccagagattgctagtggtttgtctttgtgttttcgactctctaatccttgagtagcaaactagaaccttgagctcttgctcatttgtggagttcaaagacttttcagtccagatgcaaaaaatgtgaaatccgactttttctc

SEQ ID NO: 94975 - DNA, 600 bp, Arabidopsis thaliana columbia
  unsure (1)..(600): unsure at all n locations
cngtttctgcagcctcggctaagancnctcncactagatgggtnccgaggagattaccgccattttgtgtctgcgttcagagggcttaccgagatgagtgatggagtcacaatggccagtttgaaagaccctatcttcaatctcgcccctgcccttggtgctggaaactcttctgcttcactcgacaacataatcacctgtgaactatttgccctaaggtcgtagctttcctgtttctcaaggaacacaaaggtttacttacttgatcttggggtcatcaaggtcatcaagggccatttgattttgcaatgggtaagccaaattgaacggccctatgttttaggcggacagttccatgccgttttttttgaataccttttccatttgcgaaagaacaacacgtagttgttttgttccaaatggaaacggcacgatgtttgttattcttttcttttctttttttccaggtggaggtgcaaagactgattactttttgccaaacccagtccaaatggaatttatttttatcgaaaggcatgatattattggtctntttaaaattaattattattaaattattaattatattttttatattat

SEQ ID NO: 94976 - DNA, 642 bp, Arabidopsis thaliana columbia
  unsure (1)..(642): unsure at all n locations
tcgttctatcgtccgaaatttcaggatccaaaactcttctttcaaacatggaccgaaccatgtttctttccctgacaatagcctcactcttggtcggagtcgtctcagctggtgactggaacatcttgaaccaactcagaggactcggctcatcgtcaagccaaaatggtatcgtttctaaaggtatcaagacggacctgaaaggatactgtgaaagctggaggatcaacgtggaagttcacaacatcagaaagttcgatgtggtgcctcaagagtgtgtatcgcacattaaggattacatgacgtcatcgcagtacaaggatgacgtggcgagaaccgttgatgaggtcattcttcatttcgggagcatgtgctgtagcaagtctaagtgtgacggcatggacgcttggatctttgatatcgatgacacgcttctctctaccatcccttaccacaagaaaaatggcttcttcggaggagagaaattgaactcaacgaaattcgaggattggatacagaagaagaaagcaccagcagtgccacacatgaagaaattgtaccacgacatcagagaaagaggcattaagatcttcttgatctcttcccggaaagaatatctcangtctgccaccgtcgacaacc

SEQ ID NO: 94977 - DNA, 484 bp, Arabidopsis thaliana columbia
ctctataaccaagtataagcttggagggggttatttttctaaaagggattgagtttttaagatcatgtctgtgagtatctctacctcactccattcttcttacttattgccctcggtttacaattcacacaaatatttcaatagatatagagcttgaatttgtaatagctgaaatgtgtgtttgtagatgacagtggagataagagttccaaacttggattgtgaaggatgtgcttctaagcttaggaagactctactcaagcttaaaggtattgaaagcttttgagttttaaatatgtttcttcttcttcgttcaatctaagtattgagtgcttacacaaattttgggttggttttgtctctttaagatgttaaccaaagttaaactatctgttatttttatcaaatattttttaatttttcaagccaatatatgttttattaaagattttctagttgggatgcttttatttcaattttggag

SEQ ID NO: 94978 - DNA, 682 bp, Arabidopsis thaliana columbia
  unsure (1)..(682): unsure at all n locations
agctattactctttttgttctcttcttctttttgttttgttcataggacaatacaataataggaacttcacaatttcgttcacatgacccatattctcttgactcgtgaggttgaaatgtaaatcactttaaaattaaaaacgtaccttgtcagttttgagactcaaaaggacttgaaatattgaaacccctattctttacgcgtactcgagatttttcgctcttgagagaatcacttcgacaatgtcggtaacggctgctttcattgattcggatcaaactcagcacaacattcttatggattcccaatcaactgtctccggtgtgaaaactgtcaagattagcaatgtttcactaattgtttctaagaaagatgtcaaagagttcttttctttctctggtgacattcaatacgtcgagatgcgaagtgagacacaagagagtcaggtcgcatatgttacttttaaggattcacaaggagctgaaactgcaatgctcttaacgggagctgtcattgcagatcttcgtgttagtataactcctgctgttaactatcagctaccaccagaagccctcgcactcgactcggaacattcgtttaatggtttttctgtcaagaaagctgaagatgtggtgaacatcatggtgggaagaggttatccncttggaaaagacgccatgg

SEQ ID NO: 94979 - DNA, 525 bp, Arabidopsis thaliana columbia
  unsure (1)..(525): unsure at all n locations
agctaatgaatgaactgcagaaaagttctggccatccgtcacaaaattttgcaccatacattgagcaacttgccgctggaaattttggtcaattgccacatgaaggccatcagagggaactacttgaacagctactttcaacaaaaatgcaatctcaatatggaccaatgcaatctccatacggacaactgcaatctgaaccaactcggtctttggagtaccaactgctgcagcaagagcagctgatgcaattggcaaacggagtgaggcacaatacactattggaggaacagagacatattgaccctctgtggccatctgaccataatgatcagcttctaagaagtcatcctgggatccaacgttcgcgatcctctacaggatttagacaactagactttcatcaaccagcagcagaggccaccctttngaggtccagtttnggnaaatttgnggggaaccttttntntagnaanaggttngcaagnntttttnnggnaggggctnncattttgaggggtncag

SEQ ID NO: 94980 - DNA, 589 bp, Arabidopsis thaliana columbia
ctgccctcctgttcgtgtcaacgctaatggtggccttcctggtggaaaggtgaagcttgctggatctattagtagtcagtacttgaccgctctgctcatggcagctcccttagctcttggagacgtcgagattgagattgtcgataaattaatttctgttccatatgttgaaatgacattgaagttgatggaacgtttcggggttagtgtcgagcatagtgatagctgggatcgtttctttgtcaagggcgggcaaaaatacaagtctccgggtaatgcgtatgtagaaggtgatgcttctagtgctagttatttcttggctggtgctgccattaccggtgaaactgtcacagtcgaaggttgtgggactaccagcttgcagggagatgtaaaaattcgccgaggtccttgagcaaaattgggatgtaaagtgtcctggacagagaacagtgtgactgttacaggaccacctagagatgcttttggaatgagacacttgcgggctattgatgtttacatgaacaaaatgcctgatgttagcattacccttgccgtctgtgttctttttctgacggttcaaccaccatta

SEQ ID NO: 94981 - DNA, 426 bp, Arabidopsis thaliana columbia
gaagacccaagagtcccaagaccaagggctgattaattaatgctgttttaaccatatgcatatcatggacacactttgttctccgagtcgactcgttctggtcaccttcttcctcctctgcttctttgccggagattcatcggcgacgaggcctggtttcatctacaccagacacagaggacgatgcacgccgcagtattggagcagccagagggaagcatggccgaggatggtacctgagagatcaaccgtggagaaaatattcggagtgatggtagcaaaagaacggtggagatctgatctaacgctaggggaatcaacgggctaggaatgacgaagaagggaacgcgtacggtgcattgctgaaacaggggatcgcagctctgatcaactcttacgcgagaaaaagtttcttttatgcaccat

SEQ ID NO: 94982 - DNA, 425 bp, Arabidopsis thaliana columbia
  unsure (1)..(425): unsure at all n locations
tttnttttttttttttagatttttctgatatatcaatttttctttctttctcatatccatgcgttttaagacaataacaaccttgtcttcacaaatttgattagcttacatgtctatatagaccaaacaaaatcacaataagtttttatgtctaggcaaaacaaaatctgtttaagcagcaacttcttgatccttggatgaaagttggttctgaatatgttgaggaacaacgtcgaacttagccagttgcattgtgtaagaagctcgaccttttgtcatccctctcaatgtactcacgtactgaaacatctctgccaatggaaccagagagtcgaccaccttgagaccaccgggtttgtctccgaagctgttaatttgaccctcttcgtgagttaagatcaccaatgacatcaccaagatgttct

SEQ ID NO: 94983 - DNA, 661 bp, Arabidopsis thaliana columbia
  unsure (1)..(661): unsure at all n locations
attttcttgtatgttggaatggatgccttggacattgacaagtggagatccgtgagtgacacaccgggaacatcgatcgcagggagcgcaatcctaatgggtctgggcatggttggaagagcagcgttcgtctttccgttatcgtttctatctaacttagccaagaagaatcaaagcgagaaaatcaactttaacatgcaggttgtgatttggtggtctggtctcatgagaggtgctgtatctatggctcttgcatacaacaagtttacaagggccgggcacacagatgtacgcgggaatgcaatcatgatcacgagtacgataactgtctgtctttttagcacagtggtgtttggtatgctgaccaaaccactcataagctacctatttaccgcaccaggaaccgccaccaacgaggcatgtttatcttggatgacaaatcaccccaaaatccatacatatccctttgttggaccaagaccgttcattgagccttcagggaaccacaatgtgcctcggcctgacagtatacgtggcttcttgacacggncccctcnaaccgtgcattactactgggagacaatttgatgactccttcctgcgacccgtctttgggaggtcgtggctttgtaccctttgtttccanggttctccaactgan

SEQ ID NO: 94984 - DNA, 663 bp, Arabidopsis thaliana columbia
  unsure (1)..(663): unsure at all n locations
aatgaatccagagaaattggaaatggagttgccgattcatggttaatgccgcttacacgacaagcggaaatagcgtgtgagaaggtgaagcaaatgaaagagttgagtcaaggatacaacattgttggaagatctcaggggaacctagtggctcgaggcttgatcgagttctgtgacggtggccctccggtttacactatatatccttggccggtcctcatgctggcattcctctgttcctatgtgtggttctggtttattctgtaagttagcagatgagctaatcaagggagatatctatagcgacttcattcaagatcatcttgctcctagtggttatctcaaaattcctactgatatgacaaagtacttgggaagctctaagtatttacctaagcttaacaatgagataccagaccaaagaaaccaaacttacaaagaccgtttcaccagtttacataacttggttcttatcaagtttcagggcgacaaggttatagttccaaaagattcatcgtggttcgggttttatccggatggtgaattcgaacctcttctctctgctcaacagacaaagctctatacagaggattggntcggtctgnaaacattggntgatgcgggaaaagtgaagtttntgagtntngccggtgaacatatcag

SEQ ID NO: 94985 - DNA, 978 bp, Arabidopsis thaliana columbia
atctggagcttgcggtatcaaaggttggtgatttttcggatgataaccgatccgggattgacagatctttgcatcgtataagcgctatacgtaatcgcaaactgcaagtaattggtctaacatgtcgagtgggtcgagtagtctctggaagtgcagaaattataagagacttgattcagttatttctgggtcgacccacgcgtccgctcctggagttggcaaaacaactttaatcagagaaattgcacttttgttagctgatgaacacaggaaacgtgtagtgattgttgacacgtcaaatgagattggaggtgatggtgatgttcctcattctggaattggtcgtgccaggcggatgcaagttccaaatgtgaatttacagcacgatgttatgattgtgcggtgagaatcatatgcctgagacaatcatcattgacgagataggaactgagcttgaagctttagctgctagcactattgctcaacgaggtgttcagcttgttgcaactgctcatgggatgactatagacaacataatcaaaaatccttctttgcagattcttattggtggaattgagagagtgacttttggtgatgaagaagcaaggaaaagaatagttcattagactatttttgaaagaaaaggaacttctgcatttcacttgtgctgtagagatgatatccgagaacctggtgttgtgttcattaaagactatactgtaccgttgatgctatacttgctgggaaattcggtccctttgagatccgccaaattcgtggcgaaaacgatgttctttattaagtagtgacttccaattcttttgggaaactttgaataggagcctggcctattgcttaacaaatatttcgtaagtgaattgctggtctcgcccatgaaaatgaaagattctttcttcttaatatgggacttaaataacggccccggaagttacacccaatttctccgcagcccccaaa

SEQ ID NO: 94986 - DNA, 417 bp, Arabidopsis thaliana columbia
cagagaaatgtggaagtacggtttaagaatcgccgccgggaatgccaaattgaatcggaagtcttcgattctaaataataccgtttgtcatttctcacctccgacttcagccgccgtgggaacacttttcccgagtttagatcacgttcatcgatgcttttcatcttcgaagagcacgaaatcttcaatcaccaaaacgaagaaatctgaaggcaaaaaatccaaacctaaggcggcgatcctggtgccgccggagctgaggaaggagagtttggagccgccggtggagacgaccttgaagcgggtcgtgccaagagactagctgatgatgagaagattccgtctctagatgttggtcctaatggaaggcctctctttactcccaaagatactacactatcgcagctgactcacaag

SEQ ID NO: 94987 - DNA, 494 bp, Arabidopsis thaliana columbia
cgagaagctgaatcatcaatggctctggatgcattcttcttcatcgtctctctatttcttctgtttccgtcaccatccgcgtcagaatccactactcagttttgtagtgcagggagagagaatggtgtgggatcttgtggggtttcatcgacgaggattttgattaaaggaggtactgttgtcaatgcacaccatcaagaacttgctgatgtttatgtggaaaatggtattattgtcgctgtgcagccaaacattaaggttggggatgaagtcactgtcctcgatgctactggaaagtttgtcatgccaggaggaattgacccccacacgcacctcgccatggaatttatgggtaccgagactattgatgatttcttcagtggtcaggcagcggcattagctggtggaacaactatgcatatagactttgttatacctgtcaatgggaatctggtggctgggtttgaagcctatgaaaacaaatctagagaatc

SEQ ID NO: 94988 - DNA, 695 bp, Arabidopsis thaliana columbia
  unsure (1)..(695): unsure at all n locations
gcttgttttcgggggcatttcctgctacaacggcaatccgccaagtatcatgtgggacagctcatgttgtggccttatcagaggaaggccttcttcaagcttggggctataatgaacaaggccaacttggtagaggagtcacttgtgaaggactacaagcacctcgtgtgataaatgcttatgcgaagttccttgatgaagcacccgagcttgtgaagattatgcaactttcatgtggagaataccatactgctgctctttctgatgcaggcgaggtttacacttggggattaggaagcatgggtcaacttgggcatgtttctcttcaatccggggataaggagttaataccaaggagagtcgttggtctcgatggtgtgtccatgaaagaagttgcttgtggtggtgtacacacttgtgctttatctttggaaggagcactttatgcttgggtggtggccaagcaggacagctaggacttggtctcaatctggtttcttttttagtgtctctaatggaagcgaaatgcttctacgaaatgtcccggttttagtcatcccaactgatgtcaggcttgttgcgtgtggacattctcacactctcgtttatatgagagagggacgaatttgtggatggggttataatagttatggtcaagcagcanatgagaaatcgtcatatgcttggtacccatc

SEQ ID NO: 94989 - DNA, 539 bp, Arabidopsis thaliana columbia
gctggcacgcctgcaggtaccgggacggaattccgggggggcgggcgtccgtacggtgtgagaagaaacagctaggacttggtcctcaatctggtttcttttttagtgtctctaatggaagcgaaatgcttctacgaaatgtcccggttttagtcatcccaactgatgtcaggcttgttgcgtgtggacattctcacactctcgtttatatgagagagggacgaatttgtggatggggttataatagttatggtcaagcagcaaatgagaaatcgtcatatgcttggtacccatcgcctgtagactggtgtgtaggacaagtgaggaagctagcagcaggaggtggtcattcagctgttttaaccgatgcattttcgttgaaggagttgcgtgaatttcaattagcagatagtgtgaacctctcaaatgcttcagagattcaagatgttgcattcagaatgggatccaagctttagcccgcctctaaagactgagggagcattaccggtggggacttactttggggaaaaattatcaaa

SEQ ID NO: 94990 - DNA, 515 bp, Arabidopsis thaliana columbia
ttaggtgaactatagaagatctatgacgtcgcatgcacgcgtacgtaagctcggaattcggctcgagagaaactcactcctgacctctcgcatggcgtctctagactctctagtcatctttcttttttctactctttttgtcactatcgtgagctcggaaacgccgtgcccgaatttcaagtcgatcatcagtttcggcgattcgattgcggacacgggaaacttggttggtctctctgatcgtaaccagcttcctgtgactgcgtttccaccgtacggagaaaccttcttccaccacccaaccggtcgttcctgcgatggccgcatcatcatggactttatcgctgaatttgtggggcttccttatgtgcctccgtactttggatctaaaaatagaaactttgataagggtgttaatttcgcggtagccggagcaacggcactgaaaagttcctttcttaagaagagaggaattcaaccacacaccaacgttagtttaggagttcagctaaaga

SEQ ID NO: 94991 - DNA, 729 bp, Arabidopsis thaliana columbia
  unsure (1)..(729): unsure at all n locations
aagagttacttgaaggtcaagaaatatgtagccaagactgagaaagatgctcagatcaagatgagcctgtacgacccctacgagttccatcttgtgaaccctaaccgactttctcggttagggaacccggctggttacaagcttgtacctggtggtaatgctgcaagtttgctcgatcatgatgatccaccgcaaatgcgaggcgctttcacaaacaatcagatatgggtgactcggtataaccggtcagagcaatgggctggagggcttttgatgtaccagagccgtggtgaagacacactacaagtttggtccgacagagatcggtccattgagaacaaggacatagtgttgtggtatacactagggttccatcacgtaccgtgccaagaagattttccagtgatgccaacaatagcatctagctttgaacttaaaccggtcaatttcttcgaatcgaacccggtacttgggatttcacctttcttcgagaaagacttaccagtctgttaaaccagatgcttcatcttattcgacactgtgcattttcaaatgtcatgtgtagacttttctgattataaatgttgtgcatattctattgatatatgtatatcagtatatgaaatcaacatgctcttgatattcaaaaaaaaaaaaaaagnnnnnnnnnnnnnnnnnnnnnnnnnnnnnnnnnnnnnnnnnnnnnnnnnnnnnnnnnnnnnnnnnnna

SEQ ID NO: 94992 - DNA, 488 bp, Arabidopsis thaliana columbia
cccaagcgtccgctccgccctctctccccatctctttcgacagatctcttctctctctcgtgtttcacgaaacaatggcgactcaattcagcgcttctgtctcattgcaaacttcttgtctggcaacaacaaggattagtttccaaaagccagctttgatttccaaccatggaaagactaatctatccttcaacctccgccgttcaatcccatctcgccgcctctctgtttcttgcgcggcaaaacaagagacgatagagaaagtgtctgctatagttaagaagcaactatcacttacaccggataaaaaagtcgttgcagaaaccaaatttgctgaccttggagcagattctctcgacacggttgagatagtaatgggtttagaggaagagtttaacatccaaatggccgaagagaaagcacagaagattgccacagttgagcaagctgctgaactcattgaagagctcatcaacgagaagaagtaa

SEQ ID NO: 94993 - DNA, 1134 bp, Arabidopsis thaliana columbia
cccacgcgtccgcccacgcgtgctacgtcagctcccatctaaaaataacccgacccatttacgcgacccaaaccggatcaacccgcaatggataagccaagcttcgtaatccaatccaaagaagcagaatccgccgcgaaacaactcggcgtttccgtcattcagctcctcccgtcgctagtcaaaccagcacaatcctacgctcgaactccgatttcgaaattcaacgtcgcagtcgtcggactcggatcatcaggtcggatcttcttaggcgtcaatgtcgaattcccaaatctccctctccaccactcaatccacgccgaacagttcctcgtcaccaatctcacactcaacggtgaacgtcatctcaatttcttcgccgtctccgccgcaccatgtggccattgccgtcaattcctccaagaaattcgcgacgcacctgaaatcaaaatccttatcaccgatccaaacaactccgccgattccgattccgccgccgattcagacggattcttacgtctcggaagcttcttgccacacagattcggtcccgacgatcttctcgggaaagatcatcctcttcttctcgaatctcacgataaccatctcaaaatctcagatctggattcgatttgtaacggaaacaccgattcatccgccgatttgaaacaaacggctttagcggcggcgaatagatcgtacgcgccgtatagtttatgtccatcgggagtttcgctggtggattgtgacgggaaagtgtacagaggttggtatatggaatcggcggcgtataatcctagtatgggaccagtacaggcggcgttggttgattatgtggctaatggtggtggaggaggatacgagaggatcgtcggagcggttctggtggagaaagaagatgcggtggtgaggcaagagcacacggcgaggttgttattagagactatatcgccgaaatgcgaattcaaagtgtttcattgctatgaagcttagagaatcatttaattatccgaaaaataaaggaattttaaaaaaaaaggaataaaaagaaaatggggctttttaattcttaaaggtgttgagaataacggcgaaagaaaaaaaaaaagggcggccgctctagaggatccaagc

SEQ ID NO: 94994 - DNA, 479 bp, Arabidopsis thaliana columbia
ctttccttttctcacacacaaaaagctctccttttctctttctctctctctctctctctcacatctctcttcttcatctggcggttcacgatcattgattatcaaattggcatgcaacagcaaggagagatgatgaggaactcgccgtcatatacctctgcaacgcactctcgtaatttcgacaccattttgtctccactcgtcaaaaccggcaccggtgcttctaaccgatcctacgccttcttctccatctttctcttcctcctcctcggcgcgtttctctccacgcgcctcctcctcgatccctccgtacgaacatcttactataaatagattcttgtgttctcttctaattacatcaaaacgacagtcccgtttgtcgtttgccacgtcgtattccgccttagtggcgctaaaactcgttcgcgccttatttgtgttgtaccaatacttttttgtcaaacaagttttctacgctt

SEQ ID NO: 94995 - DNA, 870 bp, Arabidopsis thaliana columbia
  unsure (1)..(870): unsure at all n locations
gttcaagaatcttttcctggagttcttgttcctgatgttaagtctttctctgctgcttctcgtgagggattgcttccgggagatgtgatcttagccgttgatggtactgagctatctaattccggttctgattcggtttctaaagttgttgatgttgtgaagaggaatccggagcacaatgtcttgctcaggatcgaaagagggaaggagagtttcgaaatccggatcacgccggataagagtttcgatggaacggggaaaatcggtgttcagttatcaccgaatgttagattcggtaaggtgagaccgaagaacataccggaaacttttagtttcgccggtagagaattctttgggctctcttacaatgtattggatagtttgaaacagactttcttgaacttctctcaaaccgctagtaaagtcgctggtccagtggcgattattgcggttggagcagaagtagcgagatcaaacgcggacgggctttaccagtttgcagcattgctgaatctaacccctgctgtgatcaatctgttgcctttaccggctctcgatggtggaactttggctctgatcttattggaagcggttcgaggcggtaggaaattaccgttagaggtggagcaagggattatgtcttctggaatcatgcttgtattatttctcggtttatttctcatcgtaaaggacacacttaatcttgatttcatcaaagaaacgtcgtaagctattgaggtatatccaagaaccaaaaaagtattttgagagttnnnnnnnnnnnnnnnnnnnnnnnnnnnnnnnnnnnnnnnnnnnnnnnnnnnnnnnnnnnnnnnnnnnnnnnnnnnnnnnnnnnnnnnnnnnnnnnnn

SEQ ID NO: 94996 - DNA, 526 bp, Arabidopsis thaliana columbia
ctaatttgaccaatctagggtttctagtcacttgaagcttctcttaaaaaacctgtctcactcctcgtcaacctcttcctctcccgctgtcgccaagattgaatcttttttcagttgtggcttcaccggataataaggaattcagtaagagataagttcatcctgacaacatggagaccaagaatgagaattctgatgtttcacgggcagaggagtttaaaagtcaggccaacgaagcttttaaaggtcacaaatactccagtgctattgatctatatacaaaagctattgaactcaacagcaacaacgctgtgtattgggcaaatcgtgcatttgctcacacaaaactggaggaatatggcagtgcaatacaggatgcatcgaaggccattgaagttgattcaagatactctaagggctattacaggcgtggtgctgcgtatcttgccatgggaaaatttaaggatgccttgaaggacttccaacatgtaaaaaggctttctcctaatgaccctgatgccacaag

SEQ ID NO: 94997 - DNA, 471 bp, Arabidopsis thaliana columbia
tgctcttgcaaacaaagagacattaatcgcatgtggtcctttcgtgcttccgcttgccaacgaacggaatgtaaagattggttggggcagattcagaacattctgccatatttcagtgtattcaaggtttgcctgaaggcgctctgcgcaagataatcttgactgcatctggtggagcttttagggattggcctgtcgaaaagctaaaggaagttaaagtagcggatgcgttgaagcatccaaactggaacatgggaaagaaaatcactgtggactctgctacgcttttcaacaagggtcttgaggtcattgaagcgcattatttgtttggagctgagtatgacgatatagagattgtcattcatccgcaaagtatcatacattccatgattgaaacacaggaatcttgctgaaacattactaactaaattagtatttttccggttttacaaaaataactgtataacatgt

SEQ ID NO: 94998 - DNA, 488 bp, Arabidopsis thaliana columbia
  unsure (1)..(488): unsure at all n locations
aatttcaacaaaaagaagagaaaaacaatgggagagaaagcgaaagaaatgtnttagtcttctcatttccgatacaaggtcacataaaccctctcctccaattctcaaaacgcctactctctaaaaacgtcaacgtcacattcctcaccacttcctccacccacaactccatcctccgccgtgccatcaccggcggagcacttgctcttcctctctcttttgtccccattgacgatggattcgaggaagatcacccatctacggacacatctcccgactactttcgcaaagttccaaggaaacgtatctcggaaggcctctcaagagcttatcttcctcgatgggccccaaaaacccaaacggcggtcggtttaacgnctcggtgccctgcctttattgtccccggacggtttttccgggaanattccttggggggttgcttnngggggtcggttttttaatttaaggccttcaccggtgaacngggg

SEQ ID NO: 94999 - DNA, 589 bp, Arabidopsis thaliana columbia
gtcataacagagtaagagtttgtatgtaacaaatttcaacaaaaagaagagaaaaacaatgggagagaaagcgaaagcaaatgtgttagtcttctcatttccgatacaaggtcacataaaccctctcctccaattctcaaaacgcctactctctaaaaacgtcaacgtcacattcctcaccacttcctccacccacaactccatcctccgccgtgccatcaccggcggagccactgctcttcctctctcttttgtccccattgacgatggattcgaggaagatcacccatctacggacacatctcccgactacttcgcaaagttccaagaaaacgtatctcgaagcctctcagagcttatctcctcgatggacccaaaaccaaacgccgtcgtttacgactcgtgcctgccttatgtcctcgacgtttgccggaaacatcctggcgttgctgcggcgtcgtttttcactcagtcctccaccgtgaacgcgacctatattcatttcttgcgtggagagtttaaggagtttcaaaattttgtcgctttggcctgcaatgccccccttgaagggtaatgacctacctttttt

SEQ ID NO: 95000 - DNA, 405 bp, Arabidopsis thaliana columbia
  unsure (1)..(405): unsure at all n locations
ctgtgaagaagaagaagcttaagagagagattaagattctgctgaacctctgcggtgggcctaatattgtaaaagggctcgacattgttagagatcagcagtctaagacgcccagcttgatatttgaacatgtgaacaataaagatttcaaagttctctatccaactctctcagactatgatgttcgatattacatttttgaacttctaaaggcgttggatttctgccattcacgtggaatcatgcacagagatgtgcaaccacataatgtcatgattgatcacgagcagcgaaaactttcgtttaattgactggggtttggcagaattctatcatcctgggnnaggatacaatgtccgngttgctntcanggtactttaaagggtccagagcttcttggtngga

SEQ ID NO: 95001 - DNA, 608 bp, Arabidopsis thaliana columbia
  unsure (1)..(608): unsure at all n locations
cgcgtccgaatggccttaaggccttgtactggattcacaatctcctctcttcgcaacgcttccgccgccaacaacaatctcttctctctcctctccttctcttcgtcgtctccggcgaagaggaatcttcttctctcttcgctccaggacaatctccgtcgtttcgcatccagcgcttctctttaccgtcaacatctccggaatcaacaacaacaacatcagcaacaacagcaatcgcgcgtgaaagaaaaatcagaaacgctggctcagaagatcggtaaatctatccggcgtgccggtgcgccgtcgaaagctagggtttacgctgatgtcaacgttgttagacctaagggactattgggattacgagtcccttgctgttcaatggggtgtacaggatgattatgagggtggtgaggaaggtaggaaggggaaatacagtgagggctttgaaggcattcatgctactgttaccgggatttgtggtatcaagattttgaagcctgtaagaagaagaaggttnagggggggnttagnttctnananccnttcgggggccaatttgnaaatgcccnnttttaggnncnnnntaanncccctttnttnaa

SEQ ID NO: 95002 - DNA, 1093 bp, Arabidopsis thaliana columbia
  unsure (1)..(1093): unsure at all n locations
cgagctcactagtgagctcccaancngacnggtccgattaagattctgcagaacctctgcggtgggcctaatattgtaaaattgctcgacattgttagagatcagcagtctaagacgcccagcttgatatttgaacatgtgaacaataaagatttcaaagttctctatccaactctctcagactatgatgttcgatattacatttttgaacttctaaaggcgttggatttctgccattcacgtggaatcatgcacagagatgtgaaaccacataatgtcatgattgatcacgagcagcgaaaacttcgtttaattgactggggtttggcagaattctatcatcctggggaagaatacaatgtccgtgttgcttcaaggtactttaagggtccagagctgctggtggatttacagggctatgattatcccttagacctatggagtcttgggtggatgtttgctggaatggtattccgcagggagccgtccttttatggccaggacaccttgatgatcaattggtcaaaattgcgaaggtgcttggcacagatgaactcaacgcctacctaaacaaataccgtatagagttggaccctaatctaacatccctcgtgggcagacatagccggaagccatggacaaagttcatcaattctgaaaaccagcacttagcagttcctgaggctgttgattttgtggacaagttgctgagatatgatcaccaagaaaggccaacagctaaagaagcaatggcgcatccatatttctatccgattagaaatgcagagagcagccgtacgccgcgcagccagtgatctcgaaaacatttgcttgttcaatcttctgatttttcatttctttacggattcaaatttgttataaatcgatctgtcattgtttcattctctcaagtgtgcgtgtgttactgttttgctctttctcagtgtttcattcaactcatttgaattttattatataaaaaaaaatatcccccaggcggggttccaaaaaaaaaaaaaagggcggccgctttaaaggattccagcttacggaagggggcaagccacgtcaagtatctttaaaagtcgcctaa

SEQ ID NO: 95003 - DNA, 761 bp, Arabidopsis thaliana columbia
ccacgactcactatagggaaagctggcacgcctgcaggtaccggtccggaattcccgggtcgacccaacaacaatctcttctctctcctctccttctcttcgtcgtctccggcgaagaggaatcttcttctctcttcgctccaggacaatctccgtcgtttcgcatccagcgcttctctttaccgtcaacatctccggaatcaacaacaacaacatcagcaacaacagcaatcgcgcgtgaaagaaaaatcagaaacgctggctcagaagatcggtaaatctatccggcgtgccggtgcgccgtcgaaagctagggtttacgctgatgtcaacgttgttagacctaaggactattgggattacgagtcccttgctgttcaatggggtgtacaggatgattatgaggtggtgaggaaggtaggaaggggaaaatacagtgaggtctttgaaggcattcatgctactgataacgagaaatgtgttatcaagattttgaagcctgtgaagaagaagaagatttagagagagattaagattctgcagaacctctgcggtgggcctaatattggaaaattgctcgacattgttagagatcagcagtctaagacccccaacttgatatttggacatgtgaacaataaagatttcaaaagttctctattcaacttttttcagactatgaatgttccgatatttaccattttttgaaactttcttaaagggccggtttgggattttcttggccacttttcaccgtggga

SEQ ID NO: 95004 - DNA, 460 bp, Arabidopsis thaliana columbia
ttcactttctcgatacgaaaattgcttcctttcatcccaattttcaaaacccttgttcctaaaccaatctcagaacaaacccagatgctcaatttcattttgtctcaagcaaagtaatcatgacgagaggcaaattcaacaagactctgccaaagaagaagaagaagaagaagaagagtattgggttgttacagcagtaagaagcagatacaatgagattgttatagtggatactgcttcttccagatatcttctccttgattcaactaagaatgtgcatagtgttatcaataaaggaggccaaaattggactggatcttattgggatgagtttgcgagtttgccgcctattatccctaatggtcccgttgcaatctacggcttgggtggtggaacagctgcaagattgatgcttgagttgtggcctacaatgcagctggaaggttgggaaaatgatgaa

SEQ ID NO: 95005 - DNA, 524 bp, Arabidopsis thaliana columbia
caaaaagaaaatgattttataacagtcgaatcgtacggcagatatttggtggcccctcctcttatatgagatcatagtcaacaagagaacaaagccacagagagagagagacactaaaaccctaatctcttactcactgtctctcttcttcaatccatgtcttcaacacaagaagcgtctgttactgatttgcccgtgaagagacctagagaagcagaggaggacaataacggcggcgccatggaaacagagaacggtggaggagagataaaggagccttcttgtatgtcctctattattcctggatggttctctgagattagtcctatgtggccaggagaagcacattctctcaaggtagagaagattctattccaagggaaatcagattaccaggatgttattgttttccagtctgcaacatatggaaaggttttggttttggatggagtgattcaactcactgagagagatgaatggtgcgtatcaagaaatgatcactcatcttcctttgtgctctatct

SEQ ID NO: 95006 - DNA, 671 bp, Arabidopsis thaliana columbia
  unsure (1)..(671): unsure at all n locations
tgannnnnnnnnnnnnnnnnnnnnnnnnnnnnnnnnnnnnnnnnnnnnnnnnnnnnnnnnnnnnnnnnnnnnnnnnnnnnnccacgcgtccgaaaaaaatgaaatgatattttcagttgtacgctcttctcttccttatatcttccgcttcacttcacaccaaaatcaccacctctcacaaaccctagttcctcctctctctcatttctcggagatattcaccagagcaataaccatggacgctaaagaaacctctgccaccgatttgaaaagaccgagagaagaggatgataacggcggcgccgctaccatggagacggagaacggagatcagaaaaaggaacctgcttgtttctccactgttattcctgggtggttctctgaaatgagtcctatgtggccaggagaggcacactcattgaaggttgagaaagttttgtttcaagggaaatcagattatcaggatgttattgttttccagtctgcaacatatggaaaagttttggttttggatggagtaatccaacttacggagagagatgaatgtgcttatcaggaaatgatcactcatcttcctttgtgttctatccctaaccctaagaaggttttggtcattggaggaggagatgggggtgtcctgcnggaagtgcacgccatgcttctattgagca

SEQ ID NO: 95007 - DNA, 817 bp, Arabidopsis thaliana columbia
acgactcactttagggaaagctgctacgcctgcaggtaccggtccggaattcccgggtcgacccacgcgtccgcccaggcgtccgtgtctctcttcttcaatccatgtcttcaacacaagaagcgtctgttactgatttgcccgtgaagagacctagagaagcagaggaggacaataacggcggcgccatggaaacagagaacggtggaggagagataaaggagccttcttgtatgtcctctattattcctggatggttctctgagattagtcctatgtggccaggagaagcacattctctcaaggtagagaagattctattccaagggaaatcagattaccaggatgttattgttttccagtctgcaacatatggaaaggttttggttttggatggagtgattcaactcactgagagagatgaatgtgcgtatcaagaaatgatcactcatcttcctttgtgctctatctccaaccccaaaaaggtactggtgattggaggaggagatggaggagtcctgagggaagtggcacgtcatagttctgttgagcagattgacatttgtgaaatagataaaatggtggttgatgtggctaagcagtatttccctaatgtagcagttggatacgaggatcctcgtgtcaacctcatcattggcgatggtgttgctttcttgaacaacgctgctgaacgaacctatgatgcagttattggtgattcatctgatccaatcggtccagctgaagagctattttgagaaacctttctttgggtcagggaatagagctcttcgtcctggtggagttgtgtgcacac

SEQ ID NO: 95008 - DNA, 471 bp, Arabidopsis thaliana columbia
accgaaccgcagtgtcgacctcacgcgtccggctttgttagatttggtaatggggattcgatgaagaacagtcaaattcagccgcttcatggagattctgcgttttctccttcgactcgtgaatgcaggtcaaggaagttgagagacaggccaagtccacttggtccacttgggaagcctcatagtttaactacgacgaatgaggagtcaatgtcaaaggcacaaagtgctactgaattgttgtctctaggaagtagacctcccgtggaagttgtgtctgtggaggatggagaagaagttgtacatattgcaggaggaagtccaagtgttcagagccggtgtcctctcactgctccgcttggtgtttctatgagtcttaggaatggagctactagaaagtctgtttccaatgtgtctatgtgtagcagaagtttcaaccgcgagacttgtagaacaacggtgagctacctg

SEQ ID NO: 95009 - DNA, 1783 bp, Arabidopsis thaliana columbia
ttgttcgagaaatcatattgagaacaaatagatttggttatatatggcctttacgaacgtttgcctatggacgctactcgccttcatgctgacttggacagtgttctacgtcacaaacagggggaagaaggcgacgcagttggcggatgcggtggttgaagagcgagaagacggtgctactgacgttatcatcgttggggctggagtaggcggctcggctctcgcatatgctcttgctaaggacgggcgtcgagtccatgtaatagagagggacctgagagaaccagagagaatcatgggtgagtttatgcaaccaggaggacgactcatgctctctaagcttggtcttgaagattgtttggagggaatagatgcccaaaaagccacgggcatgacagtttataaggacggaaaagaagcagtcgcatcttttcccgtggacaacaacaattttccttttgatccttcggctcgatcttttcacaatggccgattcgtccaacgattgcggcaaaaggcttcttctcttcccaatgtgcgcctggaagaaggaacggtgaagtctttgatagaagaaaaaggagtgatcaaaggagtgacatacaaaaatagcgcaggcgaagaaacaacagccttggcacctctcactgtagtatgcgacggttgctactcaaaccttcgccggtctcttaatgacaacaatgcggaggttctgtcataccaagttggttttatctcaaagaactgtcagcttgaagaacccgaaaagttaaagttgataatgtctaaaccctccttcaccatgttgtatcaaatcagcagcaccgacgttcgttgtgtttttgaagttctccccaacaacattccttctatttcaaatggtgaaatggctactttcgtgaagaacactattgctcctcaggtacctttaaaactccgcaaaatatttttgaaagggattgatgaaggagaacatataaaagccatgccaacaaagaagatgacagctactttgagcgagaagaaaggagtgattttattgggagatgcattcaacatgcgtcatccagcaatcgcatctggaatgatggttttattatctgacattctcattctacgccgtcttctccagccattaagcaaccttggcaatgcgcaaaaaatctcacaagttatcaagtccttttatgatatccgcaagccaatgtcagcgacagttaacacgttaggaaatgcattctctcaagtgctagttgcatcgacggacgaagcaaaagaggcaatgagacaaggttgctatgattacctctctagtggtgggtttcgcacgtcagggatgatggctttgctaggcggcatgaaccctcgtccgatctctctcatctatcatctatgtgctatcactctatcctccattggccatctactctctccatttccctctccccttcgcatttggcatagccttcgactttttggtttggctatgaaaatgttggttccccatctcaaggctgaaggagttagccaaatgttgtttccagtcaacgccgccgcgtatagcaaaagctatatggctgcaacggctctctaaaacactggtgctttaaactgcaaaatataacacatatataaatcacgaatctttgtgattctgcatatattgtgttctacaattattctcatataaatgaaaattgttctacgtaaaagtaaaaagaaggaattgtaatactaataaaacgagtttttaattctgttgaaagcttgtgtcaattggtgg

SEQ ID NO: 95010 - DNA, 543 bp, Arabidopsis thaliana columbia
  unsure (1)..(543): unsure at all n locations
nnnnnnnnnnnnnnnnnnnnnnnnnnnnnnnnnnnnnnnnnnnnnnnnnnnnnnnnnnnnnnnnnnnnnccacgcgtccggaacggtgtcgctgctgctctcttccctcacaggtttttcattacgagttcagttattgatctcactattgttggcttagaccttgttgatggagactcaagttcccagagccaacttcaacaacaaccacattacctgaagacatgttccaaaccaaacctggatctagggagtgtggtgtacctcttaggctatgccaatcagaatgaactcaagatcggcgagggaaagttagttgtagctaccgacaatctcatcaaactctcaactgatgaaatgatttggagtcctggatctgctggatttgatgttcaagggaatcttgcattcatgatttgtgatccgaggaaactatcgacatcaccaacctcaacctcggcatcttcctcttcttctttgaagaaagataacaacaagacactgatgatgcactttggtataccaataccagtaatatgtgac

SEQ ID NO: 95011 - DNA, 255 bp, Arabidopsis thaliana columbia
gggacactggttcggttcctcggatcggttctgatgtgggcatgtttctgagctgccctgtccaagctgtgagtaattagtgttgagttgagcgaaggcttggctcatgcaggttctagagtcggagggtaatgcgtgaggctggcttcacagagcagcgactacttcccgcttacagcagtggacggatcacggtttagcgtcgctcagaaccactatggcctgctggtccgatctcatatgaaccaccatttt

SEQ ID NO: 95012 - DNA, 593 bp, Arabidopsis thaliana columbia
ccggaatcttcgggtcgatccacgcgtccgctggtaaacgcctccaaatataatctcttttcttttcctcgcttccttctaatttttgagcgtgtggctgctcctggattcaagacaattcaatggttcatgattatgctacaacaactaatgggacgtccaagcgttgctcggcgttaccaacaacaaacacagtggatgtctcttcggtgtcagatctttttgaattcatatgctcgggtcctctcgtaaacaagattggtatcactcctcaaagagttggccagtctattgacaaatggttactctacggctcacaactttgtagactgtttcagcttaatgagcttaagcttacaattcctcagaaagctaggctataccactactacatacccgtttttatttgggtgcgaagtccagattgcttttgcataattccaagtttaaagatggggggtgatgtacctcctttagtgattggatttagcgctcctcaaggatgtggcaagactacacttgtgtttgcacttgattatcttttcaagacaacaaacaagaagtcagcgacgatatccgtagacgatttttac

SEQ ID NO: 95013 - DNA, 1348 bp, Arabidopsis thaliana columbia
gacgcctgcaggtaccggtccggaattcccgtgtcgacccacgcgtccgctctgcttgagagagtcagagagtcaagagagaaaaggggtcgagaatggcggtcgcaatatctgggagtagtttgatatcgtcgactcttcagcattataataatcggatttatatccgagattatccgattccgtgtcactcttctaatccaatttgcaattcttttaatttcaaaagacgttcgttctctccttcttcccccaaatttaacgaccatgtcgttaacccttcctcttcttatttatcctccaagctttctccaattcgaacccattcctctttcgctgcgtgtggctgctcctggattcaagacaattcaatggttcatgattatgctacaacaactaatgggacgtccaagcgttgctcggcgttaccaacaacaaacacagtggatgtctcttcggtgtcagatctttttgaattcatatgctcgggtcctctcgtaaacaagattggtatcactcctcaaagagttggccagtctattgacaaatggttactctacggctcacaactttgtagactgtttcagcttaatgagcttaagcttacaattcctcagaaagctaggctataccactactacatacccgtttttatttggtgcgaagatcagattgctttgcataattccaagtttaaagatggagatgatgtacctcctttagtgattggatttagcgctcctcaaggatgtggcaaggctacacttgtgtttgcacttgattatcttttcaagacaacaaaaaagaagtcagcgacgatatccgtagacgatttttacttgactgcagaaggccaggctgaattgagaaaaaagaatccaggaaatgcacttctagagtatcgtggaaatgcaggaagtcatgatctgaaactttctgttgaaacactagaagccctgtcgaaactgaccaaagaaggcttaaagatgaaggtacctaggtacaataagtctgcctatagtgggagaggtgacagggccgattcatcaacatggcctgaagttgaaggacctctatcggttattctctttgagggatggatgcttggttttaagcctcttccagctgacgttgttaaagcagttgacccacagctggaggttgtgaataagaaccttgaagcgtattacgacgcatgggacaagtacatcgatgcttgggtcgtcatcaaaatccaggacccaagttatgtataccggtggcgtcttcaggcggaaatcgccatgaggcaggatggccaagctgggatgtcggatgaggaggtgaatgactttgtgtcgcggtattt

SEQ ID NO: 95014 - DNA, 742 bp, Arabidopsis thaliana columbia
  unsure (1)..(742): unsure at all n locations
gacttntttgaccctgacccnttcgacttccnaagagcttaagtgaggccctgggccaaaagcncccttngtggngaggtgcaggccggttctcaacatgccntgagttaaggcctctacggttatcccttnggggatggatcctgggtttaancntttcccagctgncgttgttaangcattgncccacactggaggttgtgaataagacccttgaagcgtattacgacgcatgggacaagtacatcgatgcttgggtcgtcatcaaaatccaggacccaagttatgtataccggtggcgtcttcaggcggaaatcgccatgaggcaggatggccaagctgggatgtcggatgaggaggtgaatgactttgtgtcgcggtatttgccggcgtataaggcctatcttccaaccctttacgcggaagggccaagcggctcagacccagaccgtgtccttgcgatagatatcgatgaagaaaggaacccgatactcgcaaactaatgcgatgctgtctccattgcctttatagtatatcatcattgtatgtaaaagagagtaacattacgttcttcttccttctatttgacattctttttcctacactatactttcacataaatacatattcttttcttggaaaaaaaaaaaaaaaaaaaaaacaaaaaagcggccgctctagaggatccaagcttacgtacgcgtgcatgcgacgtcaagactcttctatagtgtgtcctaat

SEQ ID NO: 95015 - DNA, 526 bp, Arabidopsis thaliana columbia
  unsure (1)..(526): unsure at all n locations
nnnnnnnnnnnnnnnnnnnnnnnnnnnnnnnnnnnnnnnnnnnnnnnnnnnnnnnnnnnnnnnnnnnnnccacgcgtccgctccgactgagtagtcaccaagtgaatatgcttctttcatccctatggatccaagcaacttctaccgacaatacccctgaaaattttgaggccatggccagcacatatcaaatcactttactgttttcactagcaaagagatcaaatcacatggctctggtgcagtgttttcagctggcattctctcttcgaaatctctcattgaatcaagatggaggtatgcagcactctcgtagaagatctatcttcacttttgcatcatatatgctcattttcggtgccaagatttccaatattctggagctagttccaattatcaaagaatctttaactgcccaaatggttgatccttatcttgtgctggaaggagatatcagactgcgtgctgtatgttctggatttccacaggaagaaacgtatggatctgacaaagatgatagtgctgc

SEQ ID NO: 95016 - DNA, 543 bp, Arabidopsis thaliana columbia
  unsure (1)..(543): unsure at all n locations
nnnnnnnnnnnnnnnnnnnnnnnnnnnnnnnnnnnnnnnnnnnnnnnnnnnnnnnnnnnnnnnnnnnnnnccacgcgtccgcaagacactcgtaaaagagttcttgaacttcacaaaacaattgtcagattttcaagaaaaactttataaaacaaaaaacatttcattctttctctctctctctctcactgctcaatgatctcgttttctcactaaaccaactcgtttcttcttactttctttaactcggatctacaaaaaaccatgtcggaaactaacacaaccgatgccaagactgttccagcagaagcagagaagaagaaagaacagagtttaccattctttaaactcttttctttcgctgataaatttgattatctcttaatggttcgtgggttctcttggtgccattggtcatggctcttccatgcctgtcttcttttactctttggtcaaatgggtaatggatttggtaaaaaccaaatggatttacatcaaatggttcatgaagtctctagatattctctatatttcgtctacttg

SEQ ID NO: 95017 - DNA, 460 bp, Arabidopsis thaliana columbia
attctcttttactccttcgccgaatctcacaacgccaaattttggcgtttccacagatctatacatcccggagatctccaacaggtccgactccgttttctactccgacgaatcctcctccgtagatctagtcaaaaaacgaacctaacgaaattcgaaatcctgatcggagatggctccgagtattcgaaaagcgattggtgcggttaaagaccaaacaagcataggaatcgctaaagtagcaagcaacatggctccagatctagaagtagccatcgtgaaagctacaagtcacgacgacgatcccgcaagcgagaaatacattcgtgagattctaaacctgacctctctctctcgcggctacatcctcgcttgtgttacttccgtttcacggcgattgagtaagacgcgtgattgggttgttgctctcaaggctcttatgcttgtgcatagacttctt

SEQ ID NO: 95018 - DNA, 849 bp, Arabidopsis thaliana columbia
  unsure (1)..(849): unsure at all n locations
gaggaatcgagtcgctgcgtgcaatcccgtttatctttgcgtggactcagacgaggtttcggttacccgtgtggcttggttgtggaggagcattcaaacgcgtgatacagaaggacagtaagaatctcaacatgctcaaagagatgtacaaccaatggccattcttccgtgtcacaattgatctagtcgaaatggttttcgcccaaaggagatcccgggaattgcggctctgtatgaccgcctcctcgtctctgaagaacttcaaccattcggtgaacaacttcgagttaactaccaagagaccagacgcctcctcctccaggttccaggtcacaaagacattttagaaggtgacccttacttgaggcaaaggctgcagcttcgtgacccatacatcacgacattgaacgtgtgtcaagcctatacactcaagcagatccgtgacccaagcttccacgtcaaagtccggccacatctctctaaggactacatggagtctagtccagcggctgagctcgtgaaactgaatccaaagagtgaatacgcaccgggacttgaagatacggttatcctcaccatgaagggtatcgctgctggtatgcaaaacaccggttaaggcagtttaaaacgttcttgtaccattccctaaatctacgctatgtaatgtattatgttctatgatgtgatgaaatctctccaactcctatcccgtacgctttttaatgagtatgataatttcttgtgttaaaaaaaaaaaaaaaaaaaagnnnnnnnnnnnnnnnnnnnnnnnnnnnnnnnnnnnnnnnnnnnnnnnnnnnnnnnnnnnnnnnnnnnnnnnnnnnnnnnncg

SEQ ID NO: 95019 - DNA, 1424 bp, Arabidopsis thaliana columbia
taactaagcatgtatctcccactaaggcacaaattactaaccatataagtctcagtactctctgttctgcaaacttcatacacaaaaccaacattaagagatggcgagccactacagaaacacaagcgctattgcttatctattgctttgtctcttcattacatctgccactgcacattccttcatacgacaaatcactgatgacctcaaaacaaatctgcagcaggaggtaggagcagaaccaatccaaaacctggacgtaggacattacttacaagaaaataaggagatctcatcacgtgattataaagtatcagcttcaaacgcagtgaaaggtttgagagatcgtcctccatcgtcttactctctcaagatggggtcttttcaaccacgcgtccttaagtcaacttacacggagaaatatgtatctcgtcccttttcagttggtggatacaactggacacttgttgtgttcccaaatgggaacaagaaggatagtggttcagggtacctttctctttacgtagccatagacaactcaactctcggacaacaagagatttacgcagatctaaggttttacatctttaacaagaatgagaggaagtacttcactatccaagataccgatgtgtggaagtttagtgtcttcaaaacgatgtggggattctctcaggtcctccccattgatacattcaaagatccgacaaaaggatatctctacgatggagatcactgcgagtttggtgttgatgtaaccatgccttctctctacgaaaaatcggaacttttctctgtcacagagaattttctaaatccgagattcacctggaccattcggggattctctacgctgctaaaaaacagttacctatcagaagtgttctccatcggaggaagaagttggaatatacaaatcaatccaagtggtcttggtacgggagagggaaaagctttgtcgatgtatcttggccttaatgtgaatgagatattcagaccatatgagaagatttatgttcgagccaagcttcgagctcttaaccaactcaatctcagtaacatcgaaagggaactcgatatttggtacaatggtccgggatatggagaatatagctggggtttccctgagtttatctatttcccttatctcacagattcatcaaagggtttcgttaagaacgatgtgttgatggttcaagttgaaatggaggccatttcttcaaccaagtacttcccgagttagattttctctaagcaaagaacttgtacctacctccatgtgtttgatttgttatcaaatactaataagaatttgattatgcatttcaaatacaattgtttctttttcttcagcatatcattatcaaattatcggcggccgctttagaggatccaagcttacgtacgcgtgcattcgaagtcag

SEQ ID NO: 95020 - DNA, 546 bp, Arabidopsis thaliana columbia
aagagtcgtttcttaaggcttttaaagttatggatagagagcttaaattccatggaagtgtggactgtttctgcagtggcacaacagctgccaccttgatcaagcagggtcagtatctcgttgttggaaatgttggggattccagagctgtaatgggtacaagagacagtgaaaatactcttgtcgctgttcaactaactgtggatcttaagccaaatctcccagctgaggcagagagaataagaaagtgtcgaggacgagtgtttgctcttagagatgaacctgaagtttgcagagtttggctgccaaattgtgactcacctggacttgctatggcacgtgcttttggtgacttttgccttaaagattttggcctaatctctgtgcctgatgtatctttccgtcagttaaccgaaaaagatgagttttattgtgttggctacagatgggatttgggatgttctcttaaatgaagatgtagtggcgattgttgcttcatgctcatctacgcctcttttcatcaagtagttttagtcgtagtcttgc

SEQ ID NO: 95021 - DNA, 622 bp, Arabidopsis thaliana columbia
  unsure (1)..(622): unsure at all n locations
acgtaaagatgaacatgaagctcaggtgcaatttgctcttgagaggggcattcccgccatttctgcagttatgggcacgacaaggctacctttccctggcagagtttttgacatagttcattgtgctcgctgtagagtgccatggcacattgaaggtggtaaacttctcctggagcttaaccgtgtattgagacccggtgggttctttgtgtggtctgctactcctgtttatcagaagaagaccgaagatgttgaaatttggaaagctatgagtgaactcattaagaagatgtgttgggaactcgtatccattaacaaggacactatcaatggagtaggtgttgctacttacagaaagccaacttcaaatgagtgctacaaaaacagatcagaaccggtgcctccaatttgtgcagactctgatgatccaaatgcatcttggaaagtgccgctttaagcatgcatgcacaccgcgccagaagacaaaacgcaacgtggatctcagtggcccgaacaatggccagcgagattagagaaagcaccgttctggttatcaagttcccagactggagtttacggaaaagcagcaccagaggatttcagtgctganatgagcactgga

SEQ ID NO: 95022 - DNA, 511 bp, Arabidopsis thaliana columbia
acagaccaaaattttcacgtttcttacatgtacatatatatagtaaaacaaatctctgaagacacacaagagaatcaagaacaatgaaaaatttaaccagtttcgtaattgttatcttactacaaagcttattgtttcatgtatatggtcgtcatcaaagttcttcgaagaacattttagtagattcatctccatttccttctgatttcctctttggtacagcttcttccgcttaccagtatgaaggtgcgttcttgactgatggaaaaagtttgaacaattgggatgtctttacgcataaaaatcctgggaaaatacttgacaagaacaatgcagatagagctgtggaccaatataatcgatttttggaggacatccaattaatgtcttttcttggagggaacagttattggttttcaatttcttggtgtagaatcttacctagaggaagatttggagagattaattatttggggataaagtattacaacatatttatcgatgctctcat

SEQ ID NO: 95023 - DNA, 846 bp, Arabidopsis thaliana columbia
  unsure (1)..(846): unsure at all n locations
cacaaacaaaccatttacataaaacaaaaacaatttaatacttcttagtgtgtaaatgtgtgattctttcatcaataacaaaatgacatcgatattattcatgctcgtgagtctaacaattctttccatgaatctaaaagtctctcaagccacatctcgtgtcaccttccacgagccgatcgttgctgaacaccatcagcaatggatgactcggttctctcgagtttacagtgacgagctcgagaaacaaatgagattcgatgtgttcaagaaaaacttgaagttcattgagaaatttaataagaaaggggatagaacctacaagcttggtgtcaacgagtttgcggattggaccagagaggaattcattgccactcacaccggcctcaagggggttaacgggattccatcctctgaatttgtcgatgaaatgataccttcttggaattggaatgtcagtgatgtcgctggccgtgagaccaaagattggagatacgaaggagctgtaacacctgttaaataccaaggccaatgtggatgttgttgggcattctcaagcgtcgcagcggtggaaggtttgacaaggattgttggaaacaacctagtatcattgtctgaacaacaacttctagattgcgacagngagcgtgacaacgnttgcaacggtggaataatgtcagacgctttcagctatataatcaaaaaccgaggcattgctcanaggcatcatacccttaccaagcggcagnggggacatgncggtacaatngggaaccctcccgcatggttcanaggggttccagacccgttccaagcaacaaacgggcgtgcattnntcgnggntnt

SEQ ID NO: 95024 - DNA, 1846 bp, Arabidopsis thaliana columbia
  unsure (1)..(1846): unsure at all n locations
ccacgcgtccggcaatgacttacgcgtggttatggacgcttctcgcctttgttctgacatggatggtttttcacctcatcaagatgaagaaggcggcaaccggagatttagaggccgaggcagaagcaagaagagatggtgcaacggatgtcatcattgttggggcgggtgttgcaggcgcttctcttgcttatgctttagctaaggatggacgacgagtacatgtgatagagagggacttaaaagagccacaaagattcatgggagagctgatgcaagcgggaggtcgcttcatgttagcccagcttggcctcgaagattgtttggaggacatagacgcacaagaagcgaagtccttggcaatatacaaggatggaaaacacgcgacattgccttttccagatgacaagagttttcctcatgagccagtaggtagactcttacgtaatggtcggctggtacaacgtttacgccaaaaagcagcttctcttagcaatgttcaattagaagaaggaacagtgaagtctttaattgaagaagaaggagtggtcaaaggagtgacatacaaaaatagcgcaggcgaagaaataacggcctttgcacctcttactgtcgtatgcgatggttgttattcgaaccttcgtcggtcactcgtggataatactgaggaagtcctctcgtacatggtgggttacgtcacgaagaatagccgacttgaagatccccatagtctacatttgatattttctaaacctttggtttgtgttatatatcaaataaccagtgatgaagttcgttgtgttgccgaagttcccgctgatagtattccttctatatcgaatggtgaaatgtctaccttcctcaagaaatcaatggctcctcagatacctgaaactggaaatcttcgggagatatttttgaaaggcatagaggaaggattaccagagataaaatcaacagcgacgaaaagtatgtcatcgagattgtgtgataaaagaggagtgattgtgttgggagatgcattcaatatgcgtcatcctataatcgcgtcaggaatgatggttgcactctcggacatttgcattctacgcaatcttctcaaaccattgcctaacctcagcaatactaagaaagtctctgatcttgtcaagtccttttacatcatccgcaagccaatgtcagcgaccgtgaacacgctcgcgagtatcttttcacaagtgcttgttgctacaacagacgaagcaagagagggaatgcgacaaggctgcttcaattacctagctcgtggagattttaaaacaaggggattgatgactattctcggaggcatgaaccctcaccctcttactctagtccttcatcttgtagccatcacccttacgtccatgggccacttgctctctccgtttccttcgcctcgtcgcttttggcatagcctcagaattcttgcctgggctttgcaaatgttgggtgcacatttagtggatgaaggattcaaggaaatgttgattccaacaaacgcagctgcttatcgaaggaactatatcgccacaaccactgtttgatcaatccataacacgaagactgttttattcggagatgaaaaataacaactcaaacagttaactttctacaaccaaataaataattgtgtgtatatgaagttgagcctatggttaagctctactgaattgtgttgaaaacaaacatggatatgttatatgctaatttgttatattctatttattgattcttgaaaaaaaaaaaaaaaaaagnnnnnnnnnnnnnnnnnnnnnnnnnnnnnnnnnnnnnnnnnnnnnnnnnnnnnnnnnnnnnnnnnnnnnng

SEQ ID NO: 95025 - DNA, 872 bp, Arabidopsis thaliana columbia
  unsure (1)..(872): unsure at all n locations
gaatgtnnnnnnnnnnnncgtcgcatgcacccttccttaagctggaatcctttaaagcggccgcccttttttttttttttttcttttttttttttttttttgcttctttggacacaaatgagaacacgctcttattacatataatattcgaactacaaatacaccccttaagcaaatctaatgaaagaaggggtttttaatcaataacaaaacaaaatacacgaagctgatattaaaggtgattatttaatgacgaatcacaatcattgtgtacaggttttcttgtttggcccgtatgcatacttaatcagagactccttgatagagagtagctcagggaactctttgttgagcttggaagcatccatctagttgttgcttgttggagccacaatgactttagcttgctcctttaatgggaagtttgcccattcgaattcagggttgatggagtctctgtacatctctaggatctcgttgaggctaaccacacctgggtttgtgaggatccagaatggttttaagtttctttacggcatcttgatggagattgagaaataactggtacaacacattcatgctggattgggaatgtcactacatttgttgtaccagggagattcttggtgaagaaaatttcgccggtttggtttaaaatccaaaggagaaacggttttccttgaacccttcaaggggggaaaaaacccttgggcaataaacttcctttttaaacaaaagtttcccatagaacacaatggggtttttgggttgtgtttccccgcgttttaaaaggggacccccccacagaaaatttttggggggaggggcgtctttaccccttccctatggagaagcgcctatttttccttgga

SEQ ID NO: 95026 - DNA, 712 bp, Arabidopsis thaliana columbia
tacactatagacgagctatgacgtcgcatgcacgcgtacgtaagcttggatcctctaggagcggccgttcttttttttttttttttttgggttctaatataacaagagtcgagcaacttatgacacaaatgagaacaagctcttattacatataatattcgaactacaaatacaccccttaagcaaatctaatgaaagaaggggtaattaaacaataacaaaacaaaatacacgaaactgatattaaaggtgattatctaatgacgaatcacaatcattctcttcaggttttcttgtttggcccgtatgcatacttaatcagagactccttgatagagagtagctcagggaactctttcttgagcttggaagcatccatctcgttgttgcttcttggagccacaatgactttagcttgctcctctaatgtgaagtttgcccatttgaattcagggttgatgtagtctctgtacatctctaggatctcgttgtggctcaccacacctgggtttgtgaagttccagattcctttcaagtttcttttcgccatctcgatggagattggtaataactcgtccaacacagtcatgctgtttgggatgttcactactttgttgtacctggagatcttggtgatgaagttgcgcgggttgtttagatccgaggagatcggcatccttaccctcaatgtgcatacgttgtccggacgcgt

SEQ ID NO: 95027 - DNA, 630 bp, Arabidopsis thaliana columbia
  unsure (1)..(630): unsure at all n locations
gtctctgcaagtctcatcagaagaggaagagaatcaatggcgagttgcttcagctacgtgtcttctcgtaacaaatgttaccaatacagcttctctcgtgctggtctccgatcatctacctccgatcttggcgacggcaccgtcttccactgttggatcccacttactcacatccacaccaagcccacgctcctcctccttcacgggatcggagctaacgctatgtggcagtgggaccgcttcatcgaccgttttatcccccgcttcaacgtctacgtaccggacctcatcttctttggcgactcctacaccactcgtcccgaccgctcagagtctttccaggcgacttgtgtcatgaaggcgatggatgcttacggtgttaggaccatgaccgtcgctggcctcagctacggtggttttttggcctaattctttggcggggaagtttaaggagggggtaagatcgaagttttgctaataatgcgccggttttccttttgaggagaaaaaattcggaggttggaattttcaaagtaaagagcccgaaggaanagnnggcttttttttgttcctaagantccttcgantttncgggggtttttcaagtaattttnntaaacnccgnttttc

SEQ ID NO: 95028 - DNA, 414 bp, Arabidopsis thaliana columbia
tcgattcctagtaatcttggaaatctgacaaacttagtgagtttggatctttacttaaacagctgtctccggtcctattccggaatcattgggaaagctttcaaagctgagatttctccggcttaacaacaacagtctcactgggtcaattcctatgtcactgaccaatattactacccttcaagtgttagatctatcaaataacagactctctggttcagttcctgacaatggctccttctcactcttcacacccatcagttttgctaataacttagacctatgtggacctgttacaagtcacccatgtcctggatctcccccgttttctcctccaccaccttttattcaacctcccccagtttccaccccgagtgggtatggtataactggagcaatagctgggggagttgc

SEQ ID NO: 95029 - DNA, 738 bp, Arabidopsis thaliana columbia
  unsure (1)..(738): unsure at all n locations
acgcgtccgggaattgtttgtggttgggctcctcaagttgaaatcctagcccataaagctgtgggaggattcgtatctcattgtggttggaactcgatattggagagtttgggtttcggcgttccaatcgccacgtggccgatgtacgcggaacaacaactaaacgcgttcacgatggtgaaggagcttggtttagccttggagatgcggttggattacgtgtcggaagatggagatatagtgaaagctgatgagatcgcaggaaccgttagatctttaatggacggtgtggatgtgccgaagagtaaagtgaaggagattgctgacgcgggaaaagaagctgtggacggtggatcttcgtttcttgcggttaaaagattcatcggtgacttgatcgacggcgtttctataagtaagtagaaatgcgtcgttttcatgtaattgggcatgtggcgaccatgtttctgttcagattcctttttcctttgtttctttttttttaaatcgtaattaccatattattttaataaaagaagactaagtcttcttctcagaagtttgaactttcgcaattccatgtgtttgtaactttgtaggaatccatgattccatatttgcttccatgttgttgtatttctaatgtaatttaaggataaaaaaaaaaaaaaaaagnnnnnnnnnnnnnnnnnnnnnnnnnnnnnnnnnnnnnnnnnnnnnnnnnnnnnnnnnnnnnnnnnn

SEQ ID NO: 95030 - DNA, 751 bp, Arabidopsis thaliana columbia
  unsure (1)..(751): unsure at all n locations
gaaataaacgacgaggcttttttttattttataaagctccttcaccggtaaaagccttggtcctcatgaaaccgggaagcccaagtacttacttccaccatcaaatcgtcaaaccatttgcaaccatcgatggtggtcatgtcacgagtaagcttctactcttctttcttgctactactgttagaggtcgttgtcgctagcagcgagtttgatgatgaaggaagaacatcgttcagtccaaccacggctataatcatgatcgtactcgttagtgttttcttcgcacttggatgtatctccgtctacatgaggaggtgtctccagcacgctctggggatggacagcggtggtggtccaggaaactggcttaacgtgaggcaaacgacggagcctgggctagacgcgtctgttatagaaacgtttccaacgtttccttactctacagtgaagacgttgaggatcggtaaagaagctttggagtgtcccgtttgtctcaacgagttcgaggacgacgaaacgctgcgtttgattcctcagtgttgtcacgtgtttcatcctggttgcattgatgcctggctccgttctcagaccacatgtcctcttttgccgagccaatctcgttcctgtaccgggtgagtctgttttttcggagatacccggttttagcttggggaaaccggtcanaactttttnagaacggccgttnatgnnaccggnaaagggtttaancttaacntanngggnggttatt

SEQ ID NO: 95031 - DNA, 350 bp, Arabidopsis thaliana columbia
ctcaaagagattggatacaaagacaccaaactcaatctagctgccgatgtgtgttttgccactatattcacattggcgagaattgtgtgtggacctttcctcgtttacgtcagtctatcagctgataatcccatcttcatcaaggcaatgggatcaggattacaactcgtgagcatcttttggttctataaaattttcgggatgatgagatataaactttttaagaagccaaagtcaaacaaaaagtctacttagcttagttagagatatacaaaaagctgattcaatccaaatatttttttcttatttttatttatggtcatttatctattttattaataaaataataa

SEQ ID NO: 95032 - DNA, 395 bp, Arabidopsis thaliana columbia
ggatttgatcacgaaacgttttacatggatggaagcttatcttctcttatcaacccggatcagtaccgtcgtgactgctttgcgcagttcaaagatatgaaagcaatggatcctatggagttgctagggatcttaccaacttgccattttggtaaattctgctcgaagaagtacctttcgatcattcaccaaaaaatggaagagtcgttgttcggggactcggaacagcgggagttggttgtagccggtaaccacccaagaagtcagttctatggagagttcttggggctagctaaagcagtctggctgcttcatctcctggcattctcgctcgacccatccccgagtcactttgaagcaaacagaggagccgagtttcactctcagtacatgga

SEQ ID NO: 95033 - DNA, 906 bp, Arabidopsis thaliana columbia
  unsure (1)..(906): unsure at all n locations
cgctcaaaacgctatactctccggttgttcagctggagcattggctgcgattctacattgcgaccagttcaagtccactctccctaaaacggctaaggtcaaatgtgtttctgacgctggttacttcatccacggtaaggatatcactggaggatcttacatccaatcctactacgccaaagtcgtagcgacccacggatctgcaaagagtctacctgcttcttgcacctcaagtatgaagcctgatttgtgtttcttccctcaatacgttgctaagaccttacaaacaccgcttttcgtcatcaatgccgccttcgattcttggcagatcaagaatgtattggcaccaacctctgttgataaaagcaaagcatggaagacttgtaagcttgatcttaagaagtgtacggccgctcagcttcaaaccgttcaaggatatagagaccaagtgttggctgcgttggcgcctgttcgatccgcgacgacgaacggattgttcttggactcgtgccatgctcattgccaaggtggaagcgctgccacttggtccggcgacaaaggtcccacagtcgcgaatacgaaaatggctaaggcggttggagattggttctttgagaggagtacgtttcagaacgtagattgttcatcgcttaattgcaaccctacttgccctgcagtatctactgaagactaaaatttattcattgatgtcttaaaatttattcatctttggaatattgttcttgaaatttaaaagtaaaataatataattgatacaattccattcgaataaataaaatcctttgcccttctacaaaaaaaaaaaaaaaagnnnnnnnnnnnnnnnnnnnnnnnnnnnnnnnnnnnnnnnnnnnnnnnnnnnnnnnnnnnnnnnnnnnnnnnnnn

SEQ ID NO: 95034 - DNA, 457 bp, Arabidopsis thaliana columbia
aaagggatgcagttctggcccaagaagaatctagtggctgggttcatacatatttataggtttgtggaggatgggaaatctcttgagcttcttcataagacgcaagtagaaggtgttcctcttgctctgtgccagttccaaggaagactgctggcagggatcggacctgtcctcagattgtatgatttggggaaaaagagactgcttaggaaatgtgaaaacaagctctttccaaacaccattatctctatccaaacttaccgtgaccgtatatacgttggtgacattcaggagtctttccattactgcaagtacaggcgcgacgagaatcagctgtacatatttgcggatgactgcgtgccgaggtggctgacagcatcgcaccatgtggatttcgataccatggcaggtgcagataagttttgggaatgtgtattttgtgcacctgcctcaaaat

SEQ ID NO: 95035 - DNA, 760 bp, Arabidopsis thaliana columbia
tatggccatgatttacgccaaaggtttaataaagcctctctataaggaaaagttggtacgcttgcaggtaccggtcggaaattcccgggtcgacccacgcgtccgctgatttggtttgttgttttctttctgctacaagtagataaaaaatggcatggcgcagtgcagcacgctcttttcgtctccgctacagctagagctccgtctctccgatctccgccgccaacgcttccccgcctccgtccttcccaatcctctttgccccgccgccgatttgcctctttcactaatcccaggaatttgggagagctaggatgcacagagtcattcttgcctctgtacaatgttgtggctgcagcgagactcacatctcaccttaatgttaatctgcgagctttctgcgaactctctaacgggaatggaaaagatgggtgatggaagtggattttcagtcgctggcaagagaggtgctactgctttgtacttgagaatgcacaaagtggatacatcagttatcttgcagcagttggagacttgagaaaaggggtgtaccaagaaaaactcattggttgttttgtgttccattaggaaccaaaaactatatacattatttcgatcttacttcacttttgacaatttccagttttagaatatctggatttctcttcaaaaaaaaaaaaaaaaaaaaaaaaaagggcggccgctctagaggatccaagcttacgtacgcgtgcatgcgacgtaatagctggtggatagt

SEQ ID NO: 95036 - DNA, 649 bp, Arabidopsis thaliana columbia
gcgcttcgagattgatctgatttgctttgttgttttctttctgctacaagtagataaaaaatggcatggcgcagtgcagcacgctctttcgtctccgctacagctagagctccgtctctccgatctccgccgccaacgcttccccgcctccgtccttcccaatcctctttgccccgccgccgatttgcctctttcactaatcccaggaatttgggagagctaggatgcacagagtcattcttgcctctgtacaatgttgtggctgcagcgagactcacatctcaccttaatgttaatctgcgagctttctgcgaactctctaacggtacttgaatgcacaaagtggatgcatcagttatcttgaagcagttggagacttgagaaaaggggtgtaccaagaagaactcattggttgttttgtgttccattaggaaccaaaaactatatacattattatcgatcttccttcgcttttgtcaatttccagttttagaatatcactggatttctcttcatatttcttgttgtttagcccaatggctttaaatacttgagggtagattcagcaaattcttgaagaaccattgtttcatcgttgtatttataatgttatgaactcccttcgggtttcctgaaaggaatttaaagg

SEQ ID NO: 95037 - DNA, 527 bp, Arabidopsis thaliana columbia
  unsure (1)..(527): unsure at all n locations
cnnnnnnnnnnnnnnnnnnnnnnnnnnnnnnnnnnnnnnnnnnnnnnnnnnnnnnnnnnnnnnnnnnnnncgccacgcgtcagaaaatggatcagttcaaaggtgagcctcgtctacccaagttcgccgtccccaagcgctacgatctccgcctcaatcccgatctcatcgcctgcaccttcactggaactgtagccatcgatctcgacatagtcgccgatactcgtttcatcgttctcaacgcagctgatctctccgtcaacgatgcctccgtttccttcactcctccttcctcctctaaggcgcttgcagctccaaaagttgtcttgtttgaggaggatgagattctcgtgcttgagtttggtgagattcttccccatggagtgggagttctgaaacttggtttcaatggagtactaaatgacaaaatgaagggattctacagaagtacttatgaacataacggtgagaagaagaatatggcagttacccagtttgaaccagctgatgctaggagatgctttcca

SEQ ID NO: 95038 - DNA, 709 bp, Arabidopsis thaliana columbia
gacaggagtcgagagagaaattagccatggcgaccagagctttgctcgccgttatatatgcgtctccgaatcgctgctacatctctccgagcaggatcaaaatccaatctttaacttgttcttcttcaagtcattattaccaaagacagagtagaaaaaaccacagaatagctcgaagttactcgtctgactcggattcctccgttcttcagccgccggatgtggcccgtcttgctcagacagctcgaatctctctaactccggcggagatagaggaatgtgaaactaaaattcgtcgagtcatcgactggtttgggcagcttcaacaagttgatgttaacagtgtggagccagctattagagcagaaatggatggtggaaatttgcgagaggatgctccagaaacatttgacaacagggacagtataagagcttccattccaagctttgaggacgcatatctaaaagtccctaaaatactaaacaaagagtgactttttcagcttcttggaattgtttggctgaagagattcattctcagatccggttcttgttccagcatctctatgttttctaaaattggttagcagaaaacaaaattgcctcaaaattgttaagtctcacgtaggctattattctacaacattttgttcacaactcaccacaaccttgtgtgcatatgaaactaaactcaaaccaattttgaatt

SEQ ID NO: 95039 - DNA, 275 bp, Arabidopsis thaliana columbia
  unsure (1)..(275): unsure at all n locations
ggaacaatgaatggtgctctcttctcttcccgtcaatctcaataacttacaattcatatgctttctgcttttccttttcttctgcatcgggatttgttggacccgcaatcgttaggatatggggaggggaacataagcttttgtaggcaatgaattactctagtcaaatgttcttattatcaacatatttgatgactcattgcatacgtgcatttgatttgaatgaagttatcgactttgtttggatcaaanaaaaaaaaaacatacaaaattct

SEQ ID NO: 95040 - DNA, 446 bp, Arabidopsis thaliana columbia
aaaacacacaagaaaataaagatactacaaagtatacgacaacttctttttttgtttgtagtaataattatagccaaaaatatagacagacaaaatggagagaaagcctcttgaacttgagtcgacggataaccaccagaatccttcctccgccgtatacggtggctctgttacggcggttgactctgttgaagaagatgttcagaatcagaagaaagtcgtttatagaggctggaaagtcatgccctttattattggaaatgagacatttgagaagcttgggatcattggaacactatcaaaccttctggtttatttaactgcagtcttcaacctgaagagtattacagctgcaaccatcattaacgcctttagtggcacaattaatttcggaactttcgttgctgcttttctctgtgacacttacttcggtcgatacaagactc

SEQ ID NO: 95041 - DNA, 2526 bp, Arabidopsis thaliana columbia
cagttatcttcttccttcttctctctgttttttaaatttatttttagagaattttttttgttttgcttccgatttgattatttccgggaacgatgacttctccggggagttcccggtgagatgataagtcagattgcatacttgtctcctccatggctactctcaagggttttggctgcggtggattcgtttggtttctctagaatctaaagaggttatcacaacggctttgcaatttgaaaactttcatgtttggggagatcaaagatggtttcttttttatactttacttgttagagaggatttgaagcagcgaatagctgcaaccggtcctgttatggatactaatacatctggagaagaattattagctaaggcaagaaagccatatacaataacaaagcagcgagagcgatggactgaggatgagcatgagaggtttctagaagccttgaggctttatggaagagcttggcaacgaattgaagaacatattgggacaaagactgctgttcagatcagaagtcatgcacaaaagttcttcacaaagttggagaaagaggctgaagttaaaggcatccctgtttgccaagctttggacatagaaattccgcctcctcgtcctaaacgaaaacccaatactccttatcctcgaaaacctgggaacaacggtacatcttcctctcaagtatcatcagcaaaagatgcaaaacttgtttcatcggcctcttcttcacagttgaatcaggcgttcttggatttggaaaaaatgccgttctctgagaaaacatcaactggaaaagaaaatcaagatgagaattgctcgggtgtttctactgtgaacaagtatcccttaccaacgaaacaggtaagtggcgacattgaaacaagtaagacctcaactgtggacaacgcggttcaagatgttcccaagaagaacaaagacaaagatggtaacgatggtactactgtgcacagcatgcaaaactacccttggcatttccacgcagatattgtgaacgggaatatagcaaaatgccctcaaaatcatccctcaggtatggtatctcaagacttcatgtttcatcctatgagagaagaaactcacgggcacgcaaatcttcaagctacaacagcatctgctactactacagcttctcatcaagcgtttccagcttgtcattcacaggatgattaccgttcgtttctccagatatcatctactttctccaatcttattatgtcaactctcctacagaatcctgcagctcatgctgcagctacattcgctgcttcggtctggccttatgcgagtgtcgggaattctggtgattcatcaaccccaatgagctcttctcctccaagtataactgccattgccgctgctacagtagctgctgcaactgcttggtgggcttctcatggacttcttcctgtatgcgctccagctccaataacatgtgttccattctcaactgttgcagttccaactccagcaatgactgaaatggataccgttgaaaatactcaaccgtttgagaaacaaaacacagctctgcaagatcaaaccttggcttcgaaatctccagcttcatcatctgatgattcagatgagactggagtaaccaagctaaatgccgactcaaaaaccaatgatgataaaattgaggaggttgttgttactgccgctgtgcatgactcaaacactgcccagaagaaaaatcttgtggaccgctcatcgtgtggctcaaatacaccttcagggagtgacgcagaaactgatgcattagataaaatggagaaagataaagaggatgtgaaggagacagatgagaatcagccagatgttattgagttaaataaccgtaagattaaaatgagagacaacaacagcaacaacaatgcaactactgattcgtggaaggaagtctccgaagagggtcgtatagcgtttcaggctctctttgcaagagaaagattgcctcaaagcttttcgcctcctcaagtggcagagaatgtgaatagaaaacaaagtgacacgtcaatgccattggctcctaatttcaaaagccaggattcttgtgctgcagaccaagaaggagtagtaatgatcggtgttggaacatgcaagagtcttaaaacgagacagacaggatttaagccatacaagagatgttcaatggaagtgaaagagagccaagttgggaacataaacaatcaaagtgatgaaaaagtctgcaaaaggcttcgattggaaggagaagcttctacatgacagacttggaggtaaaaaaaaaacatccacatttttatcaatatctttaaatctagtgttagtagtttgcttctccaatctttatgaaagagacttttaattttccttccgaacatttctttggtcatgtcaggttctgtaccatattaccccatgtcttgtctcttgtctctgtttgtgtatgctacttgtggtctatatgtcatctgctactactgttaattaaccattaagcaatggatttgtcttta

SEQ ID NO: 95042 - DNA, 704 bp, Arabidopsis thaliana columbia
  unsure (1)..(704): unsure at all n locations
taaaaattctatgacgtcgcatgcacccgtccgtaagctcggaattcggctcgagcactcaaacgaacattttcgtggctccagagctacactcaaaagccattcagcggaaggggttaggatttttggcggcgagatctctctgtttctggtagcttagcaatggccttatcttctctcctcagatctgccgccacttccgccgcagctcctcgtgtcgagctttatccatcgtcatcgtacaatcattctcaggtcacgtcaagtcttggattcagtcatagcctgacctcgtctagattttctggtgctgcagtttcaaccggaaaatacaatgcgaagagggttcaacccatcaaggccacagctacggaagcacctcctgctgttcataggtcaaggagcagtggaaagacaaaggttgggatcaacggttttggtcgaattggaagattggtcctccgcatcgcaacctttagggatgatatcgaggttntagcagtcaacgatccattcatagatnccaagtacatggcttacatgttcaagtatgattctactcatggaaattacaaaggnacttttcaattgtaattaatggttcaacttttggggtcaatngaaacaaagtcaaagttntcagcaagngngacccngctgaaatnccgtgggnttatcttggngcttngtatnttgttnagnct

SEQ ID NO: 95043 - DNA, 527 bp, Arabidopsis thaliana columbia
  unsure (1)..(527): unsure at all n locations
cccacgcgtccggtttgtctatattttgggttggctctacacctactctcagaagtcataagccaagcaaagggggttttagggtttttgaccgcgagccagatctctttcttttgtttctcccacttccgaatcaatggccttctcttctctcctcagatctgccgcctcctacacggttgccgctcctcgccctgactttttctcgtcgccggcgtctgatcattctaaggtgttgtcaagtcttggatttagtcgcaacctgaagccatcaagattttcttctgggatatcttcatctctacaaaatggcaatgcaagaagtgtgcaacccatcaaggccacggctacagaagtgccatctgcagttcgaaggtcaagtagcagtggaaagacaaaggttgggatcaacggttttggtcggattggaaggttggtcctccgcattgcaacatcaagggatgattttgaggttgtagcagtgaatgcccctttaatttgtgccaaggaanagggtttananttgg

SEQ ID NO: 95044 - DNA, 1039 bp, Arabidopsis thaliana columbia
  unsure (1)..(1039): unsure at all n locations
cgtctgcagtaccggtccttaattcccgggtcgacccacgcgtccggtcaagtcttggatttagtcgcaacctgaagccatcaagattttcttctgggatatcttcatctctacaaaatggcaatgcaagaagtgtgcaacccatcaaggccacggctacagaagtgccatctgcagttcgaaggtcaagtagcagtggaaagacaaaggttgggatcaacggttttggtcggattggaaggttggtcctccgcattgcaacatcaagggatgatattgaggttgtagcagtgaatgacccattcattgatgccaagtacatggcttacatgttgaagtatgattctactcatggaaatttcaagggaagcatcaatgtcattgatgattctactttggagatcaatgggaagaaggtcaatgttgtcagcaagagagatccatctgagatcccatgggctgatcttggagctgattatgttgttgggtcttccggtgtattcaccaccctgtcaaaggcggcctcccatttgaagggcggtgccaagaaagttataatttctgccccttctgctgacgcacctatgtttgttgttggagtaaacgagcacacataccaaccaaacatggatatagtctccaatgcaagttgtaccaccaattgtcttgcccctcttgccaaggtggtgcatgaggaatttggtattcttgaaggcttgatgacaactgtccacgcaactacagctactcagaaaactgttgatgggccatcaatgaaggactggagaggaggtcggggcgctagtcaaaacatcattcctagctcaaccggcgccgcgaaggctgtaggtaaagttcttccagacctgaatgggaactttacggggattggccttccgtgtaccaacatcgattntttctttgggngggttaaacttttgggctttgaaagggnccctttnacgggngtttttaagggcccctttaagnntncctnaaagggcccctttaaaggntttttngggncnnaaaggtnnag

SEQ ID NO: 95045 - DNA, 1140 bp, Arabidopsis thaliana columbia
  unsure (1)..(1140): unsure at all n locations
ccactttctcatccgatctcttcaccttgtttaaccatatactcatcagcctctctcgcgaaaccccaaaaagcaaaccagacatgattcaagacaagtctaaaggtgcaaagcaaacgcttctagagcggccatggttcctcgctgtggctctagctggtcttataggtggcgcaatgctcatcacaagcttcatccgagctacggacaacaccttgtcactctgctccacggctaagaacacagctgcgtctatagccaaatacacagccaccccaatccaactccaatccatcgtccactacgccacttcacacaccgtccctcaacaatctttcgaggagatctcgatctctttaaacgtcctcaaggagcgtctcccttgtaactttctagtctttggcctcggccgcgactccctcatgtgggcctccctcaatccaggtggcacaactgtgttcttggaagaggatcctgagtggatagaggccgtcctcaaggacgccccatccctcagggcccaccatgttcagtaccggacccacctttctgaggccggccgccttctctcgacttacaagaacgaacccatgtgtttaccagctaaagctttcccgatccgctacaacgaaaagtgtcccttggcgttgacttctctccctgatgagttctatgataccgagtgggatctgatcatggtggacgcaccaaaagggtacttcccagaggcgccaggaaggatggcggcgatattttcctcggccatcatggcacgtaaccggaaaggtgatggcacgactcacgtcttccttcatgacgttaaccgcaaagtggagaacgcttttgccaatggagttcctttgtgagaagtataaggtcaactccgtaggtaggctctggcacttcgagatacctaacgccgctaacatgaccgaccagcctggtgaccggttttgctagagtgcgccaaatattcgttcttcgatacttcttttaattggagcaccgcatagttcgatctgagtttaaaaatcgttattaaaatataaactatatccagaggcttctcattaaaataaattatgtattctatcgttattactctttgtttcataatgttttaagaggcctngnttctnc

SEQ ID NO: 95046 - DNA, 467 bp, Arabidopsis thaliana columbia
  unsure (1)..(467): unsure at all n locations
agtctcttccagctccggtaacagaatctcaagcgcctgtcgaagtaacaactaaagatttggtcgtggaagagacagagaaaccaatcgaagaaacagaggaagctcaagttgaaactccggaggttgtggagatcaagaaagatgaagaagctccggttgaaactccggtggttgtggaggatgagagcaaaacagaggaagttgtagaggcgaagaaagaggaagaagtagaagaaaagaagacagaggaagctccagtggttgtggaggaagagaagaagccagaggcagaggaggagaaacccgccgtgggaagccttccgtgacagcttccatttggcgaaggcttgttgggtaaatttttgggaaaaaacctttttttttttaaaggcccaaatgggggggggaaattttttgccatgtatttttttttcctccctttaaggtccttttntggncnttgt

SEQ ID NO: 95047 - DNA, 755 bp, Arabidopsis thaliana columbia
  unsure (1)..(755): unsure at all n locations
gtttaccnattttttttgggttacaaancccccnttccccttnnaccctcggggcccccccccaaaggnttttggcncgggggacccccccccntttccgnnttttttcccngcccccgtnaccanattttcaaccccccttnccgaagttaccaccttaaggttttngcccntggaagagcccngggaaccccnattcgaagganccngggggaacccttcaagttgaaacccccggagtttttggagatncaaggaaagttgaagannccccgnttgaaactcccgttggttgtggaggatgagagcaaaacagaggaagttgtagaggcgaagaaagaggaagaagtagaagaaaacaactcagaggaagctccagtggttgtggaggaacagaacaagccagaggcagaggaggagaaacccgccgtggaagcctccgtgacagctccagtggagaaggctgatgagtaaatgtcaagaaaaaacctgtcttttgaaagtcaaaacaagaagaaaatgttagccagtaatttatttgctactttaaggactttgtgtcttgttatgtttttgagtctatgactcttcttgcttttggttttttaatcttcttaaggactattttcaatggttatcatttttaataagatacacattattttaaaaaaaaaaaaaaaaaacaaacccatagagcggccgctctagaggatccaagcttacgtacgcgtgcgtgcgacgtcataatcttctaa

SEQ ID NO: 95048 - DNA, 645 bp, Arabidopsis thaliana columbia
  unsure (1)..(645): unsure at all n locations
ctttnccnttgtttccccaacctngnanttcccctnncttaaggggnccaaanncttgncnntncncccccggttccngncncttttggaccttgttgncnccccccgggcttccaggaatttcncgcccgcgtctcttcccagctcccggtaccagatcncaaccccctgtncgaagttacaacttaagatttggtcgttggaagagccagagaaccaatcgaagaaccagaggaagcctcaagttgaaactccggaggttgtggagatcaagaaagatgaagaagctccggttgaaactccggtggttgtggaggatgagagcaaaacagaggaagttgtagaggcgaagaaagaggaagaagtagaagaaaagaagacagaggaagctccagtggttgtggaggaagagaagaagccagaggcagaggaggagaaacccgccgtggaagcctccgtgacagctccagtggagaaggctgatgagtaaatgtgaagaaaaaaactgtcttttgaaagacaaaagaaggaggaaatgttagcaagtaaattttatttgcctactttaaggaccttggggctcgttgtgtttgttttttgaggcctattacccctncnttgccttttnggttttttaaaacccnc

SEQ ID NO: 95049 - DNA, 651 bp, Arabidopsis thaliana columbia
  unsure (1)..(651): unsure at all n locations
acataacactcacacacacactttctcttctcttattttctcagttcttttaactcttttctctacctatattcaaatggccaccgtcgaggttgaacaagtgactccagtagcagctgagaacatcgaggtgccaccaccaaaggctgtggagtcggaggaagtcaccaccgtctccgagtctcttccagctccggtaacagaatctcaagcgcctgtcgaagtaacaactaaagatttggtcgtggaagagacagagaaaccaatcgaagaaacagaggaagctcaagttgaaactccggaggtttgtggagatcaaggaaagatgaaggagctccggttgaaactccggtggtttgtggcaggatgagagcaaaaacagaggaagttgtagaggccgagaaagagggagaagtaggaggaaagaaggcagagggagctccagtggttgtgggggaagaaggaagaagccacagccagagggggggaacccccccgtggaanctcccgtgacagctcctgtgggnaaggttgttggtaattttnagaaaaaactgcttttnaagccnaaagagagaaatnttccagaatttttccacttagacttgggcctgaaaggttttgncaagnccccttnntttggggngggat

SEQ ID NO: 95050 - DNA, 863 bp, Arabidopsis thaliana columbia
actcgtgggtcgacgcaagcctctatactgattcgaaataacgacggacgggcacccaccaaagcatcacataacactcacacacacactttctcttctcttattttctcagttcttttaactcttttctctacatatattcaaatggccaccatcgaggttgaacaagtgactccagtagcagctgagaacatcgaggtgccaccaccaaaggctgtggagtcggaggaagtcaccaccgtctccgagtctcttccagctccggtaacagaatctcaagcgcctgtcgaagtaacaactaaagatttggtcgtggaagagacagagaaaccaatcgaagaaacagaggaagctcaagttgaaactccggaggttgtggagatcaagaaagatgaagaagctccggttgaaactccggtggttgtggaggatgagagcaaaacagaggaagttgtagaggcgaagaaagaggaagaagtagaagaaaagaagacagaggaagctccagtggttgtggaggaagagaagaagccagaggcagaggaggagaaacccgccgtggaagcctccgtgacagctccagtggagaaggctgatgagtaaatgtgaagaaaaaaactgtcttttgaaagacaaaagaagaagaaaatgttagcaagtaatttatttgctactttaagtactttgtgtcttgttatgtttttgagtctatgactcttcttgcttttggttttttaatcttcttaagtactattttcaatggttatcatttttaataagatatacattattttataaaaaaaaaaaaaaatagaggatccaagcttacgtacgcgtgcatgcgacgtcagagctgttctata

SEQ ID NO: 95051 - DNA, 550 bp, Arabidopsis thaliana columbia
  unsure (1)..(550): unsure at all n locations
tgttaacaaagaaaactgagaaaggttttcttataagatcccattcttgtagcaaaaacccagaagaacaaactttcgaagaagacgactaatcaattcatctgattatggagagactacagagaatcttcggagctggtggcggtttaggtcacgcatcgcctgattctccgactctcgatacatcggagcaggtttacatctcttctctcgctctcctcaagatgcttaagcacggaagagctggtgttcctatggaagtcatgggattgatgcttggagagtttgtggatgaatacactgttagggttgtggatgtttttgcgatgcctcagagtggtactggtgttagtgttgaagctgttgatcatgttttccagactaatatgctcgacatgcttaaacagaccggaagaccttagatggtggttggttggtatcattcacaatcctggtttccgggctgcttggcttttcctnggggttgacaattaaattactnaaccagnagttttttaagncttttnaatcaagcgggcttgtagcaant

SEQ ID NO: 95052 - DNA, 447 bp, Arabidopsis thaliana columbia
actattttagctacggtcagcttttctctagcgtcggggcctcgatctcttgatttgagcttttcttaggtctgtctctctctgtacactctctccgccgtcgtatctcgccgtcgatttcaatttttccgacgatatgaagctcaccgttaaaactctcaagggcagtcattttgaaattagggttttaccctccgatacgataatggcggtgaagaagaatatagaagattcacaaggaaaagacaattatccatgtgggcagcaattgttgattcacaatggaaaagttttgaaagatgaaactagcctggtggagaacaaagttacggaggaaggatttctcgtcgttatgcttagcaagagcaaatctggaggttcagctggtcaggcttcggttcagacttcttctgtttcacagcctgtttccgctaccacatcttcgac

SEQ ID NO: 95053 - DNA, 931 bp, Arabidopsis thaliana columbia
gatctccagctctcatgcgactcatattgggaaagctggtacgcctgcaggtaccggtccggaattcccgggtcgacccacgcgtccgcttgtttagtcaaacttgaagaagaaaaaaaatctttttaaagagctttgaagatccatggcgatgtctcatgtccagcctatgctactcctcctcgtatcactcttcttcttaccggctttgcgtggcgccatagatttcgaatactgcgccaaaaatggaaacgattacggaaccgtcactagcattgtggtctctccatctgttgggcctcacgaaaacccaaccatcactataaatttattcggttctgcaagcaaaaacatccccgcgggaacccttgtgtacgtagcctttagagatggggaatttaccggccttttaaaaacttacaacctttgtgatgtgagtgcatgtaacaatgaagctgagattgaagctggcaccaactttgagttaactctttccgacgttctttatgttggttatgatgaggaaatcaagtactcggtatctttgcgccgaaagaccttagaggaggaggatccaataataaaaatgtgtgtcgacttcaaagtacctgccccagctcccgcatttgtctctatttagtcaagttggctgatgaaaagatgtttccaagtctctcttgattatatgagtctctctcgcaactttgcttttccttttccccttttgtgttgtccaacaaataaattaaaatcttggaccgatatcgatagcgatatgaacaagcaatcgagcatgtcttttcttcgatttactggttgatattaatcaaaaataaagtttttaaaaaaaaaaacaaagggcggccgctctagaggatccaagcttacgtacgcgtgcaggcgacgtcaagatcttctaagggtgtcctaa

SEQ ID NO: 95054 - DNA, 423 bp, Arabidopsis thaliana columbia
attcccgggcccgatcgttggcctcctgtttccgttttactcgacatcgttccgacgacttttgacctggaatcgacgcagtgacttcaattcaactattgcacttggtttgttggcaatggacaaaggagcacctcctagtatttttgtgaatgatgggtcattcatggaaagattcagacagcttcaacaggagaaagataaagacaaggataaggttgtccaagttgaggattctaagccggtgaagattatatcaaatcccaaacctgctgctaataaaatttccattggattaaagcccaatgatgcccagaagaaaggtggtaagcttgctttcagcttgaagcaaaagtctaagcttcttgcacctcctgtgaagcttggtacagaagaagatgaggatgatgaggatgttaaaca

SEQ ID NO: 95055 - DNA, 471 bp, Arabidopsis thaliana columbia
gatcctgtggttgtcgctgaggatggaaaagtgaagaagtacccagtcatccctctccccaaagaaaagcttgttgacaccaacggtgcaggtgatgcatttgtgggaagggtttctgtcccagctggtgcacggaaaggggattgaagagtgtgtgagggcaggatgctacgcgtcaaacgtagtgatccagaggtctggttgcacttaccctgagaaaccagacttcaactaaatctagaagtcgcacaaatcatccttttagttttatctctgaatgagattttggtgattattattatacgacccaaataaactctatgttgttttcttgtatcaccttttgaggctttaagctattattgagtgtgtgttttggcttggttttattgtacctttttatgattaataaatattattactatactaggccgagtatgatattccaaatgtcaaaatgttcataacttg

SEQ ID NO: 95056 - DNA, 560 bp, Arabidopsis thaliana columbia
  unsure (1)..(560): unsure at all n locations
nnnnnnnnnnnnnnnnnnnnnnnnnnnnnnnnnnnnnnnnnnnnnnnnnnnnnnnnnnnnnnnnnnccacgcgtccggcaagacgcttcactcagcagcagtaactaaacttgcctccaaaaaccaatcccagatctgaatctcaacctaaacctcagattcatcatcatggcttcttcttctaactacgatggaatccttctcggtatgggtaacccactcctcgatatctctgccgtcgtcgacgacgaatttctcaccaaatacgacatcaagttgaacaatgcgattctcgcggaagacaaacatttgcccatgtatgatgagatgagtagcaagttcaatgttgaatacattgccggaggtgctactcagaactcaatcaaagtggctcagtggatgcttcaaattcctggggcaaccagttacatgggatccattggaaaggacaaatatggagaggccatgaagaaggatgctacagcagctggtgttaatgttcactattatgaagatgagtcggcacctactggaacttgtggtgtctgtgttgttggtgg

SEQ ID NO: 95057 - DNA, 1289 bp, Arabidopsis thaliana columbia
  unsure (1)..(1289): unsure at all n locations
acccacgcgtccgcccacgcgtccgccagatctgaacctcttccctttcctcgaaaatccttctaacatcatcatccatggcttcctctgatttcgatggaatccttttgggaatgggaaacccactcctcgacgtctctgccgtcgtcgaccaacagtttctcgacaaatacgacatcaaattgaacaatgcgattctcgcagaggacaaacatttgcccatgtacgatgaaatgagccagaagttcaatgttgaatacattgctggaggtgctacccagaactcaatcaaagtggcccagtggatgcttcaagttcctggggcaaccagttacatgggatccattggaaaggacaaatacggagaggcaatgaagaaggatgctacagcagctggtgtctatgtccactattacgaagatgaggcaacacctaccggaacttgcggtgtctgtgttcttggtggagaaagatcgctcattgccaatctttctgctgctaattgctacaaggttgaacacttgaagaagcctgagaactgggctctggttgagaaggccaagttttattacattgctggattcttcctcacggtatcaccagaatccattcagttggtacgtgaacatgctgctgcaaacaacaaggtgttcacgatgaacctttctgctccattcatctgtgaattcttcaaagatgttcaggagaagtgcctgccgtacatggactatatttttggcaatgagaccgaggcaagaaccttctccagggttcacggctgggagactgatgatgttgagcaaatagccatcaagatgtcccagttacccaaagcctctggaacatacaagaggactactgtgattacacagggcgctgatcctgtggttgtcgctgaggatggaaaggtgaagaaatatccagtcattcctctcccaaaggagaagctggttgacaccaacggtgcaggtgatgcattttgtgggagggtttctgtcccagctggtgcacgagaaatcgattgaggaatgcgtgaaggctggatgctatgcgtcgaacgtggtgatccaaagatctggctgcacttaccctgagaagcccgactttaactaaacaattgggttaccctcagttttgtgatatcttccaaataaaacaacctttgaattattattgcttgagtgtactttttaccacttttaaaaaaaaaaaaaaagnnnnnnnnnnnnnnnnnnnnnnnnnnnnnnnnnnnnnnnnnnnnnnnnnnnnnnnnnnnnnnnnnnnnncta

SEQ ID NO: 95058 - DNA, 1901 bp, Arabidopsis thaliana columbia
gcaggtaccggtctcggattcccggctcgacccacgcgtccggcggccacgtttctgccggcgacatctctccgtctaactcaaaactctactctccgcttcttatcattcttcaccatttctaacccttcttattctctcttccgtcctctacgccgccgtgttctccctcccttcgatgcttttccggccaattctcgccggagatgcttttgcacagctgtttcggaatctctcggctccggtgatggaaataaagttgagagttacgagaaacgatttgggagtaaagttggagaattcaggaaaaagttgaggatagctgaagtgaaaggaggagcggacgaaggactgagtcgggtcgggcagagccttaacattatgggttgggttcgtacacttcgatctcagagcagtgtcacattcattgagataaatgatggttcatgcttatcgaatttgcaatgtgtgatgacttcggatgcagaagggtatgatcaggtagaatctggttcgatcttgactggagcatcagtatctgtacaaggtactattgtagctagccagggaacgaagcaaaaagtggaacttaaggtggagaaaatcattgtggttggagagtgtgactcttcctatccgatccagaagaaaagggtcagccgggaattcttgagaaccaaggctcatttacgtcctagaaccaacacttttggggcggtggcaagagttaggaatactctggcatatgctacacacaagttctttcaagaaagtggatttgtctgggtggcaagcccaattatcacagcttcggattgtgaaggagcaggagaacagttctgtgtcactacacttattcctagctcccatgagtacaccgatacttccattgatgcgattccgaaaacaaagggagggttgatcgattggtctcaggacttttttgggaaaccagcattcttaaccgtctctgggcaacttaatggagaaacttatgcaaccgctctctcagatgtatacacatttggtcctacatttcgagctgagaattccaacacgtcaaggcacttagccgaattctggatgattgaaccagaacttgcttttgccgacctggatgatgacatggcctgtgccactgcctacctccagtacgtagtaaagtacgttcttgataattgcaaggaagacatggagtttttcgatacatggattgagaaaggaatcattcgccgtttgagtgacgtagctgagaaagagtttctacagctggggtacacagacgccattgaaattcttctgaaagcaaacaaaaaattcgattttccggtgaagtgggggctggatctgcagagtgagcatgaaaggtacataacagaagaggcttttgggggtcgacctgtgataataagagactatccgaaggagatcaaagcattctatatgcgggagaacgatgatgggaagacagtggcagcaatggatatgcttgtgcctcggataggagagctgataggtggaagccaaagagaggaaaggcttgaggtgttggaagcgaggcttgatgagttgaaactcaacaaagagagctactggtggtacctcgacctccgccgctatggttcagttcctcatgcaggatttggactagggtttgagagactggtccaatttgtcaccggaattgataatatcagagacgttattcctttcccgcgcacacctgcctctgctgaattctgatactcgactctctcattgctcaacagttttctcttcatttcctcaaaattcttgtactcttatgtgccattatttatttgacataaacgaaaacctcaaaagaaataattatttgattcatatatagaaatatatttataacaaaaaaaaaaaaaaaa

SEQ ID NO: 95059 - DNA, 531 bp, Arabidopsis thaliana columbia
accacgcgtccgcccacgcgtccgcccacgcgtccgcacagcttttcgttacgttaatcaccagctccatcgtcccgatctccaccttcaccacaattcctcctccgatgacgtcactcccggagccgggatgggtcatttcaccgtcgacgacgaagacaacaacaacaaccatcaaggtcttgacttagcctctggtggaggatcaggaagctctggaggaggaggaggtcacggcgggggaggagacgtcgttggtcgtcgtccacgtggcagaccaccgggatccaagaacaaaccgaaacctccggtaattatcacgcgcgagagcgcaaacactctaagagctcacattcttgaagtaacaaacggctgcgatgttttcgactgcgttgcgacttatgctcgtcggagacagcgagggatctgcgttctgagcggtctcggaacggtcacgaacgtcagcatacgtcagccatctgcggctggagcggctgtgacgctacacggaacgatcgagattctttctct

SEQ ID NO: 95060 - DNA, 582 bp, Arabidopsis thaliana columbia
tgggaatttacatatcgttcgatgttcgagctggcatcgtcatatctctcgcatcccttttcgacacggacgtgaacaaataccggcaagtcctatataaaggtcacttatcggaaatgttcataccttacatggacccaagtgatgattggtatttcattacttatcttgattgtggcgattttggctgcggtcaatgcgccgtatctcttcaaccgtacactgattgtccagcgggtgcagtttttatggatggtatttttgctggtcaagatggaactcccgcaaaaatcccaaaagttatgtgcatttttgaaaaatatgctggagatatcatgtggcgacatacagaagctgaaattccaaacttagaaattacggaggttagaccggacgtaagtcttgtagcccggattgtgacgaccgtgggaaactatgactacatagttgattatgagttcaagcctagtggttccatcaaaatgggggtcggcttaaccggtgttttagaagtgaaaccggtggaatatattcacacatgcgaaatcaaactaggggaagacatacacgggacaattgtcg

SEQ ID NO: 95061 - DNA, 450 bp, Arabidopsis thaliana columbia
aatctttctctgatttcataaaacagaatagagatttataaaacttcttgcttttaaagatggcgattagattgtcgcgtgtgatcaactctaaacagtcccaaaaacagcaatctcgagtcccgaaaggacatgttgcggtttatgtcggagaagagatggagagcaagaagagattcgtggttccgatttcgtatttgaaccatccttcatttcaaggtttgcttagtagagcagaggaagagtttggtttcaatcatccaatcggtggattaacgattccatgcagagaagaaacatttgttggtcttttgaattcttatggttgtattgtttcaacttgagacaacttttttgggaaagcccaaaacttttttttttctttctatagaattaccttttttgccgctgttccctttggttatttttgcaaatgagacacatattgat

SEQ ID NO: 95062 - DNA, 585 bp, Arabidopsis thaliana columbia
acgcaaagatgaacaaagtcgatctggacaacaaattcatcggatgctctcatctgaccttaagaacacctggatctactttctaaacaatacacagagcattatgaagaatgcatagagagtattctgaataaaaagaaagcggacaagtttgactatgaaggtttatgtaaagcactagagcagctttcagattttgagaaagaggcaaataatcgagtgattgagtctggtgtactcaaaggcctgaatcttgaagacattaagcgcgctggggaaaggttaatccttcaagatggatgcatcaatgtcttccagaaaattttaaagactgagaatctgaatgcagaacttcatgtgctttcctattgttggggtggtgacctcatcagggcagccttttctgcaggcggagtagatgcagtggaagtacatgcaaatgaattcacatttgaggaatccatctcgactggtgagatcgaaagaaaggtggaatccccaattaacaaagctcaacagttcaaaagtatgctacaaaacagaaagaatgagaacaataagaaaagtttcttgagtgtgtatatt

SEQ ID NO: 95063 - DNA, 523 bp, Arabidopsis thaliana columbia
ggacacatctcattgaccatcaatgtcatcctcatgttcacatcaggagtcttcatcattggaccatttgctctcatcacaacagctgtctcagctgatctcggaacccacaaatctctcaaaggcaatgcaagggctttggctacagtctcagctatcatagacggcacaggatccgtcggtgctgcgattggaccagtcctcactggttacatctctgccataagctgggacgcagtgttttacatgtttgatgactgcagcattgatctctggattggtgctcactaaactaatcatagcagaagtcaaagcgttattgtttggatcagaagatgaagtagctgcatcatcatgatcaccaccagcatccagacctcccattgatgtcctcgcttgagttttttccttcattatttatcagttgctctgacaattgcacactttttttatccttttaaagttcgttcctttttccccagttgtcttcatttcttaagtttgaatgagaataagattacct

SEQ ID NO: 95064 - DNA, 550 bp, Arabidopsis thaliana columbia
gaatccgtcgcatctcgattcaaagctattgtataatttcgtcttcttcttccatggaataacgtgtttaggcgtgtatcacatggttctttctttgtgtgacacaaaaccaacataaagcttccatacgatttagacattgtcgatcgctattgtaagatctggtctgggtcctcgattttggtgaggattgtcgggtggaacaaaactctttcttaaaggctctgcagaaattaattctctgctctggctggatctgatagtgattttacagattgttcaggtcagaaatgggcaatccgggatcagacacagagagaaacaagggaaatgtggtctcaagtgtgtttgatcctgcacttctctcgattcgtttggattttccccagaaactccaaactcgtcttaagtcccagctgaagaatttgacagatgataagcatgggattggttcttcatggaggcaagataaaggaaactcatcgatctccatgcaaattgatctggagaaacagttagattgttggagggaaaacccttcgtggactga

SEQ ID NO: 95065 - DNA, 473 bp, Arabidopsis thaliana columbia
cttttgtctccgtctctctgtctctcttggcgactcttcctctcccgactcaaacggctacaatctctctccctaagcgcttatctctccaattccttctccttcccactccgtaacgcaacactctcaacaacaacaaaccgccggaactttctcaccaccggaaggatcatagctcgggcatataaagtggtggcagagcacgacggattgacgactgaattggaagtcgaaccagacgagacgattctatctaaggctcttgactctggccttgacgttccctacgactgcaatctcggtgtttgtatgacttgtccagcgaaactcgtgaccggaacggtggatcaaagtggtgggatgctaagtgatgatgtggttgaacgtggctacacgcttctatgtgcttcgtatccaacttctgattgacaacataagatgatccctggggatgaactttagtcttttcagct

SEQ ID NO: 95066 - DNA, 561 bp, Arabidopsis thaliana columbia
gccaagtagccatcaaggttcagggtcaggcagggcacgaagagattctgcagctcgtgctatgcaaggttggcatgcgcagcgccttgttggatctggagaggttactgcgcctgctgttaaggataagggcttaatttccaccccaaagcacaagaaactcaaaagcattgggctgcaaaaacacaaacaacaaactagcatggaccatgttgttacaaatgaagctgacaaacagttggctgctgaggttgttgatgttggacccgttgctgactgggtgaagataaatgtcaaagaatctaaggattccttcgagatatttgccttggtacctggacttcttcgcaacgaggttcgaattcaatcagatcctgcgggaaaggtggtgatagcaggccaaccagagcttactgtacatgcttgaaacaaacgccgctctatatcattagtgctatggatactattcccaaaataaaatatgaaaactttagtgggattgggtcatcatctttttttgggttttgtaaattactgattttggtagatgtgttaggcaaa

SEQ ID NO: 95067 - DNA, 418 bp, Arabidopsis thaliana columbia
cgcgccttctcagtcaaccgggaagcccggaggaatgcgttcgagtaaaatcatagccattactgcagctgtgattggcggggtctctctcatgctgattgctctcattgtctacctcatgagacgcccagtgagaacagtcgcttcttctgctcaagatggccaaccatcggaaatgtctttggacatatacttccctccaaaggaaggattcacgttccaagatttagttgcagccactgataatttcgacgagagctttgtagttgggagaggagcttgtggaaccgtctacaaagcggttcttccagccgggtacactctagctgtcaagaagctggcatcaaaccatgaaggcggcaacaacaacaatgtggataatagctctagagcagagattctaactcttgggaatatc

SEQ ID NO: 95068 - DNA, 571 bp, Arabidopsis thaliana columbia
gtcgcacacaccacatgctctctctctctctctctctctctctctctttcttctcctttctctttgtatctcttctctcttatgctaagccaaaaatggaagctttactctattgaagacgagatccttctctaatttacaggtacccatcttttatttctgaataatagattttggttcttgcaaatcttatagcttaaagttgagatttttggtatttacttagcaacaaaaaaagtttgtgataatattaccataaatggtgagacatccatttgcggctgagattttgctactttactcttttctctctctctatttccatttgtattgtcactcactcacatacaaaaataacatcataatcagagataatgagtaaaagtgaaagaaaccctaataccaacttactctacaaggttaaaacaaatgttgctctttttcattagtcctatggatcttattcccaaaataaaagatgaaaactttagtgggtttggttcatcatctcttttgggtttttgtaaattactgattttggtagatgtgttaagcaaaaagtagagagaaa

SEQ ID NO: 95069 - DNA, 491 bp, Arabidopsis thaliana columbia
catatccatagctatgtgatgcttcttcaagcttaaagattttgtgtatcctcgttcttgtaatggaaatctacaccatgaaaacgaattttcttgtactggctttgtctttgtgtatccttctttcaagcttccatgaggtttcttgtcaggatgatggtagtggtttgagtaatttggatctaatagaacgtgattatcaagatagtgtcaatgctcttcaaggcaaggacgatgaagatcagtctgcaaagatacagagtgaaaaccagaataacactacagtgactgataagaacactatttctctatctctatcagatgaatctgaggttggatctgttagtgatgaaagcgttggacgttcgagtctgttggattaaatcaaacttgaattcgaagctcatcacaatagtattaaccaagctggatctgatggtgtcaaggctgaatccaaggatgatgatgaagaattatctgctcatagacag

SEQ ID NO: 95070 - DNA, 442 bp, Arabidopsis thaliana columbia
ctcggttatctagaattggaaaacaagactatgagacagtaaagcagggaacatctgttggctcgtcggaggtgcatctttcagcgagaatgcaggtcacaggggaagcggaatatactgatgatactccagtacctcctaataccttacatgctgcctttgtgctaagcaaagtgccacatgcccgcatcctttcaatcgatgattcggcagccaaatcttcatctggttttgttggtctgtttcttgccaaagatattcctggggataatatgattggaccaattgttcccgacgaagaattatttgctacagatgtggtcacgtgtgtgggacaagtcattggtgtggtcgtcgcggatacacatgaaaatgcaaaaactgcagcaggtaaagttgacgtttggtatgaggtactaccagccattttatcaatcaaggt

SEQ ID NO: 95071 - DNA, 564 bp, Arabidopsis thaliana columbia
gggatcaagaatagctgccatggatgagttcattatcaaactccagtctgagaagaagcaaaaagaaaaagaaaggaatgaggcacaaaagcagctgaagaagaaggaagaggaagttgctgctttaagatctcttttaacacagagggaagcttgtgctaccaatgaagaggagataaaagagaaagtaaacgagagaacccagcttttgaagtcggaactagataagaaacttgaagaatgccgaagaatggctgaggaatttgttgagatggagagaaggagaatggaggaaaggatagttcagcagcaagaggaactggagatgatgaggagacggttagaggaaatcgaggttgagttccgccgctcaaatggaggaagtgttgatgaaactagtgggttttgccaaaagactcacgagtctttactctgatgatgatcctggtatggtgaagtcaatggaccttgacatgggtgatccagaacctgtcaagcaagtgtggggagctgtttcacaccaatcaagcaacactattagtagcaacttcactaaccttttgc

SEQ ID NO: 95072 - DNA, 880 bp, Arabidopsis thaliana columbia
  unsure (1)..(880): unsure at all n locations
gatctctcgcaaatggactcatcacataacaacattgttgttctttggttttgggctatggtctttgtgggacggtttcaaagaaggaggagggggttcggaagaattggctgaagtcgaagcagaactggatgctgatttgaaggctaatggtaaatctccaaaagacagtagtaagagagaagatgaaaacaaaaagcagaatagggcgttcctcacgcaatttttctctccaatttttctcaaggctttttcgattaatttctttggagaatggggtgacaagagtcagcttgctacaattggtttagctgcagatgaaaatccatttggggtggtccttggtggagttgtggcacagtttttgtgcaccactgctgctgtaattggaggaaagagcttagcgtctcaaatttccgaaagaatagtggctctttctggtggaatgcttttcatcatttttggcatccaatcgtatcttacttctgttgaggcttaatgctttcttatggtttgtagggagactgatgaagaggaagaacgttactatccatagtttattagacatttaattttgtttattagacatttacacaagtgattacaaaacaaatctgagagtttgattgtctacagtgaaaacattgaaatgtgctgaagcagccatctgacttcaataaagtttttttggtaatcagttttaatcctcttttgttttttggagtcatttggattttgaaatgttttgcaaggatttgactcaatgagatacaaaatgtggttttgttttaaaaaaaaaaaaaaaaaaagnnnnnnnnnnnnnnnnnnnnnnnnnnnnnnnnnnnnnnnnnnnnnnnnnnnnnnnnnnnnnnnnnnnnnn

SEQ ID NO: 95073 - DNA, 535 bp, Arabidopsis thaliana columbia
  unsure (1)..(535): unsure at all n locations
nnnnnnnnnnnnnnnnnnnnnnnnnnnnnnnnnnnnnnnnnnnnnnnnnnnnnnnnnnnnnnnnccacgcgtccggccgtttcatcaacaactctctcctgtaaacgaaacaaagaaatggctggacaaaagcaagagcttcccgtctccggcgaacctttagccgtcgagagtccgatgaccaacaagaagaagaagaaaagcaagaagaacaaacatacagaggaaaatcatgaagtcgaagaagtgcctcaagaggtcactaatggtgtagaggaagagttgagtaataaagagaagaagaagaaacgtaagagagaggagaaagagtctgagaagaataagaagaaggatgtcccggagaagaagcttgaagctgaggatttaggagaaggagagagtgaacaacagaaggttgttgtgactgggaaaggtgtggaagaagcaaagtacgcagctttgaagacttttgctgaatcgaatttgccggagaatgttttagattgttgtaagactttcgagaagccgtctccga

SEQ ID NO: 95074 - DNA, 924 bp, Arabidopsis thaliana columbia
atgaaacccaattagtctcaccgcctgttttctctactttcaccaccgagccatcgactgctcctttcactcctcctccagagcttgcacgtctgactgccccttcttcacctgatgtaccttatgctcgtttcttgacttcctccatggatctcaagaactctggtaaaggtcattacaatgatcttcaagctacttattctctttatcccggaagtccagccagtgctcttagatcaccaatctctcgggcttcgggagatgggttattgtcgcctcaaaatggtaaatgctcaaggagtgattctggcaacacatttcggggtatgacacaaatggagtctcaacaacctttgcaggaggtcaaacttcttctgtcctgaaactttttgccaagttttacctggtccacgtcccttcagttccccaaaacgggggaagattaagcgtgtcgaaggattcagatgtgtatcctacaaatggatatggaaacgggaaccagaataggcagaacagaagtcccaagcaagacatggaggagttagaagcttacagggcgtcctttggttttagtgcagatgaaatcatcacaactagtcagtatgtagagatcactgatgtgatggatgggtcttttaacacatcagcttactctccaagcgatggacaaaagcttctcagaagagaagcaaatttgctgagtcaaacaagccccaaatcagaagccgatcttgattcacaagttgtagacttccaatcaccaaagtcatcaaatagctacaaagatcacaaacaaagaaaccggatccatgcggatgaagaggctttattgtcgagagtggggtctgtaaaaggaagcagaagctatcatatttcaagctctgatgcagaggtcgagttcagaacatgaagaagcttaaggga

SEQ ID NO: 95075 - DNA, 438 bp, Arabidopsis thaliana columbia
ggttttggaagccagatccggctcacggcggagcaatctgctgctttagcggcggcgttggagaaaagcagtgtgcgtttcatatgggcggtgagagacgcagctaagaaggtgaactccagcgataactccgttgaggaagatgtgatcccggcgggatttgaagagagagtgaaggagaaaggactcgtgataagaggatgggccccacaaactatgattcttgagcatcgagccgttggatcttacctaactcatttgggttggggttcggttctggaaggaatggtcggaggagttatgttgctagcgtggccgatgcaagcagaccatttctttaacacgacgctcatcgttgataaactaagagccgcagtgcgagttggagagaacagagactcggttcctgactcggacaagctcgctcggaatttggct

SEQ ID NO: 95076 - DNA, 457 bp, Arabidopsis thaliana columbia
gggtcttctgttttgtctatttttgtttggtgcattagctccaattgtgaacgttaattatggaggaattagtggtgctttttatgggaactatagatctaattatattactgaccagatttacagtcagcatagggatagagttttggatacatctcgtagtggtgctggtactggggtttctaatagtaatgggatgcatcgtgggagagattctgatcgaggagctaggaaaaatatatctgcaacagagagttctgtcactcctggaaatggtagtgagcctctagttgcatcactctttgttccgaggaatgacaagcttgtgaagatagatgggaatttgattatcaattctatattggcgagtgagacagccgtggcttcgagaaaggcttttgtatcaaaggagaggaaagctgacttgtgatctttaaagattattacccctgcactg

SEQ ID NO: 95077 - DNA, 1055 bp, Arabidopsis thaliana columbia
aacctgagaagcttgatttctcgaaagatttctttggtcgcgacacttatctgactgcttctgggaggtttcatcttgagagctatgcttctgcacttggaaaagtttatacctttggaccaagattcatagctgataaaattgacaatgcaaggcatttggcagagaagtggaatgtggaaaccgaaatggctttcgcggaattggatgatgctatggattgtgctgatgaatacttcaagttcctctgcaaatatgttctggaaaatcgcgatgaagacatgaaattcatatcaaaacgagttgacaagaccatcaccacacgtctcgaagcaacagcatccagctcccttttgagattctcctataccgaagtgattagtcttctgcaaaaggcaaccactacaaaatttgaaaccaagcctgagtggggagttgctttaacaacagagcatctaagttatctgactgatgagatctacaaaggtcctgtaattgtacatacctacccgaaagcaattaaacagttttacgtaaggttgaatgatgataagaagactgtagcagcgtttgatctggtcgtaccaaaggttggtgttgtgatcaccgggagccaaaacgaagaacggtttgagattctggatgcgaggatcggggaatccggattcacgagggagaagttcgagtggtacttagatttaaggaggcatgggacagtgaaacattcaggaataagcctaagcatggaacaaatgcttctgtatgcgaccgggcttcctgatatcaaagatgccattcctttcccaagaagttggggcaaagcaaacaattaaagcagcctcaagctatttaatttacaaactttaagttacattgttatgtattctctgtaaccatacttgggtgtgaaataataaggaacccctataccaaattgttcataatcctataccaagttttagtatatttgtattgataacatatctactcaaaattgtactcactgcgagtagatttgatgttctatagttgattcaaaaaaaaaaaaaaaaaaa

SEQ ID NO: 95078 - DNA, 430 bp, Arabidopsis thaliana columbia
  unsure (1)..(430): unsure at all n locations
tttcagcccttgngggctttttgcaaccatcngcattgccggggttccaaatggggccaattggnggaggcacttcacaggcttgtccccacactgccaactggtccttgggggctcgcttaaccgtggattcagtgcatagaaaccctaaaccgtcttcgcatttgtttataccaccaatccccaaatattcctatttcgatttgttatgattaaatcagtattctctctgtatatctcagtatcatttccgtcgtcagtgtgtaatttcaaattatgtatttgccatgtacagaagcttgtagaactaaagttgaatgtatagaaggtttgtatattatgatgtaaacttgggagttgtcaatctcatggatggtttactttttgtagcagaaacagcagaagaaaatagtaaaaagagaattttatt

SEQ ID NO: 95079 - DNA, 582 bp, Arabidopsis thaliana columbia
  unsure (1)..(582): unsure at all n locations
atgatctnnnnnnnnnnnnnnnnnnnnnnnnnnnnnnnnnnnnnnnnnnnnnnnnnnnnnnnnnnnnnnnnnnnnnnnnnnccacgcgtgcgcgagaatccaaggcctggaaccattatcaacagccctcatggaaaagatgtctatcaaggagttcccaaggattatactggagatgatgtcaatgttgataatctatttgctgtgatccttggagacaaaactgctgttaaagggggaagtgggaaggttgtggatagtggtcctaatgatcatatcttcatattctacagtgaccatggtggtcctggagttcttgggatgccaacttctccttacctatatgcaaatgatctcaatgatgtcttgaagaagaaacatgctttaggaacatataaaagcttggtgttttatctcgaagcttgcgaatctggaagtatctttgaagggcttcttcctgagggtttgaacatctatgccacaactgcatcaaacgccgaagaaagcagttggggtacctatttgcccctggtgagggacccantccttcacccgnngnttgaaacctnnttnnggtggact

SEQ ID NO: 95080 - DNA, 592 bp, Arabidopsis thaliana columbia
  unsure (1)..(592): unsure at all n locations
acccacgcgtccgcccacgcgtccgcccacgcgtccgattttatttgatagcccggcgattaaaaagattcctatcatcatcactcgccggctaatggccacaacgatgacacgtgtctccgtcggcgtcgtcctctttgttctcttagtctcgctggttgccgtctccgccgcgagaagcggtcctgatgatgttatcaaactcccttcgcaggcttctcgcttcttccgtcctgctgaaaacgacgacgattctaactccggtactaggtgggctgttctagtcgccggatctagcggatattggaattacaggcatcaggctgatatatgccatgcctatcaacttctgaggaaaggtggattgaaagaggagaatattgtggtattcatgtatgatgatattgctaacaattacgagaatccaaggcctggaaccattatcaacagccctcatggaaaagatgtctatcaaggagttccaagggttatactggaggtgtgtccatgttgnaaacctttttctggntcctggggaaactcttaagggaagtggagtttggaagggccaanncaattaaatccaggcctc

SEQ ID NO: 95081 - DNA, 1289 bp, Arabidopsis thaliana columbia
  unsure (1)..(1289): unsure at all n locations
nnnnnnnnnnnnnnnnnnnnnnnnnnnnnnnnnnnnnnnnnnnnnnnnnnnnnnnnnnnnnnnnnnnnnnnccacgcgtccgcggacgcgtgggcggacgcgtgggacatgctttaggaacatataaaagcttggtgttttatctcgaagcttgcgaatctggaagtatctttgaagggcttcttcctgagggtttgaacatctatgccacaactgcatcaaacgccgaagaaagcagttggggtacctattgccctggagaggaacccagtcctccaccggagtatgaaacttgtttaggtgacttgtacagtgttgcttggatggaagatagtggtatgcacaatttacagactgagactctgcaccagcaatatgaacttgtgaaaaggaggactgcacctgttgggtactcttatggttctcatgtcatgcaatatggcgatgtaggaattagcaaggataatctcgatctttatatgggaacaaaccctgccaatgacaattttacctttgcggatgcgaattcactaaagccaccttcaagagttacaaaccagcgtgatgcagatcttgttcatttttgggaaaagtaccgaaaagcaccagaaggttcagcaagaaaaacagaagctcagaagcaagtacttgaagccatgtctcacagacttcatattgacaatagcgtgatactcgtcggaaaaatcttgtttggcatttcgagaggtcctgaagtgctaaacaaagtacggtctgctgggcaacctctagtcgatgactggaactgccttaaaaatcaggtgagagctttcgagaggcactgtggatcgctgtctcagtacggtatcaagcacatgaggtcttttgcaaacatctgcaatgcagggattcaaatggagcaaatggaggaggcagcttcacaggcttgtaccacactgccaactggtccttggagctcgcttaaccgtggattcagtgcatagaaaccctaaaccgtcttcgcatttgtttataccaccaatccccaaatattcctatttcgatttgttatgattaaatcagtattctctctgtatatctcagtatcatttccgtcgtcagtgtgtaatttcaaattatgtatttgccatgtacagaagcttgtagaactaaagttgaatgtatagaaggtttgtatattatgatgtaaaaaaaaaaaaaaagcacgccccctctagaggatccaagcttacgtacgcgtgcatgcgacgtcataactcttctatagtnnnnnnnnnnnnnnnnnnnna

SEQ ID NO: 95082 - DNA, 497 bp, Arabidopsis thaliana columbia
aaaagaagcagaatcattcccatttataacaaacctaaacctctcttttcttcttctctttacctttttcattccaaaatctctctctctctctctctttctctggctcgggaagaagatgtcacgtagttgctcacagtgtggaaacaacggccacaactctcgcacatgtccgacggacataactaccaccggtgacaacaacgacaaaggcggcggggagaaagccatcatgctttttggcgtccgcgtcacggaagcttcatcatcttgttttagaaaaagtgttagtatgaacaatctctctcaattcgatcaaactcctgatcccaacccaaccgatgacggtggttacgcttcaaacggcgtcgttcacgcctccggtagaaaccgtgaacgcaaacggggttaataaaataacctttcttctctctttcccaaatctcatctctggttttggttcttggttttgaaactttcttgcaaatttggaattt

SEQ ID NO: 95083 - DNA, 604 bp, Arabidopsis thaliana columbia
cttccgattactgaatcatggggcaagtatggaatcatcagagaaactgatatgtggaataaacgtccagagttcacagcatggttgcttgaagtaaagaaggttaatttggaaagcttgccaccttgggaagagaagaaaatgtttaaagattttatggaggatcataatactggtacatttacctcgaaaaaatactatgacattgatggttactatagacttaagttggaaaaagagatgaaaaagggtttgaagaaagctggattagtgaacgtactgtgttcaatgatgaggaacaacgccgactggagatgcaggaattacgtgaaaggcagaaggaagaagaagtgttagctctaaagcgatcaatggaaggtggaatggcgcaagctatgaaagagcaagctccgcttaaggaagaaatggtgtacttatacaagattggggacatggagggtgcagctgctatacagagaaggttggatccggatgttcccatgtgatgtgtagctttttgttaagctacaatatcttctcgattgtgttccaagaatcgaacttttgtaacattaggataagagaaaccaaaattgtatgtcct

SEQ ID NO: 95084 - DNA, 475 bp, Arabidopsis thaliana columbia
  unsure (1)..(475): unsure at all n locations
cgcgcttggctgggtttcgtgtgatttcgttttggatatggttgttcggattcttgttaccatgattcggctatagtgtttgtcgcctctgattgtctcaagcatcgttctttactgatttttagatagctctgagatctgtctctgcgattcgtcggatttgaattcgtttttttttttgggtagctcttggatttcttcttctagggtttccaagaggatagagaaaatgcgggtgtcctctgagatactccttctttctttggttccggcgttgactttttatcattctggtttaagttctaatcggttgaaacctcttcaaaagagtgattggcgtggtaatcttagttaaacaacaatttctcttgttttttgtttctccgatcttttcagatcttttcaattttctcctcgggttccgttttgttttcaggatttcccaagcccggggaagcnaatcgaggnngaacaa

SEQ ID NO: 95085 - DNA, 517 bp, Arabidopsis thaliana columbia
  unsure (1)..(517): unsure at all n locations
tgcgactcatattgggaatagtctggtacgcctgaaggtaccggtccggaattcccgggtcgacccacgcgtccgcggacgcgtgggttcgtcatcatcagatggagattctcgtggacctttagaagccaatggtgttcttaaggggaaagatcagaaacctcttggatctattcacgttccttctcctaatttcgatatggtttactctgtgttatctcaacgaggctattaccctgactcacctgataaggagaatcaagacacttactgcatcaaaacagagcttcaaggtaacccgaatgttcatttcttcggtgtctttgatggtcacggtgtgttgggtacgcagtgttcgaattttgttaaggagaaggttggggaaatgttgtctgaagaccaactcttcttgagatcccgagaaagctacagtctgctttttgagggtaatgaagagtacacnatagggaatcgacgatcgatgagtggactactgccttacggttcttgtgttggg

SEQ ID NO: 95086 - DNA, 534 bp, Arabidopsis thaliana columbia
  unsure (1)..(534): unsure at all n locations
ctcaaatgtatccttctctcgacgatgatttcgtctctgatttgttttgcttcgatcaaagggggaaaggttgtgtcttttgatgataatttgacgaaccctaatgtatctgaaagctgttaaattgaataggagaagaagtagctttatggatgttgttgtttatatttactcctattgatggatgtgaatctttttggtcatgatgactcttgtagcaatggagcagaacttgatgattacacacagtttggtgtaaatttgcagactgatcaagaggatacctttccagattttntgtcatatggtgtgaatttgcagcaggagccagatgaagtctttagtaattggagcttctcaattggatttngtccnccggataatggagtttttgtcggtaggagccagancagggtggggcaaccaaggnttttaaaggttgtccaggagnaggatgttgggnncaattcctgggnncaacntggnggggctttaaggnagncccggnccttttnngttccggnttncccaaaa

SEQ ID NO: 95087 - DNA, 406 bp, Arabidopsis thaliana columbia
aagacgcgtccgcccacgcgtccgcaaatctcaaatttgtttggagactctcaaatgtatccttctctcgacgatgatttcgtctctgatttgttttgcttcgatcaaagcaatggagcagaacttgatgattacacacagtttggtgtaaatttgcagactgatcaagaggatacctttccagattttgtgtcatatggtgtgaatttgcagcaggagccagatgaagtctttagtattggagcttctcaattggatttgtcctcgtataatggagttttgtcgctagagccagaacaggtggggcaacaagattgtgaagttgtgcaggaagaagaagtagagatcaattctggttcatctggtggagctggttaagggaagaacaggaacatttagatgacga

SEQ ID NO: 95088 - DNA, 3117 bp, Arabidopsis thaliana columbia
  unsure (1)..(3117): unsure at all n locations
caaactccaccaactcagaatattgttggacataataccccttggatgtcgcctctccctttccgtaacgcttggcttgcttctcagcaaaccagtggatttgatgttggttcccgtttccccgtctatccaatcactgaccctgtaaaattgactcccatgaaagaatcatccatgactctttctggcgcaaaacatgttcagagtggaacttctagcaatgtttccaaagtgacaccaacacttgagcctactagtacagttgtagcacctgctcaacattctacaagggtaaaatcaaggaaacggaagaagatgccagtctctgtggagtctggtccaaacattttgaattcgttaaagcagacagaattagctgcctcacctcttgtgccttttacacctactccggctaatctgggttataatgctggcaccctgcccagtgttgtttctatgactgcagtccctatggacctggtatctacgttccccgggaagaaaataaaatcatctttcccatctccaatttttggtggtaaccttgtacgtgaagtaaagcagagatctgtcttgtcagaggatactattgaaaaacttaaggaggctaagatgcatgcagaggatgcatctgctcttgctactgcagctgttagtcatagcgaatatgtatggaagcagatagagcaacaaagtcatgctggcctccagccagaaactcaagacagattaggttcggctgctgttgccatagctggtgcagctgcggtggcaaaagctgcagctgctgccgccaatgttgcagctaatgatgcattgcaggccaagttaatggctgaagaagcatcccttccaaatgcttctgatcagggactcccaaagtcatatgatagcatattacccggtcagggtacccctgcttctatcttgaagggtgaaggtgcagtggtgaactccagttcggttcttattgctgcgagagaggcatctaagaagagggttgaagctgctacagcggccaccaagcgtgctgaaaatatggactccattgtaaaagcagcagaattggcatcagaggctgtttctcaagctggaatacttgtttcaatgggtcatcctccgttgctcaataagctggtggaggcgggtccaagtaattactggaggcaggctcatgaatctcaggaagtacagccctgtaaaacggttgtcttagaaaaagaaactgtgtctactagtgagggaacttttgctggtcccaaaattgtgcagactgagtttggtggctctgtgaatacggcagatggtgtgtccggtccagttcctgccactggaaagttaaagggacaggagggtgataaatatgcagacttggctaaaaacaatgatgtggtttttgaaccagaagttgggtcaaaattttcaattgacgcccaacagactatcaaagcaacaaagaatgaggacatcaaggagggttctaatgtagaggttttcaaagaagaacctggattaagaaccgcatggtactctgccaatgtattgagcttagaggatgataaagcttacgtgttgttcagtgacctatctgtagaacaaggaacagacaagcttaaggagtgggtagccctcaaaggggaaggtgatcaggcccctaaaataagacctgctcgttctgttactgccttgccatatgaaggaaccaggaagagacgtagagctgctcttggggatcatatttggaaaattggggatagggtagactcgtgggtgcatgacagttggttggagggtgttatcacagagaagaacaagaaagatgaaaacacagtgactgtgcattttcctgcggaagaagaaactttgacgatcaaagcttggaatcttcgtccttctcttgtgtggaaagatggaaagtggattgaatgttctagttcaggagaaactatcagctcgtcacatgagggtgatactccaaaggagaagcgtcctagattaggaactcccgctcttgtggctgaagtaaaagacacgagtatgaagattgttgatgatccagacttggggaaaccgcctcagactggtgttcttaacctcggtgtttcagagaatacttttaacattggaaagagtaccagagaggagaacaaacccgatccactccgaatgaagagaaccggtttgcaaaagcaaggatcaaaagtgatttttggtgtccctaaacctggaaagaaaaggaagttcatggacgtgagcaaacactatgtttcagaggcaagcactaaaactcaggaacggaaggaaccagttaagcctgtgagatcaattgtgccccaaaattctggaataggtagctggaaaatgccttctaaaactatctccatagagaaacagacaacaatatctaggcccaagactttcaaacctgcgcccaagcccaaagagaaaccgggtgctacggctaggataattccccgcaaggactcgcgtaatacaacagcatcagatatggaatctgatgagagtgcagaaaacaggggtcctggatctggtgtttcatttaagggaacagtagaagagcaaaccacatcatcctctcatgatactggttcgaagaatagttcctccttgagcactaataaagggagagtggctcctactgcaggaaggttagccaaaatcgaagaggacaaggcgttggctgaaaattcttcaaaaacatcagagggaatggagccacgtagatctatccgcaggatccagccaacttctagactactcgaaggtctgcaaacgtcgatgatgacctcgaagattccttcggtatcacacagcaaaagtcacctaagtcaaagcaaaaagtagcagtagaggcaagtgaaaaggagcagaagaagcaagtgcacataaacgcaagtggaggaaacaaaagcagagcagtatcggctgctattaggttgtttgtaattttagtttcatgcttttgaaaaaaataactctttgttggttgggagagactaaaaaaagtaggggaagagaagaagaaaaatctacatatatatttttggtagactttttggccaaaaatccgttaactnnnnnnnnnnnnnnnnnnnn

SEQ ID NO: 95089 - DNA, 647 bp, Arabidopsis thaliana columbia
  unsure (1)..(647): unsure at all n locations
gttctccnnnnnnnnnnnnnnnnnnnnnnnnnnnnnnnnnnnnnnnnnnnnnnnnnnnnnnnnnnnnnnnnnnnnnnccacgcgtccgcaagggcagttttttcttgatattcctttcaactttcctgagtatgtgactcctgcggtaaagaaaatctcaaaaagagaaaagatttacttgagtgttaatgctggtactggaacagaagttctctgcaaaggatgcagtcatcaactaaaggagaaattgcggagtgcagggaagttgaggtttgcatatgaagcagatgttttgaagtggtcgaacactgactttagcttttcttatacggcctcctcaagtaatatagttggtggacttttccttcaatctgcgcctgttcacgatgttgatcagagggacatattttctttctatctttttccaggaaagcagcaaaaaactaaggcattcaagcgggaggtagtagttgttgttgacataagtaaaagtatgactggaaaacctctcgaggatgtaaaaaatgcgatatctacagctctatctaagcttgatcctggagattctttcaatattatcactttcagcaatgatactgctctattttcgacatcaatggagtcagtcacttctgatgctgttgaaa

SEQ ID NO: 95090 - DNA, 784 bp, Arabidopsis thaliana columbia
tttcctttgtcactttcacaatctcccaacagagatccttcccatggcgttcgaagaattcccacctctaatcgccgaccagctccactacttactcaatcactcacctgattccatcaagatcgcaaacgtgtggtctggtaacaaaattaatcccaagattctcgatcgctttactctcgtgataccttactgtctagagacaatcaaatgggatgttatttacaattcagagtatgcaatggatcctccagatttcgtatttggaccagacgacgaagattttgtgccgtgtaagtgtagcgctattgctcctgatgatgatcagatatcatcactggagaaggctttgtctgagtgggatcacgaggactccactcggttacttgttatcattcaaggattgagggatcaatatgtggcctaccaaagaaggcgtgtgggtcaagttgatgatgatcgagttaagtttgagattagcaccgtcttaactcgcaagggaattgaaatgcaaatggcttcaggagttgacaagccagaggaagtcaagtttgcagtacctcttgtgatggctatgaacataaacaaaatggtggttggctgcccttggaagcatcagcagaagatttatcttcaggtagtatacccgattcttcggaaatatgaagcagcaccgtcagcacctcgtttgaaattagtatcatattatgatttaaaatcgctattctctgttgaggatgttaaactttctccatggatggacgggatgtgcttggctgaatat

SEQ ID NO: 95091 - DNA, 877 bp, Arabidopsis thaliana columbia
caatggaggaagctcaccagctggagtcgagatccgatgacctaagtcaacggagaagcggcgggagatggaggaagcaggattttttcccggaattctcttttcagagcttctctacctacaaatcagctctctccgccacttgtccacgcctcgccgatcgtcttctctctcgctcttccgatgcgtacgagctcgatgcagcccgccgcgaaagcgagaaccctatgcgtcgttgtctcacttggtgggacttgctctggcttagctttggttctgttgttggttcgggtgtgttcgtgatcacgggtcacgaggctcgagttggagctggtcctgctgttgttctctcctacgctatctctggtgtctctgcattgctctcagttccctgttatgctgagtttggagttgagattcctgtcgctggaggttctttctcttatcttagggttgaattgggggattttattgcctttattgctgctgggaatattcttcttgaggctatggttggtgctgctggattagggaggtcatggtcttcgtatctagctagtttggtcaagaatgattctgattattttcggattaaagtcgattcctttgctaaagggtttgatcttttggatccggttgctgttgcagtgcttttagttgctaatggtattgccatgactggaacaaagaggacttcttggttgaatttgattacttccatggtcactgtttgtattattgtgtttatcgcccgtgtggggtttcctcattcaaaaacctcaatttggggtccttttctccctatggaccaaagggttgggggcaatctgctgcaagtgtctaccgggcatacactctggtttatattgggggctaa

SEQ ID NO: 95092 - DNA, 1124 bp, Arabidopsis thaliana columbia
atacgactcactctagggaaagccggtacgcctgcaggtaccggtccggaattcccgggtcgacccacgcgtccgggcttatgggtccggtttatgtcggaaccggttgtctcttccgaagaatcgcgctttatggattcaatccgcctcgaagcaaggacttttccccaagttgctggagttgttgttcccctcgtagcaagaagaagaatattcctgaagaaaaccgagctctgcgtatgagtgattatgatgacgaagagatgaatctctctctagtcccgaagaagttcggtaactcaacattcctcattgattcaattcccgttgctgagttccaaggccggcctctcgcggaccaccctgcggttaaaatcgggcgtccaccgggtgcactcaccattcctcgagatcttcttgatgcatcgactgtagcagatgccattgctgttatctcttgctggtacgaggataaaactgagtggggatcacgtatcggatggatctacggctcagtcactgaagatgttgtcacaggttatagaatgcataaccgaggctggatatcggtttactgtgtgacgaaacgggatgctttccgtggcacagctcctattaacttgacggataggcttcaccaggttctccgtagggctactggctcggtggagatctttttctcccgtaacacccctctctcgcaagctcgaaaatgaatatactccagagaattgcctactcatacgtcgggatctacccgttcacatcgatcttcctcatcgatactgtttcctaccagcgctctccctcttctctggtcagttcatcgtccagacgctcaacgtcactttcctagtctaccttctcatcatctccatcactctctgcttactggccctcctcgagatcaaatggtcaggaatctcactcgaggaatggtggagaaacgatcagttttggctcattggaggaacaagtgctcatctcgcagctgtgcttcaaggtttgctcaaagttgtagcaggagtcgaaatctccttcacgctcacgagtaaatccggaggagatgatatagacgacgagtttgcggatttgtacatggtgaaatggacttcacttatgat

SEQ ID NO: 95093 - DNA, 737 bp, Arabidopsis thaliana columbia
gatcgatcctaggcttacctcaaacctcagtctccgttgactactgagactcgtcgacctctgatccgcttcttcgactatacggatctacttccgatcttgatgatggccggaggtaacgtacggtttctggttttgatactcgccgtagcaatttgcggtgctgcttctgttttccagccgatctcagactctcaccgatctgcggctctggatgtcttcgtaccagtcgatggatcatacaaaagcttggaggaggcatatgaagcattaaagactttggagattcttggaattgataaaaagtctgatcttagctcaaagacttgtgagaatgtggttaaagttcttcagtcgtcttcttctactcttaaggatgcattttatgcgttaaacgttaatgggattctaaaatgcaaaattggtgaagctggtcctaaggacattgtttctcaacttcaagctggtgttaaagatgcgaagctattgcttgatttctattattctgtcagaggcttggtgctggctaaggagcaatttcctggaactcatataagtcttggagatgccgaagccattttccgttccatcaagtctcttagccagagtgatggaagatggcgctacagttccaacaatcccgaatcaagcacttttgctgctggcttagcctatgaaacgcttgctggagtgatttcattagcaccttcagagtttgatccatctttgatccagtc

SEQ ID NO: 95094 - DNA, 912 bp, Arabidopsis thaliana columbia
  unsure (1)..(912): unsure at all n locations
gggaaagctggtcncctgcaggtaccggccggaattccgggtcgaccacgcgtccggcgaagccattttccgttccatcaagtctcttagccagagtgatggaagatggcgctacagctccaacaatcccgaatcaagcacttttgctgctggcttagcctatgaaacgcttgctggagtgatttcattagcaccttcagagtttggatccatctttgatccagtcggtgaagaccggtatcctgaagctttctgacagtatccaaaaatatgatgatgggacattttattttgatgagaagtctgttgatgcaagtcaaggcccgatctcaacaactgcatcagttattagagggctcacgtcatttgcagcttcagaatccacaggattgaaccttccaggtgataagatagctggtctggccaaattctttctgggtgttggaattcctggtgatgccaaggacttcttcaaccaaatagatgcactagcttgtttggaagacaacaagttttctgttccactcatcttgtctcttccatccactgtcatttcattgacaaagaaagagcctctgaaggttaaagttagcactgtactgggttcgaaggcaccagctcttagtgtgaagcttacacaagctctaagttctaagtcactggattcatctgtaattaataaccaggagcttaagtttgacgctgacagtgcaacgtacttcctggactcctttcccaagaactttgacattggaaaatatacttttgtatgtaagattgtgctggatgaatcagcacatgagaaagtatacataactgaagctcaaacaaaagtgcctatagctgccacaggagctattagcattgaaaatgcagaaattgctgtacttgacagtgacattggaagcgttg

SEQ ID NO: 95095 - DNA, 729 bp, Arabidopsis thaliana columbia
  unsure (1)..(729): unsure at all n locations
ggtgaaacgtgaagctgatccaagtggttcagccgcaagtgaggtttaaggccttagagcgtgtgtcacaagacagcgagtcacaagtctcaacctatacgagatacaaagaacacaagagctcctcctcgatggacggtccgtgggtcgattcttccttctctgatccgtgcagagatgttagcctattacagcaagaagagggaaattcatcatcctcgtcgaggagactgttagatgatcttactgatgtggagattgagtaatgaattgtatatattcttttattcaatctacaaacacaacagtatttaccaacatatcaactttcaaaattgaatcggtattacgctgtgaaatttctctgttggattgatgagtttaatttactatatacaatatagtcttttgacgagactacacaaaccaaaaacttgcccntacatattttcagaactcgaaagcattgttgatctgaatggagaaagaaggtcgagcaacgtttggaagaggagtatcagctctaacaactattcctgttcgtccaatgttcccattccacttagaccgaccaaaggaaacagatgcaaatgttgaaggatgagctgtgaatgcgcnncaccatatcanattggtattancatccacgacggataacttcgggtttaatccgggggtgctccnccaatgagggccncccaagtgatgcnggtcacatgcccggccacg

SEQ ID NO: 95096 - DNA, 1755 bp, Arabidopsis thaliana columbia
  unsure (1)..(1755): unsure at all n locations
ttctgcccaatgatccgtcaaagttgaattttctcagctctcactctctttttctctctctttacttctactgtatcaagaagctccgttttgcttagccatagtgcgtctagggtttggttggtgggaagaaggttccgatcatggcgtcggtgtcgtcgtcggatcaaggacctaagacagaagcaggatgtagcggcggaggaggaggagagagctcggagacagtggcggcgagtgatcagatgttgttgtatagaggttttaagaaggcgaagaaggagagaggttgtacagctaaggagcgtattagtaaaatgcctccgtgcactgctgggaaaaggagttccatataccggggagtcaccagacatagatggacaggtcgttatgaagctcacctttgggataagagtacctggaaccaaaaccagaacaagaagggaaaacaagtttatctaggagcatatgatgatgaagaggctgctgctagagcttacgaccttgctgccttaaaatattggggtcctgggacacttataaattttccggtgactgattataccagggatttagaagaaatgcaaaatctctcaagggaagaataccttgcatctttacgttagaaaagcagcggtttctctaggggaatagcgaaatatcgtggacttcaaagccgatgggacgcatcagccagtcgtatgcctggacctgatacttcagtaacattcattacggggcaggtgatgatcgtggaacagaaggtgactttctaggtagcttttgtctggaaagaaagattgatctaacaggatacataaagtggtggggagccaacaagaaccgtcaaccagaatcttcatcaaaagcatcagaggatgcaaacgtcgaagatgctggtactgagcttaaaacactggaacacacatcccatgcaacagaaccatacaaggcgccaaaccttggcgtcctttgtggaactcagagaaaagaaaaagaaatatcatcaccatcaagctcttctgctttaagcatcttgtctcagtcgcctgccttcaagagcctagaggagaaagtgttgaagatccaagaaagctgcaataatgaaaacgatgagaatgcaaaccgtaacatcatcaatatggagaagaataacggcaaggcaatagagaaaccagttgtgagtcatggagttgctttaggcggtgctgctgctttgtctcttcagaaaagcatgtacccacttacctctctcttaacggctccattgctcaccaactacaatacattggatcctcttgcagaccctattctctggacaccatttcttccttcaggatcctctcttacttcagaggtgacaaagacagagaccagctgttccacgtacagctacctcccacaagagaaatgagccgttccctttagactttatgtatgtcagattctccttttttgagatgaattcgtcgacttgacatctctttgtctcttttatggagaaaaagttgggaaaagtgtgacaatggtctgaagcaggaatgtacaggttttgttagtggttgtgtttttttttttccagtgtggaatatagaatcatgatattttgtgtaaaacagaaaaaagttatcattatagtatagaagtttgctcttaaaaaaaaaaaaaaaaaaagggcggccgctctagaggatccaagcttacgtacgcgtgcatgggacgtcatagtaattctatagtgtnnnnnnnnnnnnn

SEQ ID NO: 95097 - DNA, 1980 bp, Arabidopsis thaliana columbia
gagagtgagccgtacgatttctctcctcttcttgttttaaaaacctatcaataatattcttcttcttcctcctctcaaatggcggctactagggttcgttgttgtcatagcaatgcagctttcaccagattgccacttacccgccaccgaaactcgccgacgctaccgatttctctaaatcgtgtcgatttccctacgctgaagaaattatcattacccattggagatggctcctccattagaaaggtttcaggttcaggcagcagaaacattgtgcgagctgtgttggaagagaagaagacagaggcgataacggaggtagatgagaagggtatcacgtgcgtgatgaagtttggtggatcttcggtggcgtcagctgagagaatgaaggaagttgctgatttgattttgacttttccggaagaaagtcccgtcattgttctctctgctatggggaaaactaccaacaatctcttgcttgcgggagagaaggcggttagttgtggtgtttctaatgcatctgagattgaggagttgagcattataaaggaattgcatatcaggacggtgaaagagctcaacattgatccctctgttattttgacctatttggaggaactggagcaactcctgaaaggcattgccatgatgaaggaattgacacttcgaaccagagattacttagtctcttttggagagtgtttgtctacaaggatttttgctgcttatcttaatacaatcggtgtcaaggcacgccaatatgatgcatttgaaattggtttcattacaacggatgatttcacaaatggggatatcctggaggcaacttatccagctgttgccaagagattatatgatgattggatgcatgatcctgctgttcctattgtaacaggtttccttgggaagggttggaaaactggtgcggttactaccttgggtaggggtggcagtgatttgacggcaaccacaattggtaaagcgttgggtttgaaagagattcaggtgtggaaagatgtcgatggtgttctaacatgtgaccctactatatataagcgagctacaccagtaccatatctgacatttgacgaagcagccgagctagcttattttggtgcacaggtcttgcacccacagtcaatgagaccagcaagagagggtgagattcctgttagggttaaaagttcttataaccctaaggctcctggaactatcatcactaaaacaagagacatgaccaagagtattctaacgagcattgttctgaaacgtaatgtgaccatgctggatatagcaagcacccgaatgcttggtcaagttggctttcttgcaaaggtattctcgatatttgaggagcttggcatttccgtagatgttgttgccactagtgaagtcagtatatctctgacactggatccttcaaaactttggagcagagaactgattcaacaggagcttgatcatgtagttgaagaactggagaaaattgcagttgtgaatcttctaaaaggaagagcaatcatctctctaattgggaatgttcaacattcctccctgattttagagagggcgtttcatgttctttataccaaaggtgtcaatgtccagatgatatcacaaggagcatccaaggtaaacatttcctttatagtaaacgaagctgaagctgaaggttgtgttcaggctcttcacaaatccttcttcgagagcggtgacctctcagagttattgatacaacccagacttggcaacgggtcacctgtcaggacactgcaagtagaagattgactcgacaagcttattgcttgatctgtgtttttcttgtattaccttctgagtgtagtatgtacgttctacaagcactgcttgttgtcctacgtttaggaacgggaactgctggctacctttcgactgttgtaagaccaattttttgtaccatttgcgtgatcaaagttaaaccagttactagcaaaaaaaaaa

SEQ ID NO: 95098 - DNA, 1337 bp, Arabidopsis thaliana columbia
  unsure (1)..(1337): unsure at all n locations
caagcatcnnnnnnnnnnnnnnnnnnnnnnnnnnnnnnnnnnnnnnnnnnnnnnnnnnnnnnnnnggactggaccacgcgtccgctggagagtggtttagcttttttgtaccgtacatcttcttcccagaaacatggctgaggcttctgatttgttggaatggcctaagaaggataaccgtcgttttctccatgttgtctaccgcgttggtgatcttgatcgcaccattgagttttacactgaggtctttggtatgaagctgttgaggaaaagagatatccctgaggagaagtattctaatgcttttcttggttttggacctgaaacatctaactttgttgtggagctcacatataactatggtgttagctcatatgatattggaactggctttgggcattttgccatttcaactcaagatgtttccaaactggttgagaacgtccgtgccaagggtggaaatgtgactagggaacctggtccagtcaaaggtggaggcagtgtcattgcgtttgtgaaggaccctgatggctacacttttgagctcatccagagaggtccaactcctgaacctttctgccaagtcatgcttcgtgttggtgatctcgaccgtgccatcaaattctatgaaaaggccctcgggatgagactcttgagaaagattgagagacctgagtacaagtacaccataggcatgatggggtatgctgaagaatacgagtcgatagttttggagctgacctataactacgacgtgactgagtacacaaagggcaatgcatatgcacagattgcaataggcacagatgatgtgtacaaaagcggtgaagttattaagatagtcaaccaagagctaggaggaaagatcactagagaagccggacctcttcctggactcggcaccaagattgtctcattccttgatccagatggctggaaaacggttttggtggacaacaaagattttctcaaggaactggaatgagaagagcgatgaatgaaggtcgagatcacaaaaccataataataaaaatgtgatcataaaataaaaggaagacttagagtttgatctaaaataagaagatgtggtttagtttgtgtcgtgctatgtgtgtgtgctcgtttcttttgtctttgagcttaaaagttaaaactctagtctatatggacctgaataaaaatatttccaccaccttgaggttttggtgtttgcggttatggacggtttattgaatgtaatattttcgtacaaaaaaaaaaaaaaaaaaaaagggcggccgctctagaggatccaagcttacgtacgcgtgcatgcgacgtcaagactcttctatagt

SEQ ID NO: 95099 - DNA, 513 bp, Arabidopsis thaliana columbia
aaagactcataaatctagggctttcttctagagatcgaagaagaagagttcacatagagagattttgttcgtttcgagattttcttcagtcccaatggcgtcaaacaccagcaacgacaatttccagcatagaccacggcaaagaaacggaccacctcctccgcggcgacagggaagaaatccgccgcctccgtcttcgtcaacgcgaacttctcagaatcagccaccacagcatacgccgcaggagaagaagaaaccggtgtttgtcaaagtggatcagcttaaacctggaacgagcggccacactttgactgttaaagtcgtcgatcagaattccgtacctcagaaaccgggagctgcttcttcttctcatctccgacctgctaggatctctgagtgtcttggtggagatgagactgcttgcatcctcttcactgctcgcaacgatcaagtggaattgatgaaaccaggagctactgtgaattttcggaatgcaaagatagatatgttcaa

SEQ ID NO: 95100 - DNA, 418 bp, Arabidopsis thaliana columbia
  unsure (1)..(418): unsure at all n locations
ccagtttccatcttttttgaaccntctcgatataaagctcctattcaattcccatctctatcttcttcctcttcatcttcctcttctctcagatcactggaagctctagctcgatttctcacaatccgccatgaactcacaagcttgtcttcttcttcagaaacagcttaaagatctttgtaagcatcctgtagatggattctctgctggtttagttgatgagaagaatatattcgaatggagcgtaactattattggacctcctgatactctcgatgaaggaggattttccgatgccatgatgtcattcccacgaaactatccgaatagcccacctacgggcgcggtttacgtcagatatttggcatcctaacggtttagccccgatgggccgggttttgtaatacctnttctacaa

SEQ ID NO: 95101 - DNA, 605 bp, Arabidopsis thaliana columbia
ggttgactttcttgctctcgatgggaaagctccaacatggatctcatgagtgcgagttgacctcgcgggggatcgtcgcaaacgggatctgcaacatctgcttcaaagatgaacctgttgaattcgcctgtgacccttgcaatttcgatctctgcaaagcttgcgcagatcttccccagaaaatgtcacaccatcttcatccggagcaccctctagaatttcgtataggcgaagatgatcagaagactaaacacatggtgtgcgtcgtgtgcggaaacatgtcttctggagccagatactattacgagtgtagcaagtgtgagatctacctcgatgtgggctgtgcacttcagaagaacatagcgacgagttgggaagccaaagaaatgctccattacagccatgaacacttacttaaaaggtgtaggccaggaccagattccaaagactcttgccttctctgtgagcaacctctctccttcactgcaatatgttacggttgcgttcattggtacttgttttttcacgagcgttgccttgatctaccaaccgagattcaacatcccgtgcattctatgcaccctctcaaacgccttaattatata

SEQ ID NO: 95102 - DNA, 609 bp, Arabidopsis thaliana columbia
  unsure (1)..(609): unsure at all n locations
gcgaggtggcagaggaaatgcttatgtgaacgttgagcatgaagatggaggttgggaacgtgagcagtcctatggtagaggaagaggacgtggcagaggacgcagcagtcgtggtcgtggaagaggaggatacaatggtcctccgaatgagtatgatgctccgcaagatggaggttacggttacgatgctcctcatgaacaccgtggatatgatgaccgtggtggttatgatgcccctcctcagggccgtggtggttacgatggtcctcagggtcgcggtggttacgatggtcctcagggtcgccgtggttatgatggtcctcctcagggccgtggtggttatgatggtccttctcaaggccgtggtggttatgatggtccttctcagggccgtggtggttatgatggtccttctcagggccgtggtggttatgatggtcctcagggtcgtgggcgtggacgtggacgtggaaggggaggacgtggaagaggaggaggacgtggtggtgatggtggtttcaacaacagatcagatggaccaccaagtccaggcagcttccttgagagtcaggtttttctttacacaaacatnaaaaaagaagaaaaaaa

SEQ ID NO: 95103 - DNA, 398 bp, Arabidopsis thaliana columbia
tgcttcttgaagagtcccagagtttcaaagtcacaagcagacagctctctgcatccttgacaacaagacctacaacacatgctttgaatagtatgatcactttattacatctatggatcctgagacttatagggcagtggttatgggtaaggttcaagagtttgaaaaggttatggaggagaatgaaattcctgttcttgatcaggtcacttttcaggggaatacgattctgcatcttgcagctatttatggtcatgaccacctagtgcggcgtatccttgcctatgagctaaacattcttagaaattggaaacgtggcttaaattgcaacttcgtcccaagtttctctcattatcagactcttttggtgagacgaaactacaagggagaccttgctc

SEQ ID NO: 95104 - DNA, 424 bp, Arabidopsis thaliana columbia
gattcttcgaacttgatatttgggaaacttgcaatccgattctgtcaccagtgttttgccttcataaatggagtttgttgttgaagaaggaaagctagtgaatgaagattgctcgactttagttctcccagcattgtcaattgggaatgtaggacagctcgctgttgatcttctagtgtcatctactggtgcagagagagttggttatcttgatgatccaaatctgcttccttgtgttggaaatgatgcttatggccctcttccttgtggcgagatcgcccttcctctcgaggtttatgagtcatcttcaattgctactacccttgctcagcaacggtctccagttgcaaagggaatgatgattaaatttgcggagaatatagccaattttgctgcttcaagtggaaagaagcacatcattgtg

SEQ ID NO: 95105 - DNA, 640 bp, Arabidopsis thaliana columbia
  unsure (1)..(640): unsure at all n locations
nnnnnnnnnnnnnnnnnnnnnnnnnnnnnnnnnnnnnnnnnnnnnnnnnnnnnnnnnnnnnnnnnnnnnnnnnnnnnnnnnnccacgcgtccgcgtttgttcccaaatcatcaaaccctaattttctgttaatttcaattagcttagttcgtcgttactccagagaagtcgaaatgatgggctcagagaatgccgatggattcgaagaaactaatctcaatgcgcaaagggatgatatggagaatctcgacctaggagtagatggtggtgaccatcctctgaagataagcgatgtcaacggtgatacatcgaactctggttaccgtagcgccatgtcaacactctccaacgtccgtgacccgctctcgccgccaccgaccgttatgattccagctgattctgatccactccttgcgccatcctcctacgaagatttccgcagcagcttcagctctaagccgatcagcagcgataactcctacatcgagcctccgtcgtatgcagatgttatcttcagtccctttgatgagaactcagatagcgagattaacggtaccgaggataatagccttcatagtcaattctcagattcactatcgagatctccttcttcttcaagctctgattacatcaagatcac

SEQ ID NO: 95106 - DNA, 790 bp, Arabidopsis thaliana columbia
gatttcttctataaggaagtggtaaattttttgagaaaggaacactgaaacaaagagagttcatggccactcaaggagaagcgacgttctccgcggccgcgacgacgacgtcgagctatccgacgggaggtgttggtggcaaattgaagcggcaatcggcgaggaggcatgcggcgacaccttattctcgaccaacacagaaccaggtacaacggaggccgtggatctcgagaatcgtcgatcctgcttatcggattatttccggcggcgctaccagaatacttccatatttcttctcgaacgccgcctccgctcctgctcttgctgctcctccagaggatcaaaatcaacatcaaggtgaggtgcagaataatccacaggacaatgatcccagtgtaaccccaatttcaaataaaccggagccagcatcaattgaagtgggaggtcctagtggtactgcaaacgtgaacgaaggcaatttcagtatcagtgcacagagaagagggaaagcagctttaaatgacgacgttgcaatctcggagcttgaaaggctaatggaaggaaaaacgttttcacaagctgaaattgatcgtctcatagagatgataagttcgagggctattgatctacctgatgtcaagagagacgagagaaatttggagattcctttgagagagggagccaagaaaaatatgagtttatttgataaggcaaaagagcccattggtggcaaggatgctaatagtgaaatatgggctacaccaaccccacttgcaaagtcaataatact

SEQ ID NO: 95107 - DNA, 466 bp, Arabidopsis thaliana columbia
aaaagccacataagaagttgatgcagaagcaataataacaaaacaaaaaaacattaaaaaaaaaagctcttcagttttggtttctgcagtctccagtggctctcaagctctttctctttgctcttcttctctgtctcccgacttctctctcctccactgcctctaaaggtaaagagaagaagtcgaagtttaatccatacagatacacattcatcgataaagcaagcacattctcatcatcttcctcatcttcattttcatccaacggtcaagattcgtcctacgactacatagtcatcggaggtggaacccgcagggtgtcctctcgccccaacgttgtcgcagaatttcagcgttcttgttttagagagaggtggcgttccgtttacaaacgcaaacgtttctttcctcaggaattttcacatcggacttgctgacatttcagcttcttccccgtctcaagcgt

SEQ ID NO: 95108 - DNA, 741 bp, Arabidopsis thaliana columbia
  unsure (1)..(741): unsure at all n locations
agtgttgccattgtnaagccgacggatgaagagccgtttgcacctaacaaccctaaaggctttgttgggaaagcccttgggcaacctggattgaagtcttcggtgcgagttggggaaacggggtttagagaagttgctgcttatctccttgattatggtcgctttgctaatgtccctccaactgctcttgtgaagataactcattctgtattcaatgtcaacgatggggtgaaggggaacaagcctcgggagaagaagctggttagtaagattgcttctttccagaagtttgtggctcatgatttcgatgcaagtgatcatggtacttcaagcttccctgtaacttctgtgcaccgcattggtattttggacataaggatcttcaacacagaccgtcatggtgggaatcttttggtgaagaagctcgatggagttggtatgtttggtcaagtggagcttattccaatagaccatggcctctgcctgccagaaacacttgaggatccttattttgagtggattcattggcctcaggcatcattaccattctctgatgaagaggttgactacatacaaagtcttgatccagtgaaagactgtgacatgcttagaagggaacttccaatgattagagaggcgtgtcttcgggttcttgttctctgtactattttccttaatgaagcttctgcatatggtctgtgtcttgccgagattggcgagatgatgactcgggaatttcgt

SEQ ID NO: 95109 - DNA, 693 bp, Arabidopsis thaliana columbia
  unsure (1)..(693): unsure at all n locations
ggggaatgcgtagactggcttacaaaatacagaaggcagagaatgcgcactatatactgatgaactttgagatagaggcaaagtacttgaacgaattcaagggattgttagatagtgatgagagggtgattaggcatcttgtgatgaaccgcgcggccgccataaccgaagactgtcctccacctcctgagtttcactctgtccgcgcaggtgatgaatattatgacgatgatgaagaggaagagattgaagaagatgaagatgaaggtgagggtgaagatgaagaagatgctgataatatagagtacgaagtagatgatgatggtaatgtcgttatggtgttgtacggagatgaagaagaaggagaagaagaagaagatggagctagtgaacaagaagaaggacaggacaagtcaactaatggtagaagagaaacccggagaacagttaacgtaggaggttaggactgtctgtaattcttttgtttttgggtcatgttttggataatagggtcacacatcaaatcgaagttgtttgttgtactcataatagcatcctaagaagtatatgagaaactaaactattcccttgaaaagaaaaaaaaaaaaaaaaaagnnnnnnnnnnnnnnnnnnnnnnnnnnnnnnnnnnnnnnnnnnnnnnnnnnnnnnnnnnnnnnnnnnnnnnnnnnnnnn

SEQ ID NO: 95110 - DNA, 1836 bp, Arabidopsis thaliana columbia
  unsure (1)..(1836): unsure at all n locations
cccacgcgtccgataatttacttctttctttataactaccatattctcaatcacaacactcgccactgtttcgaatagatggcttctatttcaaccccttttccgatttctctccacccaaaaaccgtacgatcaaagccgttgaaattccgagttttgacccgtccgatcaaagcttccgggtcagaaactcctgatctaaccgtagcgacacgaaccggatccaaagatctcccgatccgaaacataccgggaaactacggtttaccaatcgtaggaccaatcaaagaccgttgggattacttttacgaccaaggagctgaagagttcttcaaatcacgaatccgtaaatacaactccacggtgtacagagtcaacatgccaccgggagcttttatcgccgagaatccacaagtcgtggctttactcgacggtaaaagcttcccggttttattcgatgtcgataaagtcgaaaagaaagatcttttcaccggtacttacatgccgtcaacggaactaaccggaggctaccgtatcctctcgtacctcgatccatcggagcctaaacacgaaaagctcaaaaatctccttttcttcctcctcaagtcatctcgaaaccggatcttccctgagtttcaagctacttactccgagcttttcgattctttggagaaagaggctttccctttaagggaaagcggatttcggcggttccagcgacggaaccgccttttatttcttggctcgagctttctacgggacgaatcccgcagatacaagctcaaagccgacgctccgggtttgatcactaaatgggttttattcaatctccatccattactctctattggtttaccgagagttatagaagaacctctcatccatacatttagtctaccaccggcgttagtcaaatctgattaccagagactctacgagtttcttagaatccgcggtgagattctcgttgaagccgataaattgggtatctcacgagaagaagctactcacaatcttctcttcgccacgagcttcaacacgtggggtgggatgaagattttgtttccgaatatggttaaacgtatcgggccgggcggtcatcaagttcataaccgattagcggaggagattagatctgtgattaaatccaacggcggagaactcacgatgggagcgattgagaaaatggagttaaccaaatcagtggtttacgaatgtctccggtttgaaccaccggttacggctcaatacggtagagcgaagaaggatctggttatcgaaagccacgacgcggcgtttaaagtcaaagccggtgagatgctttacggttatcaaccgttggcgacgagagatccgaagatttttgatcgggcggatgagtttgtgccggagagattcgtcggagaagaaggagagaagcttttgaggcatgtgttgtggtcgaatggaccggagacggagactccgacggtggggaataaacaatgcgccggtaaggattttgttgttttggtggcgaggttgtttgtgattgagattttccggcgatatgattcgtttgatattgaggttggtacgtcgccgttaggaagctccgttaatttctcgtcgttaaggaaagctagcttttaggagccaagggtaaatttgtaattgtatatgttcgcacctgtgtagtccatctgttttcttgttccagtttcgtgaattttgagaaaatgttgataatctgttgctgctctacatgttcgtttttttgtcataatattaaagttcaagctggtaataagtatttacaaatctgtgagataatttcnnnnnnnnnnnnnnnnnnnn

SEQ ID NO: 95111 - DNA, 578 bp, Arabidopsis thaliana columbia
  unsure (1)..(578): unsure at all n locations
ggaaaattaggcgcgcgtcatctccctcgcgacacatatatcataagacagagagcagggaacgaatctcaagacgttacgtattagcttatagccattagttttgtctcttcttcttcttctcgttggtcggcttcttcgtcttactaattccatgattctccttcttccttctgcttcactttctcgatgatcctctgcaccagccgcgatcatgacgttgaatcctcctccgtcgcagcaaacgtctcactcgccgcgtcggattcccaatcgccgcgttctcatcgtcggaaattattgccacgacgttttaatccaaaacggatccgtcgtagctgaaactctcggcggcgccgcctctttcatatctaatgtcttagattcttcctctgtctcctgcgatttggtctccaaagtaggacacggcttcagatacgaggtcaaccactttccgatcgtgggctccggagaaggaaacaacaagttttcgaggcgtttttcgatcctgggaatcgattggatcggncaaggttatcgggtnttaaaanggctttgaatganncccgtttttcctt

SEQ ID NO: 95112 - DNA, 928 bp, Arabidopsis thaliana columbia
tgggaagatcagctctgattcacttgcttcgctcccaatcccgacgtctctcttcctccaccttcacttcaggatatcatcaccggtcaatagcaggatcatggtcatcatcagtgaacccgaaggtcagattccaggttccatcccttagccagagaagctgggcatcatttggagcaaagactagagaggacgatgatgagcacaagatcagcatcggaccccaagagaagaaagaagagaaggatggaggtgtggtttactatggaccaatctcatcaaccataaagaaagtgaaactcctctcactctccacttgctgtctatcagtctctcttggcccggtcatcactttcatgacttccccgggactgaatgtgatcatgaaaggtgctgttgcctctactgtgatcttccttagcgcatccacaaccgctgctctccactggtttgttagtccctacgtgcacaagctgaggtggcagcctggttcagacacttttgaggtcgagatgatgacttggctcggcacatttagcgcaaagacactgaaattctcagacatacgttatccagacacgcaaagaccgtatgtgagcttcaaggctgatgggaatttctactttgtggatgcagatcattgccctaacaaggcattgttggctaggctcactcctccaaaggatgctcatgactctgctttcaagaacttgtaatccaaattcgtttcttttgttatactctttttttgggtgtggatttttgttgggtttgtaagctctttaagatacttggatacctcctccccttctcatcactaatacccaaaaaaatgcaaataagaaaaggccgatttgaaccaaaaaaaaaaaaaaagggcggccgctctagaggatccaagcttacgtacgcgtgcatgcgacgtcag

SEQ ID NO: 95113 - DNA, 495 bp, Arabidopsis thaliana columbia
cggttctagattgttattgtctccgaacgttctctcctctctgtctatcatcgaacgccgtcgctcgcgccgttgacttctacgcgagtgaccccaacgccttcaatttccgcctcgtcggataatttcatcggagaagacaatggtgatggaagttacagagactgtgcgatggtgcgttgttactggtggtagaggattcgctgcaagacatcttgtagaaatgctcgtacgttaccaaatgttccacgttcgtatcgccgatttagctcctgcgatagtgctcaatcctcacgaggaaactggaattctcggtgaagcaattagatccggtagagttcaatacgtctccgctgatcttcggaacaaaactcaagttgtcaaaggttttcaaggagcagaagtggtgtttcatatggcagctccagattcatcgattaacaatcaccagcttcagtactcagttaatgttcaagggacaacaaatgtaattgg

SEQ ID NO: 95114 - DNA, 741 bp, Arabidopsis thaliana columbia
  unsure (1)..(741): unsure at all n locations
gatctggaccttcaaagtccactgctgtagatgattctgcgtccaagacaagcgaaaacacccttctaacatgtggaagggcatgggcgatttctttgacgagcaaaagtacaataagcgaggagattttgagctcatgttttcccggcaatagcggtgaaccaaatgaacatcttctataccgctcatattatcacgggaaaggcatgaatcgactgtggtccaacgttgaagggtatcatgctcctatactagtgataatttctgcaagttgtaaagtcgaacatgaggctacttcaagcgagaggaagtgggtcattggtgcaatcttgcagcaaggttttgagaacagagatgcattttatggaagctctgggaacttgttctccataagtccagtctttcacgcattctcatcttctggtaaggagaaaaactttgcgtatagccatctgcaccctgctggcggaatgttacaacgcacatccccaagccctgttnggaattggattccgggggaaacactttggaaaatgaaaaaaattttncattnaatgaaaaantttngcttaaaaatcacanntccggtccatcnatgccagtttgaataaaaactttaccaattccagggctcctcctttttnccccaaacccaagggtttttttttacccaattaaaaaggcntttgggttccttanaatatttnaaaaccnttnggggggttttanggttgggaaaac

SEQ ID NO: 95115 - DNA, 450 bp, Arabidopsis thaliana columbia
tggagactttcgatgaattcttcccacgcagtgcgttttcagctggccctccagcatttgcatctacagatggggttacagctcctccaactgtgacttctatgtctgcccctaccacctcaaacagtgttgagatggacttgcttggttcccttgcagacgtattttcatcaaacgcattggccattgtaccagctgattctatctatgttgaaaccaatggacaagcaaacgctggtccagctccatcgttttctacatctcagccatcaactcagtcatttgatgacccatttggtgactctcctttcaaggccttcacttctactgacaccgactcaaccccacagcagaattttggagcttctttccagccaccaccttcagccttcacttcagaggtctcacatcctgatactgctcataactttggctttggggactcatttt

SEQ ID NO: 95116 - DNA, 1203 bp, Arabidopsis thaliana columbia
  unsure (1)..(1203): unsure at all n locations
tgcacctaccggacctgtatttcgggtcgacccacgcgtccgacctcaaacagtgttgagatggacttgcttggttcccttgcagacgtattttcatcaaacgcattggccattgtaccagctgattctatctatgttgaaaccaatggacaagcaaacgctggtccagctccatcgttttctacatctcagccatcaactcaggtatatacactgagcttggagtatgaagattatgatggtttcctatgattattgatgactgttgtttggattatgcagtcatttgatgacccatttggtgactctcctttcaagggccttcacttctactgacaaccgcctcaaccccacagcagaattttggagcttctttccagccaccacctccagccttcacttcagaggtctcacatcctgatactgctcataactttggctttggggactcattttccgccgttgccaatcctgatcctgcttctcagaatgtgcaacctccatcgaactcaccaggttttcctcaagagcaatttgctacatctcagagtggtattgatatcctcgctggcattctcccaccatctggacctccagtacaatcgggtccctcaataccaacatctcaatttcctcccagtggaaacaacatgtacgagggatttcattctcagccgccggtatctacagctccaaacctgcctggacaaactccatttggacaagctgttcaaccatataacatggttcctcattctcaaaatatgactggagccatgccatttaatagtggaggcttcatgcaccagccgggctcacaaactccttactctaccccaagtggaccagctggtcagttcatggcacaccaaggtcatggaatgccgccatcccatggtccacaacgaactcaatccggacctgttactctgcaagggnacaacaatgtcatgggagacatgttctcgcaagctacggccaacttcttgacgncatcatcatctcatccaggtctnacacctttaacagggggcaattgaggatnttccttcggcttaggaaaagnttttagccaaaatcaatnagttttgggnagacacggtttgcaggggggtttttaannttaaacatttntnggtnttaaaaaaaatcctttgggagccatagggggtttnctttgnggggtcaanagggggnaacgnc

SEQ ID NO: 95117 - DNA, 415 bp, Arabidopsis thaliana columbia
  unsure (1)..(415): unsure at all n locations
aattggtnttccttcctctgcctttcacttgagggtattaagatagacaacaactttaaataacacatattctcaattctgtaaagtcattctaatgaaacaaatgaacaacacagccaaaaaggcgctaagtggtaaagcctctggcaaacattttctcgattctcttcctcctaaaacccctaccggtttgagaagatcagtcacgttccttagtttgtctccatatctccagaatggtactttatcaagatccgcatcaagatctttccgcagaaatcttctctgcagggcccttaccaggacgcctaccacgaccaccaccacctcggccaccgccttctcgtccaccacctcgttgttgacctcctctcccttgtcctcctctccatggagcaccattggagtttccatt

SEQ ID NO: 95118 - DNA, 571 bp, Arabidopsis thaliana columbia
  unsure (1)..(571): unsure at all n locations
nnnnnnnnnnnnnnnnnnnnnnnnnnnnnnnnnnnnnnnnnnnnnnnnnnnnnnnnnnnnnnnnnnnnnnnccacgcgtgcgaacaatatcaatgtctttcagatcatgccatctcgttcacataatgcacctggtgacctaagttatgagtgggaatcttctcatgtgcatctcttcaaactgcatagagggatcacttcagctattgtccaggacatttgctttagtcagcagagtcagtgggttgctattatttcatccaagggtacttgccatatatttgttttaaactcttctggtagcgacgctgcgtttcaaccttgcgagggtgaggagcctacccgactaccagcttcatccttgccatggtggtttactcaatcgttgtcaagtaatcagcagtctttatcgccaccaacagctgttgccctttctgttgtaagcagaataaagtatagcagttttgggtggcttaacacagtaagcaatgctactactgctgctactggaaaaagtttttgtaccatcaggttgccgtggcttgctgttttcataaatctgtcactcatg

SEQ ID NO: 95119 - DNA, 594 bp, Arabidopsis thaliana columbia
  unsure (1)..(594): unsure at all n locations
atgatatcgccggcannnnnnnnnnnnnnnnnnnnnnnnnnnnnnnnnnnnnnnnnnnnnnnnnnnnnnnnnnnnnctcctcccacgcgtccgggaatttggggattagcttgggaaacttcgccggagattcatacgtcgtcgtcgtctttagtatctgtatcgtcaatggcgttgctgaagtctttcatcgatgttggctcagactcgcacttccctatccagaatctcccttatggtgtcttcaaaccggaatcgaactcaactcctcgtcctgccgtcgctatcggcgatttggttctggacctctccgctatctctgaagctgggcttttcgatggtctgatccttaaggacgcagattgctttcttcagcctaatttgaataagttcttggccatgggacggcctgcgtggaaggaagcgcgttctacgctgcaaagaatcttgtcatctaatgaacctatcttgcgagacaatgatgttttgaggagaaaatcattccatcagatgagtaaagtggaaatgattgttcctatggtgattggggactatacagacttctttgcatctatgcatcacgcgaagaactgc

SEQ ID NO: 95120 - DNA, 651 bp, Arabidopsis thaliana columbia
  unsure (1)..(651): unsure at all n locations
nnnnnnnnnnnnnnnnnnnnnnnnnnnnnnnnnnnnnnnnncaggtaccggtcctggattcccgggtcgacccacgcgtccgacaaacacaaacacacacaccaaaaaaaacacagaccttaaaaaaataaaaatggttgatatggattggaagaggaagatggtatcatcagatttaccaaactcacctaagctttcttcaaagcttcacgtaactattccatcaccgttcaaaatcgtccctgtttcatctccgatctcatgttcagcacctgctctttgctctgcttacgagctttaccttcgtctccctgagctaagaaagctctggtcatctcgtgattttcctcaatggacatcagagccgattctcaaaccagctcttcaagctttggagatcagtttcagattagttttcgccgtttgttctgatactagaccgtacatcaaccaccgtgaatgggaaccggaggctagattctctcatcacgaagcagatccagcttgtagcagcgatctgcgaagatgaagaagaagaaggtatttcagcggaggctccggtcggcggtggacggagttcgttgagtttgttaccgcagctagctacgtggaggggataaaagggtttttggggaagaagggcnttntntt

SEQ ID NO: 95121 - DNA, 387 bp, Arabidopsis thaliana columbia
  unsure (1)..(387): unsure at all n locations
cttagagtatgcagaggtaactcatactcccctccctcttggaaanctgaagttgttgatctatctgaatttacctatctcattatcggcaagatccacctttgtgcccaatgtcttgatggggatgcaagaactgagataccttgcgttaccatcccttatcgggaggaagacaaaactagaattgagtaatctagtaaaattggagactttagagaatttctcaacagagaatagcagcttggaggatcttcgtggtatggtcaggctgagcacgctcaccatcgaattaattgaggagacgagtttagaaactctagctgcatctataggtggattgaaatacctggaaataacttgaatagatgatctcggttctaagatgag

SEQ ID NO: 95122 - DNA, 500 bp, Arabidopsis thaliana columbia
  unsure (1)..(500): unsure at all n locations
nnnnnnnnnnnnnnnnnnnnnnnnnnnnnnnnnnnnnnnnnnnnnnnnnnnnnnnnnnnnnnnnnnnnnnccacgcgtccgcggacgcgtgggcggacgcgtgggcggacgcgtgggatcagaagctgagtaaactctaagctcacacaaaaatggcgtctcttcttggaacatcttcttctgcaatctgggcttctccttcactctcttctccttcctcaaaaccttcctcctcccccatttgcttcaggccaggtaaaccagtctctccaaaccttaaaatcttactgttttttctcaattcgaaatcatggtgaattgaatttttgtatacaggaaaattgtttggaagcaagttagatgcaggaatccaaataaggccatagaagaacaggtctcgttaccatgtttcggttatgaatgtagccactgaaatcaactctactgaacaagtagtagggaagtttgattcanagaagagtgcgagaccggtttatcca

SEQ ID NO: 95123 - DNA, 657 bp, Arabidopsis thaliana columbia
  unsure (1)..(657): unsure at all n locations
tgctcggtttatcctcattggttcaggaagtcctgaagaaggcgagcttagaccccagcttcttgacaggtttggtatgcacgcgcaggtagggacggttagacacgccgagctgagagtcaagattgttgaacaaccagctcgcttcgatagtatcccaaaggagtttcgcgggccttgtcaagaagaacaactgtagcttcaggcgcagattccaacggcatgacgcaatctttctgcagttcagattgatctacatttgggagtgagagatctctcaggtctgtgctgagctggacgttgatggattgagagcagacatggtgatacacagagcagctagagcgcttgcagcactccaaggaagagatctagttacagcggaagatgttggtagggttataccgaattgtttgagactcagactcagaaaggatccattggagtctatggagtcgggaattctcgttaccgagaagttctatgaggttttcacttagagtaaagatagattcttgttacacttttaaagaagattcaatctggatcgcttattattcgcggccgcgaattaaaagcaaaannnnnnnnnnnnnnnnnnnnnnnnnnnnnnnnnnnnnnnnnnnnnnnnnnnnnnnnnnnnnnnnnnnnnnnnnn

SEQ ID NO: 95124 - DNA, 1248 bp, Arabidopsis thaliana columbia
  unsure (1)..(1248): unsure at all n locations
cgcgcacnnnnnnnnnnnnnnnnnnnnnnnnnnnnnnnnnnnnnnnnnnnnnnnnnnnnnnnnnnnnnnnnnnnnnccacgcgtccgcaaaaaacgaattctcgaagagaaagacactgaaatcgaaaaatctatagagagctcactcactagcaatggcgtctcttctcggaagatctccttcttcaatcttgacctgccctcgtatttcttctccttcctcaacatcttcaatgtcccatctctgcttcggaccagagaaactttctggaagaatccaattcaatccaaagaagaacagatctcgttaccatgtctctgttatgaatgtcgctacagagatcaactctgttgaacaagcaaagaagattgattcaaaggaaagtgcaagacctgtttatccgtttgctgctatagttggacaagatgagatgaagctatgccttttgttaaatgtgattgacccgaagataggtggtgtgatgataatgggagatagaggaactggtaaatcaacaactgttagatctttagttgatttgcttcctgagatcactgttgtttctggtgatcccgataactcagacccgagagatcctgagtgtatggggaaaggaagtaagagagaaagttcaaagggagaagaattgtctgttattgaaaccaaaatcaatatgggtgatcttcctttgggtgctactgaagatagagtttgtggaactattgatatcgaaaaggctttaaccgaagtgtntaaggcgtttgagcctggactactagctaaagctaatagagggattctttatgttgatgaagttaatcttttggatgatcatttagttgatgttcttcttgattcagctgcatctggttggaacactgttgaaagagaagggatatcgatttctcatcctgctcggtttatcctcattggttcaggaaatcctgaagaaggagagcttagaccacagcttcttgacagggtttggtatgcacgcgcaagtaggggncgggtagaagaccgcccgacctgagaagtaaagaattgttgaaagaccgagccncggtttcgnataggaaccccaaaggnggttccgggaaaccttntccangaagaccaactggaagcctccaggggccagatttcaactgcaagaagnaacctttcctngaaggccaaaattggccaannntttnaaggnaancnccaaaggcntggcntacctggncgttatgggtaaaggnnnc

SEQ ID NO: 95125 - DNA, 1378 bp, Arabidopsis thaliana columbia
acgaaagaaggggacagaaacaaacataagccaatggaaacaaaaaaattctaaggtgaaaaaagccaatcagaagctgagtaaactctaagctcacacaaaaatggcgtctcttcttggaacatcttcttctgcaatctgggcttctccttcactctcttctccttcctcaaaaccttcctcctcccccatttgcttcaggccaggaaaattgtttggaagcaagttaaatgcaggaatccaaataaggccaaagaagaacaggtctcgttaccatgtttcggttatgaatgtagccactgaaatcaactctactgaacaagtagtagggaagtttgattcaaagaagagtgcgagaccggtttatccatttgcagctatagtagggcaagatgagatgaagttatgtcttttgttgaatgttattgatccaaagattggtggtgttatgattatgggagatagaggaactggaaaatctacaactgttagatcattagttgatctgttacctgagattaatgtagttgcaggtgacccgtataactcggatccgatagatcctgagtttatgggtgttgaagtaagagagagagttgagaaaggagagcaagttcctgttattgcgactaagattaatatggttgatcttcctttgggtgcaacagaagatagagtttgtggaaccatcgatatcgaaaaggctttgacagaaggtgtaaaagcctttgagcctggtttgttggctaaagctaatagagggattctttatgttgatgaagttaatctcttggatgatcatttggttgatgttcttttggattcagctgcttctggttggaatacggttgagagagaagggatttcgatttctcacccggcgaggtttatcttgatcggttcaggaaatccggaagaaggagagcttaggccacagcttcttgatcggtttggtatgcatgcacaagtagggacggttagagatgctgatttacgggtcaagattgttgaagagagagctcgtttcgatagtaacccaaaggatttccgtgacacttacaaaaccgagcaggacaagcttcaagaccagatttcaactgctagggcaaacctttcctcggttcagattgatagggaattgaaggtgaagatctctagagtttgttcagagctcaatgttgatgggttgagaggagacatagtgactaacagagcagcaaaagcacttgcagctctcaaaggaaaagatcgagtaactccagatgatgttgcaaccgttatccctaactgcttaaggcaccgtctgaggaaagatccactggaatctattgattcaggagttctagtttccgagaagttcgccgagattttcagctga

SEQ ID NO: 95126 - DNA, 1319 bp, Arabidopsis thaliana columbia
ttaggagcactatagaagagctatgacgtcgcatgcacgcgtacgtaagctcggaattcggctcgagctcatttcttcttcttcgctcagctccgacaacgaagggcgaagaatctcgctccctcaatttcgcattgccatcgattttcttagaggttaaaatggttgaacagactcagcaccccacgattcttcagaaggtttctggccaactcttgagctcgagtgtttctcaggacattcgtggttatgcttcggcttccaaaaggcctgctacataccagaaacatgcagcttacggaaactactccaatgctgcatttcaatatcctcttgtggctgcatctcagattgcaactactacttctcctgtgtttgtccaagctccaggagagaagggatttactaactttgctattgatttcatgatgggtggtgtttctgctgctgtgtcaaagactgctgctgctcccattgagcgtgtcaagcttttgattcaaaaccaggatgagatgcttaaggctggaaggcttactgagccatacaagggtattcgtgactgtttcggcaggacaattagggatgaaggtattggttcgttgtggagaggaaacaccgctaatgttatccgttacttccccactcaggccttgaactttgcattcaaagattacttcaagaggcttttcaacttcaagaaagacaaggatggctactggaagtggtttgctggtaacttggcatctggaggtgctgctggtgcctcttcccttctctttgtgtactctcttgactatgcacgtacccgtcttgccaatgactccaagtctgccaagaaggggagaggcgaaaggcagttcaatggtcttgttgatgtctacaagaagaccctcaagtcagatggtattgctggactttaccgtggtttcaacatctcgtgtgctggtatcattgtctaccgtggtctctactttggactgtacgactctgtgaagcctgtcctcctcactggagacctgcaggacagtttcttcgctagttttgctcttggatggctcatcaccaatggtgcgggccttgcgtcgtacccgattgacacggttagaagaagaatgatgatgacatcaggtgaagcggtgaagtacaagagctcatttgatgcgttctcacagatcgtgaagaaggaaggagccaagtctctgttcaagggtgcgggtgccaacatcctgcgtgccgttgcaggtgctggtgtgcttgctggctacgacaagctgcagttaatcgtcttcggcaagaagtatggatctggaggtgcctaa

SEQ ID NO: 95127 - DNA, 2200 bp, Arabidopsis thaliana columbia
atctaacggtcctacagtccccgagtgtatagaatagtgcgttacacttgattccttctagtgtgaccctatttctggagccaataaaaggctcgtgtcaaaactcgcctcttccccacaaagagaattctctcatttcttcttcttcgctcagctccgacaacgaagggcgaagaatctcgctccctcaatttcgcattgccatcgattttcttaggtaattctggttactctgagatctctatcgctttaaatctcgttgtttatctctgttcttcatttgattctattgatctgcttcacagtcttatatatcatcaacaaggtaaaatgattcgtttcgtcttgatgatctcatggtttctctgcgtaatcctagattgaatgtagtgtagatctcgtgtggagtgtgaatgtatcgagatcctggattattcggctctgttactcttattttccgccattaagttacactgttgtatggatctgtttaacctaaattttctgcgtctgaatgtgttcatggtttagtttctgattgcatcgtttctacatgtagcctctcttatgcttaatggtggataagtgttctattccactggagatgcacaattgcttttactgcactttatagcatattccatttcttacactacgggttgtttaattttgtagaggttaaaatggttgaacagactcagcaccccacgattcttcagaaggtttctggccaactcttgagctcgagtgtttctcaggacattcgtggttatgcttcggcttccaaaaggcctgctacataccagaaacatgcagcttacggaaactactccaatgctgcatttcaatatcctcttgtggctgcatctcagattgcaactactacttctcctgtgtttgtccaagctccaggagagaagggatttactaactttgctattgatttcatgatgggtggtgtttctgctgctgtgtcaaagactgctgctgctcccattgagcgtgtcaagcttttgattcaaaaccaggatgagatgcttaaggctggaaggcttactgagccatacaagggtattcgtgactgtttcggcaggacaattagggatgaaggtattggttcgttgtggagaggaaacaccgctaatgttatccgttacttccccactcaggttggtttagtttcacttctttcggccttttttaaaatgtcttagttatatatgatgtattggttactgatctatctctcacttgctaggccttgaactttgcattcaaagattacttcaagaggcttttcaacttcaagaaagacaaggatggctactggaagtggtttgctggtaacttggcatctggaggtgctgctggtgcctcttcccttctctttgtgtactctcttgactatgcacgtacccgtcttgccaatgactccaagtctgccaagaaggggagaggcgaaaggcagttcaatggtcttgttgatgtctacaagaagaccctcaagtcagatggtattgctggactttaccgtggtttcaacatctcgtgtgctggtatcattgtctaccgtggtctctactttggactgtacgactctgtgaagcctgtcctcctcactggagacctgcaggtttgtttgagctctattcttatatatctgtaaggtgacagcttaagaaatcagggatcctgattctaatgttgttatttctttccttgctggatatttcaggacagtttcttcgctagttttgctcttggatggctcatcaccaatggtgcgggccttgcgtcgtacccgattgacacggttagaagaagaatgatgatgacatcaggtgaagcggtgaagtacaagagctcatttgatgcgttctcacagatcgtgaagaaggaaggagccaagtctctgttcaagggtgcgggtgccaacatcctgcgtgccgttgcaggtgctggtgtgcttgctggctacgacaagctgcagttaatcgtcttcggcaagaagtatggatctggaggtgcctaagtaccaccaaatcccgcagtcattaagcttcgccttttgtttttttctccattttttttgcagtttcagatttcttttataaaaaagatgttgatgaaatcatttccccataaaattagagaggagcaaggggaaatattatctgttcgacgataatggttttgttat

SEQ ID NO: 95128 - DNA, 491 bp, Arabidopsis thaliana columbia
  unsure (1)..(491): unsure at all n locations
attatccatagctcatccacgtttgccctcnntcntccaaacctccntctcccctccngattgaaatgggaatggcattcttcttaaggcttctcccttttccgaggttgggaggatagtgagtactcagttttgccaaaagtagagctcaggaacctttcccacaccaaaaagataagggaagtaaaggagacaagtctttccgggacccaagagaaggcggagatggagaagagacggctaatctggaaagtagaaggctcggccggggaggaagtgaagagaggagaggcggtggacgcagagaagctagtggttgagcttgttccgatggaaattcgaaccttgttgatcaagtttgatgatcaaattgaaatggttggtgataaagagcagcaacataggttatgaaataatacacgttgttgttgtctttttaagtttaatcggagaagagaaaaaagtttgaatttagtgtctgatgcgagttt

SEQ ID NO: 95129 - DNA, 3292 bp, Arabidopsis thaliana columbia
ccactcactatttggaaagctggaccgcctgcaggtaccggtccggaattcccgggtcgtccacgcgtgcgcccacgcgtccgcttcatcttcttctcccgtaaagctctcgcgtctatggcggtcaaatgtttctctctttatctgattctggcggcgattgtaatcggcggcgtcacctccgagtacatagagtacaacacaaaaccgagaatcgtccctgagaaaatcaatgttcacttagttcctcactcacacgacgatgtaggttggcttaagaccgttgatcagtactacgtaggctccaataactccattaggggagcttgtgttcagaatgtattggattctgtaatcgcttcattgcttgatgatgaaaatagaaagtttatttatgttgaaatggctttctttcaaagatggtggaggcaacaaagcaatgctaagaaagttaaagtcaagaagcttgttgactctggtcaacttgagttcataaatggtggaatgtgtatgcatgatgaggcaactccacattatattgacatgattgatcagactacattaggccatcagtttattaaaactgagtttggtcaggttcctagagttggttggcagattgatccctttggacattctgcagtacaagcttacctgcttggtgctgagtttggctttgattcgctgtttttcgctagaattgactaccaagatcgtgcaaagaggttaagagagaagacacttgaggttatttggcaaggttccaagtctcttggctcttcttcacagatatttactggtgtattcccaagacattatgaccctcctgaagggttcacgtttgaaataaatgatgtatcagctcctatccaggatgatcctctcctttttgactacaatgttcaagaaagagtcaacgactttgtagcagcagccctcgcacaggttaatgtgaccaggacaaatcatataatgtggttaatgggaactgacttccgttaccagtatgcatattcgtggttcagacagatagacaagtttattcattatgttaacaaggatgggcgtctcaatgttctgtattcgacaccatctatctacaccgatgcaaaatatgctgcaaacgagtcctggcccctaaagactgatgatttcttcccgtatgcggacaaacctaatgcatactggacagggtactttacgagcaggccagcctttaagaaatacgtgagggatttaagtggttactatctggcagctcgacaattggaattcttgagaggaagggatagttcaggaccaacaactgatatgctagccgatgctttggcaattgctcaacaccatgatgcagttagtggtacacaaagacaacatgtggctgcagattatgctcttagactctcaatgggctacctgcaggccgagaaattggttgcctcttccctttcctttctatcagcagcaaaatcaagtactgaaaagaagaatcctggcacaaaatttcagcagtgtcccctgcttaatattagttactgtcctgcatctgaagctcgtctgttgagcgggaaaagcctggtggttgttgtttacaattctctaggatggaaacgagaagaagttgtccgagttcctgtgtcgtctgaaaatgttattgtgaaagatgcatctgggaaagaagtcgtgtttcagcttctacctctttcagaaatcgctttgagaattagaaatgagtatgtcaaagcgtatctgggaagatcaccacgggatactgcaaaacacgtgcttgcatttacagcttcagtaccacctcttgggttcagctcgtatgtaatctcagacactggacgaacagcgcgtggactatctgcatcatatgttacttctggaagcatgaatcaaaatgtagaagttggccagggaaatctaaagttacgctattcagaagaaggagttaaaataactcgtcacttaagtaccaaaaatcaggttactgcagaacagtcatatgcttattatattggaagcaatggaactgacaaggatcctcaggcttctggagcttacgtttttcgaccagatggtgtgcttccaattaaatctaaagaagaggctcaattgactattgttcaaggacctttgttcgatgaagtgcaccaggagcttaactcctggatatcacagattaccagagtgtacaagggaaaaaaccatgctgaaattgagttcacaattgggcctataccagctgatgatggtattagcaaagagattatcactaaacttacaaccaccatgaagacaaatggaacattttacacagactcgaatggccgtgacttcatcaagcggattcgggacttcagaacagattgggacttgcaagtgtaccaaccggttgctgggaactattatcctctaaatctcgggatatacatgcaagataaaacctcagagctatccgtgttggtggatcgagctgtaggtggatccagcttagagaacggccagatcgagttgatgcttcatcggagaatgcagcatgatgacattagaggtgttggtgagattcttaatgaaacagtctgtctccctgaaggatgcaaaggattaacgatacaagggaagttttatgtacagatagataaacctggagatggggcaaaatggcgtcgaacatttggtcaagaaatttattctccactacttatagcattcacagaacaggaaggagatagttggattaattcacataagacgacattctcagcgtttgaaccgtcatattcattaccaaaaaacgtcgcattactcaccctccaggagttggaaaatggggaagttcttctaaggcttgctcacttattcgaggttggggaggatagtgagtactcagttatggcaaaagtagagctcaagaaactattccacaacaaaaagataagggaagtaaaggagacaagtctttccgggaaccaagagaaggcggagatggagaagagacggctaatctggaaagtagaaggctcggccggggaggaagtgaagagaggagaggcggtggacgcagagaagctagtggttgagcttgttccgatggaaattcgaaccttgttgatcaagtttgatgatcaaattgaaatggttggtgataaagagcagcaacataggttatgaaataatacacgttgttgttgtctttttaagtttaatcggagaagagaaaaaagtttgaatttagtgtctgatgcgagtttaaaattcgggtgattgcaacagtcacgagtgcgat

SEQ ID NO: 95130 - DNA, 921 bp, Arabidopsis thaliana columbia
atgattctccagctccctacgactcactattgggaaagctggcacgcctgcaggtaccggtccggaattcccgggtatttgtataattttacaaagatgggtttcaaactcatctctctcctccttctttttcttccacttctaacagtcacaatcttgtcgggagtcgagcaggcctttgcttccgacaaggcactcctcgtgaccggccgcaacatcacggctgacggtggaaggtcgtcactgagagggaagaagcagaggagagcatcaggatgtaacttgttccaaggccgatgggtgttcgatgcttcttaccctttctatgactcgtccaagtgtcctttcatcgacggcgagtttgactgtctcaagttcggccgaccagacaaacagttcctcaagtactcttggcaacctgaatcttgcaccatcccaaggttcgacggtggggcatttctgaggaaatacagaggaaaacgagtcatgttcgtcggagactcactgagtttaaacatgtgggaatcgttggcctgtatgatccatgcgtcggtaccaaacgccaagaccacttttctcaagcgtaccccactctctactctcactttccaggaatatggagtaacgttatatctatatagaacaccatacatagtagatatatccaaagagagagttgggcgtgtgcttaaccttggagctattgaaggaggtgctgatgcttggaaaaacatggacgttcttgtcttcaactcttggcattggtggactcacaaaggccaatctcaagggtgggattatattagagatgggtcgtctttggtgagagacatgaaccgtcttgacgctttctacaaaggactcagtacttgggctcgatgggttgatcaaaacgtcgatacggccaaaactcgagttttc

SEQ ID NO: 95131 - DNA, 383 bp, Arabidopsis thaliana columbia
caacaacaacaacaacactctcttacctctcacgttcactctctcctccaccgtaacccccaccgtcgatgactcctccatcgaagtggtccgacgtccacgtggcagaccaccaggttccaaaaacaaacctaaaccacccgtcttcgtcacacgtgacaccgaccctcctatgagtccttacatcctcgaagttccttcaggaaacgacgtcgtcgaagccatcaaccgtttctgccgccgtaaatccatcggagtctgcgtccttagtggctctggctctgtagctaacgtcactttacgtcagccatcaccggcagctcttggctctaccataactttccatggaaagtttgatctcctctccgtctccgcaacgtttc

SEQ ID NO: 95132 - DNA, 384 bp, Arabidopsis thaliana columbia
ccaaccttcatgtcgggcatttgatgtggggtgccagttccggaagtgattggaccggacaagtggcagggagcttatggtccttcctctacacattacaagtcatcttagctggtatacaagaagctatggctgccatgagaccgagacagagcaacattgagagtctctatgatatcaagaagatggagtcagagatggataatcattggctttatcaagttgacaaagctatctcctttatagatataagatcgtgggtacagtttgatttaagcgagagagtttaagagctagtgtaacaaagaactagcaagaaaactgaaacatccatttttcttgtttagtaataaaacaatcaaccttattaagtcaaaaaaaaaa

SEQ ID NO: 95133 - DNA, 938 bp, Arabidopsis thaliana columbia
  unsure (1)..(938): unsure at all n locations
nnnnnnnnnnnnnnnnnnnnnnnnnnnnnnnnnnnnnnnnnnnnnnnnnnnnnnnnnnnnnnnnnnnnccacgcgtccgcccacgcgtccggaaaacttctcttttgtccccttgtcaacaaaaatctcccattcaacaaaatttcttcagcttctctccttcaaaaggtttttattctccttggtttgaacaagttacactgtagagagtgatttggctaaaagaagattgattcaggagctgtgtagtgtattgctggggtttttccaatgcaaacgtctcagaaacatcacagtgcggctggactgcacatgctgtatcctcaagtctactgttcacctcagtttcaagcgaaagacaacaaaggcttctctgatatcccgtccaaagaaaacttttttaccctcgaatcctccactgcttctggtagtcttccttcgtatgactctccttctgtgagcattacatctggccggagcccgttttctcctcagggctctcagtcttgcatctcggatctccatcattcccctgacaacgtctatggatcacctttgagtggggtgtcatctcttgcctatgatgaagctggagtcaagagtaagattcgggaacttgaggtctcgctgctgagtggtgatacaaaagttgaagaattctcaggttttagccccgctgctgggaagtcgtggaactgggatgaacttttggctttgactccacagttggacttgaaagaggtgctggtggaggctgctcgggcagtcgctgatggggatttcgctacagcgtatggattccttgatgtcttggaacagatggtgtcagtctcaggcagtccgatccaacggctaggcacttacattggcagaagggcttagagcgaggcttgtaggggtctgggtgcaatatatacaaatcccccttttgctttgat

SEQ ID NO: 95134 - DNA, 557 bp, Arabidopsis thaliana columbia
  unsure (1)..(557): unsure at all n locations
atgatacttcnnnnnnnnnnnnnnnnnnnnnnnnnnnnnnnnnnnnnnnnnnnnnnnnnnnnnnnnnnnnnnnnnnnnnccacgcgtccggaaaagagaggacatgctaaaatacattcctttcggtagcggatggagagcttgtcctggatcacatctagcttataccgttgtaggaagtgtaattggaatgatggtgcaacactttgactggataatcaaaggagaaaaaatcaacatgaaggagggtggaacaatgaccttgaccatggctcaccctcttaagtgcactcctgttcctcgaaacctaaacacttaaacttcaagtctatagattcccaataattcttgacgtggagatgtgaacttgcttttgttgtttcaaataatatcatgattacacatgtttcctgatttctttgttaccttttgtttggttcagtttgctgtatgaaactgtatacatttcttaatgttcatcatcttatgtctctcnnnnnnnnnnnnnnnnnnnnnnnnnnnnnnnnnnnnnnnnnnnnnnnnnnnnnnnnnnnnnn

SEQ ID NO: 95135 - DNA, 1748 bp, Arabidopsis thaliana columbia
  unsure (1)..(1748): unsure at all n locations
ccacgcccacgcgtgcgtagcgggatcactgttgactttgaaaactgcttcatcttcctcctcttatgtcttttctcacgcctctcttacgatcttttcttcaggaaaacaaaagactcacgagctggctgtgctcttcctccgagccctccttcattaccaatcattggtcatcttcaccttatactctttgtcccaatccaccagtctttcaagaacatctcatctaaatatggacctctcctccacctccgcttctttaacttccccatagtcctcgtctcctcggcctcaacggcctacgagatcttcaaggcccaagacgtgaatgtctcctctcgccctccccctcctatcgaggagtctctcattttaggatcttccagcttcatcaacactccctatggagattactcgaagttcatgaagaagttcatggtccaaaagctgcttggaccacaagcactccaacggtcccgaaatatccgtgcagatgagctggaacggttctacaaaaccctgcttgataaggcgatgaagaagcagactgttgagattcgtaatgaagcaatgaagctcactaacaacaccatttgcaagatgattatggggaggagttgttcagaggagaacggtgaggctgagacagtcagaggcttggtgaccgagtcgattttcttgacaaagaaacatttcttgggagccatgtttcacaaaccacttaagaagctcgggatctcattattcgcaaaggaattgatgaatgtttccaacaggtttgatgagctactggagaagattcttgttgaacatgaagagaaattgcaggagcatcatcaaactagtgacatgttggatatgttgttggaagcttatggagacgaaaacgcagagtataagatcactagagaccaaatcaagtctttgttcgtggatctgttcagtgcaggcactgaagcctcggcgaacactatacagtggaccatggcggagatcattaagaatcctaagatttgtgagagactgagagaagaaattgattctgttgtagggaaaacaaggttggttcaagagactgatctaccaaatctcccttacttgcaagcaataggttaaagaagggctaagattgcatcctccgggaccagtggtaaggccggtcaaagagacatgtgaaatcaaaggattctacataccggagaagacaagactttttgttaatgtttatgcgataatgagagatcctgatttctgggaagaccctgaggagtttaagccagagaggtttttagcttcttcaagattaggggaagaggatgagaaaagagaggacatgctaaaatacattcctttcggtagcggaaggagagcttgtcctggatcacatctagcttataccgttgtaggaagtgtaattggaatgatggtgcaacactttgactggataatcaaaggagaaaaaatcaacatgaaggagggtggaacaatgaccttgaccatggctcaccctcttaagtgcactcctgttcctcgaaacctaaacacttaaacttcaagtctatagattcccaataattcttgacgtggagatgtgaacttgcttttgttgtttcaaataatatcatgattacacatgtttcctgaaaaaaaaaaaaaaaaaaaaaagnnnnnnnnnnnnnnnnnnnnnnnnnnnnnnnnnnnnnnnnnnnnnnnnnnnnnnnnnnnnnnnnnnnnnnnnnnnnnnnncg

SEQ ID NO: 95136 - DNA, 646 bp, Arabidopsis thaliana columbia
  unsure (1)..(646): unsure at all n locations
nnnnnnnnnnnnnnnnnnnnnnnnnnnnnnnnnnnnnnnnnnnnnnnnnnnnnnnnnnnnnnnnctttttgtttttttttttaagatttggttgaaccaagtcagcccaaaaaaaggggggctgtttcttgcataaagagaatctcctagaaaaagcagagtgacgtggatttggttctgctgagcataagaattttaacaaaagggtactactacaatagggaaatttactgcaggtccaagcaaagactgtagcagtgttgggccatgaaaaagacctgacctgtgaagattagccataaagagcacgccacggactttcttcttcttttgatgtctttgatgcgctccacttgattctgtctcttgagaaagacagtcctgtccaactagccacgagctcccctgtttcatggatcacctgaagctcttcgtctagagctttatgagttaggctattgcttctttggcctatgagaatagcggtaggcaggcgtttaacacgagctagatgaagcaagcatgacaaaggttcataatggatctgcatcgatagtggtggtttctcgatgcgagaagcaaataacctactggtctctgtttctgtagcaacttgaacgtaatgaagactagcttttctgttatt

SEQ ID NO: 95137 - DNA, 384 bp, Arabidopsis thaliana columbia
gaagaagtttaagaagcagagtgtataacaagtaacatggactcaagagccttacccttctccgttctcgtcatcctcattgctgcggcggtgttggccaacgcttacactcctcctcctcctcctccaaccaccgcataccctgccgtgaaaaccgtggaagcggcagcggtaggaatggtgttctgtcaatcctgcgacaaattcggatcatggtcattggccggagcaaaatctttatccggagcttatatcaacattatttgccagaatcatttgtcacaagtggagttttacaaaggctttccaactgtattccttccgtgcattttttttataggatgctccaaaaggcttttaaagtattacttttcactatttttt

SEQ ID NO: 95138 - DNA, 590 bp, Arabidopsis thaliana columbia
cagaatcataaccatgactataaccagaaccataactataaccaaaaccatagctataaccggaaaccaaaaccatcaaggcaacaaccccaagaagatgcatcgtcaaccatcttcgtccgattctgagaacataatgagcacacgagtcatcaccattgcacgtgaaaacaaacgtgcagtaatggagatcctacgatctcctcaaggcaacaataccggtggttcaggaacacattcctctagggtttcacacggcaccggagagaaaggacggagacttcaaagcagcagcagtagcagcagcgacgaaggagaaggtaagaagaaaacgacgaagaacgtccctaacaaaggcaatagtaacctcccaatgaaagcttttatgaatagtaacgttcagatgataaacaactccattgtctacaactcgacggcatctcatcatgatcccggcgttcatcttaaaatctcccggaaacctggctccgacaatggttttcatgtcagtgattacggtaataatggcggatacaccaactgatgaaagaagaaaaaaaactaaactaaaataaaaaaaaaggttttgg

SEQ ID NO: 95139 - DNA, 566 bp, Arabidopsis thaliana columbia
ttcaatcgaaacctctgtgagatcgcttttgatttttgtaattctcgtcgcaggatatctctctcattgggatcagacatggctgttgttgcaacatccctgatattcgctgtcgtaggcatcattgcttcgatatgcactagaatctgcttcaacaaaggcccctccaccaatctgttacatcttacattggtcatcaccgcaactgtctgctgttggatgatgtgggcaattgtatacattgcgcagatgaaccctctcattgtccctatcttaagcgaggtggagtagaaaccattctactcaaactaggaaaccaatgcacaaatttgagtaagagccccgctgctctttctgtatcttcttcaaacatatttgttttcccctttgtaattcttatcgtggtgtggaacaacgaaactatccccctctttactcaaacatattctgtctctcattcaattcttgaacagttttcatatactcaaagactctaccagagagtgagtgtattgttgatgaaataaaaacatttggcagaatattcgccatttcccaaaaaaaaa

SEQ ID NO: 95140 - DNA, 478 bp, Arabidopsis thaliana columbia
ctgagatttcgtatttgaggaagatagcttgtctctatctgccccacaaacacctctctttgttggactctctttttctttcttcttcccttagtctattttaactcagaaacctctgtttttttttgttagagagaaaggtaagaaatgggtgttgatttgaggcaagtagttgctggtattctcaccattaccatgtttgtgatgcttggacagatgcttcatagagattactttgattctcgtcaggagaaagctcagggagatgcacaagatattgaatttgaaggatctaaagtcgctgtgaaagatggtcttgtcggaaccgttgaaggcagtaaaggactttggatggaagataacactgatcttactccttgttggccaacattactatctgatgacgctgtatcatcctaaagggtatgttacattctcacttaccaatggtcctgagtaccatatctctcaaatcact

SEQ ID NO: 95141 - DNA, 485 bp, Arabidopsis thaliana columbia
cggacgcgtgggtaaaaataaaaagtgttgtcttttgacaaaatcatcaaaagggactcagatttgtgaaatcttgtctctttttctttatctgttttgtttttaacgattcgtaattctcctcaatttccgtgaaaccccttggaaaaacccatttctcgagagagagagagagaaggagagtgtaagaagaagaagaagaagaagaaggagatgggtgtggatttgaggcaagtggtggctggaatactcaccattaccatgtttgtgatgcttggacaaatgcttcatagagattactttgatgctgttcaggagaaagttcaaggagatgcacatgatattgaattccatggatcaaaagtagctgttgaagatggacttgttagagcctttgaggctgggactaaagggccttggatggaagatagtcatgaactcaaaccttgttggtcaatttctcaatctgatgaagcggtatcgtc

SEQ ID NO: 95142 - DNA, 563 bp, Arabidopsis thaliana columbia
  unsure (1)..(563): unsure at all n locations
gaagatcagtgagctttaaagtttgtcaatataacgttatgggccatatctataagagatataggccctacatacactgtttcacacattttggttcgaagtaaagttgtaacttttaactgtacatttagaaagaaaaaaacacaccaaaaagccattattctctgctattacaatgacgaaaacgattatcaattgattaccgtgggaacgcagcgaggtgttgcgccacatcagcgtcgagcggttgtgccacgtcagcagccactggatcggcaacaacgacgacttgtctacgttgtctttcccggagatagagaattgtgatgagacagacaaagagtgtaagtattgttgcattaccttcttcaaacaccacattctctatccaagtctctaccttcggatacaccttctgggtaatgaatccacaactctcaccagggcggtatcagcatagtttcttcggggccataagctagcgggggcaagtgtgactggcaatctcgcggctgcaccgctaaggggtcaaacagaacggttttctaatggggcanggggtc

SEQ ID NO: 95143 - DNA, 438 bp, Arabidopsis thaliana columbia
gtcaaaacctttctccagaatagtaggtttggagatgcaatgagggtgttaaaagaaatggcagaacatggaatcgcaccagacatattttgctacaattcccttataattggcctttcaaaagctaaaagaatggacgaagcaaggtcttttctggttgaaatggtcgagaacggattaaagcctaatgctttcacctatggggcttttatcagtggatatatagaggcaagtgaatttgcatctgcagataagtatgtgaaagagatgcgggaatgtggcgtacttccaaataaggttctttgcacgggtttgatcaatgagtattgcaaaaaggggaaagtaatagaggcgtgttcagcatatagatccatggttgaccaagggatcctgggggatgctaaaacatacactgttcttatgaatggtctttttaaa

SEQ ID NO: 95144 - DNA, 466 bp, Arabidopsis thaliana columbia
ggtggcgataaggcgagaagaaccacgtccacgacaacctccggtttggcgtcatcttacgtcacctactcaacgggcgcgtccggtggtcagcagcagcaacattcgaggagtctttcgtttggcattcacgcgccgccgtgttactctatcgccgaatgctcggaggagaatattgagagtttcggcgaaagcgtcgacgaagaatgctatggagtataggaaattaggagattccgatctcaacatcagcgaagttactatgggcactatgacatttggggagcagaatactgagaaagaatctcatgagatgctgagttatgcaattgaagagggcatcaattgcattgacactgctgaagcttatcccataccgatgaagaaggagacgcaaggtaaaacggatctttatatcagtagctggttgaagtctcagcaacgtgacaagatagttttggcaact

SEQ ID NO: 95145 - DNA, 475 bp, Arabidopsis thaliana columbia
  unsure (1)..(475): unsure at all n locations
gggagcnnacaacgagcatgggnngatgaatgagtttaaggttctgcctggtcggatcgatgatcttcagtggtctgctgatgggatgaggatcgttgcttctggtgatggcaaaggcaaatctcttgttcgtgctttcatgtgggattcaggatcaaatgtgggagagtttgatggtcattctaggagagttcttagctgtgctatcaagccaactaggccgttccgtattgtaacttgtggggaggattttctggtgaatttttatgaaggtccttcttttaagttcaagctctcaagcagagagcattccaactttgtcaactgtgtgaggtttgcaccagatggaagtaagttcattactgtgagttcagataagaagggaatcatatatgatggaaagacttgtgagatactgggagaactgttttctgaggatgggcataaaggtagtatttattgcagtcttttgtag

SEQ ID NO: 95146 - DNA, 514 bp, Arabidopsis thaliana columbia
  unsure (1)..(514): unsure at all n locations
gctatgcgccatggcacgccattagcgcgctttttaaaaccaagggttttatctcggtgtctaaatctgtttgttttggtgtttctattgaatttagattgaactgaaaactgctcctgctgattttcggtttccaacaacaaaccaaacgaggcactgcttcacccgttacattgagttccacaggtgcacaactgcaaaaggtgaggatgcaaatgaatgcgagaggttcgccaagttgacaagtggaatgagcagagggagactggaacattccctggccctctttgattcacacaagaatctctctttttcattttaagtttgagaccaaaaaaggtcgtgtggatgatcatgaaatctataactcttgtctttcattaatcgtttttccttggatgatcaattaaataaattggaacaaaaaaaaaaaaaaaagggcgnccgctctagaggatccaagcttacgtacgcgtgcatgtgacgtcatagatctcntatagtgcgtcctaaa

SEQ ID NO: 95147 - DNA, 1765 bp, Arabidopsis thaliana columbia
  unsure (1)..(1765): unsure at all n locations
gttcaacgagtgcaagacaagagattcaaatacccttcggcatccggagtaaaactccctagagatgaagaagatatcgccttcatgagcgttcttgaactcggagaacttataaagacgagacaaattacttccaaagaactcgttcggatttatcttaagcagttaaaacggtacaatcatgttcttgaagcggtagttacttatactgaagaactggcatacaaacaagccaaagaagctgatgatttactctctcaaggaacttatcttggacctcttcacgggattccatatggtttaaaggatatagttgcagttcccggatataaaacaacttggggttcaacttctttcaaagaccaatttcttgacattgaagcatgggtttacaaaagattaaaagcttcaggtgcagttttagtagcaaagcttgttacgggttctatggcttatgatgatatctggttcgggggacggactaggaatccatggaatatcgaggaattctctaccgggtcatcagctggacccgctgcatccacatcggctggtatggttccttttgctataggctcggagacagcaggctcaatgacataccctgcagcgcggtgtggcataacagcattgcgtccgacatttgggagcgttggtagaaccggagtgatgagcatatccgagagcctggataagctgggacctttctgtagaacagcagcggattgcgctgtaattcttgacgctatcaaaggaaaagatcccgatgatctctcatctagagagatcgcgtttgaagatcccttctccgttgatatcacaaaactcacagttgggtatacaaaagatgctgatatgaaggtggtggaagttcttggttccaaaggtgtcaatatggttccttttgagctaaattatactgtggaatcggttcaagggatattgaacttcacaatggatgtagatatgttggctcattttgatgaatggcaaagaaccggtcaagaagatctctatgaagctcaagatcaatggccggttgagttacgccgtgctcgtgtagttacagcagtagattacattcaggctcagagagctcgtggtaagttgattcgggaagtggagaagagctttacagtcgatgcgtttattggaaatgtgaccgattgggagaaagtctgtatgggaaacctagtcggtttgccggttctagtgattccgaccggtttcaagaacataacggatccaccaaccaacagttgccggagacggacaacgatcaatgccggaatttatgcccctccagaacgtgatcacattgctttggcattgggtatggcgtaccaatcggttaccgatgcacataggaagcgaccacctattgatgatcttggaccggatgactcgataccaaatcctcctcgggctttaatccctccccgtaggttacacatttgagctttcttcaatctttttttttacattgggaaatgtagtcaaatcaatgttgtgtgttttgtttaaaaagaagttatgttataagtagcatattgttctgtctcaatgagtgatcaagtcaatgttatgaaatgaacatatggttgggaccgtttttgacgatcatgctttgtagtgcgcgactctggatataaattaatttattgggattttgtctaaaaaaaaaaaaaaaagnnnnnnnnnnnnnnnnnnnnnnnnnnnnnnnnnnnnnnnnnnnnnnnnnnnnnnnnnnnnnnnnnnnnnnnnn

SEQ ID NO: 95148 - DNA, 588 bp, Arabidopsis thaliana columbia
  unsure (1)..(588): unsure at all n locations
nnnatgatctnnnnnnnnnnnnnnnnnnnnnnnnnnnnnnnnnnnnnnnnnnnnnnnnnnnnnnnnnnnnnnnnnnnnnnnnnccacgcgtccgccctttcataaccttgtaaaccattaagaggctttgctcaattacaagaagaagaaaaaatgcttgtcgacgggaaactcgtctgcgtcaccggagccggcggctacattgcttcttggatcgttaagttactcttagagagaggctacaccgttagaggaaccgtaaggaacccaactgatcccaagaacaaccatctcagagagcttcaaggagccaaggaaagactcactcttcacagtgcagatcttctcgactacgaagctctctgtgccacaatcgacggttgcgatggcgttttccacactgcctctccgatgaccgacgatcccgagacaatgttggagccggcggtgaacggagccaagttcgtgattgacgcagcggctaaagccaaggtcaagcgcgtggttttcacgtcatcaattggtgcagtttacatgaaccctaaccgtgacactcaagccattgttgacgaaaactgctggagtgat

SEQ ID NO: 95149 - DNA, 434 bp, Arabidopsis thaliana columbia
aaagggtttactctgtcttcttcagacttctcagtgatcgaagctatgatgacgacaacaaccaatactatggctatgcttcaaaacctcgtcttctctgttccaatctctcgtatggtagttcggcgtcactccctcgctaccaccttctccgctgccgccacaaccgtcgtaccgtctcctaaaccggtatcagccaaaccggcgcgtactccacacgtggactcacatgttctcatcggaatgtcagagcctgagcttcaagagcttgctatcaacctcggtcaagaaggatacagaggaaagcagctccatcatcttatttacaagagaaaggttaataaagttgaagactttagcaatttgccactgacgtttcgtaaaggacttgtggatggtggatttaaagtgggaagatcacccatttaccaaac

SEQ ID NO: 95150 - DNA, 1327 bp, Arabidopsis thaliana columbia
tgcagtaccggtccggaattcccgggtcgacccacgcgtccgctctctcgtcttcgtcttcttcttcttcaacgttcctctccaaaatcctcagaccaagaaatcatcatggccgtcgatctaatgcgtttccctaagatagatgatcaaacggctattcaggaagctgcatcgcaaggtttacaaagtatggaacatctgatccgtgtcctctctaaccgtcccgaacaacaacacaacgttgactgctccgagatcactgacttcaccgtttctaaattcaaaaccgtcatttctctccttaaccgtactggtcacgctcggttcagacgcggaccggttcactccacttcctctgccgcatctcagaaactacagagtcagatcgttaaaaatactcaacctgaggctccgattgtttctcagccagtgagaacaactacgaatcaccctcaaatcgttcctccaccgtctagtgtaacactcgatttctctaaaccaagcatcttcggcaccaaagctaagagcgccgagctggaattctccaaagaaaacttcagtgtttctttaaactcctcattcatgtcgtcggcgataaccggagacggcagcgtctccaatggaaaaatcttcctggcttctgctccgtcgcagcctgttaactcttccggaaaaccaccgttggctggtcatccttacagaaagagaatgtctcgagcctgagcactcagagagtttctccggaaaagtctccggctccgcctacggaaagtgccattgcaagaaaaggaaaaatcggatgaagagaaccgtgagagtaccggcgataagtgcaaaaatcgccgatattcccccggacgaatattcgtggaggaagtacggacaaaaaccgatcaagggctcaccacacccacgtggttactacaagtgcagtacattcagaggatgtccagcgaggaaacacgtggaacgagcattagatgatccagcgatgcttattgtgacatacgaaggagagcaccgtcataaccaatccgcgatgcaggagaatatttcttcctcaggcattaatgatttagtgtttgcctcggcttgacttttttttgcactatttgttttttgattttttgaggactttagatggattgaaatttgtaaatttttttattaagaaatcaatttaaatagagaaaaattagtggtggtgccaaaaaaaaaaaaaaaaaaaaaaaaaaaaaaaaaaaaaaaaagggcggccgctctagaggatccaagcttacgtacgcgtgcatgcgaggtcatagctcgtcaagatgtgaacagagtg

SEQ ID NO: 95151 - DNA, 482 bp, Arabidopsis thaliana columbia
cccacgcgtccgaaaacacacaaatggaaggaagagtcaacgctctgtcaaacataaacgatctcgaacttcacaatttcttggtcgatccaaacttcgatcagttcataaacctcataagaggagatcatcaaaccattgacgaaaacccagttcttgatttcgatcttggtccattacaaaacagcccctgtttcatagacgagaaccagttcatcccaacacctgtcgatgacctcttcgacgaattgcctgacttagactccaacgttgctgaatcattccgtagcttcgacggtgatagtgttagagccggtggtgaagaagatgaagaagattacaacgacggtgatgattcttcagccactactacgaataatgatgggacccgtaagacgaagactgatcggtctaggactttgatctctgagagaagaaggagagggcgtatgaaggataagctttatgcattgagatctctt

SEQ ID NO: 95152 - DNA, 495 bp, Arabidopsis thaliana columbia
cccacgcgtccgcggacgcgtgggccgaaactttctctgctctctctctctaatgtctcgatcaacaaagcttcttgttatcttcttcacatggataacagctctatccatgtcgaaaccaatcttcgtatcatccgataacatgaatttcacattcaaatccttcacaatccgtaacctcacattccgcggagattcacatctccgaaacggtgtcgttgggctcacaagagagctacgtgttcccgatacaagctccggtacagtaatctacaacaatccgatccgtttctacgatccggattcaaacaccacggcgtctttctccactcacttctccttcaccgttcaaaacttaaacccagatccaacctccgtcggtgacggactcgctttcttcctctctcacgacaacgatactttaggaagtcccggtggttacttaggtctcgtcaattcctctcagccgatgaagaatcgattcgtcgctatcga

SEQ ID NO: 95153 - DNA, 429 bp, Arabidopsis thaliana columbia
gacgagtcaaagtgtaaaatcgttaaacccctcatggagtgagagagagaagaatgaagtacaacaacgagaagaagaaaggaggaagctttaagagaggaggtaaaaagggttcgaatgaaagggatccattttttgaggaagagccgaagaaacggagaaaagtcagttacgatgacgacgatatcgagtctgtggactctgatgcggaagagaacggatttactggcggagatgaagatgggagaagagttgatggggaagtggaggatgaagatgagtttgctggtgagacggcgggagagaagcgaagagattggcggaggagatgctgaatagaaggagggaagcgatgaggagagagcgtgaggaagcggatatgatgatgatgatgatgagatgagcatgagactatagagagttgatgcg

SEQ ID NO: 95154 - DNA, 548 bp, Arabidopsis thaliana columbia
ctctatacgactcatatagggaaagctggtacgcctgcaggtaccggtccggaattcccgggtcgacccacgcgtgcgcccacgcgtccgcggacgcgtgggttgacagctattaaggcagatccgtctagagttatggattacatcaacaggctggacaactttgatggacctgcagttggagaagtcgcagttgaagcccaattatatgaggaagcatttgctatcttcaagaagttcaacttaaatgttcaggctgtcaatgtattgctggataatgtcaggagcattgagcgtgcagttgagtttgcattccgggtcgaagaagattctgtttggagccaagtcgctaaggcgcaactcagggaaggactagtcagtgatgcaattgagtcctttatccgtgctgatgatgccactcatttcttggaggtcatacgtgtctctgaagatactgatgtctatgatgacttggtcaaataccttctgatggttagacagaaggtgaaggaacccaaggttggatagtgagctcatctatgcatatg

SEQ ID NO: 95155 - DNA, 514 bp, Arabidopsis thaliana columbia
ggtggtggtggccaagcaaggcttaggctatagcacgacgactcaaccagctaattaacaagttttaaactttttctccggagctctgactcttcttctctccggatccaaaaatgaatcgtctcttttctctcttctccatagctctgatcgctttcctctgcctccaccatcatgttctcgcttcttcctcttccgacttcgaaggtttcgatgctgaagacgacgatgtttcagaagattccactgagcttcaccactctctccgtcctcctcttctgactcagtctgagtcaacggttctggatctggacccatctcccgattctgattctactcctgcatctaaatctgatcctcccactcagaccgtgaagccttcgtcctccatctccttcgattactgggatgaagatgagttcgaaggattgccggaggacgagaaatctacggagtctccggttttttccgatacccccctctttcttgccaaaccaagaggccggatgttgag

SEQ ID NO: 95156 - DNA, 729 bp, Arabidopsis thaliana columbia
cgcctgcagtgtaccggtccggaattcccgctgcgacccacgcgtacacccacgcgtccgctttttctccggagctctgactcttcttctctccggatccaaaaatgaatcgtctcttttctctcttctccatagctctgatcgctttcctctgcctccaccatcatgttctcgcttcttcctctaaaaacccctctggggagggggctgaagacgacgatgggtcagaagattccactgagcttcaccactctctccggcctcctcttctgactcagtctgagtcaacggttctggatctggacccatctcccgattctggttctactcctgcatctaaatctggtcctcccactcagaccgtgaagccttcgtcctccatctccttcgattactgggatgaagatgagttcgaaggattgccggaagacgagaaatctacggagtctccggttttttccgatgacgcctcctctcctgccgatccacagacgccggatcttgagtctgcttcagaaactccagatactgacattccgaagaagatgcaatcgtacactgtggagatcgtttgcgtctctatattgattggttacgctatcaattacttcactggtaaacgtgaaaatgagaacctcgctttggcttgggcttccaaatttggtcttaaagatacgatttttgagaagaacttcagtttgcttggagttggtgaaggagaagactctc

SEQ ID NO: 95157 - DNA, 589 bp, Arabidopsis thaliana columbia
  unsure (1)..(589): unsure at all n locations
agataagagaacatgaggaactagagacacttanagtttcattccaggngaataaatctgagggagctgttgcggaaacacacttggatgatgaacaatctgaggaagctgtagcagaaacactcttgaatgatgaacttgatggggatgatgaagaagaagttgctgaagacaatcttgaacctctgaacagttcattgtcatcctcagaagaaaatagagtagatagaatccgtaggctagagcaaaagcttcctcggtaaagaaaaacctcttgggtggaggagttggctttgataaaccagaagcaaaacccgctagagttgaaggaaagaagaaggagaaaaagaagaagacaaagattcttgtgaaaggccaagccaaaaaggggacaaagatagaaatccctggatcatcaaagaggttaaaggtgaaggagaaggctctattaactggcgtcttagtcaagtatgcggctaaagttgcttcaacctcaaacaatgatgaatgatatcattaacaagtgatcaaattttgatataatctttcatcaactgctagtagtgagccatcttcgatttgttttaaa

SEQ ID NO: 95158 - DNA, 911 bp, Arabidopsis thaliana columbia
  unsure (1)..(911): unsure at all n locations
cagctannnnnnnnnnnnnnnnnnnnnnnnnnnnnnnnnnnnnnnnnnnnnnnnnnnnnnnntcccggggcgcccacgcgtccggtgcgagatctctccaacgaaaaaatggcttgtagactcttttgggcttctagggttgcttctcatctaaggatctccgttgctcaacgagggttttcttccgtggttttgaaggatttgaaatatgctgattcacatgaatgggtgaagattgacgggaataaagcaacctttggtataacggatcacgcgcaggaccatttaggagatgtggtctatgtggagttacctgatgtaggacattcggtgtcacaagggaagagttttggagcagttgaaagtgtgaaagcaactagcgatatcaattctccagtctcgggtaaggtggttgaagtcaatgaggagctgaccgagtcccctggattggtgaactctagcccgtatgaacaaggatggatcataaaagttgagctgagtgatgcaggcgaggcagagaagctgatggattcagacaagtactctaagttctgcgaagaagaagacgccaagcactgagctttttctattttttccagcatccttctccaagcttccaccgcaacacagattgttgttttctcaatcgaggatcaaaacgagatttctccatctttgtcccttggactgaaaattcccatctctcgttctcctttttttcttttcatgtttttcttttaatgaaatgaaattgtttgaataatggtagagaataatgagctttggcgttgaaattgattggatctttcatggaaaaaaaaaacaaaagggcgaccgctctagaggatccaagcttacgtacgcgtgcgtgcgacgtcatactcttctatagtgcacctnnnnnnnnnttc

SEQ ID NO: 95159 - DNA, 1845 bp, Arabidopsis thaliana columbia
  unsure (1)..(1845): unsure at all n locations
nnnnnnnnnnnnnnnnnnnnnnnnnnnnnnnnnnnnnnnnnnnnnnnncacgcgtccgccattcttctctaaactctcaacatgtcttgctcggccaccgatctcgctgtcctgttgggtcctaatgccacggcggcggccaactacatctgtggccagttaggcgacgtcaacaacaaatttatcgacaccgctttcgctatagacaacacttaccttctcttctccgcctaccttgtcttctctatgcagcttggcttcgctatgctctgtgccggttccgtgagagccaagaatactatgaacatcatgcttaccaacgtccttgacgctgcagccggtggtctcttctattatctgtttggctacgcctttgcctttggatctccgtccaatggtttcatcggtaaacactactttggtctcaaagacatccccacggcctctgctgactactccaactttctctaccaatgggcctttgcaatcgctgcggctggaatcacaagtggctcgatcgctgaacggacacagttcgtggcttacctaatctattcctctttcttaaccgggtttgtttacccggtcgtctctcactggttctggtcagttgatggatgggccagcccgttccgtaccgatggagatttgcttttcagcaccggagcgatagatttcgctgggtccggtgttgttcatatggtcggaggtatcgctggactctggggtgcgctcatcgaaggtccacgacttggccggttcgataacggaggccgtgccatcgctcttcgtggccactcggcgtcacttgttgtccttggaacattcctcctctggtttggatggtacggatttaaccccggttccttcaacaagatcctagtcacgtacgagacaggcacatacaacggccagtggagcgcggtcggacggacagctgtcacaacaacgttagctggctgcaccgcggcgctgacaaccctatttgggaaacgtctactctcgggacattggaacgtcactgatgtatgcaacggcctcctcggagggtttgcagccataactggtggctgctctgtcgttgagccatgggctgcgatcatctgcgggttcgtggcggccctagtcctcctcggatgcaacaagctcgctgagaagctcaaatacgacgaccctcttgaggcagcacaactacacggtggttgcggtgcgtggggactaatattcacggctctcttcgctcaagaaaagtacttgaaccagatttacggcaacaaacccggaaggccacacggtttgtttatgggcggtggaggaaaactacttggagctcagctgattcagatcattgtgatcacgggttgggtaagtgcgaccatggggacacttttcttcatcctcaagaaaatgaaattgttgcggatatcgtccgaggatgagatggccggtatggatatgaccaggcacggtggttttgcttatatgtactttgatgatgatgagtctcacaaagccattcagcttaggagagttgagccacgatctccttctccttctggtgctaatactacacctactccggtttgatttggatttttacttttattctctattttctagagtattattttaaatgatgttttgtgatacttaaatattgttttggatatttttttggcatttcagtaatgttttagatgtacagtttcatggggttgtgatgataatatctatgtggtcatttgtgttctctttggagttaaaaaaaagggcgaccgctctagaggatccaagcttacgtacgcgtgcaggcgacgtcataactcttctantagttgcacctaa

SEQ ID NO: 95160 - DNA, 580 bp, Arabidopsis thaliana columbia
  unsure (1)..(580): unsure at all n locations
atgatactgccnngaaacttttgacaacttgtagtattaagatccaacttcaaaccaacggcaattgcattttcagctaaaaccacgcgtcccatcacttccccaagttgctgcacttgatcgttcaactctactcaaagctttcgacgagactaaaaccggcgtgaaaggccttatcgacgccggaatcacagagattccttcgatatttcgtgcacctccggctactttaacaagtccaaaaccaccttcctcctctgatttctccatccccacaatcgatctcaaaggaggtggcacggactcgatcacgcggcggagcttggtggagaagatcggagacgcggcagagaaatggggatttttccaggtgatcaaccacgggatcccgatggatgtgttggagaagatgatagatgggattcgtgagtttcacgagcaagacactgaagtgaagaaagggttttactctcgagatccagctagtaagatggtatacagcagcaacttcgatctgtttagctcaccggcggcgaattggagagatacacttggttgttatacagcaccagatcccccg

SEQ ID NO: 95161 - DNA, 765 bp, Arabidopsis thaliana columbia
ccaacgcgtccgctctatactttgcgtccgtctctaaacttctctctttctttttttctcaaagcttttttccttctccctaaacgatgaagattttcgtgaagactctcagtggttcgaacttcgagatcgaagtaaaacctgcagataaggtttctgatgttaaaacggctatagaaactgttaaaggtgcagaataccctgctgctaagcagatgctgatccaccaaggaaaggttctaaaggatgagaccacattggaagagaacaatgttgttgagaacagtttcattgttatcatgttgtccaagaccaaggcttctccaagtggggcatcaaccgcatctgcaccagcacctagtgctacacagccacagacagtagctacacctcaggtttctgctcctactgcctcagttccagttcctacaagtggaactgcaaccgctgcagctccagctactgctgcttcggttcagacagatgtgtatggtcaagcagcatcaaaccttggtgctggaactactttagagtccactgttcagcaaattcttgatttggttgaggtaggtgggacccggacactgctgttcggctctgagagcttctttcacaattcttaaaagagttgtggaatccctgaactggggtttccctggttcaagcttgaaatccccccccagttgtgttcaagccccctattttctgtgggggaaacacaggctccccccattttcttttttgtggcccactagcccctaaacc

SEQ ID NO: 95162 - DNA, 637 bp, Arabidopsis thaliana columbia
cttttaacagaatcttctttatctgaaaatatctaaagaaaatggtattgaactttagagataagtcctgcatttttctggcaattctttgttgtttatcattgagttgtatagtaaaagcatcagtctcttatgatcgtaaagctgtgatcatcaatggacaaagaagaatccttctctccggttccattcactatccacgaagcacccctgagatgtggcctggcctaatacagaaagccaaagaaggaggcttggatgttattgagacttatgttttttggaatggccatgaaccttctcctggacaatattattttggagacaggtatgatttggttaagttcatcaagttggtgcaccaagctggtctctatgttaatctcagaattggcccttatgtttgtgctgaatggaattttgggggatttccggtttggctcaaatttgtacccggtatggcttttaggaccgataatgaacctttcaaggctgcaatgaataaattcactgaaaagattgtatggatgatgaaagcagaacagttggttcaaactcaatgaggacccatcattcttgcacagattgagaatgaatatggaccagtggaatgggaaataggagcaccgggaaaggc

SEQ ID NO: 95163 - DNA, 471 bp, Arabidopsis thaliana columbia
  unsure (1)..(471): unsure at all n locations
caaagctgtcgtttactgccaagnnagagatgctagatatcgctncacaactccttctacgctcaagtggccaggaaagcagaaggaagaaagctgggtgcctattgttggaccgaagaccccaccagcctggatggaacgaagaggaaccttagctaaaacggctagagctttacaaaaccaagctagagacgacatcgatgcagtggcttggaagtaagggggtttgctaagacatattctttatattgttaatttctttgttcgtgtgggcacactgcattataatagatatgtttggagttctaacttccagtctacacaaacatacacgcgactactcatgttttcttgggtcgctaatttctatcacaactttcccacttttttttggtgtgtatcttcgattcttgaatactggtttttagaacagttaagacatattttggagtcgcacnctttacattagac

SEQ ID NO: 95164 - DNA, 616 bp, Arabidopsis thaliana columbia
  unsure (1)..(616): unsure at all n locations
ggccaattagcatcctttaacacgnngcttcaactggataatgaacatatgaaggcgataatagcaaaaatagagtcccttcgtcctaatgttctgctggtagagaaaagtgcatcttcatatgcccagcaataccttctagagaaggaaatttcattggtgctcaatgtgaaaaggtcattgctggaccgtatagcccgttgcactggtgctgttctttgcccctcactagatagtattagtactgctcgattgggtcactgtgagctgttccggactgagagagtgttggagcaacatgaagctggcaatcagtcaaacagaaaaccatcaaggacattgatgtactttgaagggtgtcctaggcgcctaggttgcacggttgtgcttcggggaagttgtcgtgaggagctaaagaaggttaaacatgttattcagtacgctgtatttgcagcttatcacttatcgttggagacttcattccttgcggatgaaggtgcttctctgcctaaaattagactgaagcaaccagggatggtgcggactgcatcacaaaggaggataattgatgaaggcatttccttaataactcaatctcctacagaaacagatagtc

SEQ ID NO: 95165 - DNA, 466 bp, Arabidopsis thaliana columbia
cccacgcgtccggatgaagaagaaagcacgtgtcttaagtgataaagattttaatcctgagtttttccaaagactagaaagaaggcaatccgtggaagtagtagttcctcgtagatgtaaaaacaatgatgaggaagaatcaggactcgatgatctcaatgccatgggatcttcaaatcgcctcaagaacacccaagcagatgataaacaggtaaaaggtaggtttgatgggaacggatcacaagcaaggacatctggtgatgataaggctggtgttgtaaacggaaaagagacacctggacatcacgctcctgtctccaatactgataaccaatctgaaggatccttcacaagtaatagaggaaattggtcagccatccagaggcagttgttgcagctagagagacaacaaacaaatcttatgaacatgctccaagagtttattggtggctcacatgacagtatg

SEQ ID NO: 95166 - DNA, 1059 bp, Arabidopsis thaliana columbia
caaaccgaacgagccgaggccttgttcaagagaatcattgagagtgatagtctcacttttggtgccatcacatacaacgagatgatgactttatacatgtcagttgggcaagttgagaaagtacctgaggttattgaagtgttaaagcagaaaaaggtttctccggatatttttacttataatttgtggctaagttcatgtgctgcaacctttaatatagatgagcttagaaagattcttgaagagatgaggcatgatgctagttccaatgagggttgggttcggtatatcgatcttactagcatctacataaacagtagtagagtaactaatgcagagtctactttgcctgtcgaagctgagaaatctatttcgcaaagagaatggatcacatatgacttccttatgattctgcacactggtctagggaacaaggttatgatagatcagatttggaagtctttgagaaacaccaaccaagcattagataagtagaagctacatttgtgttctttcatcttatctaatgcttggtcatttgagagaagccgaggagattatccatcagtggaaagagtctaaaacgacagagtttgatgcttctgcttgcttgaggatcttgaatgcttttcgagatgttggtttagagggaatagccagcggctttcacttgatcttggtgcataacaaatgcagcttggagaatgaaggatcatcttaagatggagaaataagttggtgaaaattttatgctcttagcaagaagaatcagatcaagctcattaatcatggtggatgaataaaatagaggttccttctcttcactgtgattcttaaatatctttttgttctttacgtgggaggtcatgagacacatagatttcctcaccagaagattttgctgcatagtcggaagatgtgtttccttaggcaaggtccataacatttcatatgtaacgtcaaatttcaaaaagtccaaattttacaacaaaaaatagattgtggaggtttttcttgtatggttgttgtttaataataagtctacaaaatttgtttttg

SEQ ID NO: 95167 - DNA, 620 bp, Arabidopsis thaliana columbia
  unsure (1)..(620): unsure at all n locations
ggcaaacaagaactagtcagtttctttgttttagacaacaagaatctgtgaactaacacaaaaacattgaaagaatgatcttaacaatgaaacttgttcaccctctccatcactctttgtcttcctccattccctttccctcaagaaaaaggcaatccaaaccgtaccggtgctcgttaccttctcccggctgcgaaaaggtcatcagaacagagactgtcctgcctccggcgccggtgagttgtgaagggagaagggtcttacttggatgtcttctcgctacagcttctgggattttgtcaactggttcagccgaggcagtaagcaccagtagaagagctctacgtgcatccaagttaccggaaagcgatttcacgactctccccaatggtctcaagtactatgatataaagggttggcaatggagcagaggcttgtgaaaggatctccgggccgcagttcaccattgttgcaaaatgggaaggggtaacgttcatgcaagtcgcaagggcttggtnttggggttgnccnctttttgggtttacggtggcaaataaggggggnaattttctnaagncttncctttgntttaagggtcgttaggggcannnttgtttttc

SEQ ID NO: 95168 - DNA, 423 bp, Arabidopsis thaliana columbia
attttgggatttagggtttcgcgatttggaagcggattcatggtgagtttcttgttagtgggcgtaattccagagaaattttggtatctatgattcatgactgcgcgattcatcttctcgaattgaaacagagagtagttgggtcggaatagctttcaacactgtagcagttgtagcattgtcttttgtgatgtattcgctgattctccatggaagaaggttggtccaatcgcagagatgcttgagtttggctgtttcagtgcaaaatgcatttgttttgtccaattccttctcttctgctagagctgctgatgtgagcattagagatggtcgaaaagggaagaactttacagtctcttacctcgttgattcattgggtttatctaaaaagctcgctgaatccatctcaaggaaagttagctt

SEQ ID NO: 95169 - DNA, 695 bp, Arabidopsis thaliana columbia
  unsure (1)..(695): unsure at all n locations
actataaaaaattatgacgtcgcatgcacgcgtacgtaagcttggatcctctagagcggtcgccctttggtttttttttttttattgaaaattattaggaatacttcaatcgaacatgtcccacaaaggccaaaccacacacatggaatgaccaattctctctcatacaaagatattgaaattcagaaattatttatgaaaaactatatagagaattcatattacgtaaaacagaaagaaaaagcagcgggaagagacgtgagcttattgcatcatttagaagttgtagttctcgtcttcgtggagcttttcatcgtgacaacaagagaagctcatgtacttctccatcggacgctgacactcgaagcaattcatcttctccggaatccgaccgctccgagcagtgatgtggaaatcaaagtggccgcaaggttttccggtttcacggaggacctcatcgtggtggtggtcggacattgctttggtgtagcctttggtcgggacgtgggttttccaggtccggtcgtaaacactcatagtcctctctatggcaccgtgagcgatcattactatctcaggtcctttgctcagtagtgcccatcctccaagcttgtcgtagcttagtatctttttgattccttgcattacctaatcaacgttttcaaacacacanaatcatttaataaccaaattga

SEQ ID NO: 95170 - DNA, 1064 bp, Arabidopsis thaliana columbia
  unsure (1)..(1064): unsure at all n locations
atgannnnnnnnnnnnnnnnnnnnnnnnnnnnnnnnnnnnnnnnnnnnnnnnnnnnnnnnnnnnnnnnnnnnnnnnnnnnnnccacgcgtccgcggacgcgtgggatcagcttcaagcttaagagagcttcgaaagcgaaagcgacgatttcttctccatcgtgagagcaaatctccagagccgttttctcttcttcttcttcctcctcgcgccgtctctgaaactccatcatcgtatcaatcaaattgcttcctcctccaaattgaaaaacaatggaattggattcggagaacaaattgttgaagacgggtttggttatagtggcgacacttgttatagccaaactcatcttctctttcttcacttctgattctaagaagaagcgtcttcctcctactcttaaagcttggcctccattggttggaagtcttatcaaattcttgaaaggacctattattatgcttagagaggaataccctaagcttggaagtgtgtttactgttaatcttgttcacaaaaagattacttttcttattggtcctgaagtctctgctcattttttcaaagcttctgaatctgatcttagtcagcaggaagtgtatcagttcaatgtccctacttttggtcctggagttgttttcgatgttgattattctgttcgtcaggagcagtttcggttcttcactgaggcacttagagttaacaagttgaagggttatgtggatatgatggttactgaagctgaggattacttctctaaatggggagagagtggtgaagttgatattaaggttgagctagagaggctcatcatcttgactgcaagtagatgtttactgggtcgagaagttcgtgatcagctttttgatgatgtctctgctttgttccatgaccttgacaatggaatgctttccatcagagttctcttcccatatctcccaattccagctgaccgccgtcgtgaccgtgcccgataaaagctttcggagattttcgcaaaaatcattgagttcgagaaaaccctctggaaaaacacagaaccacctgctgcagtgtttcatcg

SEQ ID NO: 95171 - DNA, 879 bp, Arabidopsis thaliana columbia
  unsure (1)..(879): unsure at all n locations
agcgtgtaccaatctctcccgctctgtctctctctctctctttcctccatctctctgtgttcttcttacagacaccgagaatggcggatcctgatctgtcttctcctttgatccaccatcaatcctccgatcaacctgaagttgttatctctatcgccgacgacgacgacgacgagtcaggactcaatcttcttccagccgttgttgaccctcgtgtttcacgaggttttgagtttgaccatcttaatccttatggctttctcagcgagtcagagcctccggttctcggtccgacgacggtggatccattccggaacaatacacctggagttagcggattgtacgaagcgattaagctcgtgatttgtcttccgattgctctgattagacttgttctctttgctgctagcttagctgttggttacttggctacaaaattggcacttgctggctggaaagataaagagaaccctatgcctctttggagatgcagaatcatgtggattactcggatctgtaccagatgtatcctcttctcttttggctatcagtggataagaaggaaagggaaaccctcggagagagattgcnccgattgtngtatcaaatcatgtttctnatattgaaccaatcttctacttctatgaattatcaccgnccattgttgcatcggagtcacatgattcacttccatttgttggaactattatcagggcaatgcaggtgntatatgtnataggatctcacaggcatcaaggaggatgctntcatgaaataaggggaaggttnctcggtggnttcccggnttcggtnttcccgagggccccgctatnggaagtcttnttcntncactngggttttncccgggnccctttaacc

SEQ ID NO: 95172 - DNA, 421 bp, Arabidopsis thaliana columbia
gattagagaaatagaaaaatcaaaagaagctttggcaaagagctaaagatcaaagcttttctttgagaatgagattgtggattgtgagtgtactcgtgcttacacaccttgtccatggagctctctgttgggggaaggatggtcactacactgtgtgcaaattagctgtgggattctttgtggatgattctattgctgctgtgcagaatcttctgcctgaatctgttgatggtggtggactagcagatttttgctcatggcctgatgaaattaaaaaactctcgcaatggcaatggactagcactttgcactatgttaacacacctgaatacaggtgcaactaccagtattggcgggactgccatgacactcataagcataaagactggtgtgtgacaggagcgatcttcaaatacacaaa

SEQ ID NO: 95173 - DNA, 663 bp, Arabidopsis thaliana columbia
agctgcaagagggttgttttatctacacgagcaatgcgatcccaagattattcaccgagatgtcaaggcagcaaacattctcctagatgagtattttgaagcagttgttggggattttggactagcaaagctactcaaccacgaggattcacatgtcacaaccgcggttagaggaactgttggtcacattgcacctgagtatctctccaccggtcagtcatctgagaaaaccgatgtctttgggttcggtatacttttgctagagctcatcacaggaatgagagctctcgagtttggcaagtctgttagccagaaaggagctatgctagaatgggtgaggaagctacacaaggaaatgaaagtagaggagctagtagaccgagaactggggacaacctacgatagaatagaagttggagagatgctacaagtggcactgctctgcactcagtttcttccagctcacagacccaaaatgtctgaagtagttcagatgcttgaaggagatggattagctgagagatgggctgcttcacatgaccattcacatttctaccatgccaacatgtcttacaggactattacctctactgatggcaacaaccaaataaacatctgtttggctcctcaggatttgaagatgaagatgataatcagcgttag

SEQ ID NO: 95174 - DNA, 633 bp, Arabidopsis thaliana columbia
  unsure (1)..(633): unsure at all n locations
tatacgttcactatagggaaagctggtacgcctgcaggtaccggtccggaattcccgggtcgacccacgcgtccggtctgaagtagttcagatgcttgaaggagatggattagctgagagatgggctgcttcacatgaccattcacatttctaccatgccaacatgtcttacaggactattacctctactgatggcaacaaccaaaccaaacatctgtttggctcctcaggatttgaagatgaagatgataatcaagcgttagattcattcgccatggaactatctggtccaaggtagtaaatcttggacacagaaagaaacagatataatatccccatgacttcaatttttgtttttgagatgatatagacatgtaaatggttatcaaacctttgaaaaaattgagattctgggtctaatggttaatattttggatgtatatattaaggtttttttaaatgtgttggttttggtctgttatccaaatttgtaaaatttgaggtcctgtgaaagcaatttttggtcaaactctgagattcatgtcttattatcaaaaaatttaccgaccaacaacttaatgatatgttgacctgtaaaaaaaaacnnnantnnnnnnnnnnnnnnnnnnnnnn

SEQ ID NO: 95175 - DNA, 498 bp, Arabidopsis thaliana columbia
  unsure (1)..(498): unsure at all n locations
ctnnnnnnnnnnnnnnnnnnnnnnnnnnnnnnnnnnnnnnnnnnnnnnnnnnnnnnnnnnnnnnnnccacgcgtccgtttactaatcgtttcttcattttctctctaggagctaggtgggaaaaagattcaaccttgtcttagaaaaagaaaaccaaagctaatctttttcttttgtacctctctttcaaggattaacaaaacaaatcgatgaagcccgggttttagtacctaaacatctctttgtctcgtctttgaaaacccccccaagtagatccaacatcattcatatctctctctctatctctgcataagctacggagcgatgtcggcgtgcatcaatggcttatgcagagccgtgactgtctctcttcttcttcttcttctttctttctctttttcctcagcttgctccaatggaaattgccagctgctggattcatgctcctcggctactgattgtgtctctggtttatactgtggagactgtcctgccgtt

SEQ ID NO: 95176 - DNA, 876 bp, Arabidopsis thaliana columbia
aacaccaccaatcatggctcttctcttcatactcgacgatgaagttgtgaagctatcaccgcatgctcgggccattagagatgtggaagatgaagaactaagaagctttttcttcggaatgtccccatggcagtttatactcattgtcgcggccagttcaataggagaagagctcttttaccgtgttgctgtacagggtgctctgtctgatatattcttgaaaggaacacagttgatgacagattctagaggcatggcatctctgaccggagtgtttcctccatttgtcccatttgctgaagtctttgcagctgtaatcaccccgactctcacaggctctctctactttcttgctgcgcctccaaaagacccgacatacatagttgccccggttttaagggcacggcgagatgattttaagaagcttttgtccaccttggtatgagaagagccagatggaagaagatttactctccactccttgaaggactcttagccctctaatctgggtattgaatgggttcagacggataatatattagcaccgatgatgacgcatggtatatactcggcggtcatattagggcatgggctgtggaaaattcacgatcaccggagaaggttacgccggagaatcgaacacattagatcggaggccacggataagttgatttaaatcaaatatagatggtttaattggttggggggtggatttgtgtgtatttttttggtatggggtcgtatagtgattagggaaattagctaggacctcttccaattaattagagagctacatgatacagtagataattaattacatatacgtacatatataatattccctaagaactaagaagtaactttttactttctcca

SEQ ID NO: 95177 - DNA, 661 bp, Arabidopsis thaliana columbia
  unsure (1)..(661): unsure at all n locations
gacgtggaacgcacgcgtacgtaagctcggaattcggctcgagctagcaacttccattaaaacctggttgcacaaggacatcaacgcagctgctttacgctaggcaagcttaccatgctcgctacaagaagtctctttgaagaggacgttgctcaccacactaccggtgacttcagaaagcttttggtttctcttgttacctcattcaggtacgaaggagatgaagtgaacatgaccttggctaagcaagaagctaagctggtccatgagaaaatcaaggacaagcactacaatgatgaggatgttattagaatcttgtccacaagaagcaaagctcagatcaatgctacttttaaccgttaccaagatgatcatggcgaggaaattctcaagagtcttgaggaaggagatgatgatggaccaagttccttgcacttttgaggtcaaccattcagtgcttgacaagaccagagcttttactttgtcgatggtccttcgttcagcaatcaacaaaaccggggaccggatgaagggggcactcacttaggatttgtgcccccaagggcctgggtttggcctttaaggggcccttggggggggggttcccccccggggggaccggattccctttgggaaaacctttttcccaaannccccgggg

SEQ ID NO: 95178 - DNA, 844 bp, Arabidopsis thaliana columbia
  unsure (1)..(844): unsure at all n locations
cttgattgagttgtgttttgattctcactgtcacagatctgtcttcttagtctagatctataatgtagttacgtgtaatacaacactaagatcttaagatttatattttgtgaatctgtttgaccggttctgttattatggatctgaagtgtgtgtgacttggatctgaagtatgtgactttgatggttatgtaaagtgaatctgattcgtgtttttcgcaggatggggtacgaacgaggacttgatcatatcaatcttggctcacagaagtgctgaacagaggaaagtcatcaggcgagcataccacgaaacctacggcgaagaccttctcaagactcttgacaaggagctctctaacgatttcgagagagctatcttgttgtggactcttgaacccggtgagcgtgatgctttattggctaatgaagctacaaaaagatggacttcaagcaaccaagttcttatggaagttgcttgcacaaggacatcaacgcagctgcttcacgctaggcaagcttaccatgctcgctacaagaagtctcttgaagaggacgttgctcaccacactaccggtgacttcagaaagcttttggtttctcttgttacctcatacaggtacgaaggngatgaagtgaacatgncattggctaagcaagaagctaagctggtccntgngnaatnaagggcaagcncttcaatgntgnggntgtttttagattcttgtccccagngnaaagnnagtcaatgttctttttaccgtaccaggtgtcatggngggaatttttagngcttttgnaggggtttttttcaatncttactttnggaccttngggttaaagcatc

SEQ ID NO: 95179 - DNA, 730 bp, Arabidopsis thaliana columbia
  unsure (1)..(730): unsure at all n locations
gaagaaaaatgtctactcttaatgttttttatnctgntcctgcccccacggaaggtgcntaactaaggtgaacggccaacaaannannnnncacnaaccacgactttatcatatcaatcttgactcacaaaagtgctgaacaaaataaatttatcatacaagcataccaaaaaacctacggcgaacaccttctcaagactcttgacaaggagctctctaacgacttcgagagagctatcttgttgtggactcttcaacccgctcaccgtgatgctttattggctaatgaatgctacaaaaagatcggacttcaagcaaccaagtgcttatggaagttgcttgcacaaggacatcaacgcagctgcttcacgctaggcaagcttaccatgctcgctacaagaagtctcttgaagaggacgttgctcaccacactaccggtgacttcagaaagcttttggtttctcttgttacctcatacaggtacganggagatgaagtgaacatgacattggcttaagcaagaagcttaagctggtccangaggaaatcaaagggcaaagcncttccaatgattnaggntgttattnaggatcttttnccccaaggagggaaagcncagtccantgnttcctttttanccgtncccaggttgntcatggnggggnaatttnntaagggcntttngggagggggtnttttttncaaagtcccttcctttttnggggcancc

SEQ ID NO: 95180 - DNA, 655 bp, Arabidopsis thaliana columbia
  unsure (1)..(655): unsure at all n locations
cccacgcgtccgcggactcgtgtgcggacgcgtgggttataagtcattcttgtgtcggcttcgactctcaacatacacaacacagtagatgtacaataaaaatggcgactcttaaggtttctgattctgttcctgctccttctgatgatgctgagcaattgagaaccgcttttgaaggatggggtacgaacgaggacttgatcatatcaatcttggctcacagaagtgctgaacagaggaaagtcatcaggcaagcataccacgaaacctacggcgaagaccttctcaagactcttgacaaggagctctctaacgatttcgagagagctatcttgttgtggactcttgaacccggtgagcgtgatgctttattggctaatgaagctacaaaaagatggacttcaagcaaccaagttcttatggaagttgcttgcacaaaggccaatcaacgcagcttgctttcaccgctaggccaagctttacccatggctccgctcacaaagaaggctcctttaaaggggcccggttgttcaaccacaaattaccccgtgactttaggaagcttttggggctttccttccnatacaggtcggagggggctnagtnacatgcatttgctaanaagnantaagtggncntggaaataaggcaantt

SEQ ID NO: 95181 - DNA, 812 bp, Arabidopsis thaliana columbia
  unsure (1)..(812): unsure at all n locations
acgcctgcaggtaccggtccggaattcccgggtcgacccacgcgtccgcactaccggtgacttcagaaagcttttggtttctcttgttacctcatacaggtacgaaggagatgaagtgaacatgacattggctaagcaagaagctaagctggtccatgagaaaatcaaggacaagcactacaatgatgaggatgttattagaatcttgtccacaagaagcaaagctcagatcaatgctacttttaaccgttaccaagatgatcatggcgaggaaattctcaagagtcttgaggaaggagatgatgatgacaagttccttgcacttttgaggtcaaccattcagtgcttgacaagaccagagctttactttgtcgatgttcttcgttcagcaatcaacaaaactggaactgatgaaggagcactcactagaattgtgaccacaagagctgagattgacttgaaggtcatgggagaggagtaccagcgcaggaacagcattcctttggagaaagctattaccaaagacactcgtggagattacgagaagatgctcgtcgcacttctcggtgaagatgatgcctaatcaatcaatcctccacagagaaaacataagctgctctacagcttctgttatctcttatctccctctctctctctttgatgagtttcaaaatcgtttgattttgtttctacaaaaaccttgtttggtttctgttngtggngttttgagttccnaaantaatgcaaaaanngggggccagagngganccnattttnggcccccttaagggttttannttatttgaangggg

SEQ ID NO: 95182 - DNA, 1427 bp, Arabidopsis thaliana columbia
  unsure (1)..(1427): unsure at all n locations
actgcgcgnnnnnnnnnnnnnnnnnnnnnnnnnnnnnnnnnnnnnnnnnnnnnnnnnnnnnnnnnnnnnnnnnnnnnnnnccacgcgtccgcccacgcgtccgtagctgcgagaagacgacagaaggggacatacacaaaacactaaaagtagaagaaaaatggcgactcttaaggtttctgattctgttcctgctccttctgatgatgctgagcaattgagaaccgcttttgaaggatggggtacgaacgaggacttgatcatatcaatcttggctcacagaagtgctgaacagaggaaagtcatcaggcaagcataccacgaaacctacggcgaagaccttctcaagactcttgacaaggagctctctaacgatttcgagagagctatcttgttgtggactcttgaacccggtgagcgtgatgctttattggctaatgaagctacaaaaagatggacttcaagcaaccaagttcttatggaagttgcttgcacaaggacatcaacgcagctgcttcacgctaggcaagcttaccatgctcgctacaagaagtctcttgaagaggacgttgctcaccacactaccggtgacttcagaaagcttttggtttctcttgttacctcatacaggtacgaaggagatgaagtgaacatgacattggctaagcaagaagctaagctggtccatgagaaaatcaaggacaagcactacaatgatgaggatgttattagaatcttgtccacaagaagcaaagctcagatcaatgctacttttaaccgttaccaagatgatcatggcgaggaaattctcaagagtcttgaggaaggagatgatgatgacaagttccttgcacttttgaggtcaaccattcagtgcttgacaagaccagagctttactttgtcgatgttcttcgttcagcaatcaacaaaactggaactgatgaaggagcactcactagaattgtgaccacaagagctgagattgacttgaaggtcattggagaggagtaccagcgcaggaacagcattcctttggagaaagctattaccaaagacactcgtggagattacgagaagatgctcgtcgcacttctcggtgaagatgatgcttaatcaatcaatcctccacagagaaacataagctgctctacagcttctgttatctcttatctccctctctctctctttgatgagtttcaaatcgtttgattttgtttctacaaaaaccttgtttgtttctgttgtgtgttttgagttcctaaataatgcaaaagagagagacagagagaaccagtgtggtctcttaagttatatatatatgaagagcattggcctnnnnnnnnnnnnnnnnnnnnnnnnnnnnnnnnnnnnnnnnnnnnnnnnnnnnnnnnnnnnnnnnnnnnnnnnnnnnnnnnnnnnnnnnnnn

SEQ ID NO: 95183 - DNA, 449 bp, Arabidopsis thaliana columbia
gttggggcgaacagactttattcgggttccatggtcaaaactataaaagtttggagtttggataatctacagtgtatacaaacactcactgatcattcatcagttgtgatgtctctcatttgctgggatcaattccttttgtcttgttcattggacaacacggttaagatatgggctgcaatcgaaggtggcaatttggaagtaacatatactcacaaagaagaacatggagtgctagctctatgtggtgtacatgatgcagaagccaagcctgttttgttatgcgcttgcaatgacaacaccttgcgcctctacgacttaccatcatttacggagaggggaaaaatctttgcaaagcaagagatacgggcgatccagataggtcccgggggcatatttttcacgggtgtcggaactgggcaagttaagatggaaatggtgcactgaac

SEQ ID NO: 95184 - DNA, 557 bp, Arabidopsis thaliana columbia
  unsure (1)..(557): unsure at all n locations
aaaacaaacaaacaaaaatatcttagtgagcttaatcaagtacagcaatggcagacgaggtgattctgcttgatttctggccgagcatgtttggaatgaggacgaggattgctttagaagagaaaaatgtcaaattcgattacagagaacaagatctgtggaacaaaagcccgattctcctcgagatgaatccggttcataagaaaataccggttctcatccacaatggtaatccggtatgtgaatcactcatccagatcgaatacatcgacgaagtttggcctagcaaaaccccacttcttccttctgatccttaccaaagagctcaggccaaattttggggagatttcattgataagaaggtgtatgcttcagcgaggttgatttggggagctaaaggcgaagagcatgaggcggggaagaaggagttcatcgggggctcaaggcacttgggtttagntttgngcaagcttcttttggggnganattcggtatgtgnaagcccattggtttcagtggttagngttaaaatttggttnncttagccgtnccaantt

SEQ ID NO: 95185 - DNA, 612 bp, Arabidopsis thaliana columbia
  unsure (1)..(612): unsure at all n locations
nnnnnnnnnnnnnnnnnnnnnnnnnnnnnnnnnnnnnnnnnnnnnnnnnnnnnnnnnnnnnnnnnnnnnnnccacgcgtccgctttcccgaagcggatctcttcgtctgtgtgatcggaggatctgcaagagttccttacccatacaaactcagagagagactgagagatattcgttacgcaatttattatggcttctgtaagcaaatcgaatcatctcgaagaagatgatgatgctgaagaagaggtgcaacatttcgatgatttcactctagcttcttcctgggaaaggttcatctcagacattgaagcaacttgtcgtcaatggttagctgatggtcccaaaaacctggtggaaaagggtgctgttgcagtggaggattcaaagaatctgtttacggtcaaacacgaacttaagaatgttgcaaagagctattgtatggagttctactttcaaattgataataatggtagccaacaagctggaattggtaattggaacagtaattcacatgatctccagctttgctttggggtgaaggattttctgttgattgctccacaaagtgccagtggggtgcttcttgatacaccagagtctagcaagcttctg

SEQ ID NO: 95186 - DNA, 1098 bp, Arabidopsis thaliana columbia
aaaaaaaagaagcttctcctcttcctctgccttcttctttccatttattgcaaaccctgatcaattggttttggtgttagtcttttggggagagagatggggagagggaagatagttatacgaaggatcgataactctacaagtagacaagtgactttctccaagagaaggagtggtttgcttaagaaggctaaagagttatcgatcctttgtgatgcagaagttggtgttatcatattctctagcaccggaaagctctacgactacgcaagcaattcaagtatgaaaacaatcattgagcggtacaacagagtaaaagaggagcagcatcaacttctgaatcatgcctcagagataaagttttggcaaagagaggttgcaagtttgcagcagcagctccaacatctacaagaatgccacaggaaactagtgggagaggaactttctggaatgaatgctaacgacctacaaaatcttgaagaccagctagtaacaagtctaaaaggtgttcgtctcaaaaaggatcaacttatgacaaatgaaatcagagaacttaatcgtaagggacaaatcatccaaaaagagaatcacgagctacaaaatattgtagatataatgcgtaaggaaaatattaaattgcaaaagaaggttcatggaagaacaaatgtgattgaaggcaattcaagtgtagatccaataagcaatggaaccacaacatatgcaccaccgcaacttcaactcatacaactacaaccagctcctagagaaaaatcaatcagactagggctacaactttcctagcaaaacatgtgggacatcgaacaatatacgaaaagagtttgtatgtcatcttcagtaacaaccaagctggatcatttcattcttggttatgtaattctgtttactactttggagtttaatatgttatatgacaagtttctctttgtcaagttacttgtgtatgtacatcataaaataatgatgtgatgtgagtgccgaacatactagacatcattttaccgtgtgtttttttcgggtacattaaatgtacaaaatccagtctaattggcatttttatacaaaaaaaaaaaaaaaaaa

SEQ ID NO: 95187 - DNA, 973 bp, Arabidopsis thaliana columbia
  unsure (1)..(973): unsure at all n locations
ccctaatacgccccctcgagatgatggctcttctagccattgatctcgatatgtttgggcatggatcgacggggcaagtattgggccggaccgatgtggatcgggttgagtatgtgcggatcgggctctgataccatattagagtgtaggttaagattattcaaacttcaaaggcaaaaccaaatgagcttcgtgtggtccgctgcggtgtgggtcatagctgtagccgctgttgtgattagcaaatggttataccgatggtcgaacccgaagtgcaatggcaagttaccaccgggatcaatgggtttaccgatcatcggagagacatgcgacttctttgagccccatggattatacgagatctcaccctttgtcaagaagaggatgttaaagtacgggccattgtttcggacaaatattttcggatcgaacaccgtggttttgacagaacctgatatcatcttcgaagtttttcggcaagagaacaagtcttttgtgtttagctatccagaagcttttgtcaagccatttggaaaagaaaacgtgttcctcaaacatggaaacatccacaagcacgtcaagcaaatcagtcttcaacatcttggctctgaggctttaaaaaaaaagatgataggagaaatagacagagtaacctatgagcatcttagatcgaaggctaaccagggtagcttcgatgctaaggaggcagttgaaagtgttataatggcgcacttgaccccaaagataataagtaacctcaaaccagtaacacaagcaactcttgtggacaatataatggccctaggttctgaatggtttcagtcacccttgaagcttacggctttgcatttctatcctcaaaggctttatttcaccgtgaggcggcctnccngggtgttaaggncggtttnncggggnggaaangncccngnaatttccggggcttcctgcanattgtggaggggggggnaaa

SEQ ID NO: 95188 - DNA, 435 bp, Arabidopsis thaliana columbia
caaagttcatataataagaaaaacagagagaaacacacagagagctagaggagagtgagtgtcaggggttgtgttcgctgcggagcatcatatccatggcaaacatctgccaatgcctttgaatccgtcgatgaatccggaatcaactgaagcctgggttgagatctccagccgcagatcatttgtcgccggcgaaggtagtcggaagaagctagagaggaagaagagccaagtgttactggaaggttacgttgagactgcttcttcttcctcggtggatgatcaaaaggacgatctgacgagatccaagagtttgacggatgacgacctcgaagatcttagaggttgtttagatctagggtttggttttagctactaccagatccctgagctctgcaacactttacctgctttggagctttgctattcaatgag

SEQ ID NO: 95189 - DNA, 824 bp, Arabidopsis thaliana columbia
agactgaaaaaaatggcgtgcttcatcatctcatctcttcgcactcccttcgcctgcttctccgtttctatctgcaccaaaccggaatcgagttcgtgttcttgcgaaatcatgcccggagaatcagagcttcgactccaacgattcggattcttcctcagagactacccacaaagcccagggagatcagaaatcagtgtcacggagacagtggatgacggcatgtgtgtgcgcatctgcagctttaattagcaattcttatacctttgtctctgtacaaagcgcagccgctttagacaagaaaccaggaggttcatgtcgtaactgccagggcagtggtgctgttctttgtgatatgtgtggtggtacaggaaaatggaaagctctcaaccgaaaacgtgcgaaagatgtatatgagtttacggaatgtccaaactgttacggtcgaggtaagcttgtttgtccggtctgtttaggtacaggtttaccaaacaacaaaggccttcttagaaggcctggtgctcgtgagctactcgaaaagatgtacaatggtcggcttcttcctgattcatgagaagattgttactgcaaatatgattttaagcacagagccagtagacatgatgatagaagcggatgaaaacttacacattgaggatgcatggaaagctatagaagaatgtatcgaattcaacatgtttttataatgctgctaggtttgtgttgtaaattctataaacataaaactttccttcttccccatacagactagacgaaaagatttcgactaagataaaaaaaaaaaaaaaaaaaaaagggcggcc

SEQ ID NO: 95190 - DNA, 415 bp, Arabidopsis thaliana columbia
aagagagtgagagtgacggcgaggaagaagagaaatgtggttcgccggcggtggtggtggactgaggaagctctgcagagcgtcggctattttcgataatgagataagttataactctttgttggtgagatacatgtccagagaacgagctgtgaacgtccggaagataaaccctaaagttccgatccaagaagcttacgccatttctaattctctctacgatctctttaagctacatggtcctctctccgttcccaacacttggctccgcgctcaggaagctggggttagtggactgaatagcaaaacacatatgaagctattgttgaaatggatgagagggaaaaagatgctcaagttaatctgcaaccaagttggttcctccaaaaagtttttccacactgttttacctgaa

SEQ ID NO: 95191 - DNA, 818 bp, Arabidopsis thaliana columbia
ttccctaccaaaggttgataaggttttttattcttttcagcgctcctgaagccaagagctgggtgtccaagctcagctccttcagaacatcgtatttttgccagtcctcttgcaagaaagttggctgaagattataatgtacctctctcaagcattaggaggcacaggtcctgaaggacggatagtgaaggctgatgtcgaagatttcttagcttcaggcagtaaagaaactactgccaaaccttccaagcaagtggattcaaaggttccagctcttgactatgttgacatccctcacactcagatacgaaaggtcacagcctcacgtttggcattctcaaagcaaactattcctcactactacttgaccgtggatacatgtgttgacaaaatgatgggtcttaggagtcaactcaattcatttcaagaggcttccggtgggaaaaggatatctgtaaatgatcttgttattaaggctgctgcactggctcttcgaaaagttcctcagtgcaatagttcatggacagatgaatacatccgccaatttaaaaatgtgaacatcaatgtcgctgtacaaacagaaaatgggctctacgttcctgtggtcaaggacgcggacaagaaaggactgtctacaattggagaagaggttcgattcttggctcaaaaagcaaaagaaaacagcttgaagccggaagattatgagggaggaacattcacagtctccaacctggggggaccttttggcatcaaacaagtctgtgccgtcatcaatccacctcaagcagccattctagcaatcggatctgctgaaaaga

SEQ ID NO: 95192 - DNA, 794 bp, Arabidopsis thaliana columbia
ggctcttcagctaggacttctagtattagcaaaaattaaagggtatggtgacgcagctcaggaaccagagtttttcactactgctcctgctcttgctataccaaaagccattgcacatgctggtttggaatcttctcaagttgattactatgagatcaatgaagcatttgcagttgtagcacttgcaaatcaaaagctactcgggattgctccagagaaagtgaacgtaaatggaggagctgtctccttaggacaccctctaggctgcagtggcgcccgtattctaatcacgttgcttgggatactaaagaagagaaacggaaagtacggtgtgggaggagtgtgcaacggaggaggaggtgcttctgctctagttcttgagctcctttgatgcattatgaatccaggttggtaacctaaatagatggatctatctctcatccaacttccatgagtcagtcattgcactttacgttttatgttagttggtctcccaataaaggagtgatcgttgatgttgttaagtctatttatttatatgaactcggcttctttttttctcttaccggtgacagtcagttattgaatcatggaccgatttaccgtagttaatgatttatcctcatgtactcattaaaacgtcgaccaagatttgacatttgatggataaatttaagtacacaatgtgtatgtaagacaagaaaataataataattggatatttttgtaaaaacaaaaacttaagggcgaccgctctagaggatccaagcttaggtaggcgtgcatgcgacgtc

SEQ ID NO: 95193 - DNA, 608 bp, Arabidopsis thaliana columbia
  unsure (1)..(608): unsure at all n locations
ccngaccgntttcnnctgcctnctnttnccaaancnntcncntctngttgganctccaattgattctatgnnncaatgaancattgcattgtagcacttgcaaatcaaaagctactcgggatgccccagagaaagtgaacgtaaatggaggagctgtcctcccttaggacaccctcctaaggctgcagtggcgcccgtattctaatcacgttgcttgggatactaaagaagagaaacggaaagtacggtgtgggaggagtgtgcaacggaggaggaggtgcttctgctctagttcttgagctcctttgatgcattatgaatccaggttggtaaactaaatagatggatctatctctcatccaacttccatgagtcagtcattgcactttacgttttatgttagttggtctctcaataaaggagtgatcgttgatgttgttaagtctatttatttatatgaactcggcttctttttttctcttaccggtgacagtcagttattgaatcatggaccgatttaccgtaaaaaaaaaaaaaaaaagggcggccgctctagaggatccaagcttacgtacgcgtgcatgcgacgtcataacttcttctatagt

SEQ ID NO: 95194 - DNA, 467 bp, Arabidopsis thaliana columbia
ggctaaacgttttctgcttcttcttcctcttttgtcatctattcttcttcttgccgtgtccggcgcagcttactccacaacggcgccgtatcaaggctacaagccggagaaattcacccacctccacttctacttccatgacgtcatctccggtgacaaacctaccgccgtcaaagttgccgaagcccgcccaacaaccaccctcaacgtcaagtttggcgtgattatgatcgctgatgatccgttgaccgaaggaccagacccgagctcaaaggaagtgggaagagctcaggggatgtacgcatcaacagccatgaaggacatagtcttcacaatggtctttaactatgttttcacggcaggagagtttaatggaagcaccatcgcggtgtatggacggaatgatatattttcgaaggtgagagagttgccgattattggaggaactggtgctttcaggtttgcta

SEQ ID NO: 95195 - DNA, 428 bp, Arabidopsis thaliana columbia
  unsure (1)..(428): unsure at all n locations
ggcgcgatggtgcatgcattcgagtgcttattctacaatacaatgtcggagaaggaccaaaggatggcgcgcatcatgcccgccaccttgtcacagaaaattgccaaactgtacccatttgtgtccggagatatgtcatcctgggcagtgtccattgccagagaagtgtggttaaaaggtggttgttcgttgcaagtgcctaaccttgaagaaagaatgggtatgccaggatgttcaagcagcccatagggccacaggttctgatcctaaagaagtaccaaagaacccgttcggtgttggcctcctcccttgtcattccaatctttaatttctttttcttgtttctaattattttttacacaattattcttttatataannnnnnnnnnnnnnnnnnnnnnnnnnnnnnnnnnnnnnnnnnnnnnnnn

SEQ ID NO: 95196 - DNA, 524 bp, Arabidopsis thaliana columbia
  unsure (1)..(524): unsure at all n locations
gattccaacccttaataaaaagattggaaattaccctacaagtgacaacagtggaaccaaaataaagaccctaaaaccctataaataatactaccattttagtaaaatcctaatgtagataaacaaccaaatcaaacttgttaacagaaaatacagagaaagattggatttcaagttacattgacattaatatcggtatgcttgtttcttggatcggaagctaaagaagtctgccatgtattattattgaccggaagagacgagaccgaatggattgtccggtgatcagctgcactagagataggaattgcagcggtaggactcgacaacatgaaatcatgtttgttctttttcggtttctgatcttgatggtcagtgcccgctaaaaaacttcctacaaccacctgaaccggactcgcggctactagtaaaccggcgaggccaccgcctactacacgtncatcgngacttgctaacgatacactcattcctcccgttctacttcgtgttccgcctgaatcatt

SEQ ID NO: 95197 - DNA, 622 bp, Arabidopsis thaliana columbia
  unsure (1)..(622): unsure at all n locations
ctatgacgacgcatgcacgcgtacgtaagcggtggaaaaaaccagaaaatggggttgcatccaatttccgacgccaatgaacacaatcccttcggctctctcaccgccgacgaattctacgccaaacattccgttagccactcctccgctttcatcaccaaccctcgcggtctcaaactcttcactcaatggtggtcaccactccctccaactaaaccaatcggtatcatcgctgtcgttcatggcttcaccggcgaatccagttggttccttcagctcacatcaatcctcttcgctaaatccggtttcataacctgcgcaattgatcaccaaggccatggattctccgatggactcatcgctcatatccctgacatcaatcccgtcgtcgatgactgtatctctttcttcgatgacttccgtagccgtcaaacaccgtcagatctgccgtgttttctctactctgaatccctaggnggggngattgcncttctaaatttggttngnnaaaaanggtttttngggtgggctttntcctaaagggggnttttnttnggaatnaagggtaaatttaaaacccgcngggccntttggggattttatnttgggggggggaattttt

SEQ ID NO: 95198 - DNA, 477 bp, Arabidopsis thaliana columbia
gtgagcttcgccgttaaactttctccggtaccgggaaattaacgaagaaagcgaaaagtcactgttacactaatatcacaaatctctctctgtctctctctctctctttgtcgaagtcgtgcgtgatgctagttacggtggtgaagcagcggttagtgtactctcgccggagaaattggttatgaccggaatctcacctccgtgatcgaagaaactgttttcgtttttttatcgttacgaagaaatggaaaaacaggcgaagctaacgaggacacagtcgtcgttactccggtcatcgtcgaatctccgttcgtcatatcaaagcttatcttcaatcgtcggaggcgagcaagatctatgaagccggagagaaagaagggaaccagggaggaaaaccacctaaaccattcggttcaccaaatcctaaaaccggtttaaccagaatcaatccccggttagctttcacaatggtatctc

SEQ ID NO: 95199 - DNA, 516 bp, Arabidopsis thaliana columbia
  unsure (1)..(516): unsure at all n locations
ttccggcttnttcgggctctnactgctcctgacttccctgttctaggntttacgtnccccattaaggctctgtcaaaagcttttcccagngattttacttgccctgcagatcccaactttgacttgagctccaccatcaaattccccgtcaattggaatctctggattcaaagggaaatggtagcaagacagttacaaggaaccagtgaccaattgttggtgaggacggtgaggcggtttacacagtcagcgtggaaacaccaccagggtttaacattcaagtgacgccagaaaaactccaatttacaaaagatggtgagaagttgacataccaggtgatagtgtctgctactgcttcacttaagcaagatgtatttggggctcttacttggtctaatgccaagtacaaggtcagaagcccaattgtaattagtagcgagagtagccgcacaaactgagataaaatggtataaagttcagcatgaatatggaataataaaaattaatgaaccgatg

SEQ ID NO: 95200 - DNA, 455 bp, Arabidopsis thaliana columbia
gcaaaacacataacacaatgggggcaccaatggcctctttccttgtcttagcattctcccttgcttttgtctctcaaaccaccgcaaattacttctactcttcccctccaccaccggttaagcattactctcctcctcctgtttacaagtccccaccaccaccggttaagcactactcgcctcctcccgtttacaagtccccaccaccaccggttaagcactactcgcctcctccggtttacaagtctcccccaccaccggttaagtactactcccctcctccggtttacaagtctcccccaccaccggtttacaagtctcccccaccaccggttaagcactactcccctcctccggtttacaagccactccccaccaccacccaagaagcactacgaatacaaatctccttctccttcggtccattactcttcacctacgggataccattcttc

SEQ ID NO: 95201 - DNA, 431 bp, Arabidopsis thaliana columbia
  unsure (1)..(431): unsure at all n locations
aacagaaatttcgcaggttgcctccgttgtctgaaggatctttggagaaggaaggnaaacaacaacaacggggggggaaaccaaaaagggggggggtaaaacaaaaaaaatgtctttcacaggaactctcgacaaatgcaatgtttgtgataagacagtctatgtggtggacatgttgtccattgaaggaatgccttaccacaagtcttgcttcaggtgtacccattgcaaaggaacccttcagatgagcaactattcctccatggacggagttttgtactgcaagactcattttgagcaactcttcaaggaatctggcaatttcagcaaaaactttcaaccaggaaaaactgaaaagccaaaactgactaggactcccagcaagatatcttccatcttctgttgaacacaaaacaagtgtgccgctttcg

SEQ ID NO: 95202 - DNA, 962 bp, Arabidopsis thaliana columbia
gagcattcgaaaagttcgccggaaaaacaaaaacatgccgacgaacaacactccgttcctcgctatttttctcctctttcggggcttacgtcgcggttcgattcatttcccgggttagaagctgcaaccgggaaattagcttcgattccaggattatacgtgttcggagattcgttagttgatgccggcaacattaattactcaccaactccaatttctaaagctaattatccacataacggcgtcgattttccgaacaagaaacctaccggaagattctgtaacggcatgaacgccgccgatgctatcgctgagaaaggtggtttacccgtaccacctccctatctctcacttagaggcttactaaaaagggagaagagaaaatctgccgccgtgactggtgtgaattttgcttccggtggagccggaatcttcaacagttccgaccaaaaacttggacaagctattcctttatccaagcaagtcaacaattggctctctattcatgaagaagtcatgaaacttgaaccatccgcagcacagcttcacctatccaaatctctattcactgttgtcataggaagtaacggtcgtttcgattactttggatcgttcaaactccgacgccagagcaatcctcaacaatatacacaattaatggctgataaactcaaagagcaattgaagagaattcacgatagtggagcgcgtagattccttatcatcggggtagcacaaattggttgcacaccgggaaaaagagcgaagaactcgacactccatgaatgtgacgaaggggcaaacatgtggtgctctttgtacaacgaagctctagtaaagatgctgcaacaactcaaacaagaattacaaggctcaataacttacacttactttgataactacaagtccttacatgacattatttccaaccctgcccgttacggttttgctgacgttacatt

SEQ ID NO: 95203 - DNA, 621 bp, Arabidopsis thaliana columbia
  unsure (1)..(621): unsure at all n locations
acggtcatgcgatnaagcttgatcatcgaattacgcggccgcagcttgggttcgagaagcagtctcggccaacatccccaaaaccagaactgaacaagatccagagacaacaactcagtaggcaacagacagagtcagcctccccgagaagaaagccagggataaaatctcgtggcctacagcaatctgaagaccgtttaagtgatgaaagcagtgacttgagaagtctaagatctgacagcaacgtaagcttggcctctaaccttgatactgaggttacaagcaggtataactatgagaggaacagcgacattacggagcagcacaccccgaaacaaaggagtccagacttgggaatgaggtcgctgtcaaaacctctgaaagttacagtggagcagcccagcccggtgtcagttcttgatgtagctttcgacgaagatgattcaccatcccctgtgcggaagatatccattgtcttttaatggggcggcaatcttaggttnttnnaggggcccntttggttgncaangncaacnacctttttttnggtcggttttttttgccctnngggnnannccgggtttnttgaaccctnnttgtttnccttccgggggggttttt

SEQ ID NO: 95204 - DNA, 492 bp, Arabidopsis thaliana columbia
ccgtttcattagaagctcaaatttcaaatctcacttccttatcacaatgtcttcctctatctctcccctcctcacaaccgccatctccgtcgcaatcctcctctgctccaccatctccacagcggcgacaattccaaacatccaccgtccattcaacaaaatctacgccttcggagattctttcaccgacaccggaaactcacgctccggcgaaggaccagccggattcggacacttgtcaagtcctccatacggcatgactttcttccgacgaccaacaaaccgttactccgacggtcgtctaaccatcgacttcgtggcagagtcaatgaatttaccgtttctgccaccgtatctcagcctcaaaaccactaacgctaacggcacagcaacggatactcacggcgttaatttcgctgtctctggatcaacggtgattaaacacgcgtttttcgtcaagaacaatctgtcgcttgatatgactcctcagtc

SEQ ID NO: 95205 - DNA, 854 bp, Arabidopsis thaliana columbia
  unsure (1)..(854): unsure at all n locations
ggacgaagcttctgcggtcctcatctccaagagaactcttttattagcgaaaaatcagaaggacgcagcgatatgcgtgctacagtagacgaaagantcaaagacattgctttgaaattcggntcacaagtgccaaaatcaaagctttatagcttccctaaggaactatcatccctcccagaactcctcttccatcttagaaggggtcctttactgggaaacatcattggtcatgaagatgaaagatcggtgctacgaaatttgtttctaaacgcatctttcgatctgtctcttcgtatggtagcaccccgttgcttgatgcaccaagaaggtggtacattcgaggaactaccagcgtatgatctctctatgcaatcagataaggctgttattcttgaccatggcacagatgtatttatttggttgggagccgaactgtcagctgacgaggtgaagagtgctgcagtcttagcagcttgcagaacgttagctgaagagctaactgaattccggttttcagctccacgtattctcgcattcaaggaaggaagttcccaagctagatattttgtttgccggcttataccagcacataaagaccctccttatgagcaggaagcaagacttccacagataagaacattgacgacagagcaaagaatgaaactaaagagtagttttatagagtttgatgaagccagtttctgcgaatgggatgaggagtttgaaagtagtgcctcctgagnccaggtagtcataccattttatccttgctcancgtttttttgccgcctttactggcagacatttttggccccgggncccttggtttanggtccctaaaananccnggc

SEQ ID NO: 95206 - DNA, 780 bp, Arabidopsis thaliana columbia
  unsure (1)..(780): unsure at all n locations
cccggggtccggggacatttgagggaacttcccgggggatgttctttttaggcaaataaataaggggtgttttgtgctgggccagggcccagaggtgtcgatttggttgggagccgaactgtcagctgacgaggtgaagagtgctgcagtcttagcagcttgcagaacgttagctgaagagctaactgaattccggtttccagctccacgtattctcgcattcaaggaaggaagttccccagctagatattttgtttgccggcttataccagcacataaagaccctccttatgagcaggaagcaagatttccccagataagaacattggcggcagagcaaagaatgaaactaaagagtagttttatagagtttgatgaagccagtttctgcgaatggatgaggagtttgaaagtagtgcctcctgagcccaggtagtcatacattttattcttggttcatcggttttttttgccgccttttactgtcagaacattttttttgttctctgggagtcttttggttttaggattctctttaaatgatctccagttctttcaagtgaattatatactttgtccggtacagcaaaataatgtgtaaagatgttgaccgtgatttttatttttaccctttttcagtcgatgttaaaaaaaaaaaaaaaaaaaaaaaaaaaaagnnnnnnnnnnnnnnnnnnnnnnnnnnnnnnnnnnnnnnnnnnnnnnnnnnnnnnnnnnnnnnnnnnngaacgaaatcacaggcntttctaccgtggggggggg

SEQ ID NO: 95207 - DNA, 819 bp, Arabidopsis thaliana columbia
  unsure (1)..(819): unsure at all n locations
aaaaaattgttatgcaaaaagatttgtttttttcattggtcttcttctactacacgcatttgggtcagcagagagagtgggttcctcagctcggcgattcaattctcagaagattatggctttcgctactggaatcacgacgtcttcaaatccaacttttcttggtctaaagatctccaacacaagtctacgttctgtggtttcatgtaattcgatttcgtttccttctttgtcatatgtgaatctcaacctcaatcggagaaaccgcctttctgttcgatccgcttcggttccagctgcacctgcaatggagggactgaagccggcgatatctctgtcagaaaatgcacttaagcatctgagtaagatgagatcagaacgtggggaagatttgtccttgagaattggagtccaaacaaggggggttccccgggtatgtcctacaccgatggactttgaaaacagggcaaatgcaaggcccagatgattcccccttcggattcccagggattcactatagtttgtgatcccaaagagcatgctctttcttttcggaatgcagcttgattaccagcgatgctttgattcngtggaggcttctctttctcgaaccctaacgctacacaaacctgtggatgtgggaagtcttttgctgccgagatgtgaaccagtttcacacattgcagtagataaacaatatagttatagttaatagaaaactttgtattatggttgtagaatgctcaaacagaatctgtaagttttttttaaaaaattgtatgatcaaaccataattttaataaattattcaacctggtt

SEQ ID NO: 95208 - DNA, 873 bp, Arabidopsis thaliana columbia
  unsure (1)..(873): unsure at all n locations
ttgaaactcttgacaagagctatgattatacttacaaactgacatttgcgatatctgggggggatgttgtacaagtgggcccaggtattctcctaccacgggatcttgagcgagctgaactttctttctctgcttggaacgggataagtcaacccagtgagtttgatcttgacataaagcttccaatttcgtctctctgtaagaagcctatcctcttcttcttgaaagaggttggccaagaaggtaatgctacacttggaacgtactcaagatccttggtaaaggatgatttgaagacgaagcttctatggtttccacgctctctacctctgcacaaatgtggataaaatccaggtctcagggtttcctctgagtaaaaattggcacttggcgccgagacggttgtgttgcagggcaaccccaactactactaacgagcctctcagattaacagttgggcagtgtggtaagataattttgggttccacgattagttctcaatgaacacttatggtgaatactggatctctctaagcatgttgtttcagctctatcctgtacttgtacataggtaagatccagaaccttgactgttgtctgacctagaatgctaatatgcccaaaattgaatttgtcactcttttgtttgttccatgttccactttctttttttgtacatctgagatttcacgaactcaacatttcctgttgagaaacgagtgtaatgtgtacaacaacaaatctttaccagtgaaacctatccatctgtgtgttaagtaagaaaaaaaaaaaaaaaaaaaaagnnnnnnnnnnnnnnnnnnnnnnnnnnnnnnnnnnnnnnnnnnnnnnnnnnnnnnnnnnnnnnnnnnnnnn

SEQ ID NO: 95209 - DNA, 740 bp, Arabidopsis thaliana columbia
  unsure (1)..(740): unsure at all n locations
aatggcctttcccggagactacgttaatgctctgtagtgctaaatttgtgaagcggtaatcacagatcatgcttctttacgaggctacaacccctcttgatgcagagcccaagaggtcagcccaagaagcattagcccaggcttgccctggtagaacatcaatagccgtggctcataggctacctacaatcaggaacgcacacgtgatcgctgtcatcgatgatggaaaagtggctgaacaaggatcgcattcgcatcttctcaagaaccatcctgatggaatctacgcgcgaatgatacagttgcaaagatttacgcatacacaagtgattggtatgacgtcaggttcaagttctagggttaaggaagatgatgcttagtacttactactttggtcatatagaagaaaaaagaaggagagtaaaaaacaacaaacaccagaagatgtttctgataaaaaactctacgaactcatcattttctctttttttctttctgttttgattttggggttacttatttttggaactacgtttcagatttgatggtatagtattattattgtgtattatcataattaatctaatttttcacctctgtaatatccatttatatgccatatcaatctatgagcctctgcctttctagtgaaaaaaaaaaaaaaaaagnnnnnnnnnnaacnnnnnnnnnnnnnnnnnnnnnnnnnnnnnnnnnnnnnnnnnnnnnnnnnnnnnnnnnnn

SEQ ID NO: 95210 - DNA, 375 bp, Arabidopsis thaliana columbia
  unsure (1)..(375): unsure at all n locations
cgagctcacagtttcttcgttggggatcgaaatcgtgccatttgagttagcctctgtatagatcgatggctagcctgagaagagctctgctcgtagcagggaagacgaagagcagccgtagaaaactgccatttcatcaccggaatcaactacaacggtctcagcgtgaagcaactacaagagctccgtggaatcctccgtgaaaacacaaacacgaagctcctcgtcgccaagaacactttagtctacaaagccttggaaggaaccaaatgggagtctctgaagccatgtatgaaaggtatgaacgcttggctattcgttcaatctgaagatatacctgctgctttgaagactttcatcaattntcagaaagag

SEQ ID NO: 95211 - DNA, 332 bp, Arabidopsis thaliana columbia
ggagaatattctgctttgttccactattgaccctgaagcagatgctcggaaatcggggattcctctggttcttccaactgtgaaggacaaggctgttcctgagagaccagttgaaaaagagaaacctaagagttatacgtatagtgcggatttgactaagaatcagaagaagaagatccgtaagaaagctaagaaagtggaaggttcagaggaaaatgagagagactcttctaactctgaggcaagaccaaatgggaatgcaactgtggagaggttggaagagaagtctgaaagagtaaaagatgcagagaatgttagtcaaaagagccggg

SEQ ID NO: 95212 - DNA, 608 bp, Arabidopsis thaliana columbia
ggccgagatgagttatcttctgaagacgttaacgacgaaggaagagattgatcgggttatcagagacaccattgatgaagttcttgttttacgatttggtcgttcctccgacgccgtttgtcttcagcatgatgaaatccttgcgaaatcggtgagagatgtttcgaaatttgctaaggtagctttggttgatgttgattcagaggatgttcaagtgtatgtgaagtattttgatatcacgttgtttccttcgacgatcttcttcttcaatgcgcatcatatgaaattggattctggaactgcggatcatactaaatgggttggtgcatttcatataaaacaagactttattgatgttgttgaggctatatatcgaggagcaatgaaagggaagatgattgttcaatgtccaataccgccagagaggataccaaagtaccagctcgtgtacaaggatgtgtagacactaaagtttgttgtgcttacaatacaaaatctgtttctcatcttctgtgttggcaataatatttacatttgacattttgagatttacagttatgtttttgtacaaagttgaagaatgagaataaatatgcagatttttcgat

SEQ ID NO: 95213 - DNA, 435 bp, Arabidopsis thaliana columbia
caatcaaacaaaaaaaaatcatcgctcccaattttacattcttcttctcgccaaaccctaattgtttcgatttctgctacattcttccggaaacttgttctatctctgacggatctcgaatcggtattctcagctgctgaaatctccggggaatgcagagaacgttttgctgcgaggtggagaacggttggaaggaatccctctctcaagggattgttatcgtaggtcctaaagcaagaactagggacaaaccttgggatattctctaatctttcatctttgattaggacagcaaagacttaagaagcagcatgactcggattttggttcaaagaggttcatcaggcagttcttccaactctagccggccttcttcctcatctaggtcttcctcgggatcagaaacacagattaacaataattttccgggtcctc

SEQ ID NO: 95214 - DNA, 617 bp, Arabidopsis thaliana columbia
ggggccgcaaaaaatggactaggtagtaccgtgataagtcacatctaccacacggaaccgaaacgcaaacccagaaaagacatggtcctaaattcccaaacaaccccttcgtctcttacatacaccatttcccgatgatcaagaaggaaattcatgaatccgtaagccacacaataataatattaataatcattcactaatatataaattaaaagatgaaaaaaaaacgtaaaaaaaaaaattgaggttcagattttgatttgaggagaggaataatctctctgatcttcttttacaacacatcaccaaatcaaatccatgtctctccgaccaatctctcttccgatcggagcttttgaaccaccacaagtttttcaacggttgagatcgaatttttaattttttaaactttgaccattttcgcagccttgaccaccggatttcctctagcgatcgcctcacgaccagcggttttgtagtcgtagctacaatcatgacgatcggagttacggtgctctgagcagaaaagctcaccgcatcggcacctgaatccggtcaacccaactttcttccgacaaccaaaacatcgggttacgatctgttgatctctcttcttc

SEQ ID NO: 95215 - DNA, 810 bp, Arabidopsis thaliana columbia
  unsure (1)..(810): unsure at all n locations
tgatactccagctctcnnnnnnnnnnnnnnnnnnnnnnnnnnnnnnnnnnnnnnnnnnnnnnnnnnnnnnnnnnnnnnnccacgcgtgcggttttcccggcggcggctagataatactggtttctgccagcaagatcgaaggagataaacttcgtaatcaaaaagtctccttctgataaaaagatgtcagaaaacacaaaagtcgaagcgaagagagtgttcataggagcaggatgcaacagagtcgtcaataacgtctcttggggagcttctggtcttgtctctttcggtgcccaaaacgccgttgctgttttctgccctaagactgcccagattcttacaacgctcccaggtcataaagcttctgtgaattgcactcattggttacccacttccaagtttgccttcaaagccaagaaattggaccggcaatatctgctatcaggtgattcagatggtatcatcatcctctgggaactatctactcttaataacgatcaacagtggagacatgtactacaactaccactgtctcacaagaaaggtgtaacttgtatcaccgcttatatggtttctgaaaccgatgcaatgtttgcttcagcttcttctgatggagttgtgaatgtctgggatgtttcttttccgtctcagcctagtgaggaatgtaaagtggtgtgtctggactctatctgtgttgacactaaagcaattgtaacgctttcattagcggaattgcctcaaaatcctggtcgatttgcccttgctttgggcggattggacaacaaaatcaaactttactctggagaaaga

SEQ ID NO: 95216 - DNA, 418 bp, Arabidopsis thaliana columbia
catatatacatcgaaaacaactaagtataaacaatagtcatggctaagtctgctaccatcgttactcttttcttcgctgctcttgttttctttgctgctcttgaagcaccgatggtggtggaagcacagaagttgtgcgagaggccaagtgggacatggtccggagtttgcggaaacagtaacgcgtgcaagaatcagtgcattaaccttgagaaagcacgacatggatcttgcaactatgtcttcccagctcacaaatgtatctgctacttcccatgttaatctaccaagagctcttaatgcttaattataaagtgtgtatttctattaaataagtatgtgtcactctatgagaggtcttatgacatgtaccagatatgttatgttgctttgttttaataaggtaaacttttacggt

SEQ ID NO: 95217 - DNA, 555 bp, Arabidopsis thaliana columbia
ggtgagactcactgttacccccagtgaagaaggtatcctcaaaattgtcggtgtaaggtgggagttgtctggttccatcgtaggtgtgcattacttccaatctgtgtctgtcaaggcaaaaactgcgagaggaagaaggaaaaacaaacttacacccactgatgccttgaaatttttagtcatcaagagtctacccaggcttgagggttcaattgatcatctgcctgagaaattgtatgctggagatttacgttatcttgttttagagttaagaaataagtcagaatccccaacaaagaatcttaaaatgaagattagccatccaagatttgtaagtcctggaaatcatgaagaagagctgacaaccgaatttccagattgcttaaagaagggcgatgaacataatattgttcagcgtgaaagtaatagaacaagtagtgtatttgcatttccaaaggatgtatcactgcaaggagacagatcattaacgtggcctctttggcttcgagctgccatcccaggaacaatatctttgtattttacgatatactatga

SEQ ID NO: 95218 - DNA, 665 bp, Arabidopsis thaliana columbia
cttttgcatcattcttacaaaatccccaaaatcattcgaaacccctgagtattctccttaactctaagaaataaatttctgaatggatgcatcgtcttcaccgtctccttccgaggaaagcttgaagcttgagcttgatgatcttcagaaacagctgaacaaaaagctgagattcgaagcatccgtttgttctattcataatcttctccgtgatcactactcttcttcctctccttctctccgcaaacagttctatatagttggagtctcgtgtcgctacggttcttaagacaagatatacagctactggattttgggttcctggactgagtcttttcgaagaggctgagcgacttgtctctgatccttctgagaagaaacatttgaaatcttgcgttgctcaagctaaggagcagttaagcgaagtagataatcagccaacagagagctcacaaggttatctttttgagggacatcttacggttgatcgtgagccgccacagcctcagtggctagtacagcagaatctcatgtctgctttcgcttctattgttggtggggaatcctctaattggcctactgaaaacactattggggaaaccgctaacttgatgcaagaacttatcaatggtcttgacatgatcattccagattttcttgatgat

SEQ ID NO: 95219 - DNA, 493 bp, Arabidopsis thaliana columbia
  unsure (1)..(493): unsure at all n locations
ccacgcgtccggtttttcaagtttgtcgttgcaaacccactctcagtgaggaccaaggttcgagttgtaaaggagacgacatttttagaggcttgcattgagaaccatacaaaagcaaacctctttatggaccaagttgattttgaacctgctaagcaatggagtgctgtaagattacagaatgaagactcaacagaagatcctccaaccagtggtctgagtggactgatacctaaaccgccagttataatccgatctggcgggggtatccacaactatctctacaagttaaacccatctgcagatgtttccgggcaaacaaaattccagggaagtaatatcctgggctaaatttcaaataacatggcgcacaaatttgggtgaacctggtcgcttacaaacacaacaaattctcggcgcgtcccgtaagccggtaaaggggttaatttgcgggttgtagggggttccncctgtttttcnntttantaggncc

SEQ ID NO: 95220 - DNA, 549 bp, Arabidopsis thaliana columbia
  unsure (1)..(549): unsure at all n locations
gctttttcctcctcctcctctcgcttcttcttcttcctctcgaatctgcttttcgcagtctatttcgtcatcgtaaattcggaagctttcgtatttaattaagcaaatggcttcgtattactctggttttttgggttgtgaagagccacactttttggaatcgtgttctctttgccggaaacaccttggtcttaactccgatatcttcatgtacagaggagacaaggctttttgtagcaacgagtgtagagaagaacagattgaatctgatgaagctaaggagagaaagtggaaaaaatcttcaagatctctccggaaaaattcttctgaaactaaagaatccgccgccggaaacaccgtacggacaggaactctcgttcgtggcttagtaggagcttcagttacataatcaagcaaataggctttttttcctcccatataaaaaccctttttggtctaaaacctttanaccccccttaaaccccttttttcccccaaggncnctaaaaaggtttcccccgntccnattgaccttcnnatgggncgggg

SEQ ID NO: 95221 - DNA, 660 bp, Arabidopsis thaliana columbia
  unsure (1)..(660): unsure at all n locations
atacgactcacctaggggaactactacgcctgcaggtaccggtccggaattcccgggttgacccacgcgtccgcccacgcgtccgtacggctgcgagaagacgacagaaggggactgatggcttcgctcaggctccccgctcaactagttacacgtggcaatctcatccaccacaactcttcatcctcctcctccgggcgtctgtcttggcgacgttctctcacaccggaaaatacaatcccgctcttcccatcttcctcatcctcatcccttaaccgggaacgatcaatagtagttccggttacatgcagtgctgcagcggttaatcttgctccggggacaccagtccgacccacgagcatcttggtggttggagccactggaactttgggaagacaaatcgtccggagagctttagatgaagggtatgatgttaggtgtttggtccgaccaagaccagctcccgccgatttcctccgtgattggggcgccaccgtagtcaatgcggatcttagtaaaccggagacaatttccggcggcttttggtcggggttcaaactttaatttaatttttccacggnccgnccttaagganccttttaagncggtaangtttgggaaggnaaagttncntngtanaatttgcaaagggaatgggga

SEQ ID NO: 95222 - DNA, 834 bp, Arabidopsis thaliana columbia
  unsure (1)..(834): unsure at all n locations
cttgacattgatgatgtaccaggaactaattaatcactaccgttgattcaagagatttctatgagagatttgattggtcgcaagggagaagaaaccatgtctcacattggattcactaagctaatggtctcaatgggtcaccaagcaagtggtgcccttgaactgatgaattatccgatgtggttaagagacattgttccccacgaccccaacggccaagctcgtccagaccacgtcgacttagctgctttagagatctacagggacagggagaggagcgtcccacggtacaacgagttcaggagatctatgtttatgattccgataaccaagtgggaagatctaacggaggatgaggaagctattgaagtgttggatgacgtgtacgatggtgatgtggaggagcttgattcttcctcgtgggacttatggcagagaagaaaatcaaagggttttgctatccaagtgagactgccttttttacaattttcctcatcattgggccacaaggcaggcggtttagaagccgggtaggtttttcacgagtgatttcaatgaaacgatttacacgaagaaggggcttgaatgggtgaatactacagagagtctcaaggatgtgattgatcgtcattatcctgatatgacagacaaatggatgaactctgaaagtgcattttcagtatgggattcacctccacttaccaaaaatccaatccctctctatctccgaattccctcttaatttgatcattttaaatgtgatctatggcacttcgaatgatttttnttcttccctttttggcatttgttggctgtgagctgtgtttcgacatt

SEQ ID NO: 95223 - DNA, 662 bp, Arabidopsis thaliana columbia
  unsure (1)..(662): unsure at all n locations
ccctttaaagntnggnccccntncccngtggnattntggggggcctaaccccccgggggccctttgccggggaaggaaatccaagggttttgctaccagtggggctgctttttacattttcctcatcatggccacaaggcgattagaagcggataggtttttcaacgagtgatttcaatgaaacgatttacacgaagaaggggcttgaatgggtgaatactacagagagtctcaaggatgtgattgatcgtcattatcctgatatgacagacaaatggatgaactctgaaagtgcattttcagtatgggattcacctccacttaccaaaaatccaatccctctctatctccgaattccctcttaatttgatcattttaatgtgatctatggcacttcgaatgattttttttcttccttttttggcatttgttggctgtgagctgtgtttcgacattgtaatgtactatacagataaataaatgggtgatatacatgtgattcaataagttgtttgtaatactcttttgttataattaaaataatgtatatgcatgatataatttttataccattttaattaaaaaaaaaaaaaaaaagggcgaccgctctagaggatccaagcttacgtacgcgtgcatgcgacgtcatagtcttctatagt

SEQ ID NO: 95224 - DNA, 585 bp, Arabidopsis thaliana columbia
  unsure (1)..(585): unsure at all n locations
gacccacgcgtccgcaagattcacaccatagattggacagtccagcttctcaaaaccgacactttacttgcttggatgcgagcaaattggtacggactactaggaaagaagtttaaagattctttcggacatgcaggcagttcgatcttgggaggtgtcgtgggaatgaagaaaaccgcaaaatcatggggtcccttactctctaactgaagatttcaccagcgtctatcgaatgcattctctcttacctgatcaactccatatacttgacattgatgatgtaccaggaactaataaatcactaccgttgattcaagagatttctatgagagatttgattggtcgcaagggagaagaaaccatgtctcacattggattcactaagctaatggtctcaatgggtcaccaagcaagtggtgcccttgaactgatgaattatccgatgtggttaagagacattgttccccacggccccaacggccaagctcgtccagaccacgtcgccttatcctttggggcttcagggcaggggggggngncccggtccacgggttaggggcntttgtntngtccgtnncnagtggg

SEQ ID NO: 95225 - DNA, 447 bp, Arabidopsis thaliana columbia
gtaatagacgagctctggcaactgatgaatggcttcgcgtagaaggaactgataatatatatgcccttggtgattgcgcaaccattaaccagcgcaaagtcatggaagatgtttctgctatttttagcaaagcagacaaagacaagtctgggacactgactctcaaagagttccaagaagcaatggatgacatttgtgttagataccctcaagtggagctctacttgaagagtaaacgtatgcgtggcattgcagatcttcttaaagaagccgaaactgatgatgtatctaagaataacattgaactgaagatcgaagagttcaaatcggctctatctcaggttgactcacaagtgaagtttcttccagctactgcacaggttgctgcgcagcaaggtgcttacctagctaaatgctttgaccgtatggaagagtgtgagaagagtc

SEQ ID NO: 95226 - DNA, 818 bp, Arabidopsis thaliana columbia
  unsure (1)..(818): unsure at all n locations
ggcggtcaacgattcccttttgcattanggttcaggttctcgatcgaattgattttgaaatgggttcgggttggggtgctttcgaggagaacgttgggcactgatatgcccgtcatggctcagattcggagtttgatggcggaattgacgaaccccatgtctctcgcccagggagtggtgcattggcagcctcctcaaaaggccttagagaaggtcaaggagcttgtctgggatcctatcattagttcttatggccccgatgaaggtcttcccgagttgagacaggctcttctcaaaaagctgcgtgaagaaaacaagctaaccaattcacaagtgatggttactgcaggtgccaatcagagcgttgtgaaccttgttattacattatgtgatgctggtgattcggttgtcatgtttgagccatactacttcaactcctacatggcctttcagatgacaggagtcaccaacatagttggtggtcctggccagtcagacactctctatcctgacgctgactggttagagaggacactgtctgagtctaaaccgactccgaaagttgtaactgttgtgaatcctggtaacccaagtggcacctatgtccctgaaccgctgcttaagaggattgctcaaatatgcaaagatgcagggtgctggctgattgtagataacacatacgagtatttcatgtatgacgggttaaaacattgttgcgttgagggagaccacattgttaatgtcttctctttctctaaaacctatggcatgatgggttggaggcttggatatatagcttactcagagagattagatgg

SEQ ID NO: 95227 - DNA, 1003 bp, Arabidopsis thaliana columbia
  unsure (1)..(1003): unsure at all n locations
cnnnnnnnnnnnnnnnnnnnnnnnnnnnnnnnnnnnnnnnnnnnnnnnnnnnnnnnnnnnnnnnnnnnnnnnccacgggtccgagccctttctcttttctctctctctctatatattgctaaacaaaaccctacttattctaaaaatggaagccacgatcttcgagaaaagaagaagctcgttatcaagcatagcggtgcacaaacagtcatactcgataaccaaatcaaagccaaggggccgtataattcacatatttgctcccgagatcatcaagaccgacgttgccaacttccgtgagctcgtccaaagcctcaccggcaaaccagacgaccagagaacttccaaggcaaaacctagaagagatatgcatcgtcttcatcgtcaagtccaagacatgatcaacacggagaaactaagagaacccgagcattgtgatcaagagttctgcttaaacgcagaagagctctcgatgacttggaacggtaataatggcgctggtgaaagctctgcagggttcttgaatggtttgggagatttcgaagggtttattcaagaacttggtgaatttccttatttgcccttgtcctccaatgatgcttctgcttcttttaactcctcttcttcctctcatttacatggtggatcagttttctcagatcaattcgcttaactcggtctctcaaaggatgtgtaacctttttcatcttttattttgtttactaggtttttgtggaaatgaatttttaatttattacttttttttttgtttgtttagtatgaggctaattgatttaatgaaattagctgagactccttttatttctcccttaaggtctttatgatttgtccattgtcttcaaaatgtaatgtacactgataaatgttgtgtctagcttttgcaagaaaaaaaaaaaaagnnnnnnnnnnnnnnnnnnnnnnnnnnnnnnnnnnnnnnnnnnnnnnnnnnnnnnnnnnnnnnnnnnnnnnnnnnnnnnnnnnn

SEQ ID NO: 95228 - DNA, 560 bp, Arabidopsis thaliana columbia
ctcaaacattcctctcttcttctgccaagattttgatccccacacacactcacatcaacacatataaatctcctcgtaaaccctaaaccctagctagtttcaacaactctcttgttccaaccccaagaaaaaagttcaatttcgttagcaatggccaaagttgggaagctgacaaagcttaagtcggctatgaagaaatggccttctttcgccaagaaccaccaccactcaacctcctcagccgctgtttccgacgaactctcagaagacaacaatctccatgtggtttacgttggtcaaactcgaagaccttacatgcttagaccagacatcatctctcacccactctttcaagaactcgtggatcggtcttcttctagatccatcgaacaagatcgtgagattgttgtagcttgtgaagtcgttttgttcgagcacttgctgtggatgctcaagtctggtcaagaaggaggatcccgtgaagaattggctgagttctatacttattgacatcgaccgattgattttatacatttatttcgtataatatataccttttt

SEQ ID NO: 95229 - DNA, 458 bp, Arabidopsis thaliana columbia
cggctcgagcggctcgagcggctcgagtaaaaacgaaacacacaaaaaaaaaaaaaaaaaagaagggacatggacgccattgattccgtcgtggatcctcttagagactttgccaaggacagcattcgcctcgttaagcgttgtcataagccagatcgcaaagaattcacgaaagttgcagtccgtacagcaatcgggttcgtagtaatgggattcgtgggattctttgtgaagctcatctttattccaatcaacaacatcatcgtcggtgctacttagataacaaagggaagataaaagatggagaagggtagttacagctttgttgttttcatgaagacacttcacagtttttttcttttttcttgttcagatactcaaaaagaggaaacattttgtgaacctagtttaaccacacatttgggatcaatctctagtaattttctttctggttaatg

SEQ ID NO: 95230 - DNA, 454 bp, Arabidopsis thaliana columbia
  unsure (1)..(454): unsure at all n locations
agagaaagaaaagaagaagcaaaacagagagaaaatggcaggattgtttgataaacaagccgatctataccttgacgccagacgctaaggacccctctgagtggttctcgaagctcgctgatctcaccgatcaccacggtttagcctgggatgctgccaccggaaatggccaagcagctctcgccgttgcagagcattacgagagtgtcgtagcaacggacgtgagtgaatcgcagctgaagctagcaacgccacatccgaaaatcaattatcgccatacgccgacgtcaatgaccgacgacgagctagtggaattaatcggaggagaaaactcagtggatctaatcacggtcgcccaaggcgtacactggttcgatctccctaggttctactcagtggccacacgactcctncgtaaaccaggcggaatcatcgctgtctggggatacaacga

SEQ ID NO: 95231 - DNA, 596 bp, Arabidopsis thaliana columbia
ccaacttttcgccttggttccaaagacggcgagctgttgctgaacaagaacagcgtagattatggaggctagctagaatgaagactgatatgaggcagattacgtctcagatgaatgaattggaagctgtggattccttcaatgccattgagaaacacattagtgaggaagtcaagtcgctggaatcaggaggaggtgcagattcagaaggaacgtttcagaaactgaagaaggatctacaagcggtgttcagtgtgcttccaaaggacatgcagcaacttctgcttttaaatccacaaagagcatctcttcttcaagatccatcagagctccaatgaatgctcttcttcactacggcgtccatgaggattctgatttcttttcttcccttttctgtttcattctttgaactgtaccaaagaaaaaagagaaaaattcttcatcttccctaattgtttactcgttttttcttttgaaacatgagaatcacacaacaccgaaatcactgatcactgctgtatttttaactctataaccagataaaaataacacttcttggatccaaaaaaaaaaaaaaaaaaaaaaagggcggccgc

SEQ ID NO: 95232 - DNA, 1306 bp, Arabidopsis thaliana columbia
atacgactcacgttagggaaagcacgtacgcctgcaggtaccggtccggaattcccgggtcgacccacgcgtccggaaaaactttcctaattggttcataccaaagtctgagctcttctttatatctctcttgtagtttcttattgggggtctttgttttgtttggttcttttagagtaagaagtttcttaaaaaaggatcaaaaatgggaaggggtagggttcaattgaagaggatagagaacaagatcaatagacaagtgacattctcgaaaagaagagctggtcttttgaagaaagctcatgagatctctgttctctgtgatgctgaagttgctcttgttgtcttctcccataaggggaaactcttcgaatactccactgattcttgtatggagaagatacttgaacgctatgagaggtactcttacgccgaaagacagcttattgcacctgagtccgacgtcaatacaaactggtcgatggagtataacaggcttaaggctaagattgagcttttggagagaaaccagaggcattatcttggggaagacttgcaagcaatgagccctaaagagcttcagaatctggagcagcagcttgacactgctcttaagcacatccgcactagaaaaaaccaacttatgtacgagtccatcaatgagctccaaaaaaaggagaaggccatacaggagcaaaacagcatgctttctaaacagatcaaggagagggaaaaaattcttagggctcaacaggagcagtgggatcagcagaaccaaggccacaatatgcctccccctctgccaccgcagcagcaccaaatccagcatccttacatgctctctcatcagccatctccttttctcaacatgggtggtctgtatcaagaagatgatccaatggcaatgaggaggaatgatctcgaactgactcttgaacccgtttacaactgcaaccttggctgcttcgccgcatgaagcatttccatatatatatttgtaatcgtcaacaataaaaacagtttgccacatacatataaatagtggctaggctcttttcatccaattaatatattttggcaaatgttcgatgttcttatatcatcatatataaattagcaggctcctttctttttttgtaatttgataagtttatttgcttcaatatggagcaaaattgtaatatatttgaaggtcagagagaatgaacgtgaacttaataaaaaaaaaaaaaaagggcgaccgctctagaggatccaagcttacgtacgcgtgcgttcgacgtcataatcttctatagtgtaccta

SEQ ID NO: 95233 - DNA, 656 bp, Arabidopsis thaliana columbia
  unsure (1)..(656): unsure at all n locations
aaaaagatgaagcaaaaaaaaaaatgagagagagaaaaagacaattcagagataatacaaaggaatggttttgtttgaagagagaaagagaaagagagaactcgacgaagaatgatggtgggaggttaaattccccaaacccccagagctcttcattttcttcatatcgacgatatgctaaatggctgctgctaccattactgatctcttctcttaagctctctttgtttggggcatggaagaagagcttgccatgcttagacagctcatcggtcagcttcaagagctcttgcacaacggctctcctcctcctccttcttcttcttcatctctgtcgtcttcttctccgtcatttttggttctccaccatcctcagtatcagaacggatggtgtttgccctgtattgaggatacttctgctgatgattgttgtgatattgtaatggctggtggaaagaggcctggnatcttcaagatgttagaacctgtcaagcctcccgtcaaacgaactcgaaaagaacggnctcaagggaaatnatgtacggaagtagatgngataagtgggnacatggntcaagaaatatggcaggaattccctcaagatctnttttgnagacggnggtttccagactaccaatgggtactttttttccagt

SEQ ID NO: 95234 - DNA, 709 bp, Arabidopsis thaliana columbia
  unsure (1)..(709): unsure at all n locations
aaaaagggagggncgacgcggggcgagaactggtacggacatattgggtatcttgttccagtttatgccatgcgnggacatctaagagaggggacggatgtatatgcctttggtgttgtggctcttgagctagtgagtggaaggccaaactctgatgagaacttggaggatgaaaaaagatatcttcttgaatgggcatggaatctacacgagaaaggccgtgaagttgaacttattgatcatcagctgactgaattcaacatggaagaagggaaacgcatgattggcatagccctgctgtgtacacaaacatctcatgccttgagaccaccaatgtcacgagtggtggccatgctttcaggagatgttgaggtcagtgatgtcacttcaaagccaggctacctaaccgactggagatttgatgacaccacagcctcctcaatcagcggctttccattaagaaacacacaggcttctgaatccttcacgagctttgtggcgcctagatccgagatatcaccgagaaacaacgacgctaggccaatgcttggagcccagatgaatgagggaagatgacaaagaccctatatggtggctatagatatagtcatatagagattatgtttgtgtatatgaggttcactttattcttcttggattggaaaaactctagatttcactttggttaaataataataatattttagct

SEQ ID NO: 95235 - DNA, 821 bp, Arabidopsis thaliana columbia
  unsure (1)..(821): unsure at all n locations
taatacgactcaattagggaaagacggtacgcctgcaggtaccggtccggaattcccgggtcgacccacgcgtccagtaaacacataaagagatctatagagagagagagagtagagataaaaggtgatgaatagaggtgtgttggagagttcgccggttcagcagctgatggcagccggaaaccctaattggtggaacgtaagcggcggcatgaggccaccaccaccgttgatgggtcatcagcaggcgccgttgccaccacatatgactcctaataacaattatctccgaccacggatgatgcccactcccttcccgcacttcttgccatctccggcgacttcttcttcttcctcttcttcttcaccgtctttgcctaataaccctaatctctcttcttggcttgaaagcaatgatctccctcctgagtcttggagccttagccaacttcttttgggtggattgatgatgggagaggaagagagattggagatgatgaaccatcataatcatcatgatgaacaacaacaccatggttttcaagggaagataagattggagaattgggaagaacaagtgttaagccaccaacaagcttccatggtggctgttgacatcaaacaagagggtaacattaacaacaacaatggctatgtcatatcttccccgaactcacctcctaacaaatcttgtgttacaacaactaccacaacaaacctgttatgaatgaatgagaacagattacatcttcntggaatttccccnttacccnatttccagttgnaaagggccattttaatggattaaggttccntncccc

SEQ ID NO: 95236 - DNA, 458 bp, Arabidopsis thaliana columbia
agaaaacgcgagagtcgacaaggaaaaggcattgcaagaagaagcttaaatctctcttctctgctcctgaagtctgttcatggcgatgtcgggaactttccattgtgacttctgactatgtccctggttacacactttcagacagccgttgcttctttaactctgctgtttcaagaagaacacttgccatattaccttgctcttcctgtctcgatcacaagaatgggcgtctgaaatctgtccccaatagaagttcttttgtgtgccgagcaagttctggcggctataggagaaatcctgatttctcaagacttaataagcatggttaccggggaaacaacaggcaaagcggagggagagaagattttgatatcgaaaactctgatatgttgtcttcaagaaatgggcctttattcaacctgtctagttcccccaaattccaagctacctcatcccct

SEQ ID NO: 95237 - DNA, 545 bp, Arabidopsis thaliana columbia
tgatactccagctcactacgactcactattgggaaagctggcacgcctgcaggtaccggtccggaattcccgggtcgacccacgcgtcctcttatctcgacgagaaaaccctactgcgaaaaaactccgatctctctggcgagaagtaaatttttatctctgagcttggtttcaccatttctctatctctatctcctcgctgggttacggtttggtaaggtcagtgttctctaaggctgaaatttgggggtttctcagtctcgatgtggtcgtgctccgttaggattcttcacaatcattagggttatatttcttacaaactgatgctcattttctcttccctgtctatggctttatctgtgatccttcaaaagcttagtgtcttcggccctggtttgaatccttctttcccttactgcatcgccaatcactcctttgcctcccgttaattgagttgctctctttcaacttaattacattagtctgcttcctttgctgtctagtctggatagtgttgcaaatcaagtagtatcttctttagacat

SEQ ID NO: 95238 - DNA, 901 bp, Arabidopsis thaliana columbia
ttttaggtcacactatagaagagctatgacgtcgcatgcacgcgtacgtaagctcggaattcggctcgagcttaaagcttctcctccattcttcacacgagtcaatttaattgagggttttgtttgatcgattcttgaatcagatcaatcttcaaaaactaggatggcgactgagaaaccgattactacggagactgttgctctcactgagaagaaaatggacatgtctttagatgagattatcaagatggaaaagagcaataccaatgtgaataagggcaagaaacagagagtattgaataaaaaggagaaatttagtggtgctgcgaagaatagtgcggtgaaagcacagcgttatatggactctcggtctgatgttagacagggtgcttttgctaagaagaggtctaatttccaaggaaaccagtttcctgtaacaacaaccgttgctcgtaaagccgcttctgctactccgcgtggtagaccttataatggtggaaggatgactaatcccaatcaatcaaggtttattgctccaccagctcagaatagagcttcacaaagagggtttgtcgcttagcatcagctgcagcaaagggagaagattgtgcatcatcaggcctctggaggaggaggagggctaagtgcatggccttaaacactgtattctcgggttgcaaacatgaaggaagagagattgagaatgagatcgtttgctgacaattgaagccctgtttgctacaatggagttggatctgcttaccaccctcgttgatggttctctgggtgagaagagcttcaggattccccaacttggttaatgaccttcccgaattattgttgttttctagggataggggtggcccattttttggcctaacttatcgttagttttggcttt

SEQ ID NO: 95239 - DNA, 822 bp, Arabidopsis thaliana columbia
  unsure (1)..(822): unsure at all n locations
gagctgaagtcagtcatgggtaaaaaaaccagtcaagattctggtntgtggtgtgatgtgaatgttcagaagagtggtggagtcagcagcacaccgangtatgagaggtacggtgtgttacatgcacccagaatgtggaggaggaggtgtgttgtctgagaaatgcgatgtttatagtttggggttctgcttntggttcttgtctcaggaagacggccattgcaggtgactgcttcgccgatgtcggagtttgagagggctaacttgatttcatgggctaagcaattagcttgcaatggtaaattgttggagttagttgataaatctatacactctttggagaaagagcaagcggttctttgtattactattgcattgctttgtctgcaaagatctccggttaagagaccaacgatgaaggagattgttgagatgctttcgggtgtgtctgagccaccgcatttgccgtttgagttctcaccctcgccgcctatgggttttccgtttaagtcaaggaagaaagcacggtgaaattcgggtttggttatgacttatgagctcagtcatcaagtgtaggatttttccggtccaaagctaaaccaattgcgagttgtaggaactatttgattccgtaagattagctttttgcaaatatttatgaatatttagttgcttaacaaattagtttagacaataaagaagttccaattgacatcaagaagatgatcatgattataaaaaaaaaaaaaaaagnnnnnnnnnnnnnnnnnnnnnnnnnnnnnnnnnnnnnnnnnnnnnnnnnnnnnnnnnnnnnnnnngtgt

SEQ ID NO: 95240 - DNA, 424 bp, Arabidopsis thaliana columbia
cgacgcagcgtccataagccaaagcattctcatggctttatacagtaactgttaacaaatatgctgcttccgatgttcaagctgtacgcagaaacgataccaaacgccattctttaactgctccacccgctgatttaggacgcagaaacattctcttctcctccacgtctgtcatcgccgctgctttgaccagcagcgaccagcttctccaaaagtatttgaagaagactgaggaaaacaaagccaagaatgataaggagagattggacagtttttacaagaggaattataaagactactttgagtttgttgaaggatctataaagggaaagacagaagcagagctcagtgaatctgaaaaacggattctggaatggctcaaagccaacaaattgatatgatgaattgatgatgatgatgatga

SEQ ID NO: 95241 - DNA, 651 bp, Arabidopsis thaliana columbia
  unsure (1)..(651): unsure at all n locations
agagaaaaatataacaaattttaagccatgtcctcgtcactattctcttatgtngtcctcttaatcttccttttcaccatcccatacattcaaagccagcccactgctccagctccaaccactgaaaaaagtcccatcaatctcacagcgattcttgaagctggtcaccaatttaccacattaatacaactcctcaacacaactcaagtcgggtttcaggtaagtgtacaactcaatagctctgaccaagggatgactatatttgccccaacagataacgcattcaacaagcttaaacccggaaccctaaacagtctgacatatcaacaacaaatccagctcatgctctaccatatcattccaaaatactactctctaagcgatcttctcttagcaagtaatcccgttagaactcaggctacgggacaagacggaggtgtttttgggttaaatttcacagggcaagcacaaagcaaccaagtgaatgtttcccccggtgttgttgaggtcggtccantaatgcnttaggnaanagtttccttttggnattttanggggtgggacagtttttttttccgggggtttttttgggnacaanggcctttccncnggggttttttcccnaantnctaanttntggtttggngtttt

SEQ ID NO: 95242 - DNA, 467 bp, Arabidopsis thaliana columbia
atcagacatcactcatatctttagattcacattaatgcttttcaactaaatcctcttcgtgtgattctccgatgacgtccatcagttcctccgatcacccccttccggtgagcaagaaacgattaaagccattgatattacgagatttccttctcgatgatctcagctcttgctcatccaacggcttcaaatctttccctcgtctcctcaacgctgagatccaacggtcaggaatgttccaccacaatcgccgtattacctgcggattagcgtttagtcacgccgttcataaagcttcgacggcgttactcaccgccgttaaactcttgcccttcccttcctccgttaaatctcagtctcgtgatagagataacaagaaaggacttttctcaagaagcttctggaagaaactttcccgacgtgaacttaacgtcgacgtcggagagaaggaacggagaacggatgat

SEQ ID NO: 95243 - DNA, 370 bp, Arabidopsis thaliana columbia
aaacactagaatttcacatggttctagttcatatatcaatggaagactaatattagcaatgttcgatatgaaaaaatgaaagtcttcttgaaatttcgttatgagagcaaggtgcataggtgttaaagttcattcatggattgaggtgtagctttggtttaaacaagttcaagtgacttcatggggtagatcataacttcaccatgattcgccgccgttaagagccaagggtctgatgttttcagtagagattttttttttctcaccggcaagccatttttttggttccctttcattataacattttgtattcactccattgttaggttttcttgggttttctcgtatggaaaataagtttttctgtaaa

SEQ ID NO: 95244 - DNA, 616 bp, Arabidopsis thaliana columbia
ggtcaaactagacacaacacttaatgcattgagcagaagaagaagaagaagaattaagaagagaaagaaaacaaaaaacatggaagttaatggagaagaagagagaagaagtagaagagaagatgaagaaaaagaagattactactactctcttctcaactctccatgttctgtttgtaacaaatttgttcaagccatattgaagtgtcttggtcttgagtcatcatcaataccaccatcttcatcatcatcatcaccatccttagtagaagaagaagattcaggaactgaaactgttgaagaaacaggatttatggcgaggataacagcagtgttaagaaggagaccaagaccaccaccttatagctcaggacgacctggtcaaaacaattgattctgattaacactcctgaagacaagcttgtgtctctccgtgtggatcttcttgttgtttaaaattcacttatgatctttatttttttttacccatctttttgggtatgtgagcggtttgcttttttttttcttaatttatctgaaataagacaaaattggtaagactcttttgtaaaatagttttcatgtttaccttcttaaaatacgtgagacttttttt

SEQ ID NO: 95245 - DNA, 1256 bp, Arabidopsis thaliana columbia
  unsure (1)..(1256): unsure at all n locations
cgcgcacnnnnnnnnnnnnnnnnnnnnnnnnnnnnggagataactgacaccgcccattcaaatcccgtttctgtgagggtggttttatctctttggcccaaatttcggtgtaaccaaaaaaaatcttcacacacatccttgaccattttcttgttcatcgctctctttcttcttcacaaatcctaaacgagtaggagctatggctgcaccgattgttgatgcggagtacttgaaagagatcactaaggctcgccgtgagctccgttctctcatcgcgaacaagaactgtgctcctatcatgctccgattggcatggcacgatgctggaacctatgatgctcaatcgaagaccggtggacctaatggctctatcaggaacgaagaagagcacactcatggtgccaacagtggtttgaagatcgctctcgatctctgtgagggcgtgaaagctaagcatcccaaaatcacatacgcagacctgtatcagcttgctggtgtggtagcagttgaggttactggtggacctgacatcgtgttcgttcccgggagaaaggattcaaatgtctgccccaaggaaggaagacttcctgatgccaaacaaggtttccaacatctcagagatgtcttctaccgcatgggactatctgataaggatattgtggcactctcagggggtcatactctgggaagggctcacccggagaggtcaggctttgatggaccatggacccaagagccgctgaagtttgacaactcctacttcgtggaactgctgaaaggagaatcagagggcttgttgaaacttccaactgacaagaccttattggaagacccggagttccgtcgtcttgttgagctttatgcaaaggatgaagatgcattcttcagagactacgcggaatcgcacaagaaactctctgagcttggtttcaacccaaactcctcagcaggcaaagcagttgcagacagcacgattctggcacagagtgcgttcggggttgcagttgctgctgcggttgtggcatttggttacttttacgagatccggaagaggatgaagtaaacgaaataggaagtaaaacacgaagcaacgatgctcttatttgggtattaaagaaactattaatcgtctatcgaatctattttgctgctacaagattctaaactctttgaatccacgattctactgtttagtagtaaaaaagttaaaaagtcaatattttgggtccgtgattcctttttgcgataaannnnnn

SEQ ID NO: 95246 - DNA, 765 bp, Arabidopsis thaliana columbia
  unsure (1)..(765): unsure at all n locations
cctggaggaaccaaatccagaaaaggttcactctagcaagctagcgtgaagagagtaatgggcatcacgagactagcccatcaatcccaagctatatgcaagcaactaaatcggcgaaagcaaagctaaggcttcaaggctcaccaaagtctgcggagcaagatggaactgagaaagccactgttcccagacgtcactctctaccatctccaggtaatggtaggatcacttctcactctccaagaacaacgagactcgcaaactcaggtgacaaaaccgggaataagaaggagaaacctcttctgtcgtcccgagaaggaaacgccaagacaactccagcagagcggaagaggtgattggttccagcggaaagtgaagcctttatcgttcttgattctatagcagcgacaataccaaacatgaagaatgcaaccatcttatctatttaaaagctagagattatgagtctgtgattgtgttttgtgtgtttatgttggccaagtgttatgttggcggctaagtttctacaattgtgagtgtgtcccgagccgataaagttacatcacaaggctttttggatcatcttcttcttctggtttttcgttacattactttgattacttttgaagatctaaactttttatgtttatatgaatctgtgattattttctccaaaaaaaaaaaaaaagggcggccgctctagaggatccaagcttacgtacgcggtcatgccacgtcaaagctcttctatnnnnnnnnnnnnnn

SEQ ID NO: 95247 - DNA, 787 bp, Arabidopsis thaliana columbia
  unsure (1)..(787): unsure at all n locations
ctcaatcatgatgacaagattctgcttggntcgccagactctgttaccgtgtttgacgggggatctccccctgagatcagtattgcacactacttggatcgcattttcaagtactcttgctgcagtccctcctgcttcgtcattgcgcatatctacattgatcactttctccataagacccgagcccttctcaaaccccttaatgtccaccgccttatcattacaactgtcatgttagctgctaaagtcttcgatgataggtatttcaacaatgcatactacgcaagagtgggaggtgtgtctacggggagagttatacaggatttggggttggagttgttggtttacccttgacttcaaggcttcaaggtagatcctcaagacggttttcacacaacactgtttgtcaagttaggaaaagcggaacagagacggcttccagatcgagtggcccataaaagaagcatgccgagccaacaaagagacttggcagaagaggacacccgactcactgtgctctcaaaccacagcacgctgatcggcgagggtaagataggattattttgtgttttagtagtgatgattcttctgcatgatggattgtctgtgacaattgtgtgacgtagaaattctgaaaatttctaccaactcattctttaagaagttgctataatatagtttccttgataaaaaaaaaaaaaaaaaaaaagnnnnnnnnnnnnnnnnnnnnnnnnnnnnnnnnnnnnnnnnnnnnnnnnnnnnnnnnnnnnnnnnnnnnnnnnnnnnc

SEQ ID NO: 95248 - DNA, 592 bp, Arabidopsis thaliana columbia
  unsure (1)..(592): unsure at all n locations
ggcttcttttagcttctaagcttcagagcagcataaaaaaaacaatggagaagcgccggagatagatctgctttcttccattctccggaccttctctagttcacgaaccaacttcttccactttattctcattcgttggagaaatggactctctcgcaaccgatccagctttcattgattcggatgtatacctcaggttaggacttattattgagggcaaacgattgaaaaagccaccgactgttctctcacgcctctcttcttctctggagagatctctgttactcaatcatgatgacaagattctgcttggatcgccagactctgttaccgtgtttgacgggagatctccccctgagatcagtattgcacactacttggatcgcattttcaagtactcttgctgcagtccctcctgcttcgtcattgcgcatatctacattgatcacttttctccataaggcccgagccctttttaaaccccttaatgtcaccgccttatcattacaactgtcaggtaggtgcgaagcttcgtgtaggattnacatganctcggaggtggggttgctggnggttaacagtnggtggtttc

SEQ ID NO: 95249 - DNA, 794 bp, Arabidopsis thaliana columbia
  unsure (1)..(794): unsure at all n locations
gccacnnnnnnnnnnnnnnnnnnnnnnnnnnnnnnnnnnnnnnnnnnnnnnnnnnnnnnnnnnnnnnnnnnnnnccacgcgtccgacggctgcgagaagacgacagaagggggaccagaagaagaagaagaaaccaaatcctggcacctccgggataagtagctccaatggaggaagaagtggtggctcgagagctgagcaagagagaagaaaagggattccatggactgaagaagagcatcggtttcttcttcttctccttcatctccatcatctatccattgatattatttagacttaaaagagtgaaaaaagatttggaagattctttacctttattgaatactctgttttgtttggaaggttgtttcttttgggtttggacaagtttgggaaaggagattggagaagcatttcaaggaactttgtgatctcaagaactccaacacaagttgcaagtcatgctcaaaaatacttcatcaggcttaactcgatgaaccgagatagaaggcggtctagcattcacgacatcaccactgtgaacaatcaagctcctgcggttacaggaggaggacaacaaccgcaagtggttaaacatagaccagctcaaccacaaccacagccacaaccgcaaccacaacaacatcatcccccaacaatggctggattagggatgtttgggtggggcgccagtgggacaaccgatcatcgcaccccctgatcatattgggtccagctgttggaacacctgtgatgcttccacctccaatgggactcatcatctcaccatcacc

SEQ ID NO: 95250 - DNA, 908 bp, Arabidopsis thaliana columbia
  unsure (1)..(908): unsure at all n locations
aagagccaatgaaaaaatgggctgaattgcaagaaaaaagaggttcctggttaaaaaggctggtttttattttcccttatccccacacgaccattggatttttaccttaaaagggaaaggattggaaattcttcctttattgaatctctttttgttgaaggtgttttttgggttggccaggttggaaagagattggaaaccattcaaggaatttgtgttctcaaaactccaacccaagttgcaagtcatgctcaaaaatctttttcaggctaactcgatgaaccgaaatagaaggcggtttagcattctcgacatcaccactgtgaacaaccaagctcctgcggttacaggaggaggacaaccaaccgcaagtggttaaacatagaccaggtcaaccacaaccacagccacaaccgcaaccacaacaacatcatcccccaacaatggctggattagggatgtatggtggtgcgccagtgggacaaccgatcatcgcaccacctgatcatatgggttcagctgttggaacacctgtgatgcttccacctccaatgggaactcatcatcatcaccatcaccatcattttggagttgctccttatgctgtaccggcttatccggtaccgccattaccgcagcaacatccagctccgtcgacaatgcactgactgaaaacaatacagttggtattaaaactgacatatattgtactgaaaacttgtgtacattctcaaatcgaatagcgaaactgcggcaaataataatgtacagcagaggaatctgtttttccatttcaaatctatgattttcttctnnnnnnnnnnnnnnnnnnnnnnnnnnnnnnnnnnnnnnnnnnnnnnnnnnnnnnnnnnnnnnnnnnnnnnnnnnnnnnnnnnnnnnnnnnnnnn

SEQ ID NO: 95251 - DNA, 700 bp, Arabidopsis thaliana columbia
  unsure (1)..(700): unsure at all n locations
ccggaacggaangggccgggccgacgccatgcgcggcaaagatgtactgcgacaacaacaccatctcttatcttctttcaaattgtcagacccaagattccaagcgtccagttaaagggccaccatgatgatctaccactctcttggtcctgtttcaagaaagaaagatcttgtccttttagcggttcttcgtcttcaccaagaaaaaacccaactatggagagtctctgcaactccggaagaaatttcccaagagatcgtttcttctgattcatcttcttcttctggagcagttgtgtctagtggtggacaagatggtgttgctttgattatacaagtgcttctctttgttgcatttcttgctctcacggttctcaccattggtgttgtgtacattggagtgactgagtttcttgggaagagggagagagagaagtttgagaaagacgaggcagcaaagaagtctaagaaaggtgggaagaagaaggcaatgagagccagagctggaccaagaggttttggtcagaagattgaagatgatgacatcgacattgatcttgagtgattttgtgtgtagtagagagacaaagattgattttgtttgtaatgttgctcagtgattgtcacatctatgatatgtttcttgtgtaccaagcaacttgatggtcgatataaccaaaaattttgcaatttttcccgg

SEQ ID NO: 95252 - DNA, 458 bp, Arabidopsis thaliana columbia
  unsure (1)..(458): unsure at all n locations
accagattgtagagatatgattgaaaatgcatttattctcattggagaaattggagggagtgattacaacttcccatggtgggatcgcaagaacatttgacggaacgtcaaagagctggttccccttgtgatcactactatttcttcggcgatctcggacttggttgatatgggagcaagaacattcctagttcctggaaattttccacttgcatgctctgtagcctatttgacgttatacgaaacaccaaacaaagaagaatacaatcctctaacaggatgtttgacatggctgaacgacttttcagtataccacaacgagcagcttcaagcagaactcaaaagacttaggaatctttacccgcatgtcaacatccatatatgggggctacgacaatactctgttgcgccttttgcnggnccatcccnnttcggggtcctgggcngncctttggccg

SEQ ID NO: 95253 - DNA, 840 bp, Arabidopsis thaliana columbia
  unsure (1)..(840): unsure at all n locations
tccggggtcctgctaccccgaggaagactaatggttatcaacaacaaggtggatacatgccgaatggtaccttgacgcgtcctgaaggggacataatgaacacaacaatatttgttggagggcttgactctagtgtcactgatgaagacttaaagcaacctttcaatgaattcggggaaatagtgtctgtcaagattcctgttggtaaaggatgcggatttgttcagtttgttaacagaccaaatgcagaggaggctttggaaaaactcaatgggactgtaattggcaaacaaacagtccggctttcttggggacggtaatccagccaataagcagcctagagataagtatggaaaccaatgggttgatccgtactatggaggacagttttacaatgggtatggatacatggtacctcaacctgacccgagaatgtatcctgctgcaccttactatccaatgtacggtggtcatcagcaacaagttagctgaggaaactaaaagcttaatctgagcatctatctataggacaacaaaaactcactcaggttaggtgatgttaggaagaacaaggcaaaaattgttggcttcttgtctctccttgagtttagggtttatcatctagtggacatcgaatttttggtggaaaccatacagtaatttaggggacttggatttgattgattaattttatttgtttcttctgatacttttgactatggaagttattgatcaagaagaagtgagttgcccctctgaaaaaaaaaaaaaaaaaaaaagggcggccgctctagaggatccaagcttacgtacgcgtgcatgcgaaatcannnnnnnnnn

SEQ ID NO: 95254 - DNA, 930 bp, Arabidopsis thaliana columbia
  unsure (1)..(930): unsure at all n locations
cccacgcgtccgaaagctgttgaatgggcttttttcggttgcttctggacaaatggtcagggctgcaatgcaacttcccggcgtggtgttcacgaaagcatcgcatctgagttcatagagaagcttgtaaaatggagcaagaacattaaaatttcagaccccatggaagaaggatccaggcttggtccctgtagttagcaaagggcagttcgagaagatattgaggtttatctcaacggccaagagtgaaggagcaccgatcttgcatggtggttcccgacctgagcatctggaaaagggcttcttcattgaaccaaccatcataactgatgtaaccacttcaatgcaaatatggagagaagaagttttcgggcctgttctttgcgtgaaaacatttgccagtgaggacgaggcaattgagctagcaaatgactctcattacggactaggagctgcagtgatatctaatgacacagaaagatgtgcccgtataagcgaggcctttgaagctgggattgtctggattaactgctcgcagccttgctttacccaagccccatggggtggtgtcaaacgcagtgggtttggacgagaacttggagaatggggacttgataactacttgagtgtgaagcaagtgactctctacacttcaaacgatccctggggatggtacaaatctcccaactaagtaatgaatacattgtcatggaaatggaaaccaaaccaaatgctgtctgttcaaatctttgtgcttttattatcagtctgtctagttcggtcctgaaactcttttgtaaaacctgttgaatttataatgaataaaagatgctttgctgataaaaaaaaaaaaaaaagaataaaaaaaaaaaaaaaaagggcggccgctctatannnnnnnnnnnnnnnnnnnnnnnnnnnnnnnaacga

SEQ ID NO: 95255 - DNA, 460 bp, Arabidopsis thaliana columbia
agaaaaagtaaataaaaaagagatggttttgatcaaagagagagagatggagattccagttattgattttgcagagttggatggagagaggagaagcaagaccatgtcacttcttgatcatgcatgtgataagtggggattcttcatggttgataatcatggaattgataaagagttgatggagaaagtgaagaagatgattaactctcactatgaggagcatttgaaagagaagttttaccagtcagagatggtcaaggctttgagtgaaggcaaaacctcagatgcagattgtgaaagcagtttcttcatctcacataaaccaacttcaaatatctgtcagatcccaaacatttcagaggaactcagcaagacgatggatgaatatgtttgtcaactgcacaagtttgcagagagactcttcaagctcatgtgtgagaatcttggtcttgatcaggaa

SEQ ID NO: 95256 - DNA, 520 bp, Arabidopsis thaliana columbia
  unsure (1)..(520): unsure at all n locations
nnnnnnnnnnnnnnnnnnnnnnnnnnnnnnnnnnnnnnnnnnnnnnnnnnnnnnnnnnnnnnnnnnnnnnnnnnnnnnnnnnnccacgcgtccgtcatcgtctctgtcttgctcgtgctgttccttgcaaccgtcttctcaacaaccaccaccgtgctcctccttcgatccgcctctcaaaccaccgttcaaccacctcactccgcctcttctcctccgccgcagccagtcgggacagtgaaatggcgactgaagatgtgcaagatcccagaatcgctaagattgcctcttccattagagtcatccccgacttccctaaaccaggaatcatgtttcaggacataacgacgcttcttctcgacactgaggcctttaaggatactattgctttgtttgttgatagatacaaagataaaggcatatctgttgttgcaggtgttgaagctagaggtttcatttttggccctcctattgcgttggctattggggccaaatttgttccatggagaagccaagaagc

SEQ ID NO: 95257 - DNA, 956 bp, Arabidopsis thaliana columbia
  unsure (1)..(956): unsure at all n locations
acgcgtacgcccaagcgtccgtgtgtttgcaaatctgacgccgagtattttgctaaagcagcagccagtcgggacagtgaaatggcgactgaagatgtgcaagatcccagaatcgctaagattgcctcttccattagagtcatccccgacttccctaaaccaggaatcatgtttcaggacataacgacgcttcttctcgacactgaggcctttaaggatactattgctttgtttgttgatagatacaaagataaaggcatatctgttgttgcaggtgttgaagctagaggtttcatttttggccctcctattgcgttggctattggtgccaaatttgttcccatgaggaagcccaagaagctacctgggaaggttatttcggaggagtattcgttggagtatggaacagatacgattgagatgcacgtaggtgcagtagagcctggtgagcgtgctattattattgatgacctcattgccacgggtgggactctcgctgctgcaatccgactacttgaacgagtaggagtgaagattgttgaatgtgcttgcgtaattgagttaccagagcttaagggaaaggagaaactaggagagacgtcgctatttgttcttgtaaagtcggctgcttaacaagaaactggaagagaaggttattggatcgagtgttgatgctatttttcatgtatggtgagacattttgcgtgggatttgatccttgttgtttcaacttatcataattggttcagactagaaaatggcatttgaatgtcaggattcgattgcagtttcctattgttccacttaaaatccccgattaataaggtgttatgggttttatttatagaatcaagttgtaatagtagactccaaaagagaatagagtcttggtaacgcaattcttctaaaaaaaaaaaaaaaaaagggcggccgctnnnnnnnnnnnnnnnnnncaa

SEQ ID NO: 95258 - DNA, 402 bp, Arabidopsis thaliana columbia
gcacagcgatcatggttatcatctatatatttctttttctcctcctcagccattatagattcacctgggttggcaaaggcccggaagtgggatgcaattggggggaagggaggcaagcagtgggacgatggagctgaccatgacaatgtagcaaaggtttatataagaggtggtcttgaaggcatacaatacatcaaatttgattatgtcaaagagggaaaacctatagaggcatctttccatggggttttcgggtagcggtttcacacagacgtttgagattgattatcaaaacagtgaatatattgtatctgttgatggctactacgacaaatctggtaccatgcaagcacttgaaattaaaaccaaccttaagacttttgaagtgattggatattcaaa

SEQ ID NO: 95259 - DNA, 452 bp, Arabidopsis thaliana columbia
aagaaaacgatcatttaaccgcttgggtatacaacatggttaagaactcgggctctggcggtttccggttcatgactgggcagtactgtggaaatgcaatcaagaagcttatgttcgggacgagaacgttctctaagaacactgcacctgacggtgtgacccaccgtagaagatgtagagcacatggaagcaatgtttgaagcattagggtttaccttcgctttttgcatctctgattatctgccgatgctcactggacttgatcttaacggtcacgagaagattatgagagaatcaagtgcgattatggacatgtatcatgacccaatcatcgtcgagaggatcaagatgtggagagatggatagagatcttcaaatcgaagattttcttgatattttcatctctatcaaagacgaacaaggcaacccattgcttaccgtcgatgaaatca

SEQ ID NO: 95260 - DNA, 583 bp, Arabidopsis thaliana columbia
  unsure (1)..(583): unsure at all n locations
gacggaactcgtatgtccagcgagacacaggtggctccaccagaagagatcagaagaaaacgatcatttaaccgcttgggtatacaacatggttaagaactcgggctctgtcgatttccggttcatgaccaggcattactgtggaaatgcaatcaagaagcttatgttcgggacgagaacgttctctaagaacactgcacctgacggtggacccaccgtagaagatgtagagcacatggaagcaatgtttgaagcattagggtttaccttcgctttttgcatctctgattatctgccgatgctcacttggacttgatcttaacggtcacgggaaggttatgtagagaatcaaagtgcgattcatgggacaaagtatcatgancccatcattcgacggggggnttcaagattttggggngaaggaaagngacccaaaatcgaggttttnttgaantttcaacccctttcaaggcggcaaggaancccttgttnccnccgttgaattaancccccttaggggtttattngggnccanaacctntaccccngnatgcctggggntgtacaccgnttccaaattgtc

SEQ ID NO: 95261 - DNA, 587 bp, Arabidopsis thaliana columbia
gaagaaaatcacagaaagccttagcacagagaagagagattgaagaagtcatggatgtttcaggaagcttgaattgcgttgttgtggcggtagatggaagcgaggtgagtatggaagctctgaggtgggctctagacaacctcaagctctcttcgtcttcttccgattcatcattcgtcgtgctccacgtccagccgtcgccttctgtagccgccggcgtgagtcccggcaccatacctttcggtggtcccagtggtcttgaggttcctgctttcactgctgcaatcgagcaacaccagaagcggatcaccgacaccatcctcgaacacgctagtcaaatttgtgctgaaaaatctgtgaatgtgaaaacacaagtggttattggggatcccaagtataaaatctgcgaagctgtagaggaatttgcatgctgatcttcttgtcatgggctcccgggcttattggccgcattaagagaatgtttctgggaaggtgtaagcaactactgcaccaaccacgcccattgtcctgttgtgattatcaaaccaaaagaggattcttctgcataaaaaggatttatatgtaca

SEQ ID NO: 95262 - DNA, 562 bp, Arabidopsis thaliana columbia
  unsure (1)..(562): unsure at all n locations
accccccttnntcccccgntgnccggcncatcctccgngcccatggctnnggncntctttcntgggcatcggccaccccggaggcggatcaccgacaccatcctcgaacacgctagtcaaatttgtgctgaaaaatctgtgaatgtgaaaacacaagtggttattggggatcccaagtataaaatctgcgaagctgtagagaatttgcatgctgatcttcttgtcatgggctcccgggcttatggccgcattaagagaatgtttctgggaagtgtaagcaactactgcaccaaccacgcccattgtcctgttgtgataatcaaaccaaaagaggattcttctgcataaagaggatatatatgtacatatgcaaagggatatcaagaccatctgtaatcttttgaagttttgtgaagctatagaagccaagcaagaattctaccagattacttcccaaataagtggtgtgaatgtaaattaataagagctacagaaacattgattggctcagtatatgtgttgtattcatattcgttgttttattttatacggttgagaattg

SEQ ID NO: 95263 - DNA, 506 bp, Arabidopsis thaliana columbia
cccaattccaccaccacacagacaaagcacttcgaaaatggcggtttcttctggaacattgggcactttcctctgcatcaaaacgacatctttccgcaacccatcaactcctctgtcctctctccggttcgcctctcacccggcggctaaactacgcttggttcgagcggtaacatctgcgacggaatcttcagagccaaccgcaaccaataagagagtgccacgcggtatcatgaaacctagaccagtttcaccagagatgcaagacatcgtcgaacttcctgaaatcgctcgcacacaagctcttaagcgtatttgggcttacatcaaagaacatgaccttcaggacccacaaaacaagagagaaatactgtgtgatgagaagctgaagaagatattcgaaggaagagatcgggttgggttcctagagattgcaaagcttatcggtcctcactttctctgatggattgttttcgcggaactttatttggatgattgtctatgtt

SEQ ID NO: 95264 - DNA, 450 bp, Arabidopsis thaliana columbia
agccaagcaaggtatgtaactttttcttgccctcgtagttccattttcatcgaaacgtctgctctttgaaccctctggattctaggctactacaatcagctgaaaaaaaccctaattcagtctctctttctcgtcgtgcaaaaaccctaaaccctgggaattgtgagatcgatctcatgtttcagtaacttgttaaatctgtacctctttctgttgatttagatttagatttctgttttcaattccgtttctgttccgaaattgttcaaggtgaaaaattcaacctcaaaggaaagtgtaaaattcaagtcttaaagaagagaaaaatggtggaggtgtggtggctcactgataggagcagcagtgcctgcactaattgctggtcaagcttggaggataaagaagagacatggcgaagaagagaggatcaagagtgctcgaggaagagag

SEQ ID NO: 95265 - DNA, 579 bp, Arabidopsis thaliana columbia
cgcgtacgtaagctcggaattcggctcgacgttgctgctaagaatctctctgaagcatctttcaaggtgactgttcttgaatcacgcgataggattggtggtcgtatccatacggattattcctttggttgtcctgttgatatgggagcttcatggttacatggagtctctgatgagaatcccttagctcccattatacgccgtttaggactgactttataccgaactagcggggatgactccatcttgtatgatcatgatctggagagttatggactttttgacatgcatgggaataaaattccgccgcagttggttactaaagttggagatgcattcaagagaattctcgaagagacggagaaaataagggatgaaactgccaatgacatgtctgttcttcaaggaatatctattcggttgggaaaaaaatcccgaacttaggccagaaggggtggcgtccgaagtttttcagtggtacttatgtaggatggaggcgtggtttgctgtagatgcgaatttaatttcactaaaatgttgggatcaggatgaatgtctttcaggtggtcatggtctaat

SEQ ID NO: 95266 - DNA, 647 bp, Arabidopsis thaliana columbia
tgttcaatatcccgtcccggtatcgataagcttatatcgaattcgcggccgcctgatttttttttaaagcactcgcatgaattgctttcacaagatctttccatagaccctttcagtctcatgttgaatgaaatgcaagaaaacatatctcttgtctcattttcaaggcgacttgctacacagatttggtcacagatgcagagtgatttcctaccaaacttcattctttgcaataccactcagcgatttgtccgttcatcgaaagttcctcctactcagaaaccatcagggccttctgctaagcctagttcctattgtggcactcaagacttaaatgcaccgcatcaaagttttgcacgattgcctagtggatttttcgggataccacatttattttccattgttaaacttcttgggtccagatcattgccttggctactaagagctttactggaccatatttcaaataagactacctcactttgagccaatcgatctctggactgcaagacgcattgcccacgtccattgggactgcttttctttttcgatgggcggtgtttccccggtatgtaattcaaagtctttaataagcgacgtagccacacttttaaacctggcgggtccaccttcatactttacaacaa

SEQ ID NO: 95267 - DNA, 681 bp, Arabidopsis thaliana columbia
  unsure (1)..(681): unsure at all n locations
acgaggctgggnttctgctnccccaatgtaaatcattntccccctggtagagttttcttccaggccgattggtttccagcccagttaagcaaacggaggtagattgcgaatacttgaaacggtgcgtagagaagctaacggaagagacccggagactccagaaagaggctatggagcttcgaactctcaagctgtctccacaattctacggtcagatgactccaccaactacactcatcatgtgtccttcgtgcgagcgtgtgggtggcccatcatcatcgaaccatcaccacaatcacaggcccgtttctatcaatccgtgggttgcttgtcctggtcaggtggctcatgggctgaattttgaagccttgcgtccacgatcgtaattttttattttagtggtgggaaaagggtgtttttggtatttttcgttatcgttatatagtctatctgtgtggggtcattgtaattttggatgattggccttctcatgaactagtcctatgtatgatgcaaccttaaaaagatttaaattagcaaaaattagttacaaacttgctatatttaccaaaaattatgaaactatctttttttgataaaaaaaataataaatatttatattaatattttaaaattaaataattaattattgggtggtcgcttttgaggatccaattttac

SEQ ID NO: 95268 - DNA, 1121 bp, Arabidopsis thaliana columbia
  unsure (1)..(1121): unsure at all n locations
ataaccaatagttggtatatttcaattattccatcatttaccatttagtcgtctccttggtgaggcaaatacttcatcacgcttccttcatagcaaattcttttcgtctatctcatacatttaaacaaacatagacatacactaatcaatcttccttaatttaaaaaaaaaacatggagaaaacccaagaatcagtggttagatatggaaaaaagatcgagaaaatgccatatcttatgcccgccggccgagttgtctttgcatctgcgttcctcgtgtctgcttggagagagtattatggtttcggattagctgccgatgagttaagaccaaaacttggtttctttgagaaccaggcaaaagccatagttgctcttggtatattgatgaagtttgttggagggatcttattcatcttcaatacgtacgtattgaagatgcgcttttgcttgtataccaagccatcttgagcccgatattgtacgatttctacaatcgcgattacgatagagaccatttcaccgttttctacacaaagttcaaagaatttgtggaagagacgacgtcagctgatggtggagtggccatgagcctctatacctctgtggttaacgaagaatcgcgccagaaattcatcgatcagcttaacgagattgcgagaatagccatctcgaatcctctattcacaccaagcgatttcaacacattgttcataaggtttattaagggtgttggaatagcagctgcattggcgtgcttcattgcgatgaaacataggcatgcggtgctcatcgagaagacgtccaagaagcaaaaaactaactgatccgatttggcttatttacttgtggatctcaatcaacaagtgatctctatgtttttcaataattattagtttcttttaagatttgtgagttttgctttttgctatgaataaatagcaagtatttaattatgatgttgtactgtaatttcatatccgaacaaatttaaatttccttcggatcaaaaaaaaaaaaaaaaaaaaanaaannnnnnnnnnnnnnnnnnnnnnnnnnnnnnnnnnnnnnnnnnnnnnnnnnnnnnnnnnnnnnnnnnnnnngaattgcaacctaaccggg

SEQ ID NO: 95269 - DNA, 728 bp, Arabidopsis thaliana columbia
gcacaagcacgagtgagtgagagatgtttgccgtggagaatgggttgcagggagacccgagattaaaggccatctccgacgccattcgtgtcattcctcacttccccaagactgggatcatgtttcaggacataacaacgttgttgctggatccagttgcctttaaacatgtcgtcgacatcttcgttgatcgttacaagcacatgaacatctctctcgtcgccggagtagaggcgagaggattcatatttggacctcccatcgcgttagccataggtgccaagttcgttccactacgcaaaccgggaaaactacccgggagagtgataagcgaagagtacgaacttgagtatggaagagattgtctagagatgagtgtagaagccgtcaaatcggaggaacgagctctcatcatcgacgatttagttgccactggtgggacactctctgcttccattaacctcttggagcgtgccggggccgaagttgtagagtgtgcatgcgttgttggtttgcctaagtttaaggggcagtgtaagctgaagggaaagcctttgtacgttctggtggaaccaaaccagtttgatgaattaaccttataaaagccttttctattcaacgattatgacaaataatgtaatcggtttaatcgattttgtaactaaggatttgtttgttttctattggctccatgtggaatgattcatgctagttactatgaaaaaaaa

SEQ ID NO: 95270 - DNA, 388 bp, Arabidopsis thaliana columbia
ttactccgacaagtgccgtgtaattcctcgccctcggctactcttttctcttcttgcctctcgtctccgccgctgattcagctgccgccgacaaaggaatatggaagaaaaagatgtgtatacgcaagatggaactgttgatattcacaaaaatcctgcaaacaaggagaaaaccggaaattggaaagcttgccgcttcattctcggaaatgagtgctgtgaaagattggcctactatggcatgggcactaaccttgtgaattatcttgagagccgtctgaatcaaggcaatgctacggctgcaaataacgtcacgaattggtctggaacatgttatataactcctttgattggagcctttatagctgatgcttaccttggacgatat

SEQ ID NO: 95271 - DNA, 723 bp, Arabidopsis thaliana columbia
  unsure (1)..(723): unsure at all n locations
ggcgaatatttatcggacgaaacagctggaaatctttcgacaatgttcgatgtaggaggtgtggttggtggaatcatggctggttacatttcagaccgaattggtgcaagagctattacggctgcgagtttcatgtactgctcaattccagctttgttcttctaccgtagctacggacatgtatcgttattagccaacgcgtctctcatgttcttgaccgggatgttggttaacggtccttacgctttgattacaacggcagtttcagctgatcttggaacacacagctcgttgaaaggaaactcgagagctttggctacggtaacggctattatcgatggaacgggatccgttggagcggcggtcggacccttactaacgggttacatatcgtcgaggggtagctggaccgcgggtttcacaatgttgatgggagctgcgtttgtggctggactattgttgacgaggctggtaatggccgaagtagcggagaagatagctgagtctaggccatcggaagaatgtagatctccggtggnctatgtccaagatcaatgttattggaaagtgttgatcancaacttttgatccgccattttttttaggaagcgttttaaggtttnntttatntttttcanaaggggagnttttcggnccaaangttaaggcctttngnaatttttaaacaagnaacctgattgnnanncnatgncaaaanttcnt

SEQ ID NO: 95272 - DNA, 417 bp, Arabidopsis thaliana columbia
  unsure (1)..(417): unsure at all n locations
cggaanncccgggncgggccaagccgtccgttaagctccaagagctgaaggagaagatagcttgcggatcaactcaagaaatcaaagacaccatggcagttcttaaccaagaggggatgcaaattggccagtctctgtacaaccaaccccaaccaggtggtgctgattctcctcctggaggtgaagcttcctcgtcgtctgacacatcatcctcagccaaaggtggagacaacggcggtgatgtgattgacgctgacttcacagacagcaattaatacgaattggattcatacaaggattatttatggggtttgtccatgattttgtaggaatgataatgtgatttgttggcagcccatgaatggtaagagtcaaattttgtctttttaaacacatgattgaagcaatattctggag

SEQ ID NO: 95273 - DNA, 776 bp, Arabidopsis thaliana columbia
  unsure (1)..(776): unsure at all n locations
ctaaaaaaaagggcgaatttttccatggtgttgtcggagtttcagctagctctgagcttggtggtcttgttcttctagcgtgggggatcgaaaccccatgttcttatgattttacacgacctaatccaaaactccaggtccttgattgattcttctctctctccagctccagattcttctgatttcttttgctatcatttgtttttgtaagatttgtatccgtttttgggttttgcttagctgattcttgctggatcgagagttgaataactctgcttttcttcaatctgggtttttttttttgtttcatagaggagaaaggttgtggatttctcaggtggggatttgagaattaggggtttctgattgggggttttcttattgatgttaccttcaccaaattgttgtcggagatctagatttggttcagtnatggaataatggctcgtctcttgccatctctattcgtaattagcatctncttcttcatccaaagactcctcctttcttcgttaatccatcgccagctattgaatctgaagcaaatctgagaatctaccgaactcacggacctgtatatngcttacacggtacagagcacacgggagacggggtacatattgtccagcgcaagtnaaagcaagngcctttttggctattgatgggtgaggagtagctgcacaatgacccnggtttgaatnttgggcctggcctnggntaccccacctgnccaacgggcttaaattggtnttggcattnccccttangcttttttc

SEQ ID NO: 95274 - DNA, 1382 bp, Arabidopsis thaliana columbia
  unsure (1)..(1382): unsure at all n locations
ggaagaatgctgtgcatgaaataaagagaaaagcttcctgcgatagattncctcgtctgcngttattccccgaaggaaccacgactaatgggaaagttcttagttccttccaactcggtgctttcatccctggttaccctattcaacctggagtagtccggtatccccatgtacattttgatcaatcctggggaaatatctctttgtttgacgctcatgtttagaatgttcactcaggtttcacaatttcatggaggttgaatatcttcctgtaatctatcccagtgaaaagcaaaagcagaatgctgtgcgtctctcacagaagactagtcatgcaattgcaacatctttgaatgtcgtccaaacatcccattcttttgcggacttgatgctactcaacaaagcaactgagttaaagctggagaacccctcaaattacatggttgaaatggcaagagttgagtcgctattccatgtaagcagcttagaggcaacgcgatttttggatacatttgtttccatgattccggactcgagtggacgtgttaggctacatgactttcttcggggtcttaaactgaaaccttgccctctttctaaaaggatatttgagttcatcgatgtggagaaggtcggatcaatcactttcaaacagttcttggttgcctcgggccacgtgttgacacagccgctttttaagcaaacatgcgagctagccttttcccattgcgatgcagatggagatggctatattacaattcaagaactcggagaagctctcaaaaacacaatcccaaacttgaacaaggacgagattcgaggaatgtaccatttgctacacgacgaccaagatcaaagaatcagccaaaatggcttgttgtcctgcttaagaaaaaaccctcttctcatagccatctttgcacctgacttggccccaacataactcagagagacaaaatggctggctaagatttgtggtgcgatgattgtaaacttgtctttgtggtatattattataccttttgttttgtcttcatatttgatttcagctagtaaaaagaagggactgctatgtttttagcctatatatataccctcctccaacatggatccatccttttgagtgttggactataactgcgtgtcgttttccaccccaaaaaacgctatggtgtttgctcctctagttctgagcaaactttgctgtatttgtttttttgtcatttttggggttacattacatatgtattattccaaatctcgattgtattcagtggaaattttatttttaaattattttaccaaaaaaaaaaaaaaagggcggccgctctagaggatccaagcttacgtacgcgtgcatgcgacgtcatagctgttctaag

SEQ ID NO: 95275 - DNA, 565 bp, Arabidopsis thaliana columbia
cagatccagactcaaaaaatggagtcaccgcactcgaatttgctccctgaagtcgattctttacccgatggattcgcgacggcgcaacagagccgcctctcaattctcccaagacccaggaagaaacaacaaaccatgaaactgttgcgatcgagaaaacagagaagccaagaacttttcggttccgttgtgtgaaactgatggttatgaagatgacgaagtagctgacctaattcaagaatcaatcaagcttgagtgagagttcgagcagaaagaaaaagaagcttctcctcctatttctcaaacattgtcagaagggtcaacctcaaaattcaaccttgtctaaggaaatggattcactcaaacccaaaaaacaacaggaggtggttgagagcaagcgtaagggttcaaagaatatgttcaaatcagagaaagagtttttggaatttatgctcaagtatcagcaagtcctttctgaaagagattctgctattactgttcgtgacaagcttgaatcactttgttgagagttacaacgtcagaacaaaatgttaatggaagaatg

SEQ ID NO: 95276 - DNA, 419 bp, Arabidopsis thaliana columbia
ggatacaaagcagtaggcattagactggattcaggtgacttagcctatctttctactgaggtcaggaaattcttttgtgccatagagagagacctcaaagttcctgatttcgggaagatgatcgtcactgctagtaacgatctaaacgaagagacagtcgatgctctaaataaacagggtcatgaagtagatgcatttggaattggaaccaacttagtgacttgctatgcgcaagctgcgttaggttgtgttttcaaacttgtggaaataaacaatcagcctcggatcaaactttctgaagatgttactaaggtatcgattccatgtaaaaagcgtacttacagattgttcggaaaagagggttaccctcttgttgatataatgactggagagaacgaaccacctccaaaggtcggtga

SEQ ID NO: 95277 - DNA, 440 bp, Arabidopsis thaliana columbia
ctctcacactttcttaagatttttttcttcggctcggacgcagatgactaacagttacgctctgtcaccggcgattatcggcgccgttcgtcctccggcatctcaagactatctagttgctgcttctcttagtggacgcaaatcgatcaactcttcatcttcgtccattttcgtacctatctcattatctacttcctacggtcgaagcaaatgcgccttctcaatctcgcggaagaatccaaaatcgacgattcgttgcgatattgctgtgaaatcggcggcttctgtagacgcggacgctgatctatcgtcatctacgtcgttggagacggaggaagacgagaaagcgaaggaaaagattggagctagggttagggttacccgttccgttgaaagtttaccatgtggttcgtgtacccggagttgaattgatgggaatg

SEQ ID NO: 95278 - DNA, 712 bp, Arabidopsis thaliana columbia
ctcgacggcaactgggttttgctgtacactgctttctctgagttgattcctctactagctgcgggttcgacacctttggtgaaagttaaaagcataagtcagtcaatagacacaaacaatctcattatcgacaactccactacactctccagcccttttgcagacttctccttcagtgctactgcttcatttgaagttcgaagcccttcaaggattggggtccttctttcaaagaaggcacgcttaaccccccggtgatcaaatcaagtgtagatctcccagagagtgtgggcgtctttggccagcagattagcctttcgttgttaaagcagtcttttgaccccctacaaacatgtggcagcaaacatttcacgggcactctctggtcagccacctctcaagcttccgtttccaggaaaccgaggcagctcttggctcttgaccacttatctcgacaaggatctcaggatttctagaggagatggtggccttttcgtgcttgccagagaaggaagctctctgcttgagctctgaaatatttgataaagtatatatatagcaggcttcatgtaaaaaccgtaaccactacagtagagacatcttcagaataatgctgaatgcagattattgggcctaatcttaaattttaattatgtaaaaaaaaaaaaaaaagggcggacgctctagaggatccaagcttacgtacgcgtgc

SEQ ID NO: 95279 - DNA, 525 bp, Arabidopsis thaliana columbia
  unsure (1)..(525): unsure at all n locations
gatgttgttcatgctatgcaatctatctnacctccggtttattcagttggaccgcttcanctcttagcaaaccgggagattgaagaaggtagtgagattggaatgatgagttcgaatttatggaaagaggagatggagtgtttggattggcttgatactaagactcaaaatagtgtcatttatatcaactttgggagcataacggttttgagtgtgaagcagcttgtggagtttccttggggtttggcgggaagtgggaaagagtttttatgggtgatccggccagatttagtagcgggagaggaggctatggttcccccggactttttaatggggactaaagaccgcagtatgctagcgagttggtgtcctcaagagaaagtactntctcatcctgctattggagggtttttgacgcattgcgggtggaacctcatattggaaagtctttcgtgtggagttccgatggtgtggtggccattttttgctgaccagcatatgaaattgtagttttgttgtgactag

SEQ ID NO: 95280 - DNA, 473 bp, Arabidopsis thaliana columbia
tcgaccacgcgtccgatggattgtatctctcggtcgatccaggcttcgtgagtgacttcgacgacgacgacgagtcacactactcttgagcttctcatacttcacccaggtcgatttgggaaataatggatgaatctctggagcatcaaactcaaacacatgaccaagagagcgaaatagttactgaaggaagtgccgttgtgcatagtgagccatctcaagagggtaatgttcctcctaaagttgatagtgaagctgaggtcttggatgagaaagtcagtaagcagattataaaggaaggtcacggttccaaaccatccaagtactctacatgctttttgcactacagggcatggaccaaaaactcgcagcacaaatttgaggatacatggcatgagcagcaacctattgaattggtcttggaaaagagaaaaagaactagccggtttagccatccgtgttgctagcatgaa

SEQ ID NO: 95281 - DNA, 397 bp, Arabidopsis thaliana columbia
agatattaaaaaaaaaacagagaaaaatggtgataaaaaggatagagctgtgtatagagctaatgaagataggtatggagtttgtagtggtggtggctgaagccgtccagattgttatgcggcaacacctcaaccaccgtgctccacctcctccgcctgtcctccgccagggtcttctcccttataccgcttcttacccttctccattcctatttggatttctcccttgaatacctttttcttgttatgaaattattctgcttcttttcttcttctttttttttgttctctgtgtagatatttagatcttattcttcttaattcttgtaactctgtatactgcttaatttcttcaaccagatttgcagcctctcttacaatttttaataatcaagtg

SEQ ID NO: 95282 - DNA, 531 bp, Arabidopsis thaliana columbia
  unsure (1)..(531): unsure at all n locations
ggcgactaagcaaaggtgggttcagatgcatttcatcttgaacaggatgagaaagacacagagccggaaaatggaaaggatgagaaatttctctggccagatgctgctgttcctcaagtgtgtgctcttgagaatgcttcacatgcttctcttgcatcggattttcagaaatataaccaaaagatgaggacactggttttcaatctcaagaacactgcactgctggctagacgactgctcaatggcgagttagagcctgcaacgattttgaacatgtcacccactgagttaaaggagggtctaactgctgacgagacaacaaagaaggagcctgatgatgctgatcgaatgcagatgacttctgtaagatgctcgagatgcagtcaattgacggttggcctgagggatatcatccaagctgggcatggagatcgatatcagttggagtgtgttgactgtggctattcctggtatgcctcaagggatnaggtatcaactctgacaatagtcacagntaaancntgccccang

SEQ ID NO: 95283 - DNA, 497 bp, Arabidopsis thaliana columbia
  unsure (1)..(497): unsure at all n locations
ccggaaattacccgggatcgaacccacgacgtccgcatncaatgnacgattccaatggcgtcgattctgggtgatttgccttcctttaatcctnacaatttcagtcaacatcgtccctccgatccttctaatccctctaagatggttcctaccacctatcggcctactcacaaccgtacacgtccgcgcaccagatcaagtgataactacagaagtgaaaaacattcttatacgcagcttctatcaacgagctgaagaaaagttaagaccaaagagaccggctacagatcatctggcagcggagcacgtgaacaagcatttccgtgctgcgtcttcttcttcatctactcagggcttataaaaaacttaaggtcaagcctataacaaatggtcatttgtattgggtacctcttatttaggggtttccaatttggggggaaaaaggtaagggcngttcctngggggaaattttnggtnaaatnnggngggaccataac

SEQ ID NO: 95284 - DNA, 454 bp, Arabidopsis thaliana columbia
  unsure (1)..(454): unsure at all n locations
cctcacttgtctcactccgatccgatcatggctttcgctgtctcggttcagtcacatttcgcaatcagagcgttaaaacgagaccacttcaagaacccttctcctcgtactttctgctcgtgttttaaatcgaggcctgactcgtcttaccttagtttaaaggaacgtacttgcttcgtttccaaaccgggtttagtcactactagatacagacatatattccaggtcggagctgagacgggaggagagttcgccgacagtggagaagtagctgattcgcttgcttctgatgcaccagagtcattttcttggtcttctgtgatactcccgtttatcttcccggctttgggaggattaattgttgggtatgacattggggctacctncggtgctacgctctcacttcagtcacctgcgcttagcggaactacatggtttaacttctcacctgttc

SEQ ID NO: 95285 - DNA, 658 bp, Arabidopsis thaliana columbia
  unsure (1)..(658): unsure at all n locations
gccgtccaaggcttgtcccagcntcatgcaatgcccnnttcaccccaggntcttgantncctaagcccactttgnaaagtttgctctggatccccatgtcactccttggctctgctgtgtcgtacccctacccttgctgctccaccgcatatgttcatcaatccgtacaagaatgccttggctattgccgcgcccccgctgagtacaccttccctcaagcagagaaggtcaaggaatacttgaaggatccaagcaagtttgctgttgcttcagtagctgcggtgtctgctgatgcaggtggtggtgccccagctgctgctaaggtagaggagaaggaagagtccgacgaagaagactatggaggtgatttcggtttgttcgatgaagagtagattttgtcggttaagatcttacctttttgtcgtggattataagtgttgctttgtttttagtatgttggacctcaatttttttggttttagccaatccagttttatgttactactgtcttttattttttggaaagatttcgttttcttatggttggaaaaaaaaaaaaaaaacacaaaaaacaaagggcggccgctctagaggatccaagcttacgtacgcgtgcaggcgacgtcatagctcttctatagtttgtcctaaanaaccg

SEQ ID NO: 95286 - DNA, 1383 bp, Arabidopsis thaliana columbia
  unsure (1)..(1383): unsure at all n locations
tgcggcactgggccggaatttccggtcgactccacccctccgcacagagttaaattgagtttgtgtctcgtaacttatcctgtgagcgaaaatggtgaaagcaactaaggcagagaagaagatcgcctacgataccaagctatgtcagcttatcgatgagtacacccagatcttggtcgttgcggccgataacgtcggatcaactcagcttcagaacatcagaaagggtcttcgtggagactccgtcgtgcttatggggaagaacactatgatgaagcgttccgttaggattcactctgagaacaccggaaacactgcaatcctgaatctgcttcctctccttcagggaaacgttggtttgatctttaccaaaggtgacctcaaggaagtgagcgaggaggttgctaagtacaaggttggtgcccctgctcgtgtgggtttggtggctccaattgatgtggttgtccaacctggcaacactggtctcgacccatcccaaacatctttcttccaggtgcttaacatcccaaccaagattaacaagggtaccgtcgaaatcatcaccccagttgagcttatcaagcaaggtgacaaggtcgggtcttctgaggctgcgcttctagccaagcttggcatcaggccgttctcatatggtcttgttgtccagtctgtctatgacaatggctcagtcttcagcccagaggttcttgatcttactgaagaccaacttgtggagaagtttgcttctggtatctccatggtcacttccttggctcttgctgtgtcgtaccctacccttgctgctgcaccgcatatgttcatcaatgcgtacaagaatgccttggctattgctgttgccactgagtacaccttccctcaagcagagaaggtcaaggaatacttgaaggatccaagcaagtttgctgttgcttcagtagctgcggtgtctgctgatgcaggtggtggtgccccagctgctgctaaggtagaggagaaggaagagtccgacgaagaagactatggaggtgatttcggtttgttcgatgaagagtagattttgtcggttaagatcttacctttttgtcgtggattataagtgttgctttgtttttagtatgttggacctcaattttcttggttttagccaatccagttttatgttactactgtcttttattttttggaaagatttcgttttcttatggttgctttaatatttttcaataatgtctggacgatgaatttgcaatttatctatccgtcgagaaagttaagagcttcttatacatgaaaaaaaaaaaaaagnnnnnnnnnnnnnnnnnnnnnnnnnnnnnnnnnnnnnnnnnnnnnnnnnnnnnnnnnnnnnnnnnnnnnnnngatcaa

SEQ ID NO: 95287 - DNA, 1017 bp, Arabidopsis thaliana columbia
acttcttcttcctcgcaactctttcactctgttttacactcacattctcacatatatataacacagactagctctaatcaccaaatgagaaaccaaagcttctaaattcagtttcaatggcgatcattaaaccaaaccgagatctcaaaccggacggtgtcacagtcgtgactcgtgaagtctgggcggagaatctcgaatcagaatttgaactaatcagcgaaatcatcgacgattatccatttatctcaatggacacagaatttcccggcgtgattttcaaatccgatctccggtttacgaatcccgacgatctttatactcttcttaaagctaacgtcgacgctctcagcttaatccaagtcggtctcactctctctgatgttaacggtaacctcccagacctcggtgacgatcttcaccgaggattcatctgggagtttaatttccgtgacttcgacgtggcgcgtgacgcacacgcgcctgattcgatcgagttgcttcgtcggcaaggtatcgattttgagcggaattgtcgcgacggtgttgagtcggagaggtttgcggagctgatgatgtcgtcggggcttgtttgtaatgaggaagtgagctgggtgacgtttcagagcgcgtatgatttcggttacttgatgaagattctcacgcgccgagaattgcccggcgcgttgggggagtttaagcgcgtgatgagagtgttgtttggggagcgtgtgtatgatgtgaagcatatgatgaagttttgtgaaaggagattgtttggtggtttggaccgggttgcaaggacgcttgaggttaaccgggcggttgggaaatgtcatcaagctggttcggatagtttgcttacgtggcatgcgtttcagaggatgagggatttgtattttgttcaagatgggccggagaaacatgctggggttttgtatgggcttgaggtttttttagggggttcctttttttttttattccaattccatttaattaactcattttttttttaaa

SEQ ID NO: 95288 - DNA, 623 bp, Arabidopsis thaliana columbia
  unsure (1)..(623): unsure at all n locations
atccccaactgctgctggcttaggattgccagttactggtgggaaggtgtcatggttccggaaatgtacttcaaagatgcttaagttgtccccaataaaaatgacagaaccctctgttacttggaatttggctgatcaagaacctcaatctactgagcaagctaacgtgggtgggccatcaactaccgttcaggcagcgacgacctattcctttgatgttcaaaaggccgaatctgaaactggcacaaaagaagtcgaagtcaccaatgtaaactcagacggtgatcaaagcgacatcaacagcaaggctcaagaagtcgctgcagattctttgtccaatctagatgttgatggccaatcacgcatgaaagggaaagggaaagccagaaccagaagaacacgctctgtcaaagatgttgttgatgatgctaaagctttatatggagaatctataaacctatatgaacccaatgattcaacaggaaaatgttgacgggctctacttaaagcaacgcacagggtgaaacctgggccgttctgataaagccanttttcgtagnatttgnccggaancgtgggccgtnttgggttcttttnaggaccttngtncttcttggnaggtt

SEQ ID NO: 95289 - DNA, 584 bp, Arabidopsis thaliana columbia
agaagatgtaagtgtacaatgacaatactgaaatgaggtcactagagacacaaccaatcaaggaaacagctttggaagggtacaatgatactgctgaaataaggtcaccagagacacaaccaatagatgaaacagctttggaagtgtacaatgacactgaaatggttgcaccagagacccaaccgatcaagcgacgcatgaagaagtcgatggtgtgggaacatttcacaatcgaggcggtagaaccgaactgcagaagagctttttgcaaaggatgtaatcagagttttgcttacagcaacggtaacaaagtggctggtactagccatcttaagcgtcacatttttaaggggacatgtcctgcacttatccatacgcatgacaatgacaacaacccactgatgtctactccttacactcccaagactgacactccgagaaggcgttaccggtctcagaacaacgctagtccctatgttgcgtttaatcaggacaagtgtcgtcaagagatagctaagatgatcattatgcatgactaccctcttcacatgggtcagcatccaggttttgtctcgttcgtgcag

SEQ ID NO: 95290 - DNA, 846 bp, Arabidopsis thaliana columbia
  unsure (1)..(846): unsure at all n locations
ctctctctctctctctcacacacacacacaaacgcacatacttgagcaaagtcatcacaatgagcttcttcatcgaagattctggtctcatagtcactcagcttctctacaaaatggctgttctcatcaccgtcttgagatggatcctcgcttggatcttacgctaccgatccagatccagatccacctcttcttccacttccgcctgtccttcgatttcctcacaggcgatcaaagaaagcctctccgtgacgacgttccgtgacgcagctgagagatctccggcgatgatcaacgacacctgcgctgtgtgtctcggagatctggaagatggagatgaggttagagaactcaggaactgtagccatatgtttcaccgtgagtgtattgaccggtggttggattatgaatgttgcggtggtgatgagaatacccgaagcgtgtgggggggataatcccccgtccgtgtcctcttggtaggacctccgctactggctgctaatccgacgtcgtgtggtgattggccgactaagaacgaacctagctgggccgttgaacggcttctctacctcttcggagatgatcttcacgtctgattaaatttttttttgtcttttcatttgattttttatttagtgggatcgattttgatcaattagaaatttaagtagtgagagtggttaatttttgtaaattgggggatttaatgtgttagattaggaaatataataataatatcatcgattaatttnnnnnnnnnnnnnnnnnnnnnnnnnnnnnnnnnnnnnnnnnnnnnnnnnnnnnnnnnnnnnnnnnnnnnnnnnnnnnnnnnnnnnnnnnnnnnnn

SEQ ID NO: 95291 - DNA, 1081 bp, Arabidopsis thaliana columbia
  unsure (1)..(1081): unsure at all n locations
caaaccaaaccctaaaccatctttctcaacatggcgcttcttcacaagcaaaacatttcctttgtgatactcctcctcctcggtctccttgccgtctcttatgcttgtgattgtagtgaccctcctaaaccatcaccacaccctgttaaaccgccaaaacatcccgctaaaccacctaagccccctaccgttaaaccacctactcacaccccaaagcctcccactgtgaagcctccacctccatacattccatgccctcctccgccctatactccaaaacctccaaccgtgaagccaccaccacctccctacgtgaagccaccaccacctcccactgtgaagccaccaccacctccttacgtgaagccaccaccaccccctaccgtgaagccaccaccaccacccacgccgtatacttcaccaccacccacgccgtatactccttcaccacccacggtgaagccaccaccaccaccggtcgttaccccaccaccgccaacaccaaccccagaggcgccatgtccgccaccaccaccaacaccatatcctcctccgcctaaaccggaaacttgtccaatcgacgcactgaaactaggcgcatgtgtggacgtgctaggcggtttgattcacatcggactagggaaaagctacgctaaggcaaagtgttgcccacttcttgacgacttagtgggtcttgacgcggcggtttgtctctgcaccaccattagagcgaagcttctcaacattgacctcattatcccaattgctctagaggttcttgtcgactgtggtaagactcctccacctcgtggcttcaagtgtcctactccgctaaaaaggactcctctcttgggttgatctcttttgtatttcatttgatacaacaaaaaagggtttgagacgttaagatctactagattcttatttatgttttgcgaaacaataattaaaagggtctaaatttagtaattgttctaaaaatataaagcaaattttatgtattgtatgatgattatgtacgttgaaataatgttatctgaaatttgatttttaacggacaaaaaaaaaaannnnnnnnnnn

SEQ ID NO: 95292 - DNA, 800 bp, Arabidopsis thaliana columbia
  unsure (1)..(800): unsure at all n locations
cggaattggaaggnnccgggccagacccacgcgtcccgaagagaggagagagaaatacaaagaaaaataaatggagaacggcaaatgcaacggagccacgacggtgaagttaccggagatcaaattcaccaagcttttcatcaacggccagttcattgatgctgcttcagggaagacgtttgagacgatagaccctaggaacggtgaagtgatcgcaacaatagccgaaggagacaaagaagacgttgacttggccgttaacgctgcacgttacgccttcgaccatggtccttggcctcgcatgaccggcttcgagagggcaaagcttatcaacaaattcgcagacttaatagaggaaaacattgaggaattggctaaacttgatgcggttgacggtggaaaattgtttcagttgggaaaatatgctgatattccggccacagccggtcattttcgatacaatgcgggtgcagcagataaaatccacggcgagactcttaaaatgacgcgtcaatctttgttcggatacacctcaaaggaccaattggggtggttggtaatatcatcccttgggatttcccaagcattttgtttcccacaaaggtggctccggctttggctgctggttgcaccatggtggtcaagccagctgaaccagacttcantctctnctttgttctatgcccatctttcaaaagaagcgggaattccctgaatggggtnctcaanattgnaactggntttggntcaactcctgnagctnccannggctcccaatttngacggngcaaagtaagttc

SEQ ID NO: 95293 - DNA, 624 bp, Arabidopsis thaliana columbia
  unsure (1)..(624): unsure at all n locations
ggaacttgcgataaaaaattggtggttttagatgatttagctccttggatcaaaatccctagcagttgggtacagtactacactccgttgctagcgattcaacccccttcagggcacgatgcagcggatatagtggctaagataaacgaaggtttgagctcgggtaaagtagagaatgggaagtacttgaaggtttatctcaaagaggatttacctagcaggctgcattatgtagacagtgaccgcatcccgcctattataggactagtcgatgagggcttcaaggtggagcagaagaaaagtaaagccaaggaatgcggtggagctcacgggtatgacaatgccttcttttcgatgagaactatattcatcgggcatggtcctatgttctcaaaaggaaggaaagtgccttcttttgagaatgttcagatatacaatgtgatcagttcgattctaggacttaaggcagcaccaaacaatggatctgatgagctttcttcaagcattctcttgccacgcgtgtagaagggtanggtaagtttattcttctgtcgataaaaggcagtctagactcttgagaccttgttgtcaaaacataaacgcgtgtgacctcttagacgtttt

SEQ ID NO: 95294 - DNA, 730 bp, Arabidopsis thaliana columbia
cgtactaggacagcgagggttttttagtcttattttttgctataaactcttacaacttcatttttatagttttatgttttgctataaactcgtacgacttcattttttttagttttattttttgctataaactcgtacgacttcattttttttagttttattttttgctataaactcttacaacttcattttgcattcattcatacgttgattaattatacttacttgtctaatatataccgaagattggatggcaagatcgcaattataacaggcggagctagtgggattggagctgaagcggttaggttgttcacggaccatggagctaaagtggtcatcgtggacatacaagaagagcttggccaaaacctcgccgtttcgatagggctagacaaagcaaggttttaccgttgtaatgtaaccgacgagacggatgtcgagatcgccgttaagttcaccgttgaaaaacacggaaagcttgacgttctgtttagtaacgccggggtcttggaagcgtttggaagcgttcttgatttggatcttgaggcgtttgatcgaacgatggcggttaacgttcgcggagcggttgcgtttatcaaacacgctgtacgttcgatggtgtctagtgtttcttgtggctccattttatgtactcactagtttttgcggtagatttaggttcttcctaattttatattttctctatctttatattttactctctttt

SEQ ID NO: 95295 - DNA, 563 bp, Arabidopsis thaliana columbia
  unsure (1)..(563): unsure at all n locations
ggtcttttcaaaagtggaaatacaacaaaacaatgtcgggacttagattggatggcaagatcgcaattataacaggcggantagtgggattggagctgaagcggttaggttgttcacggaccatggagctaaagtggtcatcgtggacatacaagaagagcttggccaaaacctcgccgtttcgatagggctagacaaagcaagtttttaccgttgtaatgtaaccgacgagacggatgtcgagaacgccgttaaggttcaccgttgaaaaacacgggcaaagcttgtacggttctgtttaagtaacgccggggtctttggagcccttggaagcgttcttgatttggatcttgaggcgtttgatcggacgattngcggttaacgttcgcggttcggctncgnttatcaaacacgnggcacgttccattngtggctagtggtcctcgtgggtccattgtatgtccgccgngtnttcggcanaataggtgtcccgncctatagttcacgggttttaanacggnttntngggcttatcccgtcacnnntctngccttggnaaaccg

SEQ ID NO: 95296 - DNA, 373 bp, Arabidopsis thaliana columbia
cttcttcaatgtagtttcatgtccctagaaattttcgttttcttctctgtgaatcatctatcgttttctaagaaattgagttcactcttcggcgatggagcgaaactcgtcggacgacgaagaagaccaccagcatttgattccccaaaacgacactcgaatccgtcaccgggaggattcagtttcctccaacgccaccacaatcggcgggaatcagagatcggcgtttcagatcgacgacattttacatcgagtccaacaccgtgggaagatctcgctcaacaagcgttacgtcattgtcttcgtttctctaattatctcaatcggtcttctcttcttactcactgatcctcgtgaactatttgcggcgaat

SEQ ID NO: 95297 - DNA, 1144 bp, Arabidopsis thaliana columbia
  unsure (1)..(1144): unsure at all n locations
tgatactctcnnnnnnnnnnnnnnnnnnnnnnnnnnnnnnnnnnnnnnnnnnnnnnnnnnnnnnnnnnnnnnnnnnnnnnnccacgcgtccggtccaccaaggacggtaagacctttgtcgattgcttgcgcgatgccaacatcgtccctggcatcaaagttgacaagggcttgtctcccctagccggttccaacgaagagtcttggtgccaaggcttggatggattggcctcacgctctgctgagtactacaagcaaggcgctcgttttgccaagtggaggacagtggtgagtgttccctgcggtccttcagcactggctgtgaaggaagctgcgtgggggctggctcgctatgcagccatctctcaggataatggtcttgtccccattgtggagccagagatccttctggacggggaccacccaatagagaggactctggaggtggcagagaaagtgtggtcagaggtgttcttctacttggcacagaacaacgtcatgtttgagggcattctgttgaagccgagcatggtcaccccaggcgctgagcacaagaacaaggcctctcccgagaccgttgcagatttcacgctcaccatgctgaaaaggagggttcctccggctgtcccagggatcatgtttctgtcaggaggacaatcagaggcagaggccacactgaacctgaacgccatgaaccagagcccaaacccatggcatgtgtccttctcatacgcacgtgccctgcagaactccgtgctcagaacatggcaaggcaagccggagaagattgaggcctcgcagaagggcactgtttggtgagggcaaaggccaactcactggcccagctcggcaaatactcagccgagggagagaacgaggatgcccaagaaaggaatgtttgtcaagggttacacctactgatttgttaatttcagagatcgtaataaggattaaggaccattgttgtcttttgtttttttttcccctttttgttttgtctccgaagaaaaaaacagtcccgagtccacgctcatatcatatatgtatgtgagcaacgtgttaacatcctcttaaatctatatttcctctcagccaaagaaaaagtaaaagcggggnnnnnnnnnnnnnnnnnnnnnnnnnnnnn

SEQ ID NO: 95298 - DNA, 632 bp, Arabidopsis thaliana columbia
ttcccacgcgtccgccgtcttcatcttcttcctctctctcacgcagctgctttgattaactcttcaggtccagcttaagagttttgtgaagatggtcttagtgctatacgagacagcggcggggtttgccctctttaaagttaaagatgaaggaaagatggctaacgtcgaggatttgtgtaaagagttcgacactccagactcagcacgaaagatggttaagctaaaagcttttgagaagtttgacaatacatctgaagctctcgaagctgtggctaaattgctggagggagctccaagcaaaggtctgcgcaagtttttgaaagctaattgtcaaggtgaaaccttggctgtggctgattcaaagcttgggaatgttatcaaggagaaactgaaaattgattgcattcacaacaatgctgttatggagcttctacgtggtgttagaagtcagtttactgaactcatatctgggttgggtgatcaagacttggctcctatgagcttgggtctgtctcacagtctcgccagatataagctaaagtttagttctgacaaggtggataccatgattatccaagctattggtctgcttgatgatcttgacatagagctgaacacatacgccatga

SEQ ID NO: 95299 - DNA, 481 bp, Arabidopsis thaliana columbia
aacagaaccaaccaaccaaccaaccaacaataagaagaatccaaagacatgaaacttttcgttattgttctcatctcttttctttccctcctccaagcatcaaaaggattcgatttcgacgaaaaagaattagaaaccgaagagaacgtatggaagctctatgagaggtggagaggccaccactctgtatccagagcctcccacgaggcaataaagcggttcaacgtttttagacacaatgtccttcatgtccacaggactaacaaaaagaacaagccttacaaactcaagatcaatagattcgccgacataacgcaccacgagtttagaagctcctacgctggctctaatgttaagcatcaccgaatgcttcgtggaccgaagcgcggatctggtggtttcatgtatgagaatgtgaccagagttcccagttctgttgattggcgagagaaaggagctgtcacttgagtcaagaattaac

SEQ ID NO: 95300 - DNA, 513 bp, Arabidopsis thaliana columbia
ttgaatttatgtgacactctacaagagctttgccgcccctgcacgcgtacgtaagctcggaattcggctcgagctgggtcgattcatctctcacatctatctccgactcagccgaattgctctacacttacgagaacgcgattcatggattctcaacacggctaactcaagaagaagccgactcgctcatgactcaacctggtgttatctccgttttaccggagcaccgttacgagctacacaccactcgtactcctctcttcctcggtctcgacgaacacaccgcagatctgttccctgaagccggctcttacagcgacgtcgtcgtcggagttctcgataccggagtttggcccgagagtaaaagctactccgacgaaggattcggtcctattccttcctcctggaaaggcggatgcgaggccggaaccaatttcaccgcttctctctgttaccgtaaactaatcggagcaagattcttcgctcgttgttacgaatcaacgatgggaccaa

SEQ ID NO: 95301 - DNA, 2659 bp, Arabidopsis thaliana columbia
  unsure (1)..(2659): unsure at all n locations
gagagacacaacacaccatctcaatcatgacttcttcgtttctctcctccactgctttcttcctcctcctttgtctaggattctgccacgtgtcctcttcctcctccgaccaaggaacttacatcgttcacatggctaaatctcagatgccgtcgtctttcgacctccactctaactggtacgattcatctctcagatctatctccgactcagccgaattgctctacacttacgagaacgcgattcatggattctcaacacggctaactcaagaagaagccgactcgctcatgactcaacctggtgttatctccgttttaccggagcaccgttacgagctacacaccactcgtactcctctcttcctcggtctcgacgaacacaccgcagatctgttccctgaagccggctcttacagcgacgtcgtcgtcggagttctcgataccggagtttggcccgagagtaaaagctactccgacgaaggattcggtcctattccttcctcctggaaaggcggatgcgaggccggaaccaatttcaccgcttctctctgtaaccgtaaactaatcggagcaagattcttcgctcgtggttacgaatcaacgatgggaccaatcgatgaatctaaagaatcaagatctcctagagacgacgacggtcacggaactcacacctcatcgaccgccgctggatccgtcgttgaaggagctagcttattaggctacgcttcaggaacagctcgtggtatggctccacgcgctcgtgtcgctgtttacaaagtctgttggctcggtggttgtttcagctcagatattttagctgcaatcgataaagccatcgccgataacgtcaatgtcctgtcgatgtcactcggcggtggaatgtcggattattatagagacggtgttgcgatcggagcattcgccgccatggaaagagggattttagtatcttgctcagctggtaatgctggtccgagtagttctagtttatcaaacgtagctccatggatcacaactgttggtgctggtactttagatcgtgattttccggcgcttgcgattctcggtaacggcaagaatttcaccggagtttctttgtttaaaggagaagctttaccggataaattgttgccgtttatttacgctgggaatgctagtaatgctactaatggtaatctctgtatgaccggaactttgatcccggagaaagtaaaggggaagattgtgatgtgtgatagaggaattaatgctagagttcagaaaggtgatgtggttaaagcagcaggtggagttggaatgattctggctaacactgcggcgaatggtgaagagcttgttgcggatgctcatttgttaccggcgaccaccgttggtgaaaaagccggtgatataatccggcattacgtgactactgatcctaatcccaccgcttcgatttcaatcttaggaacagtcgtcggtgttaaaccatctccggttgtcgcagcgtttagctcacgtggaccgaattcgattacaccgaatattcttaaaccggatctgatcgctcctggagtaaacatcctcgccgcgtggaccggtgctgctggaccaaccggactcgcttccgattctcgccgcgtggagttcaatatcatctctgggacgtcgatgtcttgccctcacgttagtggtttagcggcgcttctcaagtcggtgcatcctgaatggagcccggcggcgattagatcggcgcttatgaccaccgcttacaaaacctacaaagacggtaaaccgttactcgacatcgcgacagggaagccttcgacgccgttcgatcacggtgcaggacacgtgtcaccaacaactgccactaatccaggactcatctacgatctaacgacggaggattacttaggcttcctctgcgcattgaattacacatcgccgcaaattcgaagtgtctcgagacgtaattacacttgcgatccgagtaaatcgtactcggtcgctgatttgaactacccgtcgttcgccgttaacgttgatggagccggtgcgtataagtacacgcgcacggtgacgagcgtgggaggagctgggacttactcggttaaagtaacttcggagacgacaggagtcaagatttcggttgaaccggcggttttgaatttcaaggaagctaacgagaaaaaatcgtatacggtgacgtttactgtagactcgtcgaagccgtctggatctaacagctttgggagtattgaatggtcggatgggaaacacgtggtgggaagtcccgtggcgattagctggacatagtcgtaaattatgagaaatgaaaggggttttatggaaaagaaaaggtgtttacagatttattgtaatgccgtttttagatacgaagaaacctctgtttagcaaacaacgacatgcagtctgttaagacttgcctagtttgtttttgggatgtcttgctgtttttaattttaaaaagaaatatattctccggctacaacagtagctgggtctctctaggtgttttatcaaaaaaaaaaaaaaaaagaatgaagagaaaatgtttgaaaaaaaaaaaaaaagnnnnnnnnnnnnnnnnnnnnnnnnnnnnnnnnntagaatcgnnnnnnnnnnnnnnnnnnnnnngnnnnnntcnnnnnnnt

SEQ ID NO: 95302 - DNA, 615 bp, Arabidopsis thaliana columbia
  unsure (1)..(615): unsure at all n locations
nnnnnnnnnnnnnnnnnnnnnnnnnnnnnnnnnnnnnnnnnnnnnnnnnnnnnnnnnnnnnnnnnnnnnnccacgcgtccggtcgagatcgcttctctccccgttgccgtccgtccccaccgctgagtgatagatcgaaacagagaaacacacacggcgaagaagatttcaccatattttgtctaagtggattctgttgagagagagagatggctatgtctcaggtggtgaacacgtacccgctttcgaactacagcttcggaactaaggaacccaagctggaaaaggacacctccgtcgccgaccggctcgctcgtatgaaaatcaactatatgaaagagggcatgaggactagcgttgaagggattctactggtgcaagaacacaaccatcctcatatacttctgctacaaattggtaacacattctgcaaacttccaggtggacgcctgaagcctggtgaaaatgaagctgatggtctgaaaagaaagctgaccagtaaacttggaggcaattcggctgctcttgtacctgactggacggtaggagaatgtgttgcgacatggtggcgtccaaactttgaaaccatgatgtacccgtattgccctcctcaca

SEQ ID NO: 95303 - DNA, 583 bp, Arabidopsis thaliana columbia
  unsure (1)..(583): unsure at all n locations
gcaagaaaccaactgtttgcattggtaagttttgacttgggacaacactgctcttagtttgtcttcattgccatcgcaaagagagaaaggagatgatgttaacatgcacatcacaagactagattttgacctgaccttacacactctctttctccatctctccagttatctaatcctctaaagctgctcaaaacttacatgaaacaatggaaataaactcactcttctcacaacaatgggaaacacaggctagatccactccttcgggttgatgcaagcatccaatagcttccactcttcggtcccctcttccgggttatggtcatattcccatcttgctgaaagcggaagagagacgagaatgctctctattcgtcctcctgtcttcagaccaaatggcggtncccgatcatataccaagttgaatcgncanacgnccccgtcggaatggtggcangccttgggtggncggaaatccangcttcctttcccacaaanggannaagcggacatgggttgggatcaggggaagnanggatcngncaagctagggcnaaaaaccccagccgnncaaaggggggga

SEQ ID NO: 95304 - DNA, 771 bp, Arabidopsis thaliana columbia
  unsure (1)..(771): unsure at all n locations
agagagacactgaaacatagagagaagaaaaagaagaggtttagagagagaaaaatggcgtcaaagctctgcgattcgtgcaaatcagcgacggcggcgttatactgcgcggccagacgcagcgtttctatgcttaagctgcgattcaaaagtccacgcggcgaacaaactcgcgtcacgacacgcgcgcgtgtggatgtgtgaagtgtgcgagcaagcaccggcacacgtcacgtgcaaagcagacgcggccgcgttatgcgtcacgtgcgaccgtgatatccactcggctaatccgttagctcgccgtcacgaacgcgttcccgttactccgttttacgattccgtctctagtgacggttccgttaaacacaccgccgttaatttccttgacgactgttacttctccgatatagatggtaacggaagccgtgaagaagaggaggaagaagctgcttcgtggctgttacttcccaatccaaagactacaacgacggcgacggcggggatcgttgctgttacttcagctgaggaagttccgggagatagtccggagatgaacactggtcaacagtatttgttctcggatccggatccgtatctggatctggattatggaaatgttgatccgaaggtggaatcgttagagcagaatagctcccggtactgatgggtggtgtcccggtggagaatcggacggtaaggattccgccggtgaacgagaattgcnttgaatggntttaccggnggtcnaaggttactatggggggg

SEQ ID NO: 95305 - DNA, 629 bp, Arabidopsis thaliana columbia
  unsure (1)..(629): unsure at all n locations
cgttcacggaactnaggatcggttcctcgaacctntgggccatctncnacgactggtgcaccccaagtccaatgcgctgggatgagcagacgattcatttttnagtcaatgcttggnttttnttnatagctgtnctggcagtgctacctctaataccaaagaacctctcaaatagggcttatngtccctcgcgtccgggaactgcatgctcatctctatattccttatactccttatacgggaggccaagggcatggaatatgcaagggctgcaagtttattttcaatcaattgtggcagcaaaggatttcatctacttcatctactgccttacattcgtcacttcacatctctgtctcaagtttgctttgattcccatcttgtgccgggcacttgaacaagtagccaagttcttgaggcgtaactttggtcggtccactatatacagaaagtacttggaagacccttgtgtgtgggtggagtcaaacactactaccctcaacatcttgtcatcgcaggctgagatagccattggcttccttctgattatctctctgctctcatggcaacgtaacattatacagacgttcatgtactggcagctattgaagctgatgtatcaagcaccg

SEQ ID NO: 95306 - DNA, 591 bp, Arabidopsis thaliana columbia
  unsure (1)..(591): unsure at all n locations
aacccatacaaaaaaagtcgaatccaaatctctctctccggcgatctcatccatggcggaaggcggcgaagattcccagcggttgaagaaaattgcggcggctgccttcgactacgaaaacgacgctcgatgggccgattactggtccaatatcctcatccctcctcacatggcttctcgtcccgaggtcgtcgaccatttcaagcgcaaattctaccaacgctacatcgatcctgatcttgttgtggagcctatgtcgacttcatcttcgtcttcacaatctgccaggccaactgctacatctgcatcttcaactgcatcttctaatgcaaatgaacaagttcgttcacggaactcaggatcgggttcctcgaacctcttgggccatctgctacggcttggtgcaaccccaagttcaatgcgctgggatgggcagccggttcagttttcagtnatgcttggntttttgtanaggtttnttggagtntnccnttnaatccaaagncnttaaatngggttttggtttttttatggnctaatncaanttanntcctaaactcctnnnggggcaggatgattaaggtaatttta

SEQ ID NO: 95307 - DNA, 415 bp, Arabidopsis thaliana columbia
cccacgcgtccgcccacgcgtccgtaacactaagcaaaatccgtcacaggaacattgtcaggctatacagtttctgttaccaccaaggatcaaactcgaacctcttgcgctacgaatacatgtctcggggaagccttggcgagttacttcacggcgggaaatcacatagcatggattggccaactcggtttgctatcgcactcggtgcagcggaaggtctcgcttacttacatcatgattgtaaaccaagaatcattcaccgtgacatcaaatcgaataacattctcatcgatgagaatttcgaagcccatgttggagatttcgggttagcaaaagtcatcgacatgccactatcaaaatccgtctcagccgttgctggatcctacggttacatcgctcacgagtatgcatacac

SEQ ID NO: 95308 - DNA, 407 bp, Arabidopsis thaliana columbia
cccacgcgtccgtgacggagaaggtgatcgtggtcaaaaccctagaattatggagagggactcagattctatcaaagatccgatctcagagccttcatggtttacccccaaaaagcttctctttgtgttttgtgttgtcaacttaatcaattatatagatcgaggagctatagcaagtaatggtatcaatgggagtcgtggttcttgcacttcgagtggtacatgttcatctggcagcggaatacagggagatttcaacttgagcaattttgaagatggagttctgtcatctgctttcatggttgggcttcttgttgcctctcctatatttgcttccttagctaagagtgttaatccgtttagacttatcggagttgggttgtcaatctggactctcgctgtgattg

SEQ ID NO: 95309 - DNA, 1140 bp, Arabidopsis thaliana columbia
  unsure (1)..(1140): unsure at all n locations
aggtgaactatagaagaactatgacgtcgcatgcacgcgtacgtaagctcggaattcggctcgaggagatgatggctgcgaagcttcagaaatggcgaaatctggcaggtcgtctagatctgatgaatcggagcggcgctgtgtcgacgaggcggttcctgcacgaaggtccagataccgtggaggagcttctcgaaagacatctagcgaagaaagagaaaccaataatcgatcacgatgaggctgagtttctgaatagacggcgtctgacgagcacgcgccgggaagcgttgagtttgtacagagacatattacgagcgactcggttcttcacgtggattgattccaggggaaatttatggagggacgtgttgagagagaacgcgaggaaggagtttgaagcggcgcgatttgagacagatccggaggttatcacaaggcttctgataggtggaagcgacgccgtttcgtctgctttagataagcttgcggagaagcaaagaagagatgattgagaaacaacgccgtggtgatcaacgctgatttgacggatcatagggcatgaatgtttcaacagaatgatccatcgagtttaaagtggttggtgtttgaaattcttgctgtaaaatggttgcgagaagaagaagcgagatcatttagaaacgtgcttacagaattttgggtttgatgtttgagtgttgtaattcacttgcacaacttancccacttcgtttctgaaattatcattcatgacattgtagagtttgtatacactgccacagagctataaacaaggctgttgattttaaaactggattctgtaacctcttttgtttcgtcaagaatcatcctgagagaagtatgattttggttgcttgaaagagtatgaaagatgagttcccttgtttagatgacatgtctcgtggtctgcacagtcagttgatgtgcaagtcgagagattaatttactttttataatccgcttctacgaagcaagcctactatctcagcaagatctgaaggcggtggacatgaaaactttactatttccccagtgcacggatgtgtaaagccgagaactatagcatgaaggcaaggtctatccattctggaaataagctctatgatctcttcttgatcg

SEQ ID NO: 95310 - DNA, 501 bp, Arabidopsis thaliana columbia
gtacccttcaagttgaagaccttgaggccgttgatactactctgcgtcttgattcccgggcctctgcgatgtataatgccaaggtaatcaaaccgaaatggaatttgattgatggagctgatcctttactctccttaaggctcggtcactcttgaagctcggctgatagcagagggagttcggcaactgcttgcacgagtttatcttctgccagacaaactgaggaggcgtcctccatggatattgagctcgactttagcctccatcttggcaacgagaaaccgacggctagcaacatagaaccagctaatttgaaaatgaaagggttgcaggtcccttccccgaaatttgatcttgaattgagtctttctggtggaggatcttgtcaatctgagatcactgccgtccagcagcacgccaaccgatttcaatctcttgcggacatgctgcgtgcaaataatgaacaatctgcaacgtgtggttggaggcaagggttttgat

SEQ ID NO: 95311 - DNA, 770 bp, Arabidopsis thaliana columbia
  unsure (1)..(770): unsure at all n locations
cnnnnnnnnnnnnnnnnnnnnnnnnnnnnnnnnnnnnnnnnnnnnnnnnnnnnnnnnnnnnnnnnnnnnnnnccacgcgtccgttgtcttttctctgtctcaatctcttatttttaaatattcacatacttcaattttcatggtttttattttttttatctaaaattatataatatttgatagaacaaagagggggattcgcataacatcatcagagataatcgcaaatacacttcttcttcttctcgaaatctcagccgttcgtttgtgtgtcattggctctcaatcgaagaaaacttttagcttacaaaatctgctttgagtagtattgatttttcaattcatatggaaaatcctccattagaatctgagatcaaagaggatatgtctttgaagaatcatcctccagacaaggataaggacaaagacactatcatggaacaacctagtagtccacgtcatcggaaggttgttgctagatggttacctgatgaagcacagaggccaattatcgatgacgctcccgtattcactccatcactagaggagtttgtagatccacttgcgtatatcgagaagatacgtccactagcagagccgtatggtatctntcggatcatcccaccatcgncatgggaggctccttgccggcttaggggagagttntgggggcaggcaaagtttcctnctngggttnaancgtngncnnctttaaaaccgtngccgttnagagaaccncgggttgaaacgggaacggggnngaaacttgg

SEQ ID NO: 95312 - DNA, 620 bp, Arabidopsis thaliana columbia
  unsure (1)..(620): unsure at all n locations
accacgcgtccgctcttttgtgagctcagatctgaccagagagaaagaaacaaccggagaagaagaagatgactgaccgagtcttcccagcttccaaaccaccaaccgccactaatggagctccaccagttggttccataccacctcctccagctccggcgactgtaaccagcaacggaacaacaaacggaatggctaatcagaaacctcaagtctacattccagctaaccgtccggtttaccgtccacagccttacagtcgccgtcatcaccaccaatctcgaccaagctgccgacgaatttgctgttgttgctgtttctggtcgattctgataattctgatcttagctctcatgactgcaatcgccgccaccgcgatgtacgtgcatctaccaccctcgtccgccgtcgttctccgtcccgtcaataagaatcagccgcgtgaacctaacangctcctctgattcctccgtctctcatctctcttccttcttcaacttcactctaatctcagagaatccaaaccaacanctctcttttctcttacggatccttttcaccgtcaccgttaatttcagctaaaatcccggttangatggctcggttaacggtaactgttt

SEQ ID NO: 95313 - DNA, 513 bp, Arabidopsis thaliana columbia
  unsure (1)..(513): unsure at all n locations
cctttaacgggcaagctgtttcctcttcgtttgcacttccctcctaacaacggaacattgcatgtcattttactaccctccagcgcgagcctctagaatcgacccgagacaattagaaatgagtgattgtgtgattgtttggtgaagcatatgatatgacccgtataagaagatagtaagagttggtagttggtacaagactcgttgttacatagattgaaaaaaggcgtcggcacatgaaccttgcttaatctatagactatttgtaagagttttgataataggaaggacttataaattattttttgggggaataataatacaaagtttgtttttgtaaataagcgatttctttgtaaacgaacatttggattttgggggtttatttgtgtgagcatggattcatnnnnnnnnnnnnnnnnnnnnnnnnnnnnnnnnnnnnnnnnnnnnnnnnnnnnnnnnnnnnnnnnnnnnnnnnnnnnnnnnnnnnnnnnnnnnnnnnnnnnnnnnnnn

SEQ ID NO: 95314 - DNA, 542 bp, Arabidopsis thaliana columbia
ccgttggatatgcctttcacgtggtaaaggataatagacgtggcggtgggcgtgactcagcacattgctgagaagaaaccgtgcatggagagacgcctgtggtgtgtaccttcgtagtcctttaaacggcaagcgtgtttctctcttcgtttgcaacttcctcctaacaacggaacattgcatgtcattttactaccctccagcgcgagcctctagaatcgacccgagacaattagaaatgagtgattgtgtgattgtttggtgaagcatatgatatgaaccgtataagaagatagtaagagttggtagttggtacaagactcgttgttacatagattgaaaaaaggcgtcggcacatgaaccttgcttaatctatagactatttgtaagagttttgataataggaaggacttataaattattttttgggggaatataatacaagtttgtttttgtaaaaaaaaaaagaaaaccccaaagggcgaccgctctagaggatccaagcttacgtacgcgtgcgttcgacgtcatagctcttctat

SEQ ID NO: 95315 - DNA, 678 bp, Arabidopsis thaliana columbia
  unsure (1)..(678): unsure at all n locations
acgnnnnnnnnnnnnnnnnnnnnnnnnnnnnnnnnnnnnnnnnnnnnnnnnnnnnnnnnnnnnnnnnnnnnnnnnnccacgcgtccgcccacgcgtccgtacggctgcgaagacgacagaaggggcaatgggatacggtgtttacaagtacgtcgacaagtatggagctgactcagacattgcgagaagaaacgtgcatggaagacgctgtggtgtgtactcgtagtcctttaaacggcaaccgttggatatgctttcacgtttaagggaaatagcgtggcggagctgactcagacatatgatatgaaccgtataagaagatagtaagagttggtagttggtacaagactcgttgttacatagattgaaaaaaggcgtcggcacatgaaccttgcttaatctatagactatttgtaagagttttgataataggaaggacttataaattattttttgggggaatataatacaagtttgtttttgtaaataagcgatttctttgtaaacgaacatttggattttgggggtttatttgtgtgagcatggattcataaacaaaaatcattaatttcttaaaaaaaaaaaaaaaaaaaaaaacaccaaacnnnnnnnnnnnnnnnnnnnnnnnnnnnnnnnnnnnnnnnnnnnnnnnnnnnnnnnnnnnnnnnnnnnnnnnnn

SEQ ID NO: 95316 - DNA, 580 bp, Arabidopsis thaliana columbia
acgaaaaaaaattggcgtcgattgatagagactatgaagaagaagaaaatgccgtgcctcaacctctccaccaacgttaaccttgacggcgtcgatacatcttccattctctcggaagcttcctccaccgtcgcgaaaatcatcggcaagcctgagaactatgtgatgattgtcttgaaaggctcagtgcctatgtcatttggcgggaccgaggatcctgcagcttatggtgaattagtttctatcggtggccttaatgcggatgtgaacaagaagctaagcgctgctgtttccgccattcttgagactaacctatcggtgcccaagtctcgattcttcctcaaagtttatgacaccaagggatccttctttggttggaacggggcgactctttaattccgtggtaggtgattagtgtgattgtcttgaaatgtatgatctactctcatcgatcaagtaactttgaacaacttcgtattgtaaacatatctaaggtttgatggagttgcattaagaaataacatttatgctatatatgatgctacaacttactatcagggtaaacaatggttatttagtc

SEQ ID NO: 95317 - DNA, 424 bp, Arabidopsis thaliana columbia
cggacgcgtgggtagttttttccgccacactcttccgccattatttttgttacttggagctagcgtagctaaaaaatatggggagcgataccgaagcacagaagtcgattcaaaaggagaagaagaagtacgctattactcttgctcctatcgctaaacctctcgccggcaaaaaactccagaagagaactttcaaactcattcaaaaagctgctgggaagaaatgtttgaagagaggagttaaagaagtggttaagagcataagacgaggccagaaaggattatgtgtaatagctggaaacatttcacctattgatgttattactcatcttccaatcttgtgtgaggaggctggtggtccttatgtatacgttccttcaaaaaaagatcttgcgcaagcaggggcaacgaaacgaccaacatg

SEQ ID NO: 95318 - DNA, 624 bp, Arabidopsis thaliana columbia
  unsure (1)..(624): unsure at all n locations
gtcttactcgtgccagccactcgcatttntccagatttnattatccttcctcgaaacaagagcttagctaagatgacgaagaactacccaaccgtgagcgaagattacaagaaggctgttgagaagtgcaggaggaagctcagaggtttgatcgctgagaagaactgtgcacccatcatggtccgactcgcatggcactctgctggaactttcgattgtnaatcaaggactggaggtccattcggaacaatgaggtttgacgctgagcaagctcatggagccaacagtggtatccacattgctcttaggttgttggaccccatcaggggagcaattccctaccatctcttttgctgattttccatcaagcttgcttggtgtttgtgggccgtttaaagttacttgggtggccctgacatttcccttttcacccctgggaggggagggcaaagccccaaaccaccttccagaggggcggttttccttattgcttcccaagggttttagccctttttaanggattgcttttctnaagaanattgggnttttntttcaaaanaaattntncggttnattttggngcccnantttttgggcggttnccnaaggataggnntttgtttt

SEQ ID NO: 95319 - DNA, 1298 bp, Arabidopsis thaliana columbia
  unsure (1)..(1298): unsure at all n locations
gtgtcttactcgtgccagccactcgcatttttccagatttaattatccttcctcgaaacaagagcttagctaagatgacgaagaactacccaaccgtgagcnaagattacaagaaggctgttgagaagtgcaggaggaagctcagaggtttgatcgctgagaagaactgtgcacccatcatggtccgactcgcatggnactctgctggaactttcgattgtaaatcaaggactggaggtccattcggaacaatgaggtttgacgctgagcaagctcatggagccaacagtggtatccacattgctcttagggttgttggaccccatcagggagcaaattncctaccatctttttttnctggattttccattcagctttgctgggtggttnttggnccgtttaaaggttactnggtgggccctnaaaattccttttccanccttgggagngaatggacaagcccccaacccacctcccgaagggttcgtcttcctgatggctaccaaggggttgtgtccttttgaaaagatgtctgtcctgagcagatgggcttatctgacaaagacattgtcgctttatctggtgcccgcactctgggacaatgcctctaggataggtctggcttcaaaggtgcatggacatcaaaccctctaatcttcggcagctcttacttcaaggaactcttgagcggagacaaggaaggccttcttcagcttgtctctgacaaagcactattggacgaccctgttttccgtcctttggtcgagaaatacgctgctgatgaagatgcctttttcgctgattacgctgaggcccacatgaagctttctgagcttgggtttgctgatgcttaagctgtgacgtatgctctgtgtgtgtgtgtgtgtctccccgagagtcatggctgtttttggttgggggctggaggggtcgcattgcatttgatctttgtcatatgattgcttaatgttctctcggatttacgtatctgtttttttcggtgggttgcgatttgagcacatccggcggaccgcgaattcgatagtctaggcttatcgcataccgtcgaccctcggggggcgggccacaaangccactgttcaattaccatnttcacccaccccggcctggagtgggacgtgggccgtcgcttcattcagctccgacggactatgtgtataaggatagagtactgtatgcgtcgcttacttgttgtcatggtccgactccgacgcgcatgatatgcgtctcgagtgaccgattagtgtgtatactgccattgacgagatatgttatac

SEQ ID NO: 95320 - DNA, 815 bp, Arabidopsis thaliana columbia
ccgcaccggccattccgggtgcgacccacgcgtccgccagattttattatacttcctcgaaacaagatccacgattcgatgttgcgatcggcgatattatcgtcagctctctcgattctgttctgaggttcgatattgatgagtttctaggctaatcttacgaatctgtgaaagtttctgagagatttggtttctgaaactcactcctgctggattcagagcttagctaagatgacgaagaactacccaaccgggagcgaagattacaagaaggctgttgacaagtgcaggaggaagctcagaggtttgatcgctgagaagaactgtgcacccatcatggtccgactcgcatggcactctgctggaactttcgattgtcaatcaaggactggaggtccattcggaacaatgaggtttgacgctgagcaagctcatggaggcaacagtggtttccacattgctcttaggtgggtggacaccatcagggagcaattgcctaccatctcttttgctgattaacatcaacttgctggtgtggcggccgttgaagttactggtggccctgacattcctttgcaccctggaagagaggacaagccccaaccacctacagagggtcgactgccagaagcttccaagggttgtgacaattcgccagatgtctgtgctaagcgcatgggctaatctgaccaagacaatggcattttatgttggggcccacactttgggagcgaagccccacgggataggggttgggcttttcaaggggcatgggatgttcagaacccttttaaccttgggggagctcctaacct

SEQ ID NO: 95321 - DNA, 1229 bp, Arabidopsis thaliana columbia
  unsure (1)..(1229): unsure at all n locations
tgatttgccnnnnnnnnnnnnnnnnnnnnnnnnnnnnnnnnnnnnnnnnnnnnnnnngaccggtccggaatttccgtgccaagcgaccgctcgtgtcttactcgtgccagccactcgcatttctccagattttattatccttcctcgaaacaagagcttagctaagatgacgaagaactacccaaccgtgagcgaagattacaagaaggctgttgagaagtgcaggaggaagctcagaggtttgatcgctgagaagaactgtgcacccatcatggtccgactcgcatggcactctgctggaactttcgattgtcaatcaaggactggaggtccattcggaacaatgaggtttgacgctgagcaagctcatggagccaacagtggtatccacattgctcttaggttgttggaccccatcagggagcaattccctaccatctcttttgctgatttccatcagcttgctggtgttgtggccgttgaagttactggtggccctgacattcctttccaccctggaagagaggacaagccccaaccacctccagagggtcgtcttcctgatggctaccaagggttgtgaccatttgagagatgtctttgctaagcagatgggcttatctgacaaagacattgtcgctttatctggtgcccacactctgggacgatgccacaaggataggtctggcttcgaaggtgcatggacatcaaaccctctaatcttcgacaactcttacttcaaggaactcttgagcggagagaaggaaggccttcttcagcttgtctctgacaaagcactattggacgaccctgttttccgtcctttggtcgagaaatacgctgctgatgaagatgcctttttcgctgattacgctgaggcccacatgaagctttctgagcttgggtttgctgatgcttaagctgtgacgtatgctctgtgtgtgtgtgtgtgtctccccgagagtcatggctgtttttggttgggggctggaggggtcgcattgcatttgaactttgtcatatgattgcttaatgtactctcggatttacgtatctgtttttttcggtgggttgcgatttgaacacatccgttgcgcttttgctgcttagacacattaataaaattaatttctctcgataaaaaaaaaaaaaaaaaaacaaagggcggccgctctagaggatccaagcttacgtacgcgtgcatgcgacgtcatagtattctatagtgt

SEQ ID NO: 95322 - DNA, 458 bp, Arabidopsis thaliana columbia
gcctgcaggtaccggtccggaattcccgggtcgacccacgggtccgaggacagaccttccacctcgacttcaccaaaggtttccaatgcccatattgtttggtggtgatggcagttacatggctcctttctcacttcaaaatgacaacattcttaccagtctgatgagtcagcttggttcgcctactacttggtatagactggtggctggtgtaaatgctcaattacgtcttgttcgccgtgggcgtctgagatcaacatttcattctgttctgagatggttagaaactcatgctaatcccgctctggaaacacatggcatacgggttgatctggcctggttccagactacagcttgtggttactgccaatatggtctcttgattcatactgttgaggattgtgaaccaacatcacctcagtgtgtcagggaaacaacatggactggaatccagcccc

SEQ ID NO: 95323 - DNA, 705 bp, Arabidopsis thaliana columbia
  unsure (1)..(705): unsure at all n locations
cgtccgaaccacaattacaaaacattccattacacatttcacaaagcacacactttttctttcttttaaaccccaattgcaagagaaaatggcgaaagagtccaccaccatcgacgtcggcgagccaagcactgttaccaaaagttcaagccatgtcgtaaaggacgcgaagaagaagggctttgtggcagtcgcctcaagaggtggtgccaagagaggtttggctatattcgatttcctcctccgtttggcggccatagcagtcactattggggctgcctctgtcatgtacaccgccgaggaaactcttcccttctttactcagttcctccagttccaagccggttacgatgaccttcctgcgtttcagtactttgtgatagccgtagccgtagtcgctagctatctcgtcctttcacttccattctccatcgtatccattgtccgtccacatggctgtcgggccccgggctgatcctcctcaatttgcggactctcctgggtcgtgacggtcaacaacattaagaagcagcagcgggcagattcattcacctaaccttggaaaaaaggggaccaaaggaccaacttgggtccctatttggaagaagtttggggattttccaaaacggtagaccccggggtttggtnatnttttccgggtctttttttaatggctaaaaattaagaatngccaaaagngtggtt

SEQ ID NO: 95324 - DNA, 448 bp, Arabidopsis thaliana columbia
ataagataccttggagaggagattcatttcttaaagatggaagtgaagataatctggatcttgtccaaaggattatatgatgctggagatcatataaagtttggttttccaatggctttcactgctacagttttgtcatggtcgattctcgagtacggtgatcaaatgaatgcagtgaaccaattggatcctgctaaaaactctctccggtggatcactgactatcttatcaaagctcatccttctgataatgtcctctatatccaggtaggagatcccaaagtagatcatccatgttgggagagaccagaggatatgaaagagaagagaccacttactaaaattgatgtagatactccagggacagaggttgctgcggaaactgctgcagctatggcttcagcgtctttggtgtttaaggatagtgatcctacatattcagcaacgg

SEQ ID NO: 95325 - DNA, 791 bp, Arabidopsis thaliana columbia
  unsure (1)..(791): unsure at all n locations
ccaaatgagcaggagagatacttatgattattaccctctccaaggaaactactacccagggccatctctcgcatggtatggggggatccaatggtcagagattctccgtgcactctcgtcaatctctcggtgttgcaagcctcaaagagggttggttggagattatgctgtacagacggttggttcgtgatgacggacggtgtctagggcaaggtgtgatggataaccgcgcaatgaccgtggtatttcaccttcttgcggaatctaacatttctcaagcagaccctgcttccaacactaacccgaggaacccttcgcttctctctcacctcataggtgctcacttaaactaccccataaacacattcattgccaagaaaccgcaagacatatctgtgcgtgttccacaatacggttcctttgctcctttagccaaaccgttaccatgtgacctccacattgtaaatttcaaggttcctcgtccatccaaatactctcagcaattggaagaagacaagccaaggttcgctcttatcctcaatagacgagcttgggattcagcctattgccataaaggaaggcaagtaaactgcacaagcatggctaatgaaccagtaaacttttccggcatgttcaaagatcttgcagcttcaaaggaaaccaacttactggattctnttcaagaggttttggggtttttggtcggtgnccagnggncctggggtggtnaaagcccgggaggnggntttggttttncntggaaacggggtttaggtnacttggcnnaangc

SEQ ID NO: 95326 - DNA, 696 bp, Arabidopsis thaliana columbia
gacccagccaaaaaaaagctgggcaaaaacccaaaaaaaaacccgtcctgtccagaacgggaattcgcaactcggcgtttatctttttggcaagcctcggtgagaagcttgttgtctgcccaagggatccatttcgggttcctcttgttccagaggaatcacgttcgttattgtcggtctagatttgatcggggaacaggtcagttagtttatataaccctttttctcagtttaaaactacattgaaccataccacctgaagagcgaacaagacccaaagatcaagtcaggaaggaacgaaccaactcactcgcaggtcttttcgttacagatagattcataaaacccattcatttaaagtttctgtcttgggaacatgattttatactccacttgggttggtttagatccttcctttttttacggatagtattagagaatggcagaaacatccgtcggagaggattccaaagacttgcctacctgtctttgttgtggtattaagccaaaccttggtttttttgttgtgcaaaaattgttgttagggtgttggttttttgcttcggatgatgtggcagaaacatattttaagctttgctctaatgcccctctccaattttttgttaaaaaaaaaaaaaaaaaaaaaggcggccgctttaaaagattccagcttacggtcggcggccatgcgaggtc

SEQ ID NO: 95327 - DNA, 534 bp, Arabidopsis thaliana columbia
  unsure (1)..(534): unsure at all n locations
tacgctcaatnnnnnnnnnnnnnnnnnnnnnnnnnnnnnnnnnnnnnnnnnnnnnnnnnnnnnnnnnnnnnnnnnnnnncccacgcgtccgcccacgcgtccggggagagaaatctaaaattaggcggtgaatgatttagattagtaacaagcatcacacacacagattgtttggtgtagacaaattcaaaccctaaccctagattgattgcgtacggagtttctctttggttaaaacccccacaaaaactgggagagcgatgaggaaagaggagattccagataaaagtcggactatcccgatcgatccgaatctgccgaaatgggtctgccaaaactgtcaccactcccttaccatcgtcggcgtcgattcctacgccggcaagttcttcaacgatccccctccgtccgctacgcagggctcatctatccatggagctaacagtgttcttggttcaacacgcatggacaactcttttgttgttttacctcgacataagcctcctcaatctcagggcattcctccacgtcctc

SEQ ID NO: 95328 - DNA, 738 bp, Arabidopsis thaliana columbia
aaacgtctcgtcagcttgtcgataagcttgatatcgaattcgcggccgcttggtgtagacaaattcaaaccctaaccctagattgattgcgtacggagtttctctttggttaaaacccccacaaaaactgggagagcgatgaggaaagaggagattccagataaaagtcggactatcccgatcgatccgaatctgccgaaatgggtctgccaaaactgtcaccactcccttaccatcgtcggcgtcgattcctacgccggcaagttcttcaacgatccccctccgtccgctacgcagggctcatctatccatggagctaacagtgttcttggttcaacacgcatggacaactcttttgttgttttacctcgacataagcctcctcaaatctcagggcattcctccacgtcctcgcggggcgtcctcacctcagcctgatgctactcaatctggaaaggcgatggaggattcgtttgtagtggcctataggcctgagcctgtttctgattctggtggttctcacaatctgtctcttgaagtgggccaaaacggtcccttacattcaaatacttctggctttaatgcgactatcaatgtcttaactcgtgcttttgatattgctagaactcagacacatgttgaacagccattgtgcttagaatgcatgagggtattgtctgataaacttgaaaaaagagtccaggatgtgacgagggacgtggaagcatacgaagcatg

SEQ ID NO: 95329 - DNA, 464 bp, Arabidopsis thaliana columbia
ccggggcggcccacgcgtacggtccaaagatagagaagaaatcccttttatttagaaaatgcataaccttatgaagaattagaggcttgatggacaggggcggtggatatactgctcacactaaccgagctcgaaatggtgagctttaccgctacatcgcggatacaagaggtgcttttgctcagcctgcgttctacgaggcttttggacttacggtagtggaagcgatgacttgcgggctcccgacttttgccacttgtcacggtggtccagcagagatcatcgagcacgggcttctcgggtttccacatcgatccataccatacctgagcaagcggggtacataatggctgatttctttgaacgttgtaaggaaaatccaaaccattggaagaaaatatcagacgcttgtcttcaaaggatataccaaaggtacacattgaagatatactctgagagattga

SEQ ID NO: 95330 - DNA, 1769 bp, Arabidopsis thaliana columbia
  unsure (1)..(1769): unsure at all n locations
tgatcctgccagcatcaatacgactcactttagggaaagctcgtacgcctgcaggtaccggtccggaattcccgggtcgacccacgcgtcctttactctttcagtgagagagagaagttagagctgtaaaagcacatgacttcgataccattggggcctcctcagcctccgtctttagctcctcagccgccgcatcttcacggcggagattctttgaaacgtcgtcccgatatagacaacgacaaggaaatgtctgctgctgttatagaaggaaatgatgctgttaccggtcacataatttctactacaattggaggcaaaaatggtgaacctaaacagaccattagttacatggccgaacgtgttgttggaacaggatcattcggaattgtattccaggcaaaatgcttggaaactggagaatcagtagccattaagaaggttttgcaagatcgccgttataaaaaccgagagttgcaattaatgcgactaatggaccatccaaatgtggtttccttgaagcattgtttcttctctacaacgactagagatgagctcttcctcaatctcgttatggagtatgtaccagagacattgtaccgggttttgaagcactatactagttcaaaccagcggatgcctatcttctatgtcaaactttacacataccaaatcttcagaggcttggcttatatccatactgctcctggtgtctgccacagagatataaaaccacaaaatcttttggttgatccccacacccatcagtgtaagctctgtgattttggaagtgcaaaagtactggtgaaaggtgaaccaaacatatcatatatctgctctcggtattaccgagctccagaactcatctttggtgccacagagtatacatcatccattgatatatggtctgctggttgtgttctggcagagctacttcttgggcagccgttattcccgggagaaaattctgtggaccagctagtggagatcataaaggttcttggtactccaactcgcgaagaaatccggtgcatgaacccaaactacacagacttcagattcccacaaatcaaagcccacccttggcataaggttttccacaagcggatgcctccggaagccattgaccttgcatctcggcttcttcaatactcaccaagtctacgttgcactgcgctcgaggcatgtgcgcatccgtttttcaatgaactccgtgagccaaatgctcgtcttccaaatggccgacctctaccaccgttgttcaacttcaaacaagagttgtctggggcttcaccggagcttatcaacaggctaataccagagcatgtgaggcgacagatgaatggtggctttccatttcaagctggaccctagaaaagcgatctcgagatgcttttccagagcaaaatgccgccttatggaatgaaggagagggagatttacttctctctgattaactaagtatcagcttctgagaagagatgatgtctcctccttagacgtggccaattcagctttttgagaaatcaggaggcgatgattgtgtcctattatattctttttgttcactgacttgtagagagatacttttctcctgtatcagtatttgtatatgtttttgtccttgaaatgaaacaaaatcgattccaaaaaaaaaaaacccaaagggcggccgctctagaggatccaagcttacgtacgcgtgcgtgcgacgtcatagctcttctatnnnnnnnnnnnnnnnnnnnnnnnnnnnnnnnnnnnnnnnn

SEQ ID NO: 95331 - DNA, 599 bp, Arabidopsis thaliana columbia
  unsure (1)..(599): unsure at all n locations
ctcttacaaggagcgaaagagaaacactttccgacttgggtaaggaaaaagagtttgatgggttgttgtcaatccttgttttccggcgataacccacttgggaaagatggagttcagccgcaaccactatctcaaaacaatcacggcggagctacgacggctgataacggcggaagcggcggagctagtggtgtaggcggcggaggaggaggaggaggaatcccatctttctctgagttctctttcgctgaccttaaagcagctacaaacaactttagctcagacaacatcgtatcagaaagtggtgagaaagccccaaatcttgtctacaaaggccgacttcagaaccgtcgttggatcgctgtcaagaagtttactaagatggcttggcctgagcctaaacaatttgcggaagaagcatggggtgtggggaaattgaggcataatcgattagcgaatttgattggatattgttgtgatggagatgagaggcttcttgttgctgagttcatgcctaatgatactcttgctaagcatttgttccattgggaaaatcagacaattgagtgggctatgaggttgcgagtangatattacat

SEQ ID NO: 95332 - DNA, 520 bp, Arabidopsis thaliana columbia
gtcaattcatcattagcttgaacaaatatctagaagccatgagcaataagttctctgtacggatgagatttaagatgcgttttgagggagaggattcccctgaaagaagaggggctggcacggttattggtgtgaaagactgctcccctcactggaaagactcaaaatggcgatgcttagaagttcattgggatgagcctgcatcgatttcaagacccaataaggtttcaccatgggaaattgaaccgtttgtaaattcagaaaacgttcccaaatcagttatgctgaagaacaaaaggccccgtcaagttagtgaagtatctgcacttgatgtaggcataacagcttcaaacctttggagctctgttttgacgcaaccccatgagtttgcacaatcgtgcatcacctcacagtggagttctcctcagcaatgtcatcgtgatgcaaatgaggatgctaagaaatctgactggctaaataactcttactctgtgtcaaatgtagcaaaagactcaacact

SEQ ID NO: 95333 - DNA, 439 bp, Arabidopsis thaliana columbia
gcgtacgatgtcgccttatctgttcgtcatggctctgtagagtagcctcatgttcttattcttcttcgtccttagccattcggggaggcaaaaacagagtcttttattctttggtgattctgtgaaatggaagctacgaggaacttggtttcttcatctccttcgtttcagacaaagactcatctcaagagcagctactcttctccttcctctgtagtgatgcttcatgatcaaacaacaactcctgttgttaactcacgtcatctcaattctctatctcgacattttcctgcgtcggttctcttacaggagccacgggaagagtctaggcctctgtcacatgcgttaagagacgatagaacatcccagttgactctggagaggaggcagtttgatgaattggtttcatctcgtgaagattgggaatttgaacagcaac

SEQ ID NO: 95334 - DNA, 452 bp, Arabidopsis thaliana columbia
caattttctctagatccactgatccattcttctcgggaaaattcgaaatccgccggtgaagggaaactcattcattgagttagctaaaacatggggaccgagatccctagatcggcggagatatcagaggcattgttaccaccggaatctgagaaaaccgtgacggcgacggaggagcatgtacctgagtggaaagagcagataacgattcgaggattaaccgtgagtgcgttgctcgggactttgttctgtatcattactcataaactaaatctgacggttggaatcatcccgtctttgaacgtcactgcgtgattactcggtttcttctttcttaattcatatactggttttttttctaatcctagtttttcatgtgttatctttaacttatctataaacaccgtttttcaaactttttattttttttttctatttcctttttctttact

SEQ ID NO: 95335 - DNA, 518 bp, Arabidopsis thaliana columbia
tggagattggagcggagatctcttgaataacggcgaagcaacaacaaaaggagattaaaagaggagctacgggtaagatgatatccttaagaatgaaagggcttggtcattgcctagtttatgtcgtggtctttagtgtcattgcggctatagtgacagcatacgactcaccctcttcaacaccacaatacacttccccttatccacctaaaaactattctccttatctctcagaatcacccccacccccaccaccacaatatagaagacaagagcctaagtacacaccacacccagagccaaatgtctacgattccccgacacctctaccatattactttccttttcctaaactagacatcaagtctccaccaccaccatccgtctacaccttctcaccacctcaactatattactccccttctcctaaggtagagtacaaatctccgccgccaccatacgtttatagctctctgccacctctaacatattattctccttctccgaaggtaatctac

SEQ ID NO: 95336 - DNA, 669 bp, Arabidopsis thaliana columbia
  unsure (1)..(669): unsure at all n locations
cnnnnnnnnnnnnnnnnnnnnnnnnnnnnnnnnnnnnnnnnnnnnnnnnnnnnnnnnnnnnnnnnnnnnnnnccacgcgtccggctttcgagaaagccttcgacattgcacagctcaatcctcacaaaaccttgttctttgacgacagtacccggaacatccaaaccgggaaagccgttggtctccatacagtcttggttggtaaatcagagaaaatagatggaagcgattacgcgttagaaagcattcacaacatgaaagaggcattccccgagttatggtcggaatccattatcaacaacaaagaaactgaaagaattgattacgcttcacagatctcgattgaaacttctgttcaagcttaactttatttagtactaaatatgatgatatttacatatcattgaatgtttcaataaaatatctatgtacctttttttgtcgtctatccatgtaccgtttatggttgattcgtatttatagtctataattgtattttaatcaccctcttttgtacatatcaataatgtgctagtaaaagatcctgtttattgccccatnnnnnnnnnnnnnnnnnnnnnnnnnnnnnnnnnnnnnnnnnnnnnnnnnnnnnnnnnnnnnnnnnnnnnnnnnnnnnnnnnnnnnnnnnnnnnnnnnnnnnnnnnnnnn

SEQ ID NO: 95337 - DNA, 736 bp, Arabidopsis thaliana columbia
gcccacgcgtcggttaaatttctagggtttcgaaagaaaaattattgactccaatcgaatggctaagtccatggattcacgataagtttcgattctcaacttgttgtagtactagtagtttattgtatttgcatgcttcgagctttttccgagatcgatcttttggttttcgtcagaatccgaatcgattcgtctccaattcatcgattcaacttcctcaatcagttccagggtcgataaaccaggaaaggtttaatctttggcaagggttttcgaggaagaagagtactagtagtagtagaacgtattctgaattgtcaagaaggtgatcagaaagcgagctcatgtgaaggagaagggaagaccaataaggataaaggacggaagcaaggtaagaatgagttatggtggtctaaagggaagaaatggcaatggaaaccgataattcaagcgcaggagattggtgtaatgttactacaattgggtattgttatgtttgttgtgcgattgctcctacctttaatcccttttcctttttcttttccttatacacatacatcgtatattattaatctcattatattttttagtgttatatctttaattatttagtttatatatattcttgggttttatttattttataatttgtatttatatttatatttttatatttcttaaattatatttcaatttttatttttattttatttattaattctataatttttttttt

SEQ ID NO: 95338 - DNA, 1708 bp, Arabidopsis thaliana columbia
aagcaaagagagaggaaaaattagactttactcattgttcagtggttgagagagaaaagagtaaaaaagcacatggcctcattaccattggggcctcagcctcatgctcttgctccgccgctgcagcttcacgacggcgacgctttgaaacgccgtcctgaattggattctgataaggaaatgtctgcagctgttattgagggaaatgacgctgttactggtcatatcatttccactactataggaggcaaaaacggcgaaccaaagcagaccattagttacatggctgagcgggttgttggaacaggttcattcgggattgtttttcaggcgaaatgcttggaaactggagaatcagtagccattaaaaaggtcttgcaagatcgacgctataaaaaccgtgagttgcaactaatgcgaccaatggatcacccaaatgtcatctccttgaagcactgtttcttctctacaacgagtagagatgagctcttcctcaaccttgttatggagtatgtacctgagactttataccgggttttgaggcactatactagttctaatcagaggatgccaattttctatgtcaagctttacacatatcaaatctttagaggtttggcttacatccatactgttcccggtgtttgccacagagatgtgaaaccacaaaatctcttggttgatcccttgacccatcaggttaagctgtgtgattttggaagtgcaaaagtattggtcaaaggtgaaccaaacatatcatatatctgctcccgttattatcgtgctccagaactcatctttggcgccacagagtatacagcatccatagatatatggtctgctggttgtgtactggcagagcttcttcttggccagccgttatttccaggagaaaattcagttgatcagcttgtggagatcataaaggttcttggtactccaactcgtgaagaaattcgatgtatgaacccgaactacacagattttaggttcccacaaatcaaagctcacccttggcacaaggtttttcataaacggatgcctccagaagcaatagaccttgcatctcggcttcttcaatattcaccaagtctacgctgcactgcgctcgaagcatgtgctcatccgtttttcaatgaactccgagagccaaacgcccgtcttccaaatggtcgtccattaccgccattgttcaatttcaaacaagagttaggtggagcttcaatggagctaatcaacaggctaatacctgagcatgtgagacgacaaatgagcacaggattacaaaacagttaaaaactgtgcatgtctgaagagaaagaggagaaaagcaggtttactacttttatttgatagttgacaggttcaacagtatattaaccacgactattatcagcttctatacccgtagtaaagtcatattcagctttttgagaaatcagatgctgataattgcgtctattttttttttattccttagcctggagagtggagagagacactgttcctcgtgtatttttgtatatgtttttgtctgtaaaacaattctgacagatacgtagagacaaaagaaaaacgaggtgataatattaaaccaaaaaaaaaaaaaaaaaatagctaccaaaaaaaaaaaaaagggcggccgctttaaaggatcccagcttacggacgggggcatgcgacgtcaaaattctttataagtgtcacc

SEQ ID NO: 95339 - DNA, 442 bp, Arabidopsis thaliana columbia
  unsure (1)..(442): unsure at all n locations
gctttggatgatggtaaagatcttggaatgctctgatggagttctcattaatggaaaganagccttacctatacaatgagcggggttgttgcttatgggatcgatttcgaaacaatcacagtccatcctggaaaaacttatagacttcgagtgtcgaatgtgggaatctcgacgagtttgaactttaggattcaaggtcacaacttagttcttgcggaatcagaaggatcatacacagttcaacaaaactatacaagcttggatattcatgttggacagtcttattctttcttggttacaatggatcaaaacgcgagctctgattactacattgtcgcgagtgctcgggttgttaacgaaaccatatggagaagagtcactggagttggaatcttgaattttaccaactcttaaatgaaaagcttaaggtcaattaccctct

SEQ ID NO: 95340 - DNA, 514 bp, Arabidopsis thaliana columbia
ctcctaaacccatcactcttctctttttttccctctccctcgcactctactgcaggagcggtcctttccaccactgggccatttccaatttccccaatttcgtctctcacgaatttatctctccacgtcccgacgaagttccatgggagagagattcacaaaattcacttcagaaatcaaagattctgctgtttaaccaaatccaaggtccggagagcgtcgcctttgattctctcggacagtggtccgtacacaggcgttgctgatggtagaggttttgttttgggatggagagaaatggattgatttcgcttatacttcgagttatcgatcggagatttgtgatccgaagccttctgctttgagttacttgaggaatgaacatatatgtggtcgcaccttatgtcttcgtttcgataagaaaaccggagatctatatataactgatgcttatatgggacttctgaaagtcggtcctgaaagaggtttaacaacgccagttgtaactgaagct

SEQ ID NO: 95341 - DNA, 805 bp, Arabidopsis thaliana columbia
ggactcacaaaattaattcttcttctcttttcttttcttaaaagagctcaaaacacacgaccatctttccgctgtcttcttagcttcttatctaccgtaatcatgccaacatcagcaacagcggtggctccatcaactggatctgtccagaaaaaagatcaagactggcgtgcgattttgtctcccgagcaatttagagttctcagggaaaagggcacagagaaccgaggtaaaggagagtataccaaactgttcgacgacggaatctatagttgtgctggttgtgcaactcctctttataagtccaccactaagttcgactctggttgtggctggccttccttcttcgatgctatccctggtgccattaaacaaacgcccgaggcaggagggagaagaatggagatcacgtgcgcggcatgtgacggacatttaggtcatgttgtcaaaggagaaggttttcccacagcgaccgatgagcgccactgcgtcaacagtgtttctctcaagttctctgaaatttcctcccaataagtctatatagtccacattgatgaccactattgttggaccaagtcctctccttcaagaaaatttgaaaatcaagtcggattgtttgagattgtcatgttatgttccattcctagtcttgtgtgatatgctcgctccagtgattgttgtttgtcccttgtatggatatctttttaataattatattattgttatctttcaaaaaaaaaaaaaaaggacggccgctcgcgactagaaccggacgcgtgggtcgacccgggaattccggtccgga

SEQ ID NO: 95342 - DNA, 505 bp, Arabidopsis thaliana columbia
  unsure (1)..(505): unsure at all n locations
ctcagggtactgtataccaatggagcgaggaagtttgctttgataggagtcggggcaatcggttgcagcccgaacgagctagctcaaaacagcagagacggacgcgcgggtgacgaaagaatcaactctgcgaacagaatctttaacagcaaacgcatagctatagtcgacgcttggaaccagaacacaccagatgcaaaattcacttacatcaacgcttatggcatcttccaagacattattacaaaccctgctcgctacgggtttagagtgacaaatgcacgatgttgtggagttgggaggaacaatggacagataacttgtcttccaggtcaagcaccatgtcttaaatagggaatgaggtatggctgttttgggatgcggtttcaatcccgggtgaagccttcggattattngttntttgggaggccggtctttttaagcgggggaagggtgnttcttnatggcncatccntnntggtttttttgnngcttgntncttttt

SEQ ID NO: 95343 - DNA, 676 bp, Arabidopsis thaliana columbia
  unsure (1)..(676): unsure at all n locations
actatagangagctatgacgtcgcatgcacgcgtacgtaagctcggaattcggctcgagctttacatcgtctcttccataaaacaaacctctttcaaacagtggaaacactttttatcttttagttccccaaagtttttgaaaaggtcaaaatgtcaatggagaagccacctttggcctccggtttagctcgaacacgatcggagcagctatatgagacggttgcagcagacataaggtcacctcacggctccatggacgctaatggtgtgcctgcgacggctccagcagccgttggaggaggaggaacgttgtcgaggaaatcaagccggaggttgatggggatgtctccggggaggagtagcggcgccggaacacacataaggaagtctaggagcgctcagcttaagctcgagctagaggaagtgagtagcggcgcagctttgagccgtgcgtctagcgcatcgctcggtctttcattntccttcaccgggtttgctatgccgccggaggaaatctccgactctaaaccgttcagcgacgacaagatgatacccgaagatattgaagcgggaaagaagaagcctaagtttcaagcagaaccaacattgcccatctttctcaagttcagggatgttacataccaaagtggtgatcaagaaattgacttcatctgt

SEQ ID NO: 95344 - DNA, 309 bp, Arabidopsis thaliana columbia
agatccggatctttaatgtccccatcatcctcgtttcatcggcttcagttgcagacgaggtcttcaggatccacgacatgaacatctcctctcgcggtgctgctgcgatcgatgagtccctcgtgtttggatcttctggtgtcgtctacgctccctatggagattacttgaagttcgtgaagaagatcattgccactaagctgcttcgacctcaggtgttggagcggtcacgaggtcttcgtgctgaagagctacaacgactttacaacagaattcttgataaagcgaagatgaatgagaacgttgaga

SEQ ID NO: 95345 - DNA, 514 bp, Arabidopsis thaliana columbia
  unsure (1)..(514): unsure at all n locations
nnnnnnnnnnnnnnnnnnnnnnnnnnnnnnnnnnnnnnnnnnnnnnnnnnnnnnnnncacttncactttcaggtcgcgttgcttcactctccattgcaaagagaggtctctgcgatttctgcaactcacccctgaaaccttcttaatttacttcaactgccgctatacctaaaaacttcatctttctcctctgagctatgataaagattgcagatttcactctcttcttctttatcttcgtcttctctccctcgttgcctctagctcaatctcagcttcccgatctcgacccacaagacaaagcttctttattgatattcagagtttcgattcacgacctaaatcgaagcttatcgacatggtacggctcatcgtgttctaactggacaggtctagcttgtcagaatccgaccggaaaagttctctccctcactttatccggtctgaatctctccagtcagattcacccatctctttgtaagctctcttctcttcaaagcttggacctttctca

SEQ ID NO: 95346 - DNA, 622 bp, Arabidopsis thaliana columbia
  unsure (1)..(622): unsure at all n locations
nnnnnnnnnnnnnnnnnnnnnnnnnnnnnnnnnnnnnnnnnnnnnnnnnnnnnnnnnnnnnnnnnnnnnnccacgcgtccgcccacgcgtccggcagaatgattctggtggaggatcaagctggggaaagcaagatggtggtgggggtggttcaagctggggtaaacagaacgatggtggtggtgggtcgagctggggcaagcagggtgatggtggttctaaaccttggaatgaacatagtggtggtggtcgtgggtttggtgaaagaaggggaggagggggattccgtggaggtagaaaccaatcaggcagaggaggaaggtcgtttgatggtggtcgatcatctagctggaaaacagacaatcaagaaaacacttggaagagcgaccaaagtggtggatcagactggaaaaaaggttggggagaggattcaaacaatagcaaaccatccggttcgtctgctggtggttgtgctggaaactggcctagctgggatactaactcaaagaaagaaaccaatgacaaaccgggagacgatagcatatcagcttggggaaccagtaacgatcaggtgaataccgataacaacaatgacagttgggaaaaaaagccaaacaatgat

SEQ ID NO: 95347 - DNA, 465 bp, Arabidopsis thaliana columbia
gcgaccaaaacctagatccggcggtctcatgtctccacagctttgtggccgcctccgagaagcggccaccaccgacgaaggagtccggttttcgtctgtagagactcaactccaacgcaccaacccaccacaagactcccggaaagctagccgctccgacgtagcggttccacggaaccggatcccgacctagcaacccgaaacactcagcgataacacttctctcccatcaccggaaaatagcaaagacccagagccaaacacacgtcgatccggaccggtggagaccaaaaacggcagacctaaagactggtggctcagtcagactctctagatccaaaacccgctgcagccatctaagatccaaacagatctactgttaaccaccgcatcagacaacgaacccccccttacccctctccaacttccgccgtggacgcagcgactagaatcacgggtgagcct

SEQ ID NO: 95348 - DNA, 833 bp, Arabidopsis thaliana columbia
cgtacggtcagtttccgaggttaaacctaaaaacctcggggttcgacctggggaagctctagccggaagctttgcctttgtgcttcatcgtatgccagacgaaagcgtgagcaccgagaatcaccgcgaccggttattgagaatggtgaagagcttatctcccaaggtggtgactcttgtggaacaagagtcaaacacaaacacagccgctttcttcccgaggttcatggagacaatgaactactatgccccgatgtttgagtcaattgatgtgactcttccaagagatcacaaacagaggattgttgtggggcaacattgtcttgctagagatctcgtgtacatcatcgcatgtgaaggagctgatcgggtggagcgacacgagctcctaggaaaatggaggtcacggtttgggatggcgggtttcactccttacccgttgagtcccttggtgaattcaaccattaaaagtctgcttaggaactactcagacaagtacaggctagaagaaagagatggagctttgtatcttggttggatgcatcgagatttgggtgcctcgtgtgcttggaaatgagacagtgacatttctttagtgtgatggccattaatgtgtttccacctgtaagccaattagtcggtcatttgaattttccaaacctttgaagaattttatgtttactactaaagacccagagtgggcccaatggtccaatgtcaaagtccacttcttcctccatccaaattttaggaagtaggtccccccaaaaaaaaaaaaaaagggcggccgctttaaaagaatccagcctaaggaagggggccatgcacgttca

SEQ ID NO: 95349 - DNA, 402 bp, Arabidopsis thaliana columbia
cccacgcgtccggcaaacacgaacgggtttacgtagaccgtcaaacgctcctccgtccgacggagaaaaaacgagacggtgaagaagaagaagaagaagaagaagaagaacgactcaaagatctcatcgatcactctctccaagatctattcacgcatcgtcggaagaattttcgcttccgacgacgtttctctcgtctgattttgtctccgaacatcctacctaatcgtattcggtgctggatttgaatccggtgaactgaatctgacaatttcgttcccggaggtgtttaaaaatggccgggatcttgaataaattgcggaatctagatgcatatcctaagatcaatgaagatttttacagccgtacattatccggcggagttatcactctcctctcctc

SEQ ID NO: 95350 - DNA, 1340 bp, Arabidopsis thaliana columbia
  unsure (1)..(1340): unsure at all n locations
gagagagatagtgaaccagatattattgatggggctggtgctgagcctggtcatgtgattagaaccacactccgtggtcgaaatggtcaatcaagacagacagtcagttacatatcagaacatgttgttggtactggttcctttggcatggttttccaagctaaatgtagggaaactggggaggttgttgccatcaagaaggttctacaagacaaacgctacaagaacagggagctacaaataatgcagatgctagaccatcccaatgccgttgctttaaagcatagctttttctcaagaacagacaacgaagaggtttatttgaatcttgtccttgaatttgtgcctgagaccgtcaatcgtgttgcaagaagttatagtaggacaaaccagctgatgccattgatatatgttaaactctacacctatcagatttgcagggcgcttgcttacatccataattcctttggtctttgtcaccgtgatatcaagcctcaaaacctgctggtgaacccacacacgcatcagctaaaaatatgtgatttcgggagtgcaaaagtgttggtaaaaggagaacccaatgtttcttacatctgttctagatactatcgtgctccagaactcatttttggtgccagtgaatacacaactgcaattgatatatggtccactggttgtgtgatggccgaactgcttcttggacagcctctgtttcctggtgagagcggagttgatcagcttgttgaaatcattaaggttttaggtacaccaacaagggaagaaatcaagtgcatgaatggaaactatacagaatttaagtttccgcagataaaacctcatccatggcacaaggtgttccaaaaacgtttgccaccagaagcagttgatcttctttgtaggttcttccaatattcccccaatttgagatgtacagctttggaagcttgtatccatccgttatttgatgagctaagggacccaaacactcgtcttcccaatggccgaccacttcctccacttttcaactttaaaccgcaagagctatctggcatacctcctgaaatcgtgaacaggcttgtcccagagcatgcccgtaagcagaacctcttcatggctttgcattcgtaagacgcttatcggtttttgcatctgtataagcaagctctcttgatatcaatatttggagcagccagttttcagccatttggcttttgtttttggtgagttctttttctttatttttttctgtttggttggttatatgtcgacgaggatgcatgaatacaaacagtacttgaggtttgctggttnnnnnnnnnnnnnnnnnnnnnnnnnnnnnn

SEQ ID NO: 95351 - DNA, 509 bp, Arabidopsis thaliana columbia
  unsure (1)..(509): unsure at all n locations
nnnnnnnnnnnnnnnnnnnnnnnnnnnnnnnnnnnnnnnnnnnnnnnnnnnnnnnnnnnnnnnnnnccacgcgtccggagaaagagcttgaagttgaaactttgcttaaggcttctgcttacattttaggagccactggttcgagtataatgtacaagactgttcttgaggacggtacggttctcgcggttcgtcggttaggtgagaatggtttgagtcaacaacgccggtttaaagactttgaggcacatattcgagctattggtaaattggttcacccgaatttggtacgtcttcgtggattctattggggcaccgacgagaaattggtcatttacgattttgttcctaacggcagtctcgtcaacgcccgttacaggaaaggagggtcttcgccgtgccatttaccgtgggagactcggctcaagatagtaaaaggtttggctcgtgggcttgcttacctncacgacaagaaacatgtgcacggtaacttgaagcctagtaacata

SEQ ID NO: 95352 - DNA, 737 bp, Arabidopsis thaliana columbia
  unsure (1)..(737): unsure at all n locations
actcaaacttctggcagagagctatactagcagggatcaggtttcgattattcctttccgaggggatgctgcggaagtgctcttgcccccttctagatcaatagcaatggcaaggaatcgtctggagagacttccttgtggggggggggctcctcttgcccatggtttaacaacgcgctgtaagagtaggacttaacgcagagaagagtggtgatgtcgggcgcataatgattgttgcgataaccgatggtcgagccaacattacactgaaaagatcaactgatccggagtctattgccccagatgctcctagacccacgtccaaagaattgaaggatgagattctggaagttgctgggaagatatacaaggcagggatgtctcttctagtgattgataccgagaacaaggttgtttcaactggttttgcaaaggagatcgcaagagttgctcaaggaaaatattattacttgccaaatgcttcggatgctgtaatctcggccaccactagggatgcactatctgatctgaagaattcttgacctcattttgtctgcaataccttgattctggatcaaagtgtatattctaattgtgcaacacatcagtcactaaacatgaaattataagaaatgaaattttgtttaaaaaaaaaaaaaaagnnnnnnnnnnnnnnnnnnnnnnnnnnnnnnnnnnnnnnnnnnnnnnnnnnnnnnnnnnnnnnnnnnnnnnnnnna

SEQ ID NO: 95353 - DNA, 637 bp, Arabidopsis thaliana columbia
  unsure (1)..(637): unsure at all n locations
atgattctccnnnnngtgtactgtatctttcaatctatagttcagttacaaagatcttcactgccaattttagaaaacttctgacggaaaataaaaagagaggatttatttttatctttctgtgttaccggagaataaagacggtaccttttcactgttgacttaacggagaagatggcgactgttccggagataaagataatgagaagcgagagcttaggtcatcggagtgacgtgtcgagcccggaagctaagctagggatgcgtgtggaagatctctgggatgagcagaaaccacagctcagtcctaacgagaagctcaacgcttgctttgagagcatccctgtctctgctttccctctctcttctgattcacaagatattgagataagatcagacacaagtttggctgaagctgttcagacactatcgaaattcaaggtcttgagcgcgcctgttgtagatgttgatgcgcctgaagatgccagttggattgatcgctacatcggtattgtggaatttccaggcattgtttgtcttggcttttgcatccaagttggagccaccatcttccaaggggcccttcttttttagannttnaaatggggttttnntcanggtttcaaccccccgtttt

SEQ ID NO: 95354 - DNA, 419 bp, Arabidopsis thaliana columbia
gagagagacgattcgtttttctagattctcgtcaaatttttttgcctccttcgatctctcctttttccttattcagcatttccccattttttcacgcaagatccgtgattttccagggattgatctgattgggggatcgtgaaattcgtttgtgttttctgctcgattaaccggagaaatggacgagtttggtgttctaacggagcgttatgggattaagccacaaggtaaatctgctccgatggctgcttctaagcgtaaccctaacaacaatgctcagagctggaatttcggttcaggctcctctggtttaaatgcaaagtcgacgtctttttcttccaatagctcttggaataaggattctactaatgggtctttgtttgatggtgacgatattttcattccggctaactctacta

SEQ ID NO: 95355 - DNA, 513 bp, Arabidopsis thaliana columbia
  unsure (1)..(513): unsure at all n locations
atgatactctcgctannnnnnnnnnnnnnnnnnnnnnnnnnnnnnnnnnnnnnnnnnnnnnnnnnnnnnnnnnnnnnnnnnnccacgcgtccgcccacgcgtccgaaaaatccggtttacttatggactctaccgatatttcacgctaacggctggagctatccatggggaatcgccgccgtcggaggaactaacgtctgtttgcgtaaattcgacgcgccgttaatctaccgtttgatccgtgatgggggcgtcacacacatgtgtggagctccggtagtgctcaacatgttgtcggcgactaacgaatttcagccgttaaatcgtcctgtcaacatcttaaccgccggtgctccgcctccagcagccgtactcctccgagcagaatcaattggattcgtgataagccacggatacgggttaacggacaccgccggataaccggtcatgcgctggaacccaagtggattttttacccgcgaccaacgagcgaggtgaagcacggcaggattg

SEQ ID NO: 95356 - DNA, 531 bp, Arabidopsis thaliana columbia
tacggctgcgagaagacgacagacgggtacggctgccagaagacgacagaagggtacggctgccagaaacgacagaagggtacggatgcgagaagacgacagaaggggcacaagattcagctacaaggttctttgacttacctgccgatgagaagatgcatctggtttctgataattttcaggagccagtaaggtatggtaccagcataaaccattcaacagacagagttcattactggagagatttcataaaacattactcccatcctctctcaaactggatcaatttgtggccttccaatcctccctgctacaaggaaaaggtggggaaatacgcagaagcaacgcattttttacataatcaactaatttaagctatctcagatagtctattactgtataaaaattacttacattaagtaattgattattgctcacaagtcatttctatttacttctatccatcttttttctaacccaatatttgccttggaattcctccactctctaactatttttttcttacatttt

SEQ ID NO: 95357 - DNA, 436 bp, Arabidopsis thaliana columbia
gcgtccggctgcgaacactctcaacgtttccttcttttcctcgtcgccacacaacgaccagacgtgaacccaatctcaccgtcattggccgtaatccgacgacatcaatcgtctgtaaatcaatagctaattcagaaccaccagtttcactctcggaacgagatggatttgcggcggctgctccaacccctggagaaaggttcctggagaaccaacgagctcatgaagctcagaaagtagtgaagaaagagatcaaaaaggagaagaagaaaaagaaagaggagattattgcacggaaagttgttgatacctcagtctcatgttgttacggctgcggagctccgcttacaaacttccgacgttcgattctccgggatttgtcgatttggttacttatgaattgaaaaagaagcatcaccagttaagaactatgata

SEQ ID NO: 95358 - DNA, 405 bp, Arabidopsis thaliana columbia
cgtccgaaacaatggttgaatcggagaaaacgaatctctcttgtctccgtctcgaaatctccggcgccgatccaattttcgtcagaggcacttggcataattctcgtttcgatatctccgtcaccgatggttcctcctcttggatttgcaatgcgacggaggaggaagtggcggagagagcagcacaatgggaccagcctgtgtcagagtatttaaagctcgccgagcaatacttatggtttcaacaacctaattcggtctatagtttctccgatgctctagagggatctaaacggctctcttggacgtttgaaaaagaatggactaaacttgagtggaggtggtaaagtaaaccatcagatgataaccagaagatcacctgtgggatcttggattttcttatgg

SEQ ID NO: 95359 - DNA, 629 bp, Arabidopsis thaliana columbia
  unsure (1)..(629): unsure at all n locations
actatatggacagctggtacgcctgcaggtaccggtccggaattcccgggtcggacccacgcgtccgctctgtcgtcatcgacttcctcttcctctgactttgagcagctctgtcttcttctcgaaatcgtctcctgtttcttctgctttcatggatgcttcaaatcccaattcttctagaaaatctaatgtctcttccttcgctcagtccagtcgaagcggtggtagaggaggaggatatgagagagataacgatcgacggagacctcagggtcgtggcgacggtggaggcggaaaggatagaatcgatgcacttggacgactcttgacgagaatattgcgacatatggctactgagctgagattgaacatgagaggtgatggttttgttaaagttgaagatttacttaacctgaatttgaaaacttctgcaaatattcagttaaagtcacacacgattgatgaaattagagaggctgtgagaagggncaataagcaacgggttagtctcatcgatgagaatggagagccctgattcgcgcaancggggcaatcgatacnacgggtnngccngagnagtacttaacantactgtnccagannagccccgtgtggacatgnactttnga

SEQ ID NO: 95360 - DNA, 522 bp, Arabidopsis thaliana columbia
  unsure (1)..(522): unsure at all n locations
cccacgcgtccgatcttcgttgaagtgagggtgacgagaagtttctgctttcatcaattaaaggtttacgcgtgaagcagatcatcagcaatggcggcgtcgcaagataagttggataagatgaaacttaggcaagattaccggaatttatggcactccgatctcatgggcaccgtcaccgccgacactccctattgctgcatctcgtgtctgtgtggaccttgtgtgtcatacatgcttcggagaagagcactttacaatgacatgtcaaggtatacttgctgtgctggatatatgccctgtagtggaaggtgtggagaaagcaaatgtcctcaactttgccttgccactgaggtcttcctttgcttcggaaactctgtggcctctacccgctttcttctgcaggatgaattcaacatccaggcaacacaatggggcaattgcataattgggtttatgttcngcntcagccaagttngcttgcatatncnctatagtggcttncantgntnggaagtgntg

SEQ ID NO: 95361 - DNA, 662 bp, Arabidopsis thaliana columbia
  unsure (1)..(662): unsure at all n locations
nnnnnnnnnnnnnnnnnnnnnnnnnnnnnnnnnnnnnnnnnnnnnggcgaaaatggaggaacgcggccgcggaaccggtgccggcgaaagcagtttgttggatggatcaggtcactggtggtgggcattgggaagtggagcccaaatcatgtggggaatacgattgattcggagaggttacgccggcgacgttcgattaatgccgctcaaagccttcggtgtcgcatcactcttcgtcgggtcgttagccaccagctccgtcgcattagtccgcgccacggggatccacacggttcaagatgcgattgatcttggagccaacattagaaccaatttgggggttactcctcaaataccggataagcaaatcaccgagagagacgggtgatttatcatgaacagatcgagcttgaagctctatcggaattactgtgagacgatcatggaattagggtctcctggtaagaatgacttccataattatgtatgttttatataagataagaccataatttataaggtttttgggttcataaaaatcagatgttatgtgaaaaattaaaaggttagcggccgannnnnnnnnnnnnnnnnnnnnnnnnnnnnnnnnnnnnnnnnnnnnnnnnnnnnnnnnnnnnnnnnnnnnnnnnnnnnnnnnnnnn

SEQ ID NO: 95362 - DNA, 579 bp, Arabidopsis thaliana columbia
  unsure (1)..(579): unsure at all n locations
ctttcttcttggcgtcaattcaatcaaccaaaacctttttctcctatctagctcacgctttcttcttcttccaatggcgtcttctgcagctctcggatctctccatcagactttagggtcagccattaattcacagagtgaggttcactcgctttctggaaactggtctgcctctggtaattcatgtgtgccacggtggagattatccaacaggaacagcaactacaggctcgtgttacgtgctaaggccgctaaatcttcgacaacaaccataagtgatggttcatctgatgctagtgtgtcagacgggaagaaaacagttcgacggataactttcccgaaagaagtggaggcactggttcacgagatgtgtgatgaaactgaggttgctgtgctgcaacttaaggttggaggtttcgggatgaacctaaaacggaggttttgngcagccacaaaccccattcccgtggnggttttcttcactctagggctcccatcctctgacctctgataattttttttggtctgccatttagaaanttctttgaagttncctagntnntttggacccaaattgtc

SEQ ID NO: 95363 - DNA, 866 bp, Arabidopsis thaliana columbia
tatacgacttactatagggaacagctggtacgcctgcaggtaccggtccggaattcccgggtcgacccacgcgtccgcggacgcgtgggaatttgttcaaccgtcatcttcttcaactgatcttagctcaactaacacactctttcttcttggcgtcaattcaatcaaccaaaacctttttctcctatctagctcacgctttcttcttcttccaatggcgtcttctgcagctctcggatctctccatcagactttagggtcagccattaattcacagagtgaggttcactcgctttctggaaactggtctgcctctggtaattcatgtgtgccacggtggagattatccaacaggaacagcaactacaggctcgtgttacgtgctaaggccgctaaatcttcgacaacaaccataagtgatggttcatctgatgctagtgtgtcagacgggaagaaaacagttcgacggataactttcccgaaagaagtggaggacttggttacgagatgtggatgaaactgaggttgtgtgctgcacttagggtggagatttcgaaagaacctaaacggaagattggagcagcacaaaccccttccggggggatattctcaactggagccctccattcttggaactagaataaattgtttttcggtccagccatctgagcaagcttccttgagaagggtcccttaaaaatcccctatgcgaaccagcaggtggtgcttgaggctttgatccccaccttgggtagcccactcccccggcgaacttccaggccaactgaagggaaaaccctcctactgaaaggggttgaaaaagaggccctttcgactcctcgtggaccacctccgccagaggctgg

SEQ ID NO: 95364 - DNA, 424 bp, Arabidopsis thaliana columbia
  unsure (1)..(424): unsure at all n locations
ccacgcgtccgaaacgaccaaaccaagaagaagaagatggtgaaactggagaactcgaggaaacccgaaaaaatttcgaacaagaacatccccatgtccgatttcgtggtcaatctggatcatggtgatccaacggcgtacgaagaatactggaggaagatgggtgacaggtgtacggtgacgatacgtggttgtgatctcatgagttacttcagcgacatgacgaacttgtgttggttccttgagccagagcttgaagatgcgatcaaggacttgcacggtgttgttggtaacgctgcgacggaggatcggtacatagtggttgggaccggttcgacgcagctttgtcaagccgtcgtccacgcactctcttcactagccaggagtcaacctgtcagcgtcgtcgccgccgctcctttntact

SEQ ID NO: 95365 - DNA, 510 bp, Arabidopsis thaliana columbia
  unsure (1)..(510): unsure at all n locations
nnnnnnnnnnnnnnnnnnnnnnnnnnnnnnnnnnnnnnnnnnnnnnnnnnnnnnnnnnnnnnnnnnnccacgcgtccgcattaaccttctttctacacaacacaaaactatatataaggatcatacatgtaataacgtcctgcaactattacaatcattctcgcttgaattaacgtggacgtcattgtttttggattgttaatcaaaggcggcgttacttttttttaatataattgtttctttaggatctttgtctctggaaaatgaaggaagacgcaggaaaccctttgcatctcacgtcactgaaccatgtctctgtcttgtgccgatccgtcgacgaatctatgaatttttaccaaaaggtgttagggttcatcccgatacgaagacctgaatccttaaattttgaaggcgcttggttgtttggtcacgggattggaatacacctcctgtgtgccccagaaccagagaaacttcccaagaaaactgcgattaatcccaaggataatc

SEQ ID NO: 95366 - DNA, 849 bp, Arabidopsis thaliana columbia
cattaaccttctttctacacaacacaaaactatatataaagatcatacatgatctttgtctctggaaaatgaaggaagacgcaggaaaccctttgcatctcacgtcactgaaccatgtctctgtcttgtgccgatccgtcgacgaatctatgaatttttaccaaaaggtgttagggttcatcccgatacgaagacctgaatccttaaattttgaaggcgcttggttgtttggtcacgggattggaatacacctcctgtgtgccccagaaccagagaaacttcccaagaaaactgcgattaatcccaaggataatcacatctctttccagtgtgagagtatgggagtagtggagaagaagctggaggaaatggggatagattatgtaagggcattagtagaagaaggagggatccaagtggaccagctcttcttccatgaccctgatggcttcatgatcgagatttgcaactgcgatagcctccccgtagtccccctcgtaggagaaatggctcggtcctgctcaagagtcaaacttccaccagatggtgcagccccaaccgcagactcagatccacccaagtggtctacccttaattataaacagctcacttcttctttataattgtgtgtgtttgtgtattggtgtccttgggttttgggtgtaatatacaattaggggcccttgtgaatcagcgaatgtgattcccttcgaggaaatgaccattctctttgctccacaagcttatataatataatcaagggaaatcatgttttacataaaaaaaaaaaaaaaaaaagggcggccgctctagaggatccaagcttacggacgcgtgcatgcgacgtca

SEQ ID NO: 95367 - DNA, 691 bp, Arabidopsis thaliana columbia
ttaccattattacgccaagctctaatacgactcactaagggaaaattggtccgctgcaggtaccggtccgaaattaccgggtcgacccacgcgtccggttgtttggtcacgggattggaatacacctcctgtgtgccccagaaccagagaaacttcccaagaaaactgcgattaatcccaaggataatcacatctctttccagtgtgagagtatgggagtagtggagaagaagctggaggaaatggggatagattatgtaagggcattagtagaagaaggagggatccaagtggaccagctcttcttccatgaccctgatggcttcatgatcgagatttgcaactgcgatagcctccccgtagtccccctcgtaggagaaatggctcggtcctgctcaagagtcaaactccaccagatggtgcagccacaacccgcagactcagatccacccaagtggtcttaccccttaatttataaacaagctcacttcttcttttataatttgtggtgtgtgtttgtgtattttggtgtgcttgggtttttgggggggaatattccaataaagggagccccatgtgaatcaagcggaatgtgagttccccttcgaggaaatgaccaaaaaaaaaaaaaaaaaaagggcggccgctctagaggatccaagcttacgtacgcgtacatgcgagtggatag

SEQ ID NO: 95368 - DNA, 701 bp, Arabidopsis thaliana columbia
  unsure (1)..(701): unsure at all n locations
gcccccccgcccccnnnaatgaaaatgcaatggtccttccgcaggaccggtctcggaattcccgggtcgacccacgcgtccgagaagaaggagggatccaagtggaccagctcttcttccatgaccctgatggcttcatgatcgagatttgcaactgcgatagcctccccgtagtccccctcgtaggagaaatggctcggtcctgctcaagagtcaaactccaccagatggtgcagccacaaccgcagactcagatccaccaagtggtctacccttaattataaacagctcacttcttctttatattgtgtgtgtttgtgtattggtgtgcttggttttgggtgtaatatacaataagagaccgatgtgaatcagcgaatgtgattcccttcgaggaaatgaccattctctttgctccacaagcttatctaatataatcaagggagatcatgttttacataanngaaaaggagcnanaacaacacaccctnctaattatacaaaattaccaagggcggccgcctctagaggaaccaaagcttacgtacgcctgcctgccaagtcatagcttcttttatagtgtcaccctaaattcattttactgggccggcgttttaccaacgcccttgactggggaaaaaccccttggcgttaccccccaccttaaattggcctttgggaagcaacaatccccccctttt

SEQ ID NO: 95369 - DNA, 587 bp, Arabidopsis thaliana columbia
atctgcttcacatctgtagatggtgagaaagctccatcaggagagagctttgaggaatggctggaacctcttaacaaaagcaacaatatttacgcagttggtattaactgcgcacctcctcaattcatcgaaaatctgattcgcaaattcgccaagctgacgaagaaagcaatcgttgtttacccgaataccggagaggtttgggatggaaaagctaaccaatggctgcccatcacattgcttgggtgatgatggattggagatgtttgcaaccgaatggcgtgacccttggagctaaactcatcggaggatgttgccaggactacaccttccaccattaacgctatctcccagagatttgaaacgaagatgatttttcttcagggagaaaagactgaagattctttttcaactttttaactagcttgaccattgttagggctatctatctgttttctgttgttttcttgttgttcacgttttctttgtggtttgatgatatgtattcgtaaactaggccttgggcgttttcaatgtaatggcccataaaatattttctttatcaaaattacccgatttgaatcttt

SEQ ID NO: 95370 - DNA, 558 bp, Arabidopsis thaliana columbia
gcaggagttggttcatctagctcaaagcctcgaagcagttacgaaccaaagaaacccgaggtcgatcccgagaaacagagactcgctgcatccttgtttggtggatcatcatcaagaactgacaaaaggtcttcttctggtggtcacaagccggcgaaaggaactgctaacaaaaccgcaaccgtacccaaggaaaatcaaacccctgttcaaccgccaccggacttgctcgacttcggtgagccaactgccacaaccgctacagcaatggatccttttaaagaattggaaggtcttatggattcttcgagccaagacggtggttcatccgatgtgatgggactatactcagatgcagcacctgtgacaacaaccacaagtgttgactctctcttatccgaactgtctgatagctccaaaggaaactcacgcacgtaccaacctcaaacctccaaaggaccaaacacaaaggaagctcttgagaaagacgctcttgttagacaaatgggtgtgaatccaacaagtcagaaccctacactgttcaaagatctcctcggg

SEQ ID NO: 95371 - DNA, 432 bp, Arabidopsis thaliana columbia
  unsure (1)..(432): unsure at all n locations
tcgcggtctcgtgggcggacgcgtgggttgctgtcttttgaagaagaagatcctgttttttggagatgcctgctgctgtagttgatggacatgatcaagtcactggtcatattatttccaccacaatcggtggcaaaaatggtgaaccaaaacagacaatttgctacatggcggagcgagttgttggtacaggctcgttcgggatcgttttccaagcaaaaatgtttggagactggaggaaccgcggcgataaagaagggtttgcacggtaggaggtacaagaaccggggacttcagttgatgccgtgtaaatggatcatccgaatttgggttttttnaagnattgcttctttttcgggctttcaaagtaaaaggcggggcttttttttngnaaccttgggttaatgggggnttttccccccnaanggcttt

SEQ ID NO: 95372 - DNA, 1804 bp, Arabidopsis thaliana columbia
caaagaaagagaaagagaagagctggattcacatggtcttgttctttctctctccttcttttctatcttgcggcttccctttctctctctatcgccacaatgatcattaccaaccaaactgattgaaactcatttgttctctctctctcaaatccactctctctctttcttttctcttctcctctctgtgtctctatcgccatggctgatgataaggagatgcctgctgctgtagttgatggacatgatcaagtcactggtcatattatttccaccacaatcggtggcaaaaatggtgaaccaaaacagacaattagttacatggcggagcgagttgttggtacaggctcgttcgggatcgttttccaagcaaaatgtttggagactggagaaaccgtggcgataaagaaggttttgcaagatagaagatacaagaaccgagaacttcagttgatgcgtgtgatggatcatccgaatgtggtttgtttgaagcattgcttcttttcgactacaagtaaagacgagcttttcttgaacttggttatggagtatgtccctgagagcttgtatcgagttctgaaacattatagtagtgcaaaccaaagaatgcctcttgtctatgttaaactttacagttatcagatcttccggggacttgcttacattcacagttgcccgggagtttgtcacagagatctaaagcctcaaaatcttctggttgatcctcttactcatcaagtcaaaatctgtgactttggcagtgcgaaacagctcgttaaaggtgaaccaaacatttcttacatctgctcacgattctaccgtgcacccgagctcatatttggtgccactgagtacacaacttctattgatatctggtctgctggttgtgttcttgctgagcttcttcttggtcagccattattccccggagaaaatgctgtggatcagctcgtggaaattattaaagttcttggtacaccaactcgagaagaaatccgttgtatgaatcccaactacacagatttcaagttcccacagataaaggcccatccctggcacaagatcttccacaaaaggatgcccccagaagcgattgattttgcatcaaggctgcttcaatactctccaagtctaagatgcacagcgctcgaagcttgtgcacatccgttctttgatgaactcagagaaccaaacgctcgtttaccaaatggacggcctttcccgcctctcttcaacttcaaacaagaagtagctggatcatcacctgaactggtcaacaagttgattccagaccatatcaagagacaattgggtctaagcttcttgaatcaatctggaacttaaaagggatcctgcaaaagacaactacttttttatatataatgtaccattacacgagccacaaggtcgtagttgaaggcaaacgtggaggacacaattcaaagtttttcctcctcaaactcgttcagacaaagccagctgctagcaaaaccaactacccaaatctgcgaaaacaaaaactctccagtgttgtatctgcttatttctcttctcttttcaagtttggtgaaaaacacagtctcctctttgcttcatttcttctttctttcccccttatgtaaatgagtttagtcagaagtttttttatatagtaaagtttgggcagaaggtgaagaatgtaatcaaagtgatactctttcaacgaggagcttctttcaaacaaaaaaaaaaaaaaaaaagggcggccgctctagaggatccaagcttacgtacgcgtgcatgcgacgtcataatcttctatagg

SEQ ID NO: 95373 - DNA, 441 bp, Arabidopsis thaliana columbia
caaaagtacagtttctttattcccttttttgttcactttaaacatcatcactcttgaaacacttcaaatctccggtcaacaaaaaccatgacttcaatttcttaaacaaaaagtttcaatctttttccaaacaaaacccatttcagattttgttctttgagaaaccaacatgagaaagacttctgtttcatctaatagctttggtgggtttttaagtcccggagctccgagttacgctgacaacaaaggttggagctccgagagagttcctcatccttcctccactacttcctcctctgcaattaacggtggtcgtcgtcacatcggctcttcttccgctttaacgacgccgttttacagcggcagagcaattccttcgaaatgggaagatgctgagcggtggatttgtagccctgtgtcgacttacccacaaggtgtttg

SEQ ID NO: 95374 - DNA, 593 bp, Arabidopsis thaliana columbia
  unsure (1)..(593): unsure at all n locations
nnnnnnnnnnnnnnnnnnnnnnnnnnnnnnnnnnnnnnnnnnnnnnnnnnnnnnnnnnnnnnnnnnnccacgcgtccgctgacttctgtgttctggggaattgtggctgatcgttatggaagaaaacccattatactcttgggaactatctcaattgcaattttcaacgctctttttggcttgagctcaaatttttggatggcaattggcacaaggtttcttcttgggagtttcaactgtttgcttggaacaatgaaggcctatgcatcagaaatatttcgtgatgaatatcaagctaccgcaatgtcagctgttagtactgcttggggcattggactgatcattggccctgctcttggtggttttttagctcagccggcagacaaatatccaaatgtgttctcccaagaatctctttttggcagattccggtatgcattgccttgctttaccatttcaccttttgccttgcttgtgacagtactatgctgcttcatcccggacacactgcacaatcataagctggacagcttatcacatgatgattcatacgatatacatgaagctgcatctcatgaatcatctccatctac

SEQ ID NO: 95375 - DNA, 676 bp, Arabidopsis thaliana columbia
  unsure (1)..(676): unsure at all n locations
nnnnnnnnnnnnnnnnnnnnnnnnnnnnnnnnnnnnnnnnnnnnnnnnnnnnnnnnnnnnnnnnnnnnnccacgcgtccggtctttttcactcccacacgttctgctccagcgatactgtgagagaatctctgtgtggttctgaattcttaggctggaattgaattctgaaatggcggaggagtacaaggaagcgttgttggagaagcagaactatcacgacggatgtcccggctgtaaggtggagcagatgaagcagctccggcgaggatatccttacctcgagctttccttcgtttggattatcgtcctctccacttctctaccaatttcctcactctatcccttcctctactatatgattgaggattttggtgtcgcaaagacggagaaagatattgggttttatgctggttttgttggttgctcttttatgcttggaagagcactgacttctgtgttctggggaattgtggctgatcgttatggaagaaaacccattatactcttcgggacctatctcaattgcaaattttcaacgctcctttttggcttgggcccaaatttttggttggcaattgacaaaggttnntntttggggggtcaactttttcntggaccantaagccctnaacnaaaattcggggggatcaaagnccccaattcccctttngctc

SEQ ID NO: 95376 - DNA, 418 bp, Arabidopsis thaliana columbia
gcggttcaattataccagagagtactttctctccaaaaagaatcacatctgatgctgatagggagtttcaacagcgtagatatcaaacagagcggagctacagcggatcattataccgcaccaagagagattccgtggacgagacgtcagaagtcccgcatgtggagcacaagggacggtttaaggtcacatcagcagatctgagtcccaagggatctacaaactctacattcacaccatttagtggtggtacaagcagccctagttgcctcaatgctacaaccgcctcaatcctcccatcaattcagtcgattttgcagcaaaatgctatgcaacgggaagagattttgagactaatcaaatacttggagcaaacctctgccaagcaacctggatcgcctgagacgaacgtcgatgt

SEQ ID NO: 95377 - DNA, 845 bp, Arabidopsis thaliana columbia
gccatggcgaccacttcatcgacaaaacaagtcattgtcttcacaatttcccttctcttggttgctttccaagcagtccatgcagactattaccgtcagaggccaccggttacccctaccccttacgttcctaagccacggtacccacttccgagcccgagccccaagcctgtttatcgaccacctactacccctagtctacccgctggctcaatcgctagactattccttgatccacataacgctcttcggtccggactaggtttgcctccattgatttgggacggtaaactagcgagctacgcaacatggtgggctaaccagaggcgttacgactgctccttaacccattccaccggcccatacggtgagaacttgttctggggaagcggctcgagctgggcaccagggtttcgcggtgcagtcatggatcgttgaaggaaggtcatacaaccacaacaccaactcgtgtgacggaagtggaatgtgtggtcactacactcagatggtgtggcgggacaccaaaaggctcggatgcgcacgtgtggtgtgtgagaacggtgccggagttttcatcacttgtaactaccgcccaccgggtaactacgttggcgagaagccatactaaaaaaacaaaacacattaaacggggtttttgtttggtatttgatttcatttaatatcttttgtatctgttttcgttatatcttcgtgaaattaaaatttccgacaaatctaatttgtatgtatcattgtatgttgttgtttccaatgttctctcggtcatgtcctcaaaattttgttgagtggcctacttatttaaacatcgtaaaacaaacagtcag

SEQ ID NO: 95378 - DNA, 997 bp, Arabidopsis thaliana columbia
  unsure (1)..(997): unsure at all n locations
nnnnnnnnnnnnnnnnnnnnnnnnnnnnnnnnnnnnnnnnnaggcagagagagaatttgcttggcttggcgaccccatggagctctggatttgtgtgtgagtgagtagatcgcgcaaagaatctgaaaatggcgtcaacggaaggccttatgcctatcacccgggcttttctcgcttcttactacgacaaatatcctttctctcctctttccgacgacgtttctcggctttcctctgacatggcatctctgattaagctattgaccgtccaatctcccccttcacaaggggaaacttccctgattgacgaagcaaaccgtcagccccctcacaaaattgatgagaatatgtggaaaaatagggagcagatggaggagatactgtgtcttctgtcaccatctcgctggcctgttcagcttcgggaaccttccacatccgaagatgctgaattcgcttctattttgcggactctcaaggacagttttgataacgcattcactgctatgatttccttccagacgaagaattccgagcgcatattcagcacagtaatgacctacatgcctcaagatttccggggaacgctcatcagacagcagaaggagaggtcggagaggaacaaacaggcggaggttgatgcgttggtcagctctggagggagcatacgcgacacatatgctcttctttggaagcagcaaatggagaggaggaggcagttggctcagctaggctctgccactggtgtctacaaaaccctggtcaagtacttggtaggggttccacaggtgttgttggattttattcgacaaataaacgatgatgatgggccaatggaagaacagcgagaacgttatggaccccctctatacagtctcacaaaaatgggtgatcgcaattcgggttttcctaacacttctgtgggaaagatatgataccttcaaactgagtaaagaccaaatgaatctcctgtctgaagctgctatagtctacacttctg

SEQ ID NO: 95379 - DNA, 1803 bp, Arabidopsis thaliana columbia
  unsure (1)..(1803): unsure at all n locations
cctgcaggtaccggtccggaattcccgggttgacccacgcgtgcgaaacaatgtgagtgggggaagatggagagtggtatgggaacaacaacaattgatgctatgacatacaacaacagcaagaaatttgtgtgagagtagagagtcttgcttcagttgaatcaaagattggtcctttttttttttcgttttctctttcctgctttttttgtttgtagtttctgatctctcaggaaggctttttataaatttgccctcaatttctccgtccctactactctttttgatcaatttctacgggaaaaagcaccaatctttaaacccgggcatgtccttgtaatcgagtatgttgtgtaagtgatgaatttgtggtgagatctggtgagaagtttcctcttttttctcagattgcggtaaaaaaaaagagtttttaataaggaagagattgagattagattttatcgcttttgtttgtgtgatatgggtaacgtgaacgcgagagaagaagcgaatagtaacaacgcttctgctgttgaagacgaagacgctgagatttgttctcgtgaagctatgtctgctgcttctgatggtaaccatgtcgctcctcctgagcttatgggtcaatctcctcctcatagccctcgagctactcagtctcctctcatgtttgctcctcaggttccggtgcttccacttcaaagacctgatgaaattcatatccctaatccttcgtggatgcaatcgccatcttcgttgtatgaagaagcttctaacgaacaaggaatccctacgatgatcacttggtgtcatggaggcaaggagattgctgtggagggatcatgggataattggaagacaagtcggctgcagagatctgggaaggacttcactatcatgaaagtgttaccttcaggagtctatgagtacaggttcattgtggatggacagtggaggcatgcccctgagctccctttagctagagatgatgctgggaacacttttaacattttggatcttcatggctatgtccctgaagacattcatagcatatttgggtttgagcgctcgcaatctccagagaatagttacagcaacttgcttctcggagctgaggactactctggaggaccgcctgtggtgcccgggcacctacaaatgacactgctgaacttgccggcagccaatcctgacattccatctccgctgccgagacctcagcatgtcattctcaatcatctttacatgcagaagggcaaaagtggtccttctgtggttgcgcttggttccactcaccgatttctagcaaagtatgtaccatgtggtgctctacaaatccctccacaggtgagtgaagatgatgcaattccaatgggtagtgggcatgtggatcctcggcatgctcttatctattttggtgttaaaacgttaactcatggagtatgggtgaggctatatagaaaggagacacccgaagagagttatttccaggcaaagtattccctcgatacagcgaattttgttgtctttaaaagttgtcaataaggtttaccaacagaatgaagatgcagtattcagtcagtgtctgtgtaatcttttgatttgaagacttcatcatctgttttttttttagcatagaagaatgcaggaacgacttcacttgtaaaaccggcaaatcttttttatggttttgttttggggctttcaagttttcaaaaaaaaaaccccaaagnnnnnnnnnnnnnnnnnnnnnnnnnnnnnnnnnnnnnnnnnnnnnnnnnnnnnnnnnnnnnnnnnnnnnnnnnn

SEQ ID NO: 95380 - DNA, 673 bp, Arabidopsis thaliana columbia
  unsure (1)..(673): unsure at all n locations
aaatctcattaatcctacctaaatataaatatataaagtcccttttgccattgatagcaacaaaatcatcaattaatttgcaatataacacacacttactactacatacatagtagtttgaggaatctgggaagaagctccagtggcaaagactcaacatttaagatgagaggtgggagtctatggcagctagggcaatcaataacccgtcgtcttgctcaatctgacaagaaggttgtgtcacgtcgctactttgcctctgaagctgacctgaaaaagactgctctttacgacttccatgttgcccatggaggaaagatggttccttttgctggttggagtatgccaattcagtacaaagattcgattatggactcaacggttaactgcagggaaaatgggagtttgtttgatgttgcacatatgtgtggtttgagccttaagggtaaagattgtgttccttttcttgagacacttgtggttgctgatgtggctggtttggctcctggaactgggagcttaactgtgttcacaaacgagaaaggaggtgccattgatgactcggtgattaccaaagtgacagatgaacatatctttttgggggggcaatctnncttnagggtaaggttttgnccacatttaggcncnttangggtttaanccaaggggtttt

SEQ ID NO: 95381 - DNA, 438 bp, Arabidopsis thaliana columbia
tacggctgcgagaagacgacagaaggggagagaaagaaagaaaacagagcaattacttgaagaatccataggaagctgaagatgagaagaattcctcgtatcaaatttcctcagagacattctatctcatctggttctggaccggcgccgggatctgtttccggcgttaagaaaaatgtgacggcgagttctgatgttccggcagctccgaagaacactgctgatggagggaaagcatctctccagccgaaacgtacacctgtctccgacaaagaaatcgaatctattatgttgggtggttgcatatgacatttggggagttacgaagatttgatcgaacacattggtgttcttgtcttgttcggctggtgatgtttattttgctgtttttaaatgtaaagaagtaactaataatgtagagaatatgattttataaga

SEQ ID NO: 95382 - DNA, 405 bp, Arabidopsis thaliana columbia
  unsure (1)..(405): unsure at all n locations
gcggaatcggttgtgagagagagagacggtgatcgggaaatgtcgacgaaaggcgcggcggcggcgtaccctagcgcggctcggatatctgattctccatgttatcttcagtactctgcttctctcaaatgtcttgaagaatttggatcagacaagagtaaatgccaggttcattttgatgtgtacaaggaatgcaagaagaaagagagggaagctcgactggaacgcaataagacacggtcgttgttctcgtgaatgcagatcctcgaataccaatgatgtctcagaacatcacctagctagtagtatcctgttgtttcatttgcaatggctgtgtttgtatgatctatctaagtaaacaagtgggaagtgtttgttaatgttactttttaccccccttggngg

SEQ ID NO: 95383 - DNA, 445 bp, Arabidopsis thaliana columbia
gcgatgtataagttttatgtccgttggtgttctcatctccttttggtcttggcttcggcctaggcctacggtctgtaactgatgttccagccgctatccttactggcttactaggaattccttgggataaaagattacttgcacatgtcgcaaagtttgttttctgttattgtagaatgtaatggcgaaaatatggaatgatgggagagtaaatgtagagccaagggagagaaaaaagctagttttgattatatttgtgccgtttatccaaagcgggcgggttgcgttaggtaagaaattttgcattcattctgaacatttgtattgtgaggtcagtggttgtatcagcttgttcctgtgcctatatattttcaatctgtttctccatgaaaaaaaaaaataaagggcggccgctcaggaggatccaagcttacgtacgcgtgca

SEQ ID NO: 95384 - DNA, 608 bp, Arabidopsis thaliana columbia
caaagcttcttatgcacgctcaacccccggatccagattggcatcacagctgactggagaggacaccatggtagacttgttctcttcatgggaaacaagaatacgtctccacttacatcagttcaagctctgatactaccccctgcccacttaagactggatctgtctccagtacctgatacaattcctcctcgagcacaggtacaatctccgcttgaagtgatgaacatccgccctagtagggatgttgcagttttggatttctcctacaagtttggtacaaacgtggtcagtgccaaattacgcatcccggcaaccttgaataagtttcttcaacctctacaattgacatctgaagagttcttccctcaatggagagcaatctcagggccacccttgaaacttcaggaagtggtaagaggtgtaagacctctagctcttccggaaatggcaaaatctgttcaaccagttttcattgtgccgttatgccctgggcttgatccaaaccctattattctagtggcaagcccaaccttctactctgaaactacaggagccatgctctgtttggcaagaattgaaacagaccagcggacagaacccactac

SEQ ID NO: 95385 - DNA, 844 bp, Arabidopsis thaliana columbia
gggaatgctgtacgcctacaggtaccggtccggaattcccgggtcgacccacgcgtgcgacaaaccctaataatctagtggcaagtacaaccttctactctgaaagtacaggagccattctctgtttggcaagaatagaaacagacccagcggacagaacccaattgcgaatgacagtaggcacgggagatcctacccttacatttgagttgaaagaatttatcaaggaacaactaattactgtcccaatgggatctcgagctttagttccagcagcaggtccagcaccacctgtagctcaaccgccaagcccagcggctttagctgatgatccaggagctatgctcgctggcttactttaaattcattgggccttcgtgttgagagagtctaatctaagtcataacggggggaaattgcaaaaacacatcccaaacgcatagcatttcacttgtaaaaacctgaactaatttgaggtgatatattctagagatgaaatccatctcttataatgatttcggaaatcccaattttatttcaaaaaaccgggaaaaaccaagccattgtttgtaaatgtgcaacaaattaggcaagacccctttcaatgtttgaacccggttttttttagcatttttccccatcaaaattgaagaaggccaaaggtccccgaaaatatttaaattcaaacccggtggatttttttttggaaaaaaaaaaaaaaaaaaaaaaaaaaaaaaaaaaaaaaaaaaaaaaaaaaaaaaagggcggccgctctagaggaacccagcctacggacgggtgcaagcgacgtcaagcttctctaaaggtcccctaaatccaaccc

SEQ ID NO: 95386 - DNA, 1170 bp, Arabidopsis thaliana columbia
gagaagataagaaagcagcacgaacaccaactcttaaggaaaacatctaagttatggttaagtaattgcatgcaatttaaagctacgtgtccagcttaagacactcaagtctcacatctgtccctttttacttcgacttcgcttcttttggcttcttttaaactctctctatctctctctttcttcttcacactttgttgttaatttcaagtgtttgatcataatggcaacatcagctcgtagagcatacggtttcggtagagccgatgaggctacacaccctgactccattagagcaactttagctgagtttctctccacttttgtcttcgtctttgcagctgaaggctctatcctctctctcgataagttgtattgggaacatgcggctcatgcggggacaaacacaccaggagggctgattttagtagcgttggctcatgcgtttgctctgtttgctgctgtttcagcagccattaatgtctccggcggacacgttaacccggcagtcacttttggtgctcttgttggaggcagagttacagcgatccgcgccatctactactggatcgctcagcttcttggagccatcctcgcttgtctcttgttaaggctcacaacaaacggcatgagaccagttggtttccgtctagcatcaggtgttggagcggttaatggacttgtattagagatcattttaacatttggcttagtctacgtagtgtattccactttgattgatccaaaacgtggaagcctcgggatcatagcaccgcttgcaatcggactcatagttggggcaaacatcttagtaggtggaccattttctggtgcttcgatgaatccagctagagcttttggtccagcgttggtgggatggagatggcatgaccactggatctattgggtcggaccattcatcggtagtgctttagccgcccttatatatgagtacatggtcatacccaccgaaccacctacccaccacgcacatggtgtacaccagcccttggcccctgaagattactagatggaactttcctcatgtcaccactgcttttgttcgttgttcaagctctctttgtctgtatgatgagatcacttgcatagatactttttttcttatgctactcttatgttgtaataataaaaaataaagaacgatttcgc

SEQ ID NO: 95387 - DNA, 615 bp, Arabidopsis thaliana columbia
  unsure (1)..(615): unsure at all n locations
cccgccggatccgggcnccccgcccttggtttcaggncattccncctagtccccctggagggntattnccaatgggcggnctgcaccntccccatgcactgccncagaagatgtgtgacgtctggtgaagctgtcaagtaccaggagttctttggacgccttcaggcagatcctcaagaatgaaggagcccaagtcactcttccaagggagctggtgccaacattctgcgtgctgttgcaggtgctggtgtgctttccggttacgacaaattgcagctgattgtcttcggtaagaagtacggatcaggaggtgcctaagcattgcttcttcctccttttttcgattttaattgcggttttaaggcccgcaataaactgagatgttgatgaaattttttttgccttaaggacttagggaggcatgtgccctaaaccaaattttatatcgttctgacgccaactttttttacttatggaataattcatgtttgagagagtttgttagactcttcgattttaaagaattttggatttataaaaaaaaaaaaaagggcggccgctctagaggatccaagcttacgtacgcgtgcatgcgacgtcaagatcttctatagt

SEQ ID NO: 95388 - DNA, 946 bp, Arabidopsis thaliana columbia
  unsure (1)..(946): unsure at all n locations
ccccccccccccccaatgaanaggcagtgggcattgcgcgnccgcaattcccgggtcgacccacgcgtccgtgtttcggcaggacgattaaggatgaaggttttggatctctattgagattaaacactgccaatgttattcggtatttccccactgatgccttgaactttgccttcaaagattacttcaaaagacttttcaactttaagaaggacagagatgggtactggaagaggtttgttggttacttggcatctggaggagcagctggtgcctcttgccttctgttcgagtactaccctagactatgcccacactcttttagctaatgatgccaaggctgcaaagaaaggatgtggaggaagacagcttgatggtcttggggatgtctacagaaagacacttaagactgatggcattgctggtctgtaccgaggattcaacatctcatgtgtcggtatcattgcctaccggggcctgtactttggactctatgactctgtgaagcctgttctcctcactggtgacttacaggacagttgcttcgctggtttcgctcttgcatgggttattaccaatggtgcgggtcttgcatcctaccccattgacactgtccgcagaagaatgatgatcacgtctggtgaagctgtcgaggacatgagtgctttggacgccttcaagcagatcctcaccaatgatggagccacgtcgctcttcaagggagctggtgcccacattctgcgtgctggtgcaggtgctggtgtgcttaccggttacgacaaattgcaactgattgcctccggnaaaagtacggatcaggngggncnaaaaattgttcttccccccttttncnattaaattcgggttaaaagncccaaaanacnaaatttgaaaantttttttccaaaanctggggnnttncccaaacannttaaancnncngcca

SEQ ID NO: 95389 - DNA, 563 bp, Arabidopsis thaliana columbia
  unsure (1)..(563): unsure at all n locations
ccacagagaaaacttcgtctctcttctctgcttcgccctctcatttcctgtgagataaaggcggagtctctctccagttattttgctcatccatcgattcttagagttcaaaatggttgatcaagttcagcaccccactattgcgcagaaagctgccgggcagttcatgcgttcaagtgtttccaaggacgttcaagtgggttaccagaggccttctatgtatcaaagacatgcaacctacggaaactactccaatgctgcatttcaatttcctccgacatcccggatgttggcaacaactgcttctcccgtgtttgtccaaaccccaggagagaaggggttcactaactttgcccccttgactttctgatggggtggtgtttctgctgccgtttccaagactgctggtgctcctattgaccgggttaagttttttgatcccaaacccgggttgggttgttaaagggtggaaggttttttaacccccaaaaggatttggggacttttttggaaggcgggttagggttaaggttttggtgttctttgggggacacttccaatnn

SEQ ID NO: 95390 - DNA, 672 bp, Arabidopsis thaliana columbia
  unsure (1)..(672): unsure at all n locations
cgatctgatttaggcgcactatagaatagcttgacgtcgcatgcacgcgtacgtaagctcggaattcggctcgagctcgagccgctcgagcggctcgagcggctcgagtgactctgtgaagcctgttctcctcactggtgacttacaggacagtttcttcgctagtttcgctcttggatgggttattaccaatggtgcgggtcttgcatcctaccccattgacactgtccgcagaagaatgatgatgacgtctggtgaagctgtcaagtacaagagttctttggacgccttcaagcagatcctcaagaatgaaggagccaagtcactcttcaagggagctggtgccaacattctgcgtgctgttgcaggtgctggtgtgctttccggttacgacaaattgcagctgattgtcttcggtaagaagtacggatcaggaggtgcctaagcattgcttcttcctccttttttcgattttaattgcgggtttaaggcccgcaataaactgagatgtggatgaaattttttttggcttaagaactaagggggcttgtgcccttaaccaaattttatttcggtctgaccccaactttttccttcctatgggaaaatccaggttgaaaaagttgtaaaccccccntttaaaaaatttgggttntgaaaaaancccccttt

SEQ ID NO: 95391 - DNA, 660 bp, Arabidopsis thaliana columbia
  unsure (1)..(660): unsure at all n locations
aaaacttcgtctctcttctctgcttcgccctctcatttcctgtgagataaaggcggagtctctctccagttattttgctcatccatcgattcttagagttcaaaatggttgatcaagttcagcaccccactattgcgcagaaagctgccgggcagttcatgcgttcaagtgtttccaaggacgttcaagtgggttaccagaggccttctatgtatcaaagacatgcaacctacggaaactactccaatgctgcatttcaatttcctcccacatcccggatgttggcaacaactgcttctcccgtgtttgtccaaaccccagggggagaaggggttcactaactttgcccttgactttctgatgggtggtgtttctgctgccgtctccagagacttgctgcttgcttctattgaaccgngttaaggtttttgatccagaaccagggtgaggatgattaaaggctggnagggtttttggaacccttacaaggggcttttggcgacttttttttgggaaggccggttaagggttaaagggtttgggcttctttggggggggggctacccttccattggaattttcccccctaagncttgaactttccttnaaagttttttnaaagttttaccttaggggcaaagtgtnctgagggggttttgc

SEQ ID NO: 95392 - DNA, 1715 bp, Arabidopsis thaliana columbia
  unsure (1)..(1715): unsure at all n locations
nnnnnnnnnnnnnnnnnnnnnnnnnnnnnnnnnngcctgcaggtaccggtctggaattcccgggtcgacccacgcgtccgccacagagaaaacttcgtctctcttctctgcttcgccctctcatttcctgtgagataaaggcggagtctctctccagttattttgctcatccatcgattcttagagttcaaaatggttgatcaagttcagcaccccactattgcgcagaaagctgccgggcagttcatgcgttcaagtgtttccaaggacgttcaagtgggttaccagaggccttctatgtatcaaagacatgcaacctacggaaactactccaatgctgcatttcaatttcctccgacatcccggatgttggcaacaactgcttctcccgtgtttgtccaaaccccaggagagaaggggttcactaactttgcccttgactttctgatgggtggtgtttctgctgccgtctccaagactgctgctgctcctattgaacgtgttaagcttttgatccagaaccaggatgagatgattaaagctggcaggctttctgaaccctacaagggtattggtgactgtttcggcaggacgattaaggatgaaggttttggttctctatggagaggaaacactgccaatgttatccgttatttccccactcaggccttgaactttgccttcaaagattacttcaaaagacttttcaactttaagaaggacagagatggttactggaagtggtttgctggtaacttggcatctggaggagcagctggtgcctcttcccttctgtttgtgtactcccttgactatgcccgtacccgtctagctaatgatgccaaggctgcaaagaaaggaggtggtggaagacagtttgatggtcttgttgatgtctacagaaagacacttaagactgatggtattgctggtctgtaccgtggattcaacatctcatgtgttggtatcattgtctaccgtggtctgtactttggactctatgactctgtgaagcctgttctcctcactggtgacttacaggacagtttcttcgctagtttcgctcttggatgggttattaccaatggtgcgggtcttgcatcctaccccattgacactgtccgcagaagaatgatgatgacgtctggtgaagctgtcaagtacaagagttctttggacgccttcaagcagatcctcaagaatgaaggagccaagtcactcttcaagggagctggtgccaacattctgcgtgctgttgcaggtgctggtgtgctttccggttacgacaaattgcagctgattgtcttcggtaagaagtacggatcaggaggtgcctaagcattgcttcttcctccttttttcgattttaattgcggttttaaggcccgcaataaactgagatgttgatgaaattttttttgcttaagacttagggaggcatgtgccctaaaccaaattttatatcgttctgacgccaactttttttacttatggaataattcatgtttgagagagtttgttagactcttcgattttaaagaattttggatttatgaaataaattcttcttttttatcaaaaaaaaaaaacaaaagggcggccgctctagaggatccaagcttacgtacgcgtgcatgcgacgtcatgatctgctataggtcgtcctcaattaatagcggcggcgctgcgcgcaaccgaatctgagagtggggggc

SEQ ID NO: 95393 - DNA, 1089 bp, Arabidopsis thaliana columbia
  unsure (1)..(1089): unsure at all n locations
taggtgcactatagaagagctatgacgtcgcatgcacgcgtacgtaagctcggaattcgtctcgagatttctttagctcaaccttcattactaatctccttttaaggtttctttcgtgaatcagatcggaaaaatggaatcttttttgttcacatctgaatccgtcaacgagggacatcccgacaagctttgtgatcagatctccgacgctatcctcgatgcttgccttgaacaagaccctgagagcaaagttgcttgtgagacttgtaccaagactaacatggtcatggtttttggagaaatcaccaccaaggctaacgttgattacgagcagattgttcgtaaaacatgccgtgagattggattcgtctctgctgacgttggtctagatgctgacaattgcaaggttctggttaacattgagcaacagagtcctgacattgcacaaggtgttcatggtcatctcaccaagaagccagaggaggttggagctggtgaccaaggtcacatgtttgggtatgctactgatgagactcctgagctcatgcctcttactcacgttctcgctactaagcttggagctaaactcactgaagttcgcaagaatggaacttgcccttggttgaggccagatggtaagactcaagtcactattgagtacatcaacgaaagcggagccatggttcctgtacgtgtccacactgttctcatctcaacacagcatgacgagactgtgactaacgatgagatcgcagctgatcttaaggagcatgtgatcaagccagtgatcccagagaaataccttgatgagaaaaccatcttccatctcaacccatctggtcgttttgttatcggaggtcctcatggagatgcagggcttaccggccgtaagatcatcatcgatacttatggtggttggggtgcacacggaaggtggtgctttctctggaaaggccccaaccaaggttgacaggagtggggctttacatcgttaggcaagcagctaagggcattggacccagtgggctagccaggcgggccattgtgcaaggctcgtatgccattggtggcctaagccattctttntgc

SEQ ID NO: 95394 - DNA, 1107 bp, Arabidopsis thaliana columbia
  unsure (1)..(1107): unsure at all n locations
gccccccctcgaagtcgacggtatcgattagcttgatatcgaattcgcgggcgcgccgagccatgggttctggacgtgtccacactggtctcatctcaacacagcatgacgagactgggacctacgatgagatcgcagctgatcttaaggagcctgggatccagccagtgatcccagagaaataccttgatgagaaaaccatcttccatctcaacccatctggtcgttttgttatcggaggtcctcatggagatgcagggcttaccggccgtaagatcatcatcgatacttatggtggttggggtgcacacggaggtggtgctttctctggaaaggacccaaccaaggttgacaggagtggggcttacatcgttaggcaagcagctaagagcattgtagccagtgggctagcgaggcgggtcattgtgcaagtctcgtatgccattggtgtccctgagccattgtctgtgttcgtggacagttatggaacaggaaagataccagacaaggagattcttgagattgtgaaggagagttttgatttcaggccaggtatgatctccattaacttggatctgaagagaggaggtaatggtaggttcttgaagactgctgcctatggtcactttggaagggacgatgctgatttcacctgggaggtagtcaagccactcaagtctaacaaggtccaagcttgaaacctgtcagcctctgtttcacttctgtccagaatcagtcttgttctctgtattttaggctctttctgcctctttagtttcaactctgagatgggtttattcattttgttttcaactttgaagaaaaaagctaagcagctgggaatttatataattatttatatggtattcttgtgctaagaaagttaaattcataatatgtatttcttacttattttgagaagaaaatcatataagagaataatattcgacattagtctcctaaaaaaagattatcaatatcnnnnnnnnnnnnnnnnnnnnnnnnnnnnnnnnnnnnnnnnnnnnnnnnnnnnnnnnnnnnnnnnnnnnnnnnnnnnnnnnnnnnnnnnnnnnnnnnnnnnnnnnnnnnnnnnnnnnnnnnnnnnnn

SEQ ID NO: 95395 - DNA, 540 bp, Arabidopsis thaliana columbia
caactctctgcgactcatatagggaaagctggtacgcctagcaggtaccggtccggaattcccgggtcgacccacgcgtgcgggaataagagaaaagtgagtttgttgtttgtatcgatcagaaaatggcgacgtcgatgatacagaggatgttcaagcaagggacgaagatcgtctgcgtcggccgtaactacgccgctcacgccaaagaactaggcaacgccgtccccaaggaaccagttatattcttgaagccaacatcatcatacttagaaaatggaggaacaattgagatcccacatcctttggattcacttcaccatgaagtagaactcgctttagtgattggacagaaagctagagatgtacctgaatcaatagccatggattacattggaggatatgcgggtgctcttgatatgactgctagggaactccaagcttctgctaaggcatctgggtctcccatggacggttgcgaaaggacaagataccttcacttcttataacttttgtctgtcaaaggcgatggtgcgtgat

SEQ ID NO: 95396 - DNA, 693 bp, Arabidopsis thaliana columbia
gctaacaaagtactttggaatttcgggtggtagcttaccggctataacagcggttgttgttattttagcaactgtctttccgtcccagtttggtcgtcttgctccatctggagaagccatggctctaattttaatgcaggtgttcttcacagtggtgggtgcaagcggaaacatatggagtgtgatcaacacggcgccgagcatattcttgtttgcattggttcaaattgggacacatctggctgtgatattgggcataggaaagctgctaaacatcgagctaaggttactgcttctagcatcaaatgctaatgtcggaggacccacgaccgcagctggaatggcgacggcaaagggatggaactcgttgatagttcccgggattctggccggaatatttgggatcgccattgcaactttcataggaattgcatttggagttaaagttcttaagttcatgtgaagatggtagtataactaaactatggacctgactctgctcagtgctcactctctctctctctctctatatatatatatatatatatatatatatatagtgagtgatattgtaaaccccacaaaatttcaagtgggcttaatttgccaaagggttccttactgtgttttattttgaggctttgtaccttcgaatggaatttgttcataccacggagctcattactattcttt

SEQ ID NO: 95397 - DNA, 533 bp, Arabidopsis thaliana columbia
  unsure (1)..(533): unsure at all n locations
tcacgtcncccccgaccttgtccacgtgcaggttncagggccncggaccctggngcnccgtcgatctcctaggaccgtggntngaggccacncggggaaattngggccctgttngggaaccccacagcggnncatctcccaggaatgctgcggacaaactcgcacagctatgccaagctctggacaacaatgacttcagcacagcccttcaaatacaggtacttctgactaccagcgaatgggacgaatgcaacttctggctggcaacactaaagcggatgatggtcaaggccaggcaaaatgtgcggtgattatttattttctgggttcatggattttttttattataaatctaaaggagggacgtgtgtatcaaactccttttgctttcttaattttggtctttttaaaacgccggtgctgctctaatcttcttttttttttttttttgtcatttatgaacctcatctgctacttccagtcactcttttgtttagatagtatagagatcatcagattgctgaaacattctc

SEQ ID NO: 95398 - DNA, 581 bp, Arabidopsis thaliana columbia
  unsure (1)..(581): unsure at all n locations
cgctcttctcttctcttctcttctcttctcttctcttctctcctcttcaacctcaatcacttaacaaaaccctcagtagaaaacttccactaagtttttagtcatcgttggttttcacaataaagcagctcacatgcaaacattctcgtttaagaggagacccaaccattcacatttcccatcaactctcttcttcttctttctctctttaactctgttcatctctggtgtgagttctcgtgtactaagtcctgtccctctagataactcgagcttgatctctgatggtgtccatggcgcctcggattacaagtatctcactctcgaccctccaaagaacgtttccaaagcagcttgcatacatgtctacgggttccttccatgtggcagacaatattggaggttatggcttccaaagttttttcctttggctgtctcttgatcattggtgacaanttcttgtccaagnagatcaaactctttggaatctngagggcggggttatgggggganggntccttacctnacaatgntccaagaatggccnaagnaanggctgggnagagggncngaggggggtc

SEQ ID NO: 95399 - DNA, 883 bp, Arabidopsis thaliana columbia
  unsure (1)..(883): unsure at all n locations
atacaaaccccgagaaggagattctgagcataaggagaagccaatgcagcaaatagagtcacttgaaggcgatgatggtgctgataagagcacgcacagagagaaagagaaggaagccccaccagagaatatgttagcgaagactgaagcatcaatggcgaagagtagtaataagctgtcagagcccgtggaagagatgaggcatcatcagccagggagcagaatgccaggggacacagtactgaagatactgatgcagaagttaaggtcattggacttgaacctatcgattctagagagatacttagaggaactgaacctgagatacgggaacatattcaaggagatggaccgcgaagccggtgtgagagaaaaggcgattgtggctttgagacttgacttggaaggtatgaaggaaaggcaagaggggatggtgagtgaagcagaggagatgaaagagtggcgaaagagagtggaggcagagatggagaaagcagagaaagagaaggaaaacataagacagagtcttgagcaagtaagtaaaagacttgagtggatggagaagaaatgcttaacggttttcaccgtatgtctagggtttggcattattgcggttattgcagttgtgattggtatgggaactggtctagcagagaagaccggtagtggggcttggctcttgttattgattagctcaacattcattatgttcgttttgtctctttgatgagagttttggtcttatttttacactgtagagtcatgttaccaatggatgaaatataccttgtttttcaaaaaaaaaaaaaaaaaaaagnnnnnnnnnnnnnnnnnnnnnnnnnnnnnnnnnnnnnnnnnnnnnnnnnnnnnnnnnnnnnnnnnn

SEQ ID NO: 95400 - DNA, 751 bp, Arabidopsis thaliana columbia
  unsure (1)..(751): unsure at all n locations
gtccgttcggattccggtcgaccaccgtcgatttttgcgagtgtccatatagatcaagaaacacggaggaggagaaattgaagtgcttttgataagtgcacagaagaaagggaaaggaatgttattaccaaaaggaggttgggagattgatgaatcaatagaagaagctgctttaagagagacaattgaagaagctggtgttacgggtcagcttgaagaatcacttgggaaatggcaatacaaaagcaaaagacatactatgactcatgagggtcatatgtttcctttgcttgttagtcagcagtttgagatatggcctggatctgaattcagtccgacgcaaatgggtttctttgtctgaagccatggagttgtgtcagaatttcgtggatgagagaagctttgggagctttcattaaccgcaaatgccagacccaataaggataatgtagcatctctgggaacaaagagctcttcttttggaagcccatgcatataattgaagagccggtcctcaagtttagtgcttcgatttcattcattcatttgttaataatgttagtagtctaattgataatatctgaatgttttgaatgagtgtattcacaacaatgtaatgtgagcatatataaacatggctcaatatcatacgatgtaataaaaaaaaaaaaaaagnnnnnnnnnnnnnnnnnnnnnnnnnnnnnnnnnnnnnnnnnnnnnnnnnnnnnnnnnnnnnnnnnnnngtacctaa

SEQ ID NO: 95401 - DNA, 1125 bp, Arabidopsis thaliana columbia
  unsure (1)..(1125): unsure at all n locations
tgatctgccnnnnnnnnnnnnnnnnnnnnnnnnnnnnnnnnnnnnnnnnnnnnnnnnnnnnnnnnnnnnnnnnnnnnnnccacgcggtgcgcccacgcgtccggtccatgttcctcggtttatccaaatcctcattcagacttcatcaaatcgtttcttgcttccgatccgaaatttgcggcgggaaaagaagataacatcaacaaaaaaatgatttctctattcatctcaaacttttcaaacttatcaaacttatctccgacctttgataacatgaacatgaacatcccatcgaagaagatcgtaccggtaccgacaccgagtgagaaagttgtctctttggtatctcgaaccggacgagatctccaacgttacaacaccgcagggtatcgtcaagtcgtcggatgtgtaccatatagatacaagaaacacggaggaggagaaattgaagtgcttttgataagtgcacagaagaaagggaaaggaatgttattaccaaaaggaggttgggagattgatgaatcaatagaagaagctgctttaagagagacaattgaagaagctggtgttacgggtcagcttgaagaatcacttgggaaatggcaatacaaaagcaaaagacatactatgattcatgatggtcatatgtttcctttgcttgttagtcagcagtttgagatatggcctgaatctgaattcagacaacgcaaatgggtttctttgtctgaagcgattgagttgtgtcagaattccgtggatgagagaagctttggaagctttcattaaccggaaatgccagacccaataaggataatgtagcatctctgggaacaaagagctcttcatttggaagcagatgcatataattgaagagcaggtcctcaagtttagtgttctgatttgattcattcatttgttaatgatgttaggtagactaattgataataactgattgttctgaatgattgtcttcacaacatgtaatgtgtacatatataacatggatcaatctcatagatgttataacgacttggtcttcacttttgatttaataagaaaaaaaaaaaaaaagggcggccgctctagaggatccaagcttacgtacgcgtgcatgcgacgtcatag

SEQ ID NO: 95402 - DNA, 783 bp, Arabidopsis thaliana columbia
  unsure (1)..(783): unsure at all n locations
tcttnnnnnnnnnnnnnnnnnnnnnnnnnnnnnnnnnnnnnnnnnnnnnnnnnnnnnnnnnnnnnnnnnnnnnnnnnccacgcgtccgacggctgcgagaagacgacagaaggggactccgacgtacctcctcttccccgttaccttctcagagtttttagtagtcttcctttggaacaatgagtgacgtgtttgatggatatgagcgacaatactgtgagctctcggcgagtctttcaaagaagtgttcctctgctatttcgcttgatggagaacaaaagaagcagaagttgtctgaaataaaatccgggctggaaaatgcagaagtattgattaggaaaatggatctcgaggcaaggacccttccacctaatcttaagtccagcctccttgtcaaattaagagaattcaagtctgatctgaacaatttcaaaactgaagtgaagagaatcacatctggacagttgaacgctgctgctcgtgatgagttgctagaagctggtatggctgacacaaagacgggcttcaagctgatccagagagcaagattgatgatgtcaactgagccgtctttgggcccgaacccctgtcaagagtcaagggacagtcgtagaaccaatgacttggggcctgaaggaatccggtggttttaatccctccaagnctttcaacnggttagnggcaatnttttttttaggggccncggaancgtttnattgggggtagccggtaacattggnaaggcaagnaggtnttttcaaacattncgggggggttaccttc

SEQ ID NO: 95403 - DNA, 441 bp, Arabidopsis thaliana columbia
cagaaaaccctaaacacagataaaccccaaaactcaaaaaccaaatctttccaacaatggcgtctcatctctttacccgatctcgaatctctctcctcagaaaccctaaaacccaatccgtttacctcagcttcacccatcagagccatttccggtacaccattcctctctcaagatcctctgctcgcaaccgaatcaacagatcacgacccatcaaaccatcaatcaacctccacgccgcttccaccgaatccagcaacaggaagtcctctttaccaagagaattggcgtagtccgatcccaaacactccttccttcaaccaatctctagttccattaggatttctaaatcaagctcctgctcctcgtatcagagctctttctgagacgcttgacatgaactcgctgttgaatatgtttgcggattggactgtttcgcag

SEQ ID NO: 95404 - DNA, 377 bp, Arabidopsis thaliana columbia
tcactactgaagcacggactagtagtctctccaatgtctcgtcattctgagccatacgggggaggacgagatgatcctaatgggaataattttgatacggcttcgactaaatcgcttcccaataatccctctgtggcggcttccaatctcatattagacctattgtcattggatgacgtaagtaacacggcagaagcagaagatgttgaagacaagaagaagcaagaccattcaaaggcagagactttcgatccttgcgaggcgtcgctgttgagagatgatccgaagaagaagatagaaacgattgaggaggaaccttcaaccgctgaggaccatcagagagattcagggaattgggtgcttgcgttagaagaaac

SEQ ID NO: 95405 - DNA, 1321 bp, Arabidopsis thaliana columbia
  unsure (1)..(1321): unsure at all n locations
tcctccattcatagtaacaataatattaagaaagagggtaaactatgtcagaattattacagttgcctccaggtttccgatttcaccctaccgatgaagagcttgtcatgcactatctctgccgcaaatgtgcctctcagtccatcgccgttccgatcatcgctgagatcgatctctacaaatacgatccatgggagcttcctggtttagccttgtatggtgagaaggaatggtacttcttctctcccagggacagaaaatatcccaacggttcgcgtcctaaccggtccgctggttctggttactggaaagctaccggagctgataaaccgatcggactacctaaaccggtcggaattaagaaagctcttgttttctacgccggcaaagctccaaagggagagaaaaccaattggatcatgcacgagtaccgtctcgccgacgttgaccggtccgttcgcaagaagaagaatagtctcaggctggatgattgggttctctgccggatttacaacaaaaaaggagctaccgagaggcggggaccaccgcctccggttgtttacggcgacgaaatcatggaggagaagccgaaggtgacggagatggttatgcctccgccgccgcaacagacaagtgagttcgcgtatttcgacacgtcggattcggtgccgaagctgcatactacggattcgagttgctcggagcaggtggtgtcgccggagttcacgagcgaggttcagagcgagcccaagtggaaagattggtcggccgtaagtaatgacaataacaatacccttgattttgggtttaattacattgatgccaccgtggataacgcgtttggaggaggagggagtagtaatcagatgtttccgctacaggatatgttcatgtacatgcagaagccttactagaagggaattcctttcctgccgccgaaacgcaacgcaaaacgaccctcgtttttgcgtttatggcaacacgagaccgttttatatggtcaatgagtgtgccgattcgccattagatttctgttcagtcttcgtttattctatagaccgtccgatttcagatcatccctaatcggacggtggtcgttggatgtatcagtagtgtattactgtgttaggtagaagaaaatccacttgttcttaaattggcataaaagtcagaagctaatatttatatgtgccgcaatcaatttaataaaaaaaaaaaaaaaaaaaaaaccctgacgtagctcgaggaattcnnnnnnnnnnnnnnnnnnnnnnnnnnnnnnnnnnnnnnnnnnnnnnnnnnnnnnnnnnnnnnnnnnnnn

SEQ ID NO: 95406 - DNA, 770 bp, Arabidopsis thaliana columbia
agattattgtaactgcagaaaagagctatctctcagctcctcaccatgcagaactagtggagaagaaatggggaggtagtactcacactacagtagaagaaacgaagaaaaagatatctgaaatcttgaaggaatacgtggaaaacggagacacttacgaagcttgtagatgcatcagggaattaggtgtctcgtttttccatcatgaggttgtgaagagggctttggttctggcgatggattctccaaccgctgagtcacttgtactaaagctgttgaaggaaactgctgaagaaggactgatcagttcgagtcaaatggtgaagggattcttccgagtagcagagagtctcgatgaccttgctctagatatcccatctgccaaaaagctgtttgattcgatagttccaaaggctatttctggaggctggctcgatgattcatttaagataacctctgatcaagatggagaaaaatcgagtcaagacggaaagctaagacagtacaagaaggatacagtgaacataattcaggaatatttcttatcagatgacattcctgagctaatccgcagtcttcaagatttaggggcacctgaatataacccggtgtttctgaagaggctcataactcttgctctagacaggaaaaacagagaaaaggaaatggcttcggttcttctttctgctcttcacatggagctattctcaactgaagatttcataaacgggttcattatgctcctggaatcggcagaagacacagcttta

SEQ ID NO: 95407 - DNA, 1317 bp, Arabidopsis thaliana columbia
  unsure (1)..(1317): unsure at all n locations
atggannnnnnnnnnnnnnnnnnnnnnnnnnnnnnnnnnnnnnnnnnnnnnnnnnnnnnnnnnnnnnnnnnnnnnnnnnnnnnccacgcgtccgcggacgcgtggggaaaaatcgagtcaagacggaaagctaagacagtacaagaaggatacagtgaacataattcaggaatatttcttatcagatgacattcctgagctaatccgcagtcttcaagatttaggggcacctgaatataacccggtgtttctgaagaggctcataactcttgctctagacaggaaaaacagagaaaaggaaatggcttcggttcttctttctgctcttcacatggagctattctcaactgaagatttcataaacggtttcattatgctcctggaatcggcagaagacacagctttagatatcatggacgcatcaaacgaacttgctctgtttttagctagagctgtgattgacgacgtcttagctccacttaaccttgaagatatctcaaccaagctgcctccaaaatcaaccggaaccgaaacagtccgctcagccaggtctcttatctccgccagacacgcaggagagagactcctaagaagctggggaggtggaaccggctggatagtggaagatgcaaaggacaaaatctcgaaactcctagaagaatacgaaacaggaggagtaacatcagaagcttgtcaatgtatccgcgatctagggatgccttttttcaaccacgaagtagtgaagaaagctttggtgatggcaatggagaagcagaatgatcggttactgaatctgcttgaggagtgttttggtgaaggattgattacaactaaccaaatgacgaaagggtttggtcgtgttaacgacagcctcgatgacttgtcgcttgatataccgaacgcgaaagagaagtttgagctgtatgctagtcatgccatggacaatggttggatccttcccgagtttgggatttctgcaactcagtgattagtggttctcttatcagtttcttgtgtttgtgcttacgatactttcctcactatctacatatatgtatggattcagttagtagataaacatgagatgtttatatgttcatgtgtttctgtctggttgttgtgttttgtctttgtactgatatcttttagtgtgttctaatttctgatggatttttgttccattgaaaataagttattagcatggttaaaaaaaaaaaaaaaagnnnnnnnnnnnnnnnnnnnnnnnnnnnnnnnnnnnnnnnnnnnnnnnnnnnnnnnnnnnnnnnnnnnnnnnnnnnnnnnnnnnnnnnnnnnnnn

SEQ ID NO: 95408 - DNA, 585 bp, Arabidopsis thaliana columbia
  unsure (1)..(585): unsure at all n locations
cccaagcgtccggccaagcctccggggaaaagaacacaaaaagggaacaaaatcagcggagcaaaagttacttccgaaaccctaaaaaaaacacgatgatgctcaagcaagctgcgaagaaggccctagggcttacgtcacgtcaatcaacaccgtggtctgttggtatcctccgaacctaccatgagaacgtcatcgaccactacgataatccccgcaacgttgggtctttcgataagaatgatcccaacgttggtacgggactcgtaggagctcccgcttgtggtgatgtgatgaagcttcaaatcaaggtcgatgagaagactggtcaaatcgttgatgctcgctttaagacttttggttgtggttcagccatcgcttcttcatctgttgccactgaatgggtgaaaggcaaagctatggaggatgttctgaccatcaaaaacaccgaaatcgcaaagcatctttctctcccaccaggcaagctccactgcagtatgttggcgggggccgttaaaaggacatgtgaaanctcaagggaaccggtaaanaaatggtgtcacacaggggaccncaggttntctt

SEQ ID NO: 95409 - DNA, 538 bp, Arabidopsis thaliana columbia
  unsure (1)..(538): unsure at all n locations
cnattttaaaggcttagctttgttcctctgtcgccttggagaatctccagaagcgtatcatgtggccttcgtctcgaaactcttcgcagcctcaagctatgagacaagaaaagaagtcgatatctgtgagttttagagcagagaatctcataccaggggttgtgataggattcatcataggtatgatattggatttatcacagcaagtgacctccccagtgaaaaggagcagacttttatccagcaaggtccagaagcagagttctgtaccaggcaatggcaaggaccaagagcttaaaatggtactggtagttaggcaagacttgaagatgagaacgggcaaaattgcgtcacagtgtgcacattgctgccaccggcatgtatgcagagttgatgcagagtgaccgataccttctgcggcgatgggaggaaattggcagccaaagatagtcggcacttcaaaacccgcangaatgattaggtccagggctcttangngtggcnccgctttttttgntntctgaggctaggtcgntgc

SEQ ID NO: 95410 - DNA, 604 bp, Arabidopsis thaliana columbia
tggccgttctgcagtaccggtccggaatttccgggtcgacccacgcgtccgaatttgatgttgacacacgattggttgaggggcttgttcttgatcatggtgcgagacaccctgacatgaagcgacgtgcggagaattgtcacatcctgacttgcaatgtgtcattggagtacgagaagagtgaaattaatgcgggattcttctactcgaatgcggagcagagggaagccatggttactgctgagcgacgttccgttgatgaaagagttcagaaaattattgagctgaagaacaaggtttgtgctggtaatgataacagctttgttatcctaaatcaaaagggtattgatcccccgtcattggatcttcttgctagagaagggataatcgcccttagaagggcaaagaggaggaacatggaacgtttggttttggcatgtggtggagaagctgtgaactctgtcgatgacttgacccctgattgtcttggctgggctggacttggtcttgagcacgctcttggagaggggaagtacacatttgtgtgacgaagcgaagtaattctcattgatgtgctatcctcataagatggcctaatgaccac

SEQ ID NO: 95411 - DNA, 473 bp, Arabidopsis thaliana columbia
ggtccacgcacgcgtccgtatcaaattccctatcaaagtgaatgactttcttctccaaaatcgatttctgaaacatcccatttcttgatttccctctttgtcgcaaacccaacaaagtagagcaaaaccctaaaacggaaaccttccatggcgattatctctgaggtagaagaagaaagcagtagcagccgacccatgatatttccctttagggcaacactcagttctgcaaacccattagggtttttggagaaagttttcgactttctcggagaacagagcgattttctcaagaaaccctccgtggaggacgagatcgtcgtcgcggttagggcggcgaaggagaagttgaaaaaggctgagaagaagaaagctgagaaggagagtgtgaagcctgtggagaagaaagccgagaaggaaattgttaagcttgtggagaagaaggtagagaaggagagtgtcaagccaactat

SEQ ID NO: 95412 - DNA, 650 bp, Arabidopsis thaliana columbia
gtgacaatagaatcaaacgatcatcgagattttgttagattgcagaatctttcagaagctgacattagatctctggtttctagtgcgctagtcactagaaataatacatctaatgcttctgaatctaacttgggaccagtttcaggtctaagcgctggagttaacaaacaggaagacgcatctcagaaccaagagatcaccttggagaagacaacaagctggggcacagcataggagcaacacgtccctctaaagaaccttctgagtgaagcaagatcaccaaggctgcaacaacaagcaaaggatcacgagagtaacaacataccgagagtgagttcgatactgggacaggagacatcccctgaagatggtcactggccagagaaaagagaagtgagcgaggaatggaattcaccagcaaagtatccagtggacttaaagagagaggagaagaaagtgaaaggaagacccttttgggtgccatttgtttgctgctccaatgttaaatagaccaccactctattgtataatgtgtaggagatgatgaatggtttctgaagacttgctagtacaaagacgtgttagtagtttggttcttgtaggcgctactgttgcttaggctttgaatacttttatgcagaccacttttg

SEQ ID NO: 95413 - DNA, 441 bp, Arabidopsis thaliana columbia
agctcggaatgaggttcgttttcgtggttgggttacacacccagcagcggggctcgcatttaattgcaccttcttgttattcggatcagtcatccagctcattgcttgcgctagcaatatatattacataaacgataggttagacaagaggacatggacttatatatttggggcttgctgtgccacgaccgtgttcataccatctttccacaattaccggatttgggctttcctcggcaagagcgccgacccgcccaagatgcagcaaacacccacaacgctcacagaaacgccaactccgagtcgcgcgcacgcgcgacgaggggtagcgcgccgtggagcggccagtaaatgtaccaaagccactgacctctgcccccccgatgacacaagccccactcagggacactcgtgcccggtgcttaacctgcgagacctcgt

SEQ ID NO: 95414 - DNA, 461 bp, Arabidopsis thaliana columbia
tgaagattatggacaaacattctgcatattttcatgaagatgttcggcttcaagcagttactggtttgaaacatatattggctgcagctcatgctatcttccagactcataatgatggaactggaaaggcaaatgaaattcttgatacagttatgaataattatatcaaaactatgactgatgatgacgacaaggaggttgttgctcaggcttgcatcagtgttgccgatatcatgaaggattatggttacccagccattcaaaagtatttatcaccccttgttgatgcgacattgctactgctgacggaaaaagcagcttgccagcagttagaagatgagagtgatattgatgatgatgatactggacatgatgaggtcctcatggtatgcagtttctgaccttccttcccgcctttgcatagtgtatggggtctcaatttgaacctgtctttgcccaat

SEQ ID NO: 95415 - DNA, 447 bp, Arabidopsis thaliana columbia
  unsure (1)..(447): unsure at all n locations
ggatttaacaacttctgtgtgtgtgggtgtgagtttcttaagtgtaagtcagaaacaatgattgggttgtttaaagtaaaggaaaagcaaagagaacaagctcaaaatgctactagaggaggagcttctgttaagaagcaatctgctggcgaacttcgtcttcacaaaggtatataaatgccttgttgatcttttttttgttcttgcatctccaagtttcaatttttggtgttttttccgattttgaactgtgcagatatatcagagttgaaccttcctagctctttgttcaatatcttttccaaatgggcaaaggtgatttgatgaacctttgaaggatccctttaaaccngnatggtgggtnattnccncaatnggancggtttnttttcncaattccaaggcnttnccggggantccccatgngggnccaaagnttaattnaaa

SEQ ID NO: 95416 - DNA, 983 bp, Arabidopsis thaliana columbia
  unsure (1)..(983): unsure at all n locations
attattgcaaccatttctctgctgtttctttttcttttagcttcagaggacgacaatggggtgtgctagagagagagatggatcgatcnncnacctttttaattcgctcgtaattcgttttgattttcgtgtttttgcaacgaatttaacaacttctgtgtgtgtgtgtgtgtgagtttcttatagtgtagtcagaaacaatgattgggttgtgggaagtataggaaaagcaaagagaacacgctcaaaatgctactagaggaggagcttctgttaagaagcaatctgctggcgaacttcgtcttcacaaagatatatcagtgttgaaccttcctagctcttgttcaatatcttttccaaatggcaaagatgatttgatgaactttgaagtttccattaaacctgatgatggatattaccacaatggtacgtttgttttcacattccaagtctctcctgtgtatccacatgaacccccaaaagttaaatccaaaacccaaggtttatcatcccaatatcgatttggaaggaaacgtttgcctgaacatcttgcgtgaagattggaaacctgttcttaacattaacacagttatctacggactcttccatctgtttcacggaacccaattctgaagatcccttgaaccatgatgctgcagcagttttgagggataacccaaagctctttgagaccaatgtttcgcagggccatgaccggtggatatgtcggtcagacctttttcccgcgttgtatctaacaaagctctggtttgtcttcttcaaggaaaaagataagaaccaaacccttttgtccgccattgtatttctcctctttcttcaaggaccctcgtttgtttgtttgaccttgtaaaattacattccgcgttaaagtaaccctttccttatatcgaaatcttgtcaactttaagttcgtgagaattcgataaaggagactaaaaggaattgnataacatgttgacgtn

SEQ ID NO: 95417 - DNA, 816 bp, Arabidopsis thaliana columbia
  unsure (1)..(816): unsure at all n locations
gcttcaggcagtccttggagatctgatcccctcagttatgttcattttgcgtcagctcttttcatcagaggacgacaatccggtaggcgagagagagagattaatcaatcggcgacctttttaattcgctcgtaattcgttttgattttcgtgtttttgcaacgaatttaacaacttctgtgtgtgtgggtgtgagtttcttaagagaagtcagaaacaatgattgggttgtttaaagtaaaggaaaagcaaagagaacaagctcaaaatgctactagaggaggagcttctgttaagaagcaatctgctggcgaacttcgtcttcacaaagatatatcagagttgaaccttcctagctcttgttcaatatcttttccaaatggcaaagatgatttgatgaactttgaagtatccattaaacctgatgatggatattaccacaatggtacgtttgttttcacattccaagtctctcctgtgtatccacatgaagctccaaaagttaaatgcaaaaccaaggtttatcatcccaatacacaagccggagcatccgaatgtagaactaacctcctcttcctatgtctctatttgcatgcttcgttttgctcttgaattatcttctattgtggatctcgtacttttcatttttctcttcttcaagaccaagcaaatcattgtttaaatctgttgtcttgcatttgtatttttaaaaagagaaaaacttgcttttaaaaaaaaaaaaaaaaaagnnnnnnnnnnnnnnnnnnnnnnnnnnnnnnnnnnnnnnnnnnnnnnnnnnnnnnnnnnnnnnnnnnc

SEQ ID NO: 95418 - DNA, 547 bp, Arabidopsis thaliana columbia
gggatgttctggaaaactctagctcaagagcaaggccattgccatggcggagatcatttggacgaccagcttcagttcctgattctgttatcttccagcgaaagcttcagtggcgagctagcatatacactaagcaattacgagctgttcgattacattcaaggcgcttggaactaagtttggcggtgaatgattacaccaaagcaaagataacctgaaggaattgagccatggattagaagagagcttcaggcagtccttgggagatcctgatccctcagttaattggtcaattttgcgtcagcctcttttcattccaaaaggcctttgagaggagggattaatcggccaaaacccgggcagacccgggatgttggtggaagatgaagtctcctctcttcgaaaattcttgtctgataaggtggatatattttggcatgaactaagatgttttgcggagagtatactcacgatggagacttatgatgcagtggttgaatacaatgaggtggagtaatagcagtaaaaaaaacagataaccgagcac

SEQ ID NO: 95419 - DNA, 446 bp, Arabidopsis thaliana columbia
  unsure (1)..(446): unsure at all n locations
cnnnnnnnnnnnnnnnnnnnnnnnnnnnnnnnnnnnnnnnnnnnnnnnnnnnnnnnnnnnnnnnnnnnnnnnccacgcgtgcggtgttttgttgtgccacaggcgtaacaggctttccgcttcaaccacctcttattccttaccgttaaagaagcttagagtctttggtagctatcaagcttcatatcatcatcttcttcttctcaggtcaagagccattctatggtttaaaggatgctcctggctaatctcagcacttagtttctctccctctgctctaaaagctaccccattttatggaatttggaggtggctttttaagcagatcccaatgggatctcctgtttcagatggtgatcatgtcgtatttgtcatctctcaccttcttgcaattgcatcttctcgagagaatgggtttctctttgagagatattgctaatggagca

SEQ ID NO: 95420 - DNA, 509 bp, Arabidopsis thaliana columbia
acagaacatcactaccaaacatctccagctcagtttcttcaaaataaaaacagttaatctctctaaaacaattttttgttttctctctctcttaaataaccagagagttcagaatcattttgattctctttgtaatctttagttgttgtacctaacatcatggctgaagaggaaccgaagaaggtgacagagaccgtgtcggaaccaactccaacaccggaagttccggtggagaaacctgctgctgctgcagatgttgctcctcaggagaagcctgtggctccacctcccgttcttccatctccggcaccggcagaggagaagcaagaagactctaaggctattgttcccgtcgtccctaaagaagtagaggaagagaagaaagaaggatcagttaatcgagatgctgttctggctagagttgagacagagaagaggatgtcacttatcaaagcttgggaagaggctgagaaatgcaaagtggagaacaaagctgagaagaagctttc

SEQ ID NO: 95421 - DNA, 808 bp, Arabidopsis thaliana columbia
  unsure (1)..(808): unsure at all n locations
tcccggtttcttccattcttccgggccccgggcaaagggaaaaagccaagaaagattctaaagggctatttgttcccggtcgtcccctaaagaagttaaggcaagagaaaaaaagaaggttcagttattcgagatgctgttctggcaaaagttgagacataaaagaggatgtcacttttcaaagcttgggaagaggctgagaaatgcaaagtgaagaacaaagttgagaagaagctttcttcaattggatcatgggagaccaacaagaaagcagctgtggaagctgagctcaagaaaatggaggagcatttggagaagaaaaaagcagagtatgtggagcagatgaagaacaaaatagctcaaattcccaaggaagcagaagagaagagagcgatgattgaagctaagcgtggagaagaaattctcaaagcagaggaattagcagccaagtaccgtgccactggaaccgctcccaaaaagcttttcggatgcatgtgatctctaatcatctcgatggggaaacaaatgaaatatggtattgatgtaatgacgttctttagtttgcttaatgtgggtttaatatggcaacatagaaagttataaggtcaacatcttatattgattggggtgcgtttgttaattatttaatttgtatttgtacatctttccattgaaaggctttctcttagctttatgaattggtaagtacaataatacataaaaaaaaaaaaaaaaagnnnnnnnnnnnnnnnnnnnnnnnnnnnnnnnnnnnnnnnnnnnnnnnnnnnnnnnnnnnnnnnnnnnaacg

SEQ ID NO: 95422 - DNA, 570 bp, Arabidopsis thaliana columbia
  unsure (1)..(570): unsure at all n locations
nnnnnnnnnnnnnnnnnnnnnnnnnnnnnnnnnnnnnnnnnnnnnnnnnnnnnnnnnnnnnnnnnnnnnccacgcgtgcggagagttttaaagtctattgtgctattaatgatggaatcatcaatctcattgacaagttctttgaaatggcaaaacatgaagccatcacttcccttgaaatatacaagcgtgcgggtcagcaggctcgtagcctttctgatttctatgaagcctgcaaaggattggaacttgcaaggaattttcaatttcctgttctaagagagcctccacaatcttttctgacaacaatggaggagtatattaaagaagcaccgcgtgttgtcgatgtcccagcggaaccactgcttctaacatataggccggatgatggactgactaccgaagatactgaaccgtcgcatgaagaacgtgaaatgttaccttcagatgatgtcgttgttgtatctgaagaaacagaaccttctcccccgcctcctccttcagccaacgctcagaacttcattgataccgatgatctatggggtctgaatactggtgctcctgatacat

SEQ ID NO: 95423 - DNA, 574 bp, Arabidopsis thaliana columbia
ggaaagctggcccgcctgcaggtaccggtccggaattcccgggtcccccacgggtcggggttatgatccgatcccttctcaatctcacggaggggaaaagattcctccaattcaaatctctgtctgtgtctctgtctctcaactttcaatttctgagagagtcggaaatattctccagatcgcctaaggcaaattcgttttccgattcggcctagcgacggcgagagaggagaggaagaggcaagttgattgaccggagaagaagacgaagccgttcttggagaaaatgataacgattccttatttaaccgctgtatccacctacttcagctatggattgctctttgcttttggtcagctccgagatttcttccgtcgcttcattgattggtggttcactagcaatctccagggatacgcgccgatctgtttggggcatgaggatttctatatcaggcgattgtatcatcggattcaggattgttttgaacgacctatatcgagtgcacctgatgcttggtttgatgtggttgagcgctactctaatgacaacaacaagacgcttaagcgaaca

SEQ ID NO: 95424 - DNA, 566 bp, Arabidopsis thaliana columbia
  unsure (1)..(566): unsure at all n locations
gtctctcttctctttcctctctctctcacacatcttcgagaagtttccccccgcgggagcgtatcaaagacaactgctgggcagaaatcagagatcagacatatgaacattctcttctccagattctcctttttgcttctgtttctctgttcttggaccagtttcactttcaccacaacagaagcttatgatgcacttgatccatatggaaacattactataaaatggcatattatgagctggactggtgatggttatgtggctgttgtaacaatctttaatttccaacaataccgtcacattgaggcgcccgggtggcaattaggatggagttggatgaagaaggaagtaatatggtgtatggttggtggtcaagcaacaggacaaggngnttgtctaagtttaagggtacattcccattnctgcaagaaactccggctatcgtngnttnttnccgggnctccttttancngcaggttccacctgttttggggggggtttgtttgcncgtgggnnagacccgnacccggntttnttcgtcaaccaatnttgcnagctgncacnaa

SEQ ID NO: 95425 - DNA, 418 bp, Arabidopsis thaliana columbia
gtgcgctgaatctctctgcatctatggaggctacgaaagaaagagttggcttgctcgatacgatcctcccgccggcacttgcagacgccggtctcgaggattgtgctctgccgccggaatctattcaggaagcatttcgcaaagccgctaacgccgtgaagtctcgcgcagcgtcgaatattcgaccacgaggaggaagacggttgtttagcggatcctattccggaaactgcagacaagattatcgttggaggagacaatgaaagggatactgggccgtgtttagctggaaaaggcattgagaagttggctgaatcgaaacaggccggagatttggtggtggctggcgaaggagaagaagggaagagctgcgttgatggtttgaaggatctagatgttgaaggtattgagagaagca

SEQ ID NO: 95426 - DNA, 727 bp, Arabidopsis thaliana columbia
ttttgattccatatactgaatatggactcattctacttctgtatatacacatgggatccaaacttaaactttaccctctcttaaatcactcatccgtttttcacccagacagtcgttaccaatcggcccctacaatggaggaagagcaacaacaacttcgtgttctcttcgcgaaatacgagatgggaaggttactaggcaaaggaacattcggaaaagtttattacggcaaagagataacaaccggagaaagcgttgcaatcaaaatcatcaacaaagatcaagtcaaacgtgaaggtatgatggaacaaatcaaacgagagatctcaatcatgagacttgttcgtcatccaaacatcgttgagttaaaagaagtcatggctacaaaaacaaagatcttctttatcatggaatacgttaaaggcggtgaacttttctccaagatcgttaaaggaaagcttaaagaagactctgctcattttacaagacggtttgcttcatactcagtgtggaactccggcgtatgttgcaccggaggttttgaggaagaaaggttacgacggagctaaaggtgatatttggtcgtgtggtattatcttgtacgtgcttctcgctggattcttaccgtttcaagatgagaacctaatgaaaatgtatcggaagatcttcaaatcggagtttgagtatccgccgtggttttcaccggagtccaagaggttgatttcaa

SEQ ID NO: 95427 - DNA, 825 bp, Arabidopsis thaliana columbia
  unsure (1)..(825): unsure at all n locations
gnnnnnnnnnnnnnnnnnnnnnnnnnnnnnnnnnnnnnnnnnnnnnnnnnnnnnnnnnnnnnnnnnnnnnnccacgcgtccgcggacgcgtgggcggctgcgagaagacgacagaagggggggtagagtagtaagatggccaagtacaacgagattgcgaagaagaagagagaggctaaagccgatagaaaacgagccattcacggcgatcctctcaccaataaattgaagaccagaactccggtcccctccgtctccggcaaacgtcagagaaagctccttcgcaaatggcgcagagagcagaaagatatggtggagaagggtcttgttactatggaagatgtggagatggcttctgctcaagctgcatcagaagactccaagaaatcccccagaaaatttagcgttaagaagagcttgaagttgaacaaactaaataataaaggcaaaaagaagaaaaaccagaaagccagtggtgaaaaatctgctgattgtatgctagaatgagtgtcgtgtatacctgtaaacccatttcttctaacggatgatagaggtttctcaatgtctggttagattctttcaaaaatgtgaaacgtgtgtttttgcatccggaggatgcgaagcagaggaatggagggtttgatatgattttatttaagttttccgaatcctttaatttctcaatctaatttttgtcttatcaaaatatcatattttgtattcaaaaaaaaaaaaaaaaaaaaaaaaanaaagcggccgctctagaggatccaagcttacgtacgcgtgcatgcgacgtcatagactcttctataggcgacctaa

SEQ ID NO: 95428 - DNA, 363 bp, Arabidopsis thaliana columbia
agtcatctccttcttctttcttgatctagctagcggaaaatttgacaatggcaagaatcgggagctttctcattcttctgtccctcacttacgctcttactctctgcatctgcgacgacgacgagagtaactttggcggcgacaaagggaacctcttcccaggtttctacaggagctcgtgccctagagccgaggagatcgtgaggtccgttgtagccaaggctgttgcaagggagactcgtatggctgcttctctcatgaggctccatttccacgattgtttcgttcagggttgtgatggatcgttgcttctagacaccagtgggagtatagttactgagaagaactctaaccctaacagca

SEQ ID NO: 95429 - DNA, 457 bp, Arabidopsis thaliana columbia
  unsure (1)..(457): unsure at all n locations
ataaaacgaagatgtgaagagtgaagaccgagagagatttatagcagaggaaagtgaaatcatgaaagggattctagggtttgaatacgggatagttcaggcgccattaggaccagatatctccggaccagagcttgtagccgccgtcgctaatgcaggagggattggtcttctcagatgtcctgattgggagtgtcctgattacttgagagagcttataagaaagacaaagacattgacagagaaaccatttgggatcggtgttgttcttgcgtttcctcatgatttgaacattaagacaatcttagaagagaaagtggctgtcttgcagctttattggggtgattgttcacaggagcttgtggatgatgctcactttgccggtgtcaaagttattcctcaggtggggaatgtcgaagaagctagaaaggctgttgctgtangagtagacgccatt

SEQ ID NO: 95430 - DNA, 1848 bp, Arabidopsis thaliana columbia
  unsure (1)..(1848): unsure at all n locations
agctctcnnnnnnnnnnnnnnnnnnnnnnnnnnnnnnnnnnnnnnnnnnnnnnnnnnnnnnnnnnnnnnnccacgcgtccgctctccctctctatctctctcttaccaatttccatttctcgggggaaaataataatacgacttttgaaatctctcactaatatttcccaagaaaacctgatgaattaaaagttcatattttcttggtgttgattggtattagatgactatttcttagtattagtcaattctctgtttccatcttatatggatagtctagacacagagcaaagatccttctttggagaaaaagaagatgagagacgagagaggatcgtttcttcacgtattggtcgtagatagatcttaatcgataaccatctaggccttgatctaaccattcaatataaactttatttccttcttcttttcgatctcaattgttccgaccaaacaagatgaagagatcacgtggaagctccgattctttatccggtttcttaccaattcgccattctacaacagacaaacaaataagcccaagaccaacaactaccggctttctctattccggcgccggagactactcccagatgtttgacgcattagaagacgacggaagtctagaggacctcggcggcgttggacacgcgtcttctacggcggcggagaaaaaacggcggttgggtgtagagcaagtgaaagcgttagagaagaatttcgagattgataacaagttagagccagagaggaaagtgaagctggctcaagagcttgggttgcagccacgccaagtcgcgatctggtttcaaaaccgccgtgctcggtggaagacaaagcagcttgaacgtgattacggcgttcttaagtcaaactttgatgcactcaaacgcaaccgcgactcgcttcaacgcgataacgattcactccttggacagattaaagagctgaaagcaaaacttaacgtggaaggggttaaaggtatagaagagaacggcgctttaaaagcagtggaagcaaatcaatcggtgatggctaataatgaagtcttagagctaagccaccgttctccatcgccaccaccgcatattcctacggacgctccgacatcggagctcgcattcgaaatgtttagcatttttccacgcacggaaaacttcagagacgatcctgccgatagcagcgactcaagcgcggttttgaacgaagagtatagtcccaatacggttgaagcagctggcgcagtggcggccacgactgtagaaatgtcgacgatgggttgttttagccaattcgtgaaaatggaagagcatgaagatctgtttagtggagaggaagcttgcaagttgtttgcggacaatgagcaatggtattgctccgatcagtggaattcgtaaaatgtgggggcagaattaaaagcatagaaaagctgaagggggtatgtggaaatattactgaagtcatattgggtcggaaaatgcattactcaaaatattggggtttttcttgagaaaatggaatatgacgcgagagggtagtaaaaacgagcgtgtggtgttccatgcacgtgtggccgtaatcttttcaaggttgaatgagagaggacaaaaaagtctgaaatcatcgggaataaaaaaaatatgtgacgaagaaatcgttttttcgtcgtttataatattatttgaataattttacttaggtgaatgtaatcgtcaaaaatctttaaattccgaagggttaaagattctgagcccgaaaaaaaaaaaaaaaaaaaaaagggcggccgctctagaggatccaagcttacgtacgcgtgcatgcgacgtcaagcatcttctatagtgcgcc

SEQ ID NO: 95431 - DNA, 591 bp, Arabidopsis thaliana columbia
cggacgcgtgggttctgggagaacttaactgttgtcgtcaatgcactggataatgtgaatgcgaggctctatgttgattcgaggtgcttgtatttccagaagcctctccttgagtctggaactcttggtacaaagtgcaacacacagtcggttatcccacatctaactgaaaattacggtgcctcaagggacccaccagagaaacaggcccccatgtgtacagtgcattccttcccgcataacattgatcacttgttaacttgggctcgctctgagtttgagggtctgctggagaagactcccgctgaagtgaatgcatatctttctagcccagttgagtacactaactcaatgatgagtgctggtgatgctcaggcgagggacacattggagaggattgttgagtgccttgaaaaggagaagtgtgagaccttccaagactgcttaacctgggcacgactgaggtttgaggattactttgtgaaccgtgtcaagcatttgatatacacatttcctgaagatgctgtgactagtaccggagcttcattcttgtctgctttaaaaagatttcttcttccactccagtttttg

SEQ ID NO: 95432 - DNA, 1065 bp, Arabidopsis thaliana columbia
  unsure (1)..(1065): unsure at all n locations
gaagggccgggccgacgcgtccggcctggaatggctaagaacgttatgagcgtgttcaaacccgaagtcttaccgntttacagcgagttagcgaacgagttcggagtgttcnatcgatggttcgcttcaataccaacttcgactcaaccgaatcggttctacgttcactcagctacttctcatggatgctcaagcaacgtgaagaaagatctcgttaaagggtttcctcaaaagacgatctttgattcgttagatgagaacggactcagttttgggatttattaccaaaacatccctgcgacgttcttcttcaagtctcttcgtaggcttaagcatttggtgaaattccatagctatgcacttaagttcaagctcgacgctaagcttgggaagcttccgaattattctgtcgtggaacagagatatttcgatatcgatctttttccggctaatgatgatcatccgtcgcatgacgtggcggcgggtcaacggtttgttaaggaagtttatgagacgttacggagtagtccacagtggaaagagatggctttgctcattacttatgatgagcacggtgggttttatgaccatgttcccacgccggttaaaggtgtgcctaaccctgatggtatcattggacctgatccgttttactttgggtttgaccgattgggtgttcgggtccctacctttctgatctccccctggattgagaagggcactgtgatacatgaacctgaaggtccaacaccacattcacaatttgagcattcttctatccctgcaacggtgaagaaactcttcaacctaaagtctcacttccttacaaagagagatgcatgggctggtacatttgagaaatacttccgtatccgagattctcctcgccaagattgtccagagaaactgccggaagtgaaactatcgctgaggccatggggagcaaaagaagactcaaagctctcagaattncaggtgggctgatccaactggccttnaactcgttgnggcatctctaaactatatcnngcattgggngncatgcagaagtnagnacaattggtg

SEQ ID NO: 95433 - DNA, 477 bp, Arabidopsis thaliana columbia
cttttacaaacacacaaaaaaaacaagaactagctaaaaggcaaaacactaaccacgcgctccgcaatggctatcacacgtgcctcctttgcgatttgcatcctcctctctttggctaccattgctactgctgattattacgctccctcatctcctccggtttacacttcaccggttaataaacccacgcttccacctccggtttacactccaccggttcacaaacctacccttccacctcctgtttacactccacctgtccacaagcctacactctcacctccggtttacactaagccaactctaccacctccggcttacactccaccggtttacaataagccaacgctcccagctcctgtctacactccgcctgtttataagcctacactctcccctccggtttacactaagccaactctcttacctccggttttcaagcctacactctctcctccagtttacactaagccaact

SEQ ID NO: 95434 - DNA, 681 bp, Arabidopsis thaliana columbia
cgacaaagattgccggaaaactagccgtaacttaggggagctaggtgagaccagcgggggttccatcctcgtgagtaaagcagtgatcgtcggtccgttcaaatccgacaacttcacaaccatcaccgatgctattgcagccgcacctaataacactagaccagaggatggttactttgttatctacgcaagagaaggtgtctatgaagaatatattgttgttcccatcaacaaaaagaacttaatgcttatgggagatgggatcaataagacgattattacagggaaccataatgttgttgatggtgggactacgtataattgctcgagcttcgctgtggttggagagcggttcatggcggttgatgttacattcagaaacacagccggacctgaaaaacatcaggcagtggctttgaggaacaatgcggaaggatcaagtttttatcggtgtagttttgaaggctatcaagatactctctacgtccattctcttagacaattctatcgcgaatgcgatatatatggtaccgtcgattttatattcagaaatgcagccgcaatttttcaaaactgcaacatatatgctcgaaaaccgatggccaagcaaaagaacgcaataacagcgcatggaagacttgatccaaaccagaataccgtattctctatcatcaattgtac

SEQ ID NO: 95435 - DNA, 515 bp, Arabidopsis thaliana columbia
aatacgactcactttagggaaagctcgtacgcctgcaggtaccggtccggaattcccgggtcgacccacgggtgcggcggagggggaaacaagtatgttgatgactttgttctcctttaaattatcatcacttcatttctcagagatttacgcacacagagttctcttcttcgtcctagtttcttctattccaggtgagaagaaaaaatggcgtttgtgaccactgcggaagtgtgtgacgcgaatcaagagatgattcgaagtggccagctccgagctctgcaacccgtttttcagatttatggtcgtcgtcaaatattttcaggtccagtagttactgttaaagtctttgaagacaatggcttaatccgtcacttcctcgaagagaaaggcaatggtagagttcttgtggtggatggtggggggagtttaccctggcccatactgggggggaacccgggtcgacaaggcccaaagaagcgggggggcaggggttcataggggatgggatggct

SEQ ID NO: 95436 - DNA, 614 bp, Arabidopsis thaliana columbia
gtatgctaccatgattgacattctcggtaaatctaaccgtgtgttggaaatgaaatatgtcattgagagaatgaaggaagattcttgtgaatgtaaagattcggtttttgcatcggttattcgtacattctccagagctggaaggctggaagatgctatttctctcttcaagagccttcatgagttcaattgtgtgaattggagtctatctttcgatactcttttacaggagatggttaaagaatccgagctcgaagctgcttgtcatatcttcagaaagtattgttatggttgggaggtgaattctcgaattacggctccgaatttgcttatgaaggttctttgccaggtcaatcgctctgaccttgcgtctcaggtttttcaagagatgaattaccagggttgttatccggacagagacagttacaggattttgatgaaggggttttgtctagaggggaaacttgaggaagccactcacctgttgtattcaatgttctggaggatctcacagaaaggttcaggtgaggacattgtggtttatagaattctattggatgcattatgtgatgctggtgaggttgatgatgctattgaaattcttggtaaaatct

SEQ ID NO: 95437 - DNA, 680 bp, Arabidopsis thaliana columbia
  unsure (1)..(680): unsure at all n locations
gaaaaccggggcgggccgaagcaaacaaactctctcaacaaacacataatttttttttttttacctacatcaaattcttcatgcacgtggtattaaaaagaccgtatgcattaacataacgacttttaccttctcttctcgtggggcacaaaccatgaacaccatgttcgtcaagccgatgcttaggaaatcaattcacaagaagagtgcctcgcatgatatagtgagggatacggtgaagactgagggctctagctccggagaggaggtgaagacgatgagaggcttctacggcgccggagaaacgtcgtcgccggcgagtagtttgggtgccacatgaaggtacgggaatatactatccaaagggacaagagaaagtgatgcaagatgtgcctcctcctccagctggcagccacgcggacgagctcgttaattggttctcttgatccattagtctcgagtgactctcttctcatctcgatctcgtcgaagactcgaagtctcttatattattgtctattgttctaatgggaaaccataaaatatatgtgtaattaagtggaaatatattgtcatataaccaatgataatgaataattaatgatgattaccnnnnnnnnnnnnnnnnnnnnnnnnnnnnnnnnnnnnnnnnnnnnnnnnnnnnnnnnnnnnnnnnnnnn

SEQ ID NO: 95438 - DNA, 736 bp, Arabidopsis thaliana columbia
  unsure (1)..(736): unsure at all n locations
cctgcaggtaccggtccggaattcccggtttacccacgcggcgaaccgcgtccgaccagcgtacgacagctgggagaagaacacaaggatgagttagagaaaagctggagcctgagaggaaagtttatctagctcaagaacttgggcttcaacctagacaagttgctgacgggtagcaaaacctggttggctctgtggaagaggaaacagcacgagaaagattacggcgtacttaaaacccaccacgattctggccgtcagaactgtgattccctccgccgtgacaatgaatctctccttcaagagattagcaaactgaaaacgaagcttaatggaggaggaggagaagaagaagaagaagagaacaacgcggcggtgacaacggagagtgatatttcggtcaaggaggaagaagtttcggtgccggagaagattacagaggcaccgtcgtctcctccacagtttcttgaacattctgatggtcttaattaccggagtttcacagatctacgtgatcttcttccattaaaggcggcggnttcttcattcggcgccgcagctggatcttcagacagtagcggttcaaacggctcctgctgaattgaaggaaagcagnnctaatggncactgttggngggtnccgggtaanggttcncggngggaattttncccccatttngnaaaantggggnnaccngggggctttnggggtnttcntgggggggaaaaaaacctt

SEQ ID NO: 95439 - DNA, 1024 bp, Arabidopsis thaliana columbia
  unsure (1)..(1024): unsure at all n locations
nnnnnnnnnnnnnnnnnnnnnnnnnnnnnnnnnnnnnnnnnnnnnnnnnnnnnnnnnnnnnnnnnnnnnnnnnnnnnnnnnnnccacgcgtccgcccacgcgtccgcccacgcgtccgtacggctgcgagaagacgcagaaggatgagttagagaataagcttgagcctgagaggaaagttaagttagctcaagaacttggtcttcaccctcgtcaagttgctgtttggtttcaaaaccgtcgtgctcggtggaagacaaaacagctttgagaaagattacggtgttcttaaaacccagtacgattctctccgtcataactttgattccctccgccgtgacaatgaatctctccttcaagagattagtaaactgaaaacgaagcttaatggaggaggaggagaagaagaagaagaagagaacaacgcggcggtgacaacggagagtgatatttcggtcaaggaggaagaagtttcgttgccggagaagattacagaggcaccgtcgtctcctccacagtttcttgaacattctgatggtcttaattaccggagtttcacagatctacgtgatcttcttccattaaaggcggcggcttcttcattcgccgccgcagctgggtcttcagacagtagcgattcaagcgctctgctgaatgaagaaagcagctctaatgtcactgtggcggctccggtgacggttccaggaggtaatttcttccagtttgtgaaaatggagcagacggaggatcatgaggactttctgagtggagaagaagcttgtgaattcttttccgatgaacaaccgccgtctctacactggtactccaccgttgatcattggaattgaagctgaaaacacccaccggaggagattttggattggattagatgctcttttcttctctgtggaaaaaacagaggagggcaaaatgggaaaaaaaaaaaaaaagggcggccgctctagaggatccaagcttacgtacgcgtgcaggcgacgtcaagactcttctatagtggtaccta

SEQ ID NO: 95440 - DNA, 1593 bp, Arabidopsis thaliana columbia
  unsure (1)..(1593): unsure at all n locations
ccggcacctatacgactcactatagggaaagccggcacgcctgcaggtaccggtccggaattcccgggtcgacccacgcgtccgcccacgcgtcctcaacctcaacaatctctctcctctctctctctgtatatagaagaatctccattgtctttaatttctctccatttctctttctctcttccttcaaagttttctcttttcttgatgggtttaagagagtaaagatcatcaagtactatgcattaaattgagaagttattaaaaatttcgaaagtaattaaagattgttgatgatgaagagattaagtagttcagattcagtgggtggtctcatctctttatgtcctacaacttccacagatgagcagagtccgaggagatacggtgggagagagtttcagtcgatgcttgaaggatacgaggaagaagaagaagctatagtagaagaaagaggacacgtgggcttgtcggagaagaagagaaggttaagcattaaccaagttaaagctttggagaagaattttgagttagagaataagcttgagcctgagaggaaagttaagttagctcaagaacttggtcttcaacctcgtcaagttgctgtttggtttcaaaaccgtcgtgctcggtggaagacaaaacagcttgagaaagattacggtgttcttaaaacccagtacgattctctccgtcataactttgattccctccgccgtgacaatgaatctctccttcaagagattagtaaactgaaaacgaagcttaatggaggaggaggagaagaagaagaagaagagaacaacgcggcggtgacaacggagagtgatatttcggtcaaggaggaagaagtttcgttgccggagaagattacagaggcaccgtcgtctcctccacagtttcttgaacattctgatggtcttaattaccggagtttcacagatctacgtgatcttcttccattaaaggcggcggcttcttcattcgccgccgcagctggatcttcagacagtagcgattcaagcgctctgctgaatgaagaaagcagctctaatgtcactgtggcggctccggtgacggttccaggaggtaatttcttccagtttgtgaaaatggagcagacggaggatcatgaggactttctgagtggagaagaagcttgtgaattcttttccgatgaacaaccgccgtctctacactggtactccaccgttgatcattggaattgaagctgaaaacaccaccggaagagattttggattggattagatgctcttttcttctctgtggaaaaaacagaggagggcaaaatgggaataaagttaaaattgaagggtgaaagggcaattaaggaagggttaagtctgggcgggaataatgatttagggtgaatttgtaattatgctttttctctagtgattttcgtgcacttcttgtaattaaggatcatcagatcaaagagaaattgagaaggggttaacatgtcaaaaaaaaaaaaaccccaaccccaaaagcggccgctctagaggatccaagcttacgtacgcgtgcaggcgacgtcataatcttctatagtggtcnnnnnnnnnnnnn

SEQ ID NO: 95441 - DNA, 398 bp, Arabidopsis thaliana columbia
agggaagaagcttgacgctttgcttggtcgcagtttcaagaccaacaagttcaagtctcttatcaccttagctctcacaaggctctctattctcaagaaccagcgtcaagccagactctctcaagccatctctgatgtcaccgagcttcttaagctcggccaacatgagcacgcttaccatagagtcgatcaagtcgtcaaagaccaaaacactctcgacgttctcttcttcatccatggctacttcactctctgtctcgatcgtattcacctctttgaacacaacagagattgtcctgaagagcttctagaagctgtttcgggtttgctatttgcagcttctagaatcggtgaattccctgagcttcaagagattcgtaatgttttgatttcgcgtt

SEQ ID NO: 95442 - DNA, 637 bp, Arabidopsis thaliana columbia
  unsure (1)..(637): unsure at all n locations
cccacgcgtccgctctctctctgctccatttctctcactttcttcacatctctgaagctcttcgtcacgcatctacaatggcatcgatgatgcaaccgcagatcatactgctgaaggaagggacggacacatctcagggcaaagcgcaactagtaagcaacatcaacgcttgcactgctgttggagatgtagttcgaaccacgctcgggccacgagggatggacaaactcattcacgacgataaaggatccgtcaccatttctaacgatggtgctaccatcatgaagctcctcgacattgttcatcctgctgctaagatcctcgtcgatatcgccaaatcccaagactccgaggtgggtgatgggacaactacagtggttcttcttgcagcagagtttttgaaggaagcgaagccatttattgaggatggtgttcacgctcagaatctaattaggagttaccgcacttcaagcactttgtcaattgccaaggttaaagaactcgcttttagcatcgaagttaagagtttatagcaaaagaaaggtntattggctaaaggcgctgttactactctatcatttaagcttatctgtggaaaaaatgatttattttctacaattgtttattatttttattt

SEQ ID NO: 95443 - DNA, 437 bp, Arabidopsis thaliana columbia
cgggctggaccgcacgcgtccggaaacatatacgttcttagtggcaaggatggtcctatcggccgtccttacccatgcgagggctgatggaagagcggtggacgcgaacttcttcttgttgatctgaacaagcgaggtgagaaaaagaagggtctcaccatcgttactacatcctttgacggttacctgtatctcatagatggacccacctcgtgcactgacgttgttgacattggcgaaacttcatacagcatggccttggctgataatgttgacggtggagatgatctcgatcttattgcctcaactatgaatggaaacgtcgtgggcttctcaacgccttcttctcaccatccccttaaggcttggagatctagtgatcaaggcaggaacaataaggccaatcgttatgatcgtgaaggcgtttttgtcacgca

SEQ ID NO: 95444 - DNA, 679 bp, Arabidopsis thaliana columbia
  unsure (1)..(679): unsure at all n locations
nnnnnnnnnnnnnnnnnnnnnnnnnnnnnnnnnnnnnnnnnnnnnnnnnnnnnnnnnnnnnnnnnnnnnccacgcgtgcgcgccataactctctctctctctcccacttcccacagagagacacattcatgccagcaatgccaggtctcgtctcagtcaaaactccttccgatacaccgccgctacgtgtagccgtaccagacacgcaacctctctcaaacccgccgcgaactccgatgaagaaaaccccttcctctacaccatctcgatccaaaccatcaccaaatagatccaccggcaaaaaagattccccaaccgtatcctcctccaccgcagccgtaatcgacgtcgacgatccatctctagataatccagatctcggtcctttccttctaaaattagctcgtgacgctattgcttctggtgaaggtcctaacaaagcattagattacgcgatccgagcaactaagtcctttgagagatgttgcgccgccgttgctccgcctattcccggtggtagcgatggtggacctggtcttgatctcgctatgagccttcatgttctcgctgctatttactgtagtctcggccgatttgatgaagctgtaccacctcttgaacgagctattcaagtccctgaaccgactcgtggccctgaccactctctcgctgcgttttc

SEQ ID NO: 95445 - DNA, 724 bp, Arabidopsis thaliana columbia
  unsure (1)..(724): unsure at all n locations
cgcgtccgaatttggcttttatcatcgccgccgggacacaacacaaagaggggcttagatttgtgctttcgagaagtgctttgatctctcttctccattttcacttctaatcggagatttctcttagggttttgttattcgttgagagatcgaattaaaaacttgtgaagaaatctctagggatcgtaatcgttgttggtgtggggtattacactgattccggtttgaacctgaatcgtatctatcaatcgatggcatcagaggatgtgaaaagaacagaatcagcagctgtgtcaacgatcgtaaatctggcggaggaagcgagggaaggagtcaaagctccgagttatgcttttaaaagcatctgcaagtctctttttgccggtggtgtcgctggtggagtgtcacgaactgctgttgcacctctggaaaggatgaagatattacttcaggtccaaaatccgcataatataaagtacagtgggacagtccaaggattgaagcatatttggaggaccgagggacttccgtggactnttncaaaaggnaatngcaccaacttgtgctcggatttgttcctaattcgggctgttaaatttttcaagcnnatgggcaagcttcaaaattggattactgtnacatgtatnggnagngggcccgnaatgnaaattncccaacttacttctcttttnnggggttgngnctngngaaccncttggggtta

SEQ ID NO: 95446 - DNA, 580 bp, Arabidopsis thaliana columbia
ggaacccctgttcttacacattttcgaccccgtgggaacaaacacggcggttcactgccattttgctgtgtcaagaaagtcaatgcgacggagcttgacaagaatatttcctcatctgctgtagactcagagcagaaagggaagttggatgatgcacctaattcagggacagagaatggcaaaacagtacggaaggtaacaagaatgattccacgtcccaaacaaccgaaaaagaaaattttgcttaagaagaagttaaaaatcggggttgtgtcagcaacttacccaacaaaagacgatgaagaaattgttccttccttggactctagtgccaatcaacttctctgccagagatgtcactgttcgttgaagagcaccagcatcgatgacaacccaccttcatatacttctagtcataatcctaagatttgcacagatagtttgagctctgtttcaaataaagaagctcatcaaggatctgacgagaactcctctggctcgtgtaatgtcagtcaaagctctgaagctgacattgtcataatgaaacaagatgtttcctctagcaataatagtggaatcg

SEQ ID NO: 95447 - DNA, 651 bp, Arabidopsis thaliana columbia
ctggttctttctactcaaaaacaaaggcaatggtggaagagcttctaagagaatttgacaacgtatgcaccttgagagtgcggatgccaatctcatctgacttaaataacccgcggaacttcatcacgaagatctcgcggtacaacaaagtggtgaacattccaaacagcatgaccatactagatgaactcttacccatttcgatcgagatggcgatagaggaacctaaggggaatatggaacttcgccaatccaggagtggtgagccacaaccagatattagagatgtacaagagttacatcgagcctgatttcaaatggtccaacttcaatttggaagaacaggctaaggtcattgttgctccacggagcaacaacgagatggatggtgccaagctcagcaaggagtttccagagatgctttccatcaaagattcgttgatcaaatacgtcttcgaacctaacaagagaacgtaaaacacagacacacacacgcacttccccgctctgtgttcactataatgtttctactatagttttatctgattcatttactctctttttttgcaaaaaaaaaaaaaaaaagggcggccgctctagaggatccaagcttacgtacgcgtgcatgggacgtcaagtaaatctatagtg

SEQ ID NO: 95448 - DNA, 531 bp, Arabidopsis thaliana columbia
  unsure (1)..(531): unsure at all n locations
cttcgcttctcgtctctcttatcagtcttctcttttcacggctacaaggctaattgagagtgtcccttgcgttagagtttgttactagcttttttcgtctgaaacatggcgaattttgccaaaccagagaacgcgttgaagcgtgctgatgaattgatcaatgttggacagaaacaagatgctcttcaggcgcttcatgatctcattacttccaagagatacagagcttggcagaaaccgcttgagaagatcatgtttaagtatcttgatctttgtgttgacttgaagaggggtcgattcgctaaggatggattgattcagtatcgtattgtttgccagcaagtgaatgtcagttccttggaggaagttatcaagcacttcctacatcttgctactgacaaagctgagcaagctcggtctcaggcggatgcccttgaggaggctcttgatgttgttgcccttaagctgttggaagcntcgggttncactaagaatttcantggggnagggaaananaggntnccccnngca

SEQ ID NO: 95449 - DNA, 543 bp, Arabidopsis thaliana columbia
  unsure (1)..(543): unsure at all n locations
gcnnacccncgtgngnncctagggaccntctctctgtgtccctcngctttggtgtgntgtgctatggancaattttgccgccgccgtggatatggtgtnccactggtttggtggaagtgaaaactttccccaaggcagctccactaatgctggctttgatgacaagtttgagagcaaccaaccattaggcaatgatacggatcatcagactgaaagcggtttgggaggcgatgaacaatttggtggcagtgacaatcaatttggagatgcagagaacggtaacacagagaatggtccagttgggtttgatcaaactgacgatggcgatgttgccaagagagcctagtctccacgatgttgtgccgtgtatgtttacgtcatggaacttttgttttgcagtttcagtctaaaacttacgaactttcttaatctctctatttaacgtttgaggttgtttatcatgtagagagacctctttagttggtctgtttttcttaaaatgttgggccaattaattaaaaccggtaataacctcccgggtcc

SEQ ID NO: 95450 - DNA, 1456 bp, Arabidopsis thaliana columbia
  unsure (1)..(1456): unsure at all n locations
atgatacgccgagacctaatacgacctacttagggaaccctggtacgcctgcaggtaccggtccggaattcccgggtcgacccacgcgtccgacaaatcacatttttatataactgttaacataataatctcagcctcatcaacacacatatatagatagccaacatcacacaaacatagagattccaaaaaataaaaataaagaaaacataaatcctctgaggaaaaattccgatgagatgacagaaggtggagaatattctccggcgatgatgtcagcagagccattcttgaccatgaagaagatgaagaagagcaaccacaacaagaacaatcagagaaggtttagcgacgagcagatcaagtcactggagatgatgtttgagtctgagacaaggcttgagccaaggaagaaggttcaattagctagagagctagggttgcagccgaggcaagtggctatatggtttcagaacaagagggctcgttggaaatccaagcagctcgagactgagtacaacattctcagacaaaactacgacaacttggcttctcagttcgagtccttaaagaaagaaaaacaagctttagtctctgagttgcagaggctaaaagaggcgacgcaaaagaagacacaggaggaggaaaggcagtgtagtggagatcaagcggtggttgctctaagcagcacacatcatgaatcagaaaacgaagagaaccggaggcgtaaaccggaagaggttagaccggagatggagatgaaagatgataggggtcatcatggggttatgtgtgatcatcatgattatgaagatgatgataatggttatagtaacaacatcaagagagagtgttttggtgggtttgaggaagaaccagatcacttaatgaacattgttgaaccagctgatagttgtttgacatcatctgatgattggagaggtttcaaatcagatactactactctcttggaccaatcctgcaacaattacccttggcgggatttttggtcatgaaaacaataaactctaaacaagaagatgaaacagattgagactaaagattggatatatacatattcaaatcgaaatttaccggtctacatcgcatgaaccgagccacggatatagagatattcggtccagcaaatgactcgtttctcagcgagaattttgcaggattttgagctgaaattgtatggttttgtctgtataaatgatgtgtttagaaagacgtatattctcagttcgtgtttgtaattctgtttttaagtagtaagtactcgtcatgctttgtagctaagtagtaagtttaagactaaatttggatgaataaaaatcaaaagcaggagaaatcatataaaaaaaaaaaaaaaggannnnnnnnnnnnnnnnnnnnnnnnnnnnnnnnnnnnnnnnnnnnnnnnnnnnnnnnnnnnnagttcccctatgaatcg

SEQ ID NO: 95451 - DNA, 716 bp, Arabidopsis thaliana columbia
  unsure (1)..(716): unsure at all n locations
caacaatcccacctccggtttacactccaccggtttacaagcctactccctctcccccggtctacaaaaagtctccaagctattcgtctcctcctcctccatacgtaccaaaaccaacctacactccaaccaccaagccatacgtcccagagattcttaaggccgttgatggcatcattctatgcaaaaacggctacgaaacctaccctattctaggagcaaagatacagattgtntgttccgacccagcatcatacggtaaaagcaacaccgaggttgtgatctacagtaatccaactgactctaaggggtacttccacttgtcgttgaccagtattaaggatctagcttactgtcgtgtcaagctctacttatctccggtcgagacttgcaagaacccgaccaatgttaacaagggtctcacaggagttcccttggcgttgtacggataccgtttctacccggacaagaacttggagctctttagcgtcggacctttctactacactggtcccaaggctgcccccgccactcccaaatacttgatccgtgatgatcatcttatgatgatgatggttatggttttgcatgcattatataagggggcgctttaatcaactttattttttggaattttttccccttgaaaatgtcctttggtttttttgttccggtttaatttggtcnaaatgaancantccccttgggntggtttt

SEQ ID NO: 95452 - DNA, 782 bp, Arabidopsis thaliana columbia
tcgtccacgcgtccgcttcaccattgccactaacgacgaactctcttgtctctgaaatggaggttccaaaggagcagatcgcgactttaatagagcatgggctttacgattctgctgaaatgctcggctgctttctcgtttcttctcctactgttagtgccgaaactagtcctcagctcaaggcggagaatttgattctactgggtgatgctttatttcatcagagagaacaccggagagctattcatacgtacaagcaagcgttgcatcattacacaaggattccgaagcaaagctccggtatttcgaggagttcattatctttatctaccagatcatctgtgaatgcctccagcatttctgctattaatgagaacgaggtgagattcaagattgcttcatctcactttgctcttaatgaaacaaaagctgcgattgctgagatggaatctgtcaagaccaggagcttagagatgaatatactgatggcaaagcttcatcgaaattctggatacaaccgtggtgctattgctttttataaagagtgtttaaggcagtgtccttatgtacttgaagccgtcataggtttagctgaactgggagttagtgcaaaggatatcatatcatcgtttactcagacttcaaatagaagtgcaaaggtttcactcgatcagatagatcctacccgctggttgcaacgttatgtagaggcccagtgttgtgttgcttcgcatgcttacaaaggggcgctggaactctttgctgaactcttacaacgattt

SEQ ID NO: 95453 - DNA, 536 bp, Arabidopsis thaliana columbia
cggtttttcagttaccaagtttgtcaccggtagattcctttccgttttactcccacaccacttaaattttcaaatcgtaggagaatcaactttttccggccattatcagcaaccgacgattctcgatccggtgcaccagatccagaatcgccgaaccaaatgttcattctcgggatgggattcgtcggaggtttttttgcgcaacagctcaaagaatcagactgggtggtttcagggacttgcaggagtgattctaagaagaaagaatgggaaaagagaggaattaatcttcatccattttctgcagactcacctgaatggagcttgctagattcagtgaaagattacactcagctactcatttccattcctcctttagctgacattggtgatccgatgttgcggaatgtagaacttgtgagagacaagctttcgagtggaaatcttcgatggctttgttatctcttatcaacaagtgtgtatggagaatgtggtggtgcgcgggtcaatgaaaatcatctcccaaattctaaaac

SEQ ID NO: 95454 - DNA, 482 bp, Arabidopsis thaliana columbia
  unsure (1)..(482): unsure at all n locations
acgcgtccgaatgggaaaagagaggaattaatcttcatctcattttctgcagactcacctgagtatttgttttaatcagatcttcaatgatggtaatctctaaaatctgagtcttaaactcttttgtttgcttgttaatcaggtggagcttgctagattcagtgaaagattacactcatctactcatttccattcctcctttagctgacattggtgatccgatgttgcggaatgtagaacttgtgagagacaagctttcgagtggaaatcttcgatggctttgttatctctcatcaacaaagtgtgtatggagattggggtggtgcgtgggtcaatgaaaatcatctcccaaatcctaaaactcagtccagcccaaggtgagattagctgcagaaccaaggatggttaanncttgggcngtnatntttggggttcggctcaaaancttnggcttnggggggttttttggccctgggcnnagg

SEQ ID NO: 95455 - DNA, 516 bp, Arabidopsis thaliana columbia
  unsure (1)..(516): unsure at all n locations
cagttaccggatttctcgagaagggaaagctagctgatgttgaagggatgaagacaaaagtaatgatatgggttaaagtcacaagtatctctgctgattcttcaaaggtacatttcccggcagggatgaagaaaagcagaagccgagatgcttatgaggttttaagagatggcgttgagattgataaattctagctctgttttgctggtaattctcaattcttttatcctctttctccaatctctatctttaaagtttcaactttcttcaaaattgttttgtatatgctgattttcaattatgttgaagttcatgaatttgataaactgaagaagatggtaactcagtacaccaaacaatgttcttatgtcttttggtattacttactgagtcactgtttaagccaaaaaaaaaaaaaaaaaaaaccaaanngannnnnnnnnnnnnnnnnnnnnnnnnnnnnnnnnnnnnnnnnnnnnnnnnnnnnnnnnnnnnnnnnnnnnnnnnnnnnnnncg

SEQ ID NO: 95456 - DNA, 889 bp, Arabidopsis thaliana columbia
  unsure (1)..(889): unsure at all n locations
gcgggtcgacccaagcctctatactgattcgaaataacgacagaggggaaccaaaaaaaaaacacctccgatctcggcgagagaaagagaaacgatctgtgagagagaatggatcagatcttgaacaaggtaggctcgtactggttaggtaagaaggtgaacaagcagctcgattccgtcggtgacgatatcaactctttgtcttcgagcatcgaaggaggaacaaaatggttggtgaacaaaatcaaaggaaaaatgcagaagccattgcccgagttactaaaggagtttggtttgcctgtggggatctttccacgtgatgcaaccaactacgagttcaatgaacagacgaggaagttaactgtctttattccatcaatctgcgaagttggttacaaagatacatcagtcttgagattcaccactacagttaccggatttctcgagaagggaaagctagctgatgttgaagggatgaacaccaaagtaatgatatgggttaaagtcacaagtatctctgctcattcttcaaaggtacatttcgcggcagggatgaagaaaatcacaaccgacgatgcttattaggttttaagagatggcgttgagattgatcaattctagctctgtttggctggtaattcacaattccttcatcctctttctccaatctcaatctttaaagtttcacccccccccccaaaaattttgtacaccctcattctcaaccatgttgaagctcacgaatttgataatctgaacaagatggtaactcagtacgccaaacaatgttcttatgtcatttgggatgacttattgagtcactgtttaagcaatattataacacccgcctcanacancggagcgaacgctctagaggatccnagcttac

SEQ ID NO: 95457 - DNA, 1018 bp, Arabidopsis thaliana columbia
cggacgcgtgggctgatgtgtcgtttcctctagcagggctgagtacagcccatatcgaagctatatctttccatccatgtgcccaagttccagcacatgggattgacaagcagaacattgttttccagcctcccttgggtaactttgttctcatgcgataccaggcaggttgtggactcggaccaccagtgaaagggttctatcagctatcaatggtttcagaagacgagggtgcattcctcttccaaggtgccacctcatgggaaggtttacaagggctcctctgtccaatggaatttttggccctattactatgccctttccacggagacggatagtggcatttgatgggactccgtcagctgggactgttttaaccacagaacactctgttgagtggaggattctgggcagcggacgtagtctttctggaaaaagccttgaggcacctttccctgggacaatcaagtttagtccattgcagaccagaagaaaaggggatggggttgatgaagagagtgaggatgagacccctgagattgtggtgaacgtggaggcctccttggtgcagaaaatgaacaagggatctcccagcagctgagttggaggaaccggtcctgctggcaagcctatgactatgccaaggtctcgttcaagattgtcggggcatctgtatctcgaatgtcaatcgacacaaaatcagtcaatatctacccaaccacaaagtcaccggttgagttttctgctcaggtgacttcaggggattatatattgtggaacacattggggaaagctccatcagcagccgtcgtgtgatttccccaagtcgcagcctcactggtattgtattttcccatcccaaggaagtgatttatttgtttgagtttgaaagcattaaacgtatgaatgagcagtttgatttttacagcggaagtgtatctggacattattgttgtttcttgagagataaagaaaaattaatgttgtttgcggccgcggatttgaaatccagcttatc

SEQ ID NO: 95458 - DNA, 504 bp, Arabidopsis thaliana columbia
  unsure (1)..(504): unsure at all n locations
atgatacgtcnnnnnnnnnnnnnnnnnnnnnnnnnnnnnnnnnnnnnnnnnnnnnnnnnnnnnnnnnnnnnnnnnnnnnnnccacgcgtccgagagaatctattgggaagaatcgagtcatgattatggagtgtttgtgaaggaattaggtgttttgagaagtaaagctgatggagctaggtctagagaagaagcttttgatggacatatggctattggtagggttttatatgagcatcagttgtttaaagaagctcttgttagcttcaagagagcttgtgaattgcaaccgactgatgtgagacctcatttcaaagctgggaactgtctttacgttttggggaaatgcaaagagtcgaaagatgagtttttgttggcgttggaagctgctgagtcgggcgggaaccaatgggcttatttgcttcctcagatttatgtcaatctcggtatcgcgcttgaaggcgaaggtatgggtttgagtgcttgtgagtattatagagaagc

SEQ ID NO: 95459 - DNA, 466 bp, Arabidopsis thaliana columbia
agaccacgcgtccgcccacgcgtccgcggacgcgtgggctttcttctttctctaaaatcttctaagaataaccattttctaaagatatcttttaacgagacaacaaacaacagaaaaacacacaaaaacacaaaacttctgtttccctgtttctccggattctctccggctctgagctttcggcttctcctctccggagatgttactctgcttccctcttttgtgttctttttgttttctgggtgaatattgtatgaacctttgactgggatttttccgaagaagaatcccagacgacgtaatttttctccaagctatggctgttgaagagatggagaagaagatcaaaggaagccaagagacggagctacataaaaacgacttatcaatcgaagacccatctccaagatgcgtgcttgaaattccggtaatgagttcagattccgataacagcagcagtagtagg

SEQ ID NO: 95460 - DNA, 889 bp, Arabidopsis thaliana columbia
atctcctttgaaaatatgtgtttcatggaggagaaacaccaagtgagcaacaacaacaacaaccagtttgggatgacaaactccgttgatgctggatgtaatgggtatcagtatttcagctctgaccagggtagtaattctttcgattgttcggagtttggttggagcgatcaagctccgataactcccgacatctcttctgcggttatcaacaacaacaactcagctctgttctttgaggaagccaatccagctaagaagctcaagtctatggatttcgagacaccttacaacaacactgaatgggacgcttcactggatttcctcaacgaagatgctgtaacgactcaggacaatggtgcaaaccctatggacctatggagtattgatgaaattcattccatgattggaggagtcttctgaagagatccagtttcatgtaaataaggctgcatgtttgtgagtttcccgcatcgttcgtttatcaacctccaaaactttctaatgtctgttacttgcatcttcttctgctgtctctgtctgtctctctcaggagttcctgtttgcattgcgagaagccatgagcctctatcttgagggtagttgtgatgaagttaagtagaggcttatttttaggggttgtggtagtttttgttttagtgaatcttttgaattcgtttgtgttttgtttttgttactttatgccccaaaactcctttaacatttgtcataatgtgtttgaacctctcatctgtttaatcaaataaatcttctttgtatgctaaaaaaaaaaaaaaaaaagggcggccgctctagaggatccaagcttacgtacgcgtgcatgcgacgtcataagtcttctataggtgcacctaaaagctatatccgc

SEQ ID NO: 95461 - DNA, 537 bp, Arabidopsis thaliana columbia
  unsure (1)..(537): unsure at all n locations
accctttntggaaccntnggcccntnccggttcagcnggngtcctncttnaancccggnattcccgnnacccctttggttggaaccttgaagaacacgttatctgcacacttctgtcgaaagaaagacaaagcaaggatcgcttctgaaaagttctctgagatttacagggatgttacgatgaacaatctgatgggaatgtcgataacattggcgattgtatactcgagaggattgaagtgggaatactcaatagaatctcttcttgttgtggtagttggcattgcaattggcttaccggcttatgtgagatcgacttatccgttctggatctgtgtaatggcctttgctatgtatatcttctctcttgtccttatctatatccattttcatcttcgaggtcagagctaaagctttcaccttttagctctgatcagactaaaagagtatatcaacttcaaagtgttcttttccattttcattaagaccattttttttttgtttttaaattatctatatttgtttttctttattcttt

SEQ ID NO: 95462 - DNA, 537 bp, Arabidopsis thaliana columbia
  unsure (1)..(537): unsure at all n locations
tttgtttattggtagtcagcgacacggaactcattaactttactcttctcactggtcaatcgtcggagataatcgggtgatcggcgatggagaatacggacgtcttcttggggctgcatgatttcctggagcggatgcgcaaaccctccgccggcgatttcgtcaaatccattaaaagtttcattgtttcattctcgaacaatgcaccagacccggaaaaagattgtgctatggttcaggagttcttttctaagatggaggctgctttcagggctcatccactttggtctggttgttctgaggaggaattggatagtgctggagatggcctggagaagtatgttatgacaaagctatttactcgggtgtttgcttcaaacactgaggaggttatagctgatgagaagctttttcaagaagatgtcattggttcaacaattcatttctcccccgagaatttggatatacaaccaacttttccaaaatgaatcgccatggcttcttgcttaaaaagggcnccnnaggtaancatgntgc

SEQ ID NO: 95463 - DNA, 762 bp, Arabidopsis thaliana columbia
  unsure (1)..(762): unsure at all n locations
gtcagctttgctggatgtggcttccattgcatctttcaagatccttctattagatccatatcgggagtgttgtctgccttccatgcgatgactatatcgccaatggccgaaaccatggggttatcttcatcagcctgaacatgaggcctttgctcacttattgcaagctccgcaagaggattcccagatgttagtccgggagcgtttcccagtcccgagattagttgtgtgtgatcaacatggatcacaggcaaggtttttattggctaagctgaatccatcagcgacttacaacaatgcaaacgagatgtcagctgggtcagacataatcttcactgacgatgtgagcctccaagtctttattgaacatcttcagaaactggccgtgcaatcctgagcaaagtagtcacagtcccagtttgttttttgcttaaattatccatatcttcctgattacccgcatgcccgtttgtactattttaaagctctttgttattttggtctcacataaaatacatcatagttggaagtcttttatttgcattgggatttgtctggagtacaaagatttactatttgcttcttctttcttttttttttgggatgaaatctcttgtatgattgatcaattatatggtttgggtctgtggctttagtnnnnnnnnnnnnnnnnnnnnnnnnnnnnnnnnnnnnnnnnnnnnnnnnnnnnnnnnnnnnnnnnnnnnnnnnnnnnnnnnnnnnnnnnnnnnnnnnnnnnnnnnn

SEQ ID NO: 95464 - DNA, 719 bp, Arabidopsis thaliana columbia
ccaatggggtattttgcttccaacaaagccctgaaaccattgagggccctgtggctcagggttaatgccagagcttccggcaagaggtattcccccgttttgttatcacggaagcttttcccagtcccagagattaggtgtgtgggatcgagcatggatcccacggcaaggtttttattggctaagctgattccatcagcgacttccgactatgcaaacgagatgtcagctgggtcagacataatcttcactgacgaatgtgagcctgcaagtctttattgaacatcttcagaaactggccgtgcaatcctgagcaaagtagtcacagtcccagtttgtgttttgcttaaattatctatatcttcctgattacccgcatgcccgtttgtactattttagagctctttgttattttggtctcacataaaatacatcatagttggaagtcttttatttgcattgggatttgtctggagtacagagatttactatttgcttcttctttcttttttttttgggatgaaatctcttgtatgattgatcaattatatggtttgggtctgtggctttagtgcttttgggccttgggcaacttctctgcttctggtccagtatctcgcgctactgcgtttgatttaaagaggtctctaaaacacaagctgactaaaaatgaagggcggccgctctagaggatccaagcgtagggacgcgtgcaacaa

SEQ ID NO: 95465 - DNA, 653 bp, Arabidopsis thaliana columbia
  unsure (1)..(653): unsure at all n locations
gttggatgagagcaaagacgttggtgcatccaatcgtcgccatctcgctgcactatactgtggtgctacttctggatttgagcttatccatggcctggtcgataggatcatggaagtgatggcaataccatttctaacaatccatgaaaataacgtaccaatcaatgaaaaagacggatactatgtaaagctctcccaagaacccgagtttctaccgggcaggcaagctagcatcattgtcagagggaaacatattggtaactttggaatcgtgcatcctgaggttttgaacaactttgacatccctgatccatgctcttacttggagttagacatcgaagctatcttatagaaaaagaaaccaaccaaaatgttttcttctctttgtgcaatatcgttatctggattatttgaagttgttgattttgtttggttagaggatctagaacacgcatgtcgagagaattactacaaatatttaacttgctctgctgttttttaccccatttgtaagatccagcttttattttcaattcgattgtaattttcattaaaaaaaaaaaaaaaaagnnnnnnnnnnnnnnnnnnnnnnnnnnnnnnnnnnnnnnnnnnnnnnnnnnnnnnnnnnnnnnnnnnnnnnnnnnnnnnnnnng

SEQ ID NO: 95466 - DNA, 708 bp, Arabidopsis thaliana columbia
  unsure (1)..(708): unsure at all n locations
tgccccaagcagctgccattgtgttcgtagtggatgccttggagttcctcccaaactgtcgtgcagcttcagagtacctatacgagattctgaccaatgcgaatgttgtcaagaagaagattccagtcctcctttgctgtaacaagaccgataaactcactgcacacaccaaggagtttatccggaagcaaatggagaaagaaattgagaaactgagggcttcaaggagtgcagtctctactgctgatatagcgaatgacttcaccattggaattgagggagaagtgttctccttcacgcattgctccaacaaagtcactgtcgctgaggcatctggacttaccggagaaaccatccagattgaagacttcattcgagaatacatcaagccatgagctccaacatgccttcatagattgaatctaccacaagtttcttatgctttgggctgtgactttgatttgagtttagagatccttttgtatatgagatctttggatgatttagggtgttcaaaactgagtagctgtattttcgagttagataatctgttttaaatcggaatgattttaaggaaatgttaaatgacttaattctcttgcnnnnnnnnnnnnnnnnnnnnnnnnnnnnnnnnnnnnnnnnnnnnnnnnnnnnnnnnnnnnnnnnnnnnnnnnnnnnnnnnnnnnnnnnnnnnnnnnnnnnnnnnnn

SEQ ID NO: 95467 - DNA, 761 bp, Arabidopsis thaliana columbia
atctctttgggatgctacagggaactagatttgttttatatgcaaacggtagagaatccatcagtgttacaatccaggaagtgacaccaacatctgttggggctattatagctctttatgaaagagctgttggtttatatgcctcaattgtgaccataaatgcttaccaccaacccggtgtggaagctgggaaaaaggcagcagcagaagttctcgccctgcaaaagcgggtattgtcagttcttaatgaagccacttgtaaagatccggtagagccattgacactggaagagatagctgatcgttgtcatgctcctgaggaaatagaaatgatatacaagatcatagcgcacatgtctgcaaacgacagagttctgatagcagaaggaaactgtggatcgccacgaagtatcaaagtgtatttgggcgagtgcaatgtggatgacctgtacgcataacaaaacccaacactttctcaaactccaaactctcattctctccattccttatttctttctgccatgtctatgattttgaaaaagaaaaagattgcaataagagccaggaaacacttgtgtacttgttttgaaataaagataatttcagaatgttacaaatgttgattgtaatgataacattggagatagattcatcaatcaagcaggctcatgtgaaacaaaaaaaaaaaaaaagggcggccgctctagaggatccaagcttacgtacgcgtgcatgcggcgtcatagtctagctatagtgtc

SEQ ID NO: 95468 - DNA, 560 bp, Arabidopsis thaliana columbia
ggagaaagaggcagcagtgaaaaaagagtttggacagacttgtgactggataaagaaacgattgggtgacaaggttgccagtgttcaaatttccaaccgtcttagttcttccccctgtgttcttgtatctggtaaatttggttggtcagccattatggagaggctaatgaaggcacaatcaactggtgacacaatacgcctcgactacatgaaagggagaagagtgtttgagatcactccccaccactcaattatcaagaacataattgctgcttacaatagccacccaaatgacgaagatgcaatgagagccattgttcttatgtatgacgcagcactagtttctagtgggttcacgcccgataatccagcagagctgggtgggaagatatatgagatgatggatgtagctctttccgggaaatggtcaagccctgaggtgcagccgcagcaacagcagaggcacattctcacgatgcagagacgtttgaagtctgaagtggttgaaccagtcgaagtggatgggaagaaatgaacacaagcctaatgttttatgtccc

SEQ ID NO: 95469 - DNA, 1498 bp, Arabidopsis thaliana columbia
  unsure (1)..(1498): unsure at all n locations
nnnnnnnnnnnnnnnnnnnnnnnnnnnnnnnnnnnnnnnnnnnnnnnnnnnnnnnnnnnnnnnnnnnnnnccacgcgtccgctctatctctctctctctttgaagcagtttgttacttcttacttttgtgtttcttcatattcttcagaagcaagcacaaggctagggatcgaagaagcggcgatcactgatcgtatctcactacgatcacattaatggatagaatgtgtggtttccgctcgacggaagactattcggagaaagcgacgttgatgatgccgtccgattatcagtctttgatttgttcaaccaccggagacaatcaaagactgtttggatccgacgaactcgctaccgctttgtcctcggagttgcttccgcgtattcgaaaagctgaggataatttctctcttagtgtcatcaaatccaaaatcgcttctcatcctttgtatcctcgcttactccaaacctacatcgattgccaaaaggtgggagcgcctatggaaatagcgtgtatattggaagagattcagcgagagaaccatgtgtacaagagagatgttgctccattatcttgctttggagctgatcctgagcttgatgaattcatggaaacctactgtgatatattggttaaatacaaaaccgatcttgcgaggccgttcgacgaggctacaactttcataaacaagattgaaatgcagcttcagaacttgtgcactggtccagcgtctgctacagctctttcagatgatggtgcggtttcatctgacgaggaactgagagaagatgatgacatagcagcggatgacagccaacaaagaagcaatgaccgcgatctgaaggaccagctactacgcaaatttggtagccatatcagttcattgaaactcgagttctctaaaaagaagaagaaagggaagctaccaagagaagcaagacaagcgttgctcgattggtggaatgttcataataaatggccttaccctactgaaggcgacaaaatagctctggctgaagaaacaggtttggatcaaaaacaaatcaacaattggtttataaaccaaaggaaacgccattggaagccttcggagaacatgccgtttgatatgatggacgattctaatgaaacattctttaccgaggaatgaaaagagagacatgggattgtgcattgtataatttttacactgttttcccaagaaaagaaaacagtaaaaagcttttggtaaatgggacatcatcgcgaatgaatggaaccagttagccaaaacggtcaagggcgtggcgtaacgagacattgtattggaaatagtggcaatattatgtcactaatcttccaatggtccaaaatgatagatttcttatttgtattgaaccttacttagatagctgatgtgtcaactaaataatttattttcatccttatactacttgtatcaatgtctctaattgatcaattgttgcttgctattcnnnnnnnnnnnnnnnnnnnnnn

SEQ ID NO: 95470 - DNA, 642 bp, Arabidopsis thaliana columbia
gaagaagtccaagaagaagaagaagaagatttttatcatgaatcttctccagaacttgtggatagtaagaaatcagattgggttagatctgttcagctatggaatcattcaccggatctaaatccaaaagaggagcgtgtagctaagaaagcgaaagtggtggaggtgaaaccaaaaagcggtgcgtttcagccgtttcaaaagcgcgttttggagactgattggcaaccggcggtgaaagtagctagttcgatgccagcgacgacgacgagttctacgacggaaacttgtggtggtaaaagtgatttgattaaagctggagatgaggaaagacggatagagcagcagcaatcgcagtcgcatacgcatagaaaacaaaggcggtgctggtcgccggaattacaccgtcgattcctaaacgcgcttcagcagcttggaggatctcatgttgctacaccaaagcaaatcagggatcacatgaaggttgatggattaacaaacgacgaagttaaaagccatttacagaaatatagacttcacacaagaaggccagcagcaacatccgtggcggcacaaagtaccgggaatcagcaacaaccacaaattgtggtggttggaggcatatgggtaccatcgtcacat

SEQ ID NO: 95471 - DNA, 435 bp, Arabidopsis thaliana columbia
cggccgcctggcttcttcttcctcttcaactctcaaacaatctcttccttcatcatcttctatctcttcctctgttccttcttctggttttgccaatcaccaaacctgactaacccttctcctcctcctctctccgtcgctccccttcgcggggatgccaattctccaccgccggaatcttcttcttctccggcgacgaaatcttctttaatgatttcttctagagatcccaatgccctctttagcggcggtggaatcagcctttttagcaggagttagaactgtgaagtttagttatggttatcctagtcttaaaggtaaaaagagcaacaatggaggattacttcgaaactaggaatctctgatgttaatggacaaatggttgctttctttggtgtctttgatggtcatggtggagcaagaactgcagaatat

SEQ ID NO: 95472 - DNA, 454 bp, Arabidopsis thaliana columbia
caaaaacactttccttttcctctcatcaagaaactccctaatccgacgtcgttcgttttaattcagtgacacaatctcccacatcttcaaaccctttgaaaccagcgattacagagatgcaagatcctcatgtcccatcttctccaactatctcctccgtctcttcctccgatcttgatactgagtcaacaggatcgttcttccatgacagaagcatcacacttggaacgcttatgggatttagtttcactgcaactatgccgatgccatttagagcctcttcacgccgccacgtgtcaccttccgtcgcaatctcacgagcttctagctccaatgcaagacgcaaccaccagagaaagcgtcctccttcaaattcggctgagcctgagccgcatcgccgccgtaaatggtggcggttttgccgagatgacgatgacgacgccgccggaaatgg

SEQ ID NO: 95473 - DNA, 986 bp, Arabidopsis thaliana columbia
  unsure (1)..(986): unsure at all n locations
cgtggagacgatccgtggagacattgagtttaggcatgttgatttcgcttacccttcaagacccgacgtcatggttttcagggactttaacctcagaattcgagctggacatagccaagctcttgtgggcgcgagtgggtcagggaagagttctgtaattgcgatgatcgagcggttttacgaccctcttgctggaaaagtcatgattgatggcaaagacatccgccggctaaacctgaaatctctaaggctcaaaatcggtcttgttcaacaagaaccagctctcttcgcagcaacgatcttcgacaacatcgcctatggtaaagatggtgcaactgaatccgaggtaattgatgcagctcgagccgcaaatgctcacggtttcatcagtggtttacctgaaggttacaaaactccagtgggcgaaagaggagtgcagttatcaggtggacagaaacagaggatcgcgatagccagagctgtgctcaagaaccctacagtgttgcttctagacgaagcaactagcgcactagatgcagaatcagaatgcgtgctgcaagaggcgttagagaggctcatgagaggtcggaccactcgtggtagttgctcaccgcctgtcccccataaaaggtgttgattgcattggtgtgattcaagaccggcgggattgtggagcaaggcagccattcagagctcgttacccgcccagaggagcttattcaaggctgttacagcttcaaacacataggattgaagcaagatcatggattaaaactaaaaatcggtttgtgtcatttttcttatattgaactttaatttggaaagatttctatggactatacgataaatatgtataggtgtagataatgnagcttttggagtgctatgaaggttcttaagtaaaaaaaaaaaaaaaaggtcggccgctctagaggatccaagcttacgtacgcgtgcatgcgacgtcatagtctnnctatagttca

SEQ ID NO: 95474 - DNA, 808 bp, Arabidopsis thaliana columbia
  unsure (1)..(808): unsure at all n locations
cgggnncccncgtccccctttntnaattngccacttacccnngtaattntcccccggccccaaatcccacggtttcatcagtggtttccctgaggttccaaaaccccagtagcccaaagaggagtccagttatcaggtggcagaaacagaggatcgcgatagcaagagctgtgctcaagaaccctacagtgttgcttctagacgaagcaactagcgcactagatgcagaatcagaatgcgtgctgcaagaggcgttagagaggctcatgagaggtcggaccaccgtggtagttgctcaccgcttgtccaccataagaggtgttgattgcattggtgtgattcaagacgggcggattgtggagcaaggcagccattcagagctcgttagccgaccagagggagcttattcaaggctgttacagcttcaaacacataggatttgaagcttgatcatggattaaaaacaaaaaatcggtttgtgtaattttttttatattaaaactttaatttggaagatttctatggactataacgataatatgaataggtgtagataatgaagcttttggagtgtttatgaaggttctttaattaagggttatttttttcgcattttgcttatgtgcccgttttggaacataagactgaactatgttttcgttatgtttttaatttatgcctcgaaacaaaccaaaaaaaaaaaaaaagaaaaaaaaaagnnnnnnnnnnnnnnnnnnnnnnnnnnnnnnnnnnnnnnnnnnnnnnnnnnnnnnnnnnnnnnnncannnnnnnnnnnnnncaatggggg

SEQ ID NO: 95475 - DNA, 511 bp, Arabidopsis thaliana columbia
  unsure (1)..(511): unsure at all n locations
gatagaacaaagattacgaaaacttcctccgcttcanatttttcctttctgcaagaattttcctgggaaaatcaggaattttctcggagaaaattctcgtaatcatgaactgtgtttctgcatttgaatttgttccttcaagtgctctatttccatgtgcacaatcatcaatccctgcgaaatttcttcacattttgagctcaaaagcctcgatttctcccagatgtcgtagtttcgcttcttcttcttcttccacaattcggaggaagcctctaactctagtatcttcaaaatcttcagacgcggaggaggtgtcagatacggaggacgaatggctgaagaagctaccagagaagaacaatgccactgtattcgcatagcttaccttgtatcgaagcgtggctgaggaaattagggttttaccaaagtaaagacggtagagcctgtttggttgattcagaaacctgattggattgctaacctatctttggngcnntgncnttgattaggg

SEQ ID NO: 95476 - DNA, 511 bp, Arabidopsis thaliana columbia
  unsure (1)..(511): unsure at all n locations
cccnngcggtcctcttntntcccatcggggacccntacnctggnactcaaaattcagcccggaggaggtgttcagatccggaggacgaatggctgaagaaggctacccggggaggaccagccactgtatacccgcatagcttaccttgtatcgaagcgtggctgaggaaattagggttttaccaaagtaaagacgatagagctgtttggttgattcagaaacctgattggcatgctcaactatctcttgatgtcactgatctctgcattaggtacatgaaaagtgggccgggaaatctagagagagacatggaaagaaggtttagctatgcgttgagtagagaagataccgagaatgccatacttggaggaccttaaagaataaaaagagtttgtttgagtatctttgttcttaaactttgctttttcagtagtttctcgttatatgatgcatttgcttgtttgatccgaaaaccatttttatcacaattctttagcaggtacggtctttc

SEQ ID NO: 95477 - DNA, 821 bp, Arabidopsis thaliana columbia
  unsure (1)..(821): unsure at all n locations
cttactcatttctactatacagtataatggcaaaccaaatctacataatctccttgatcttcttgtctgtgttactttatcaatccactaccgtcttatctttccgacaaccattcaacctagcgaaaccatgcaagcgtttcgtcttctacctccataatgttgcctacgacggtgataacacggataatgctacatcagcagcaattgttaaccctttaggtctaggagacttcagttttgggaagtttgtgatcatggacaaccctgtgacaatggaccagaacatgctctcggaacaggtggctcgtgttcaaggcttcttcttctatcacggtaagacgaaatacgacacttggctctcttggtcagtagtattcaattcaacacaacacaagggggcattgaacataatgggtgaaaccgcgtttttggagccgacaagggaccttcccgtcgttggtgggactggtgatttcggcatgacccgtgggatcgctacgttcatgactgacctcgttgaaggcagtaagtatttccgtgtcaaaatggatattaaactctatgaatgttactattagagttactaatacatgtcttgggtttgatgtttctatcttgatatttttgggtttgatgtttctttgttggcactttgttgcttttctctgttcgtagttgatgttgtaccaagtttccaataaatgttatattgaaaacgttcttttnnnnnnnnnnnnnnnnnnnnnnnnnnnnnnnnnnnnnnnnnnnnnnnnnnnnnnnnnnnnnnnnnnnnnnnnnnnnnnnnnnnnnnnnnnnnn

SEQ ID NO: 95478 - DNA, 498 bp, Arabidopsis thaliana columbia
tcttctctccgattacatggacaagttcgaattcgaaatccgagcgcagaaaaaaatggtgatgaagaagaaggtgagattcgcggcggatgtggtggacccgtccgggaataacaaagagtatcgccggagacattcttccaagggtaaatcgaattcgaagatggcggcaactatttgactttaaggttttttgtacaaaattttatgtggaatttattcatttggggttttgggatttgaaattcgtaaatttaatttcggaatctgaatctgggctaaacttttcaaagtcttccccaagggccaattatttcccttcttctttttttttcttgagggtttatttttgttggtgtgacccggaaattaatggggtggttgggtatacccaaaagggaatggtaaatccctttttaaaaaaaaaaaaacaaaaaggaggccggttcaaaggatccaagctaagaagcggcagcgagtcaagtctttaaggtcact

SEQ ID NO: 95479 - DNA, 684 bp, Arabidopsis thaliana columbia
  unsure (1)..(684): unsure at all n locations
tgcaatgcttcttccatttctctcctcctctctcctcctccgtctctcttctccgatcatgtcccctgatcccaaatccaataccttcttcttctctttttccagttgattaccggagaatttcagatcgcgatctccgatttattaataattacagaaaaaaataattaaaccctagagagagagagagatatatatatacatggagagttcattaggtttcatggcggttttcgccgtctcaggaagcgttgtgttcttagcgagtcaatttcacaagcgtcttctctccgattacatggacaagttcgaattcgaaatccgagcgcagaaaaaaatggtgatgaagaagaaggtgagattcgcggcggatgtggtggagccgtcggggaataacaaagagtatcgccggagacattcttccaaggctaaatcgaattcgaagatggcggcaactatttgactttaaggtttttttttacaaaatttaatgtgtaatttattcatttggggtttttttatttgaaatccgggaaatttaaatttcgggnatctgaacctgggcgtaacttttcaaagcttcccccggggcaattatttncccccntccttttttccttgnggntatttttntggttggncccccaaaaaatgngtntttggaanncaaaaagggttccattt

SEQ ID NO: 95480 - DNA, 677 bp, Arabidopsis thaliana columbia
aaaaatcttgacgtctcttcttgtctgaagtcttaagtatataactggaaagtccgtattggagttcaacaaaagaagaaaacgaagacttttagttagatcctacattactgaactcattatatatatctggtgagacattctcctatatatgcagtttcaactttcaaagccagcaaataataaacagaggagaaatatggaaacacaaggcaaagtaatcacttgcaaagctgctgtggcatggggagctggagagcctctagtaatggaagatgtaaaagtggatcctcctcaaagattggaagtgagaattcgaatcctcttcacttccatctgtcacactgatctcagcgcatggaaaggcgagaacgaggctcagcgagcataccctcgaatccttggccatgaggcagcagggatagtggagagcgtaggggaaggtgtggaagagatgatggcaggagatcatgtgctccctattttcacaggagagtgtggagactgcagagtgtgcaagcgagacggagccaatctgtgcgagagattccgagtggatccgatgaagaaggtgatggtaaccgatggaaagaccagattcttcaccagcaaagacaacaaaccaatctaccattttctcaacatatccaccttctccgagtacacggtcatagact

SEQ ID NO: 95481 - DNA, 3865 bp, Arabidopsis thaliana columbia
  unsure (1)..(3865): unsure at all n locations
gaagtttcttctgtgggggtggatttggtgtgtctgagatctatctccagcaatagttgaatcctttctgagaatctgaagtttttctactgaaggtgctgctgattggcttttctctaattttggaagcaaaatgtctcagaaggttactccattcatgcagtcacttaaatctttgccagcagactatagatttgatggttcaccagtctctgaccgccttgaaaattcttctggtgcaagtgttcgcttgaccaattcgaatgttccaagaaaaggtggcttaaggaatggtgttagtcgaactgatactgctgctggggatagtgaggattcaccatatagcgggcacggtgtttttgttgaagagcagtctttaacggatgatgtagattctggagctgctacaatgcccttgcctcagagtgatgaacgcaggtggagtgacactagtgcatatgctcgaaagaagatactgcaatcttggattcaacttccaaatggtaactgggagcttgggaagatattgtcaacttcaggggaggagtctgttatatctttgcccgaaggaaaagttataaaagtcatatcagagactctagtacctgcaaatcctgatattcttgatggagtggacgatcttatgcagcttagttacttaaatgagccatcagtgttgtacaacctcaactataggtacaaccaagacatgatatatacaaaagcagggccagttttggtggctgtgaatccttttaaggaggttcctttatacggaaatcgatacattgaagcatacaggaagaaatcaaatgagagtcctcatgtgtatgcaattgcagatacagcaattcgcgaaatgatacgcgatgaagttaaccaatctatcattatcagcggcgagagtggagcagggaaaactgagactgctaaaatagctatgcaatacttggctgctcttggaggcggaagcgggatcgaatatgagatacttaagactaatcccattttggaagcatttggaaatgcaaaaacattgagaaatgataattctagtcgttttgggaagctaatagagattcattttagtgaaagtggaaagatatcgggtgctcaaattcaaacctttttactagaaaagtctagagtggtccaatgtgctgaaggggaaaggtcatatcatattttttatcaactttgtgctggggcttcacctgcacttagagagaagctaaatctgacaagcgcccatgagtataaatatttgggacagagtaattgttattcaattaacggagttgacgatgctgaacgttttcacactgttaaggaagctctggacattgtgcatgttagtaaagaagatcaagaaagtgtatttgcaatgcttgctgcagttttatggctgggaaacgtttccttcaccgttattgacaatgaaaaccatgttgaacctgtagcagatgaaagtttgtcaactgttgctaaattgattgggtgcaacatcaatgagcttacgctaactttatcgaaacgtaacatgagagttaggaatgataccattgtacagaagctaacgctaccacaggccattgatgcaagagatgctttagcaaaatcaatctattcgtgcctgtttgactggctggttgaacagatcaacaaatctcttgctgtgggaaagagacgaactggcagatctatcagtattcttgatatctacggctttgaatcatttgataaaaatagcttcgagcagttctgtataaattatgcaaatgagagattgcagcaacactttaaccgtcatctattcaagctggagcaagaggaatatatccaggatggcattgactggacaagggttgattttgaggacaaccaaaattgtctgagtctttttgaaaagaaaccattggggctgctctcccttttggatgaggaatctacatttccgaatggcacagatttgacacttgcaaacaagctaaaacagcatctacagtctaattcatgtttcagaggagataaagggaagcttttcacagttgtgcattatgcaggagaggttacatatgagacgactggatttctagagaagaatagagacttgttgcattcggattctattcaacttttgtcctcttgttcttgcctccttcctcaagcatttgcttctagcatgctgatccaatctgaaaaacccgttgtcggtcctttatacaaagcaggtggtgctgattcccagcgtttgagtgtagctactaaatttaagagtcaactcttccaattgatgcaacgtttaggaaacactaccccacatttcattcgctgtatcaagccaaataacatccagtctcccggggtgtatgagcaagggcttgttttacagcagctaagatgttgtggggtcctagaagtggttcgaatttcacggtctggatttcctacaagaatgtctcatcagaaattttcccgaagatatggttttcttctggtggagaacattgctgatagagatcctctaagtgtttcagttgcgattctccatcagtttaatatcttgccggagatgtatcaagttggctacacaaagttgtttttcagaactggccagattggggttcttgaggacacaaggaaccgtactctccacggcattttacgtgttcaaagttcttttagaggataccaagcacgctgtctcctgaaggaacttaaaaggagaatttctattctccaatcatttgttcgtggagagaagataagaaaagagtttgctgagttacgaaggaggcataaggctgctgctactatacagagccaagttaaaagcaagattgctaggatacagtataagggcatagccgatgcatcagttgtgatacaatcagcaattcgtggttggttggttagaagatgttcaggggatattggatggttaaaatctggaggtgccaagacaaatgagttaggtgaggtgctagtgaaagcatcagtactttccgagctccaacgcagggtacttaaagcggaagctgctctgcgtgaaaaggaagaagagaacgacattcttcagcagaggcttcaacaatatgagaaccggtggtcagagtatgagacaaagatgaaatcaatggaagaaatctggcaaaagcaaatgaggtcgttgcagtccagtctttccatagcaaagaaaagcttagctgttgaggactcagcgagaaactcagatgcatctgtcaatgcgagtgatgcaacagattgggattcaagcagtaatcagttcaggagccaaacaagcaatggagtagggtcaagactacagcctatgagcgcagggctgagcgtgattgggcggttagcagaagaattcgagcagagagctcaagtgtttggtgatgatgcaaagttcttggtggaagtgaaatctggtcaggtggaagcaaacttggacccagacagagaactgaggaggctgaaacagatgtttgagacgtggaaaaaggattatggagggagattgcgggaaacgaaactgatactgagcaagctcgggagcgaagagagcagtggttcgatggagaaagtgaagaggaagtggtggggaaggagaaatagcaccaggtattgatgaaggagaagactattcttacaggcaaacttaggtcgtttgctaattaaggatttggcgggttttatctggtaaaagtagttaaatgatgttcttgagacaacctcgtatttgcctctcaatgttaaggattctgtgattatacaaacaaaaacaaatcttaatttaagtttgtaaattttgtttttctttaatataacaaaagtcacgaaaaaaanagttatatatatg

SEQ ID NO: 95482 - DNA, 513 bp, Arabidopsis thaliana columbia
ctgctacaatacgactcactttagggaaagctcgtacgcctgcaggtaccggtccggaattcccgggtcgacccacgcgtccgatccaagatgagtatgattggcctcgagttcaagacactgacagttcatgttctgatgaagttgttagtgcccgtgagtctctctctagtgacgaagacattactgaagatattgggtatatgagtgaggtttcatgtacagttgagagagacgacggtagtagttcaagacgaatcaccaatgctactatctctacacttaattccgagtcatcagattcagattcttcagatgagagtgaagtggtacaggtctttcaatcttctgctactccggatgtgaatagtacttatccagccagttcatctattccccggacagaagaggattttgtgacgtggcagcgtattatccgtctaaacgccgtgcgggcctgctcagaggggaccctctattctccatcccagggggtatatcggggggtagagg

SEQ ID NO: 95483 - DNA, 1115 bp, Arabidopsis thaliana columbia
  unsure (1)..(1115): unsure at all n locations
nnnnnnnnnnnnnnnnnnnnnnnnnnnnnnnnnnnnnnnnnnnnnnnnnnnnnnnnnnnnnnnnnnnnnnnnnnntgttctcaccacgctctctctttttttcgagattcagctgtaaaaccctaactagcgccatagccaaggaagctttcctcagatcgtctctccgaaattttccggttaatcgtcagttaaggggaaaattaggctatggcgatgttaggtgcacagcaagttccagcagcagcttgtactccagatatggttgggaatgcttttgtgccccagtattatcacatattgcatcaatcacctgagcatgttcacagattttaccaagagattagcaagttaggtcgtcctgaagagaatggtttaatgagcatcacttctaccttgcaagctattgacaagaagataatggcgcttggttacggtgtaatcagtgcagagatagctactgtggacacacaagaatctcatggaggtggttatattgtactggtgactgggtatttgacgggaaaagacagtgtcaggaggacgtttagtcagaccttcttccttgctccacaggagacaggatactttgtcttgaatgatatgtttcgattcattgatgaaggcactgtcgtacatggaaatcagattccagtgaacaacgtccaagctcctgtcaacacttaccaggacacagctgctgcgaaggaaattccagatgactttgttcaggagaaatatgtccaagagaatcatgctgttaagcaaaccgaggtgttgtccaagagcattaatgagcctgaaaaagtgttcacgccctctgaagatgaacaagtatcagctgcagaagaagctctggtgactgaaacagttaatgaagcaccaatttgaagtgcaaaagggttggaggaatctgattctagggcctggcggaattcccaaagncggtctttatgcatcaatttgttgaagggttattgaaaggaaaattgcttgcacccaattgtcctgtttcggggacctcccaccaaagggtgggccccaangaaaccagggcggtcaggccctttttttcccttttcccaacacctttttntttnggaatnnnggttttc

SEQ ID NO: 95484 - DNA, 557 bp, Arabidopsis thaliana columbia
  unsure (1)..(557): unsure at all n locations
gtgaagttgctcttccactaaagttgaaatcagaaaaaccatcaatggcttcttcatcatctctctttctcctccctctgggtcttcttgtctcccaagcttcagcttcaacggttatattttacaacaagtgcacgtacactgtctggcctgggatccaacctagctccggtcagtcattactcgccggcggcggatttaaactgtcgccgaacagtgcttacactctccaacttccaccgctctggtccggtcgcttctggggccgccacggttgctcctttgacagatctggccgtggtcgctgcgccaccggagactgtggtggttctttcctctgtaacggagctggcggtgtacctccggctactcttgccgagatcaccctcggtcatgacatggacttttatgacgtcagcctcgttgatggatataacttggcgatgtcgataatgncggtgaagggtacgggaaagtgtacctacgctggttgcgtaagnaccttgaaccggatgtntccggttggtctacaagnccgttcaagtgacgggacacag

SEQ ID NO: 95485 - DNA, 841 bp, Arabidopsis thaliana columbia
  unsure (1)..(841): unsure at all n locations
atcaacattacgggcaagttaaacccataactcccaaaatccatatcctctttaaaacatttttgtccaaataaaatgccttcttgttcggtaactgaaatttcaaaatgtatcgtctatccggagaagaagtccaccgtctccgatctccgtctctccgtctccgacctccctatgctctcatgtcattacattcaaaaaggcgtcctcctcaccagccctcctccttccttctccttcgacgaccttgtctcctctctccgccgttctctctcctccactctttccctcttccctgctttagccggccgtttctccaccactcccgccggtcacatttccattgtctgcaacgacgccggagttgatttcgtcgccgcttccgctaaacacgtcaaactctctgatgttctcttaccaggtgaagacgttcctctgcttttccgtgagtttttcgtcttcgagcgtctcgttagttacaacggtcatcataagcctctcgccgccgttcaagtgacggagctccacgacggtgtcttcatcggatgtaccgtgaatcattccgttactgacggaacattccttctggcacttcttcaaacacctttgctgaacgtcactagcgggtgcttgtaacgatcaaacaaccttcccagatttcttccccgccaacaccgtctttcgatttctccgggtcgttctttccagtccctccccgggtgggtccacggtgtcacttttccggcggccgacccaaaccttcttacggggcggggaattttttcaattttaaagaagaaangggggtttncaaancttgaaacaanaggccgggttanaa

SEQ ID NO: 95486 - DNA, 736 bp, Arabidopsis thaliana columbia
  unsure (1)..(736): unsure at all n locations
atcggctctgaagaggaacaaagaagcgtttaatggaattgctcgaggattcaccacttggtctcatcgagttttcacttgtaacattacagctgcttctgtaacctctgcttcgtcttctcctttagctggaaactccttctatggcttgcgatctctgctcaagggtcaaaatgcttcaatgtttaggaggatgtcaactgtagcgtcgataagctcagagagtaaagagggtttgaagcttcttgtcactggaggacctcaagctcagaaatgggttggaatttggctttttggttcggctgcttgggttttcagcatggttgtacttggcggtgtaacccgattaactcgatctggtttatcgatgactgattggaaatttactggtgaattccctcctctgtcagatgaagcttgggctaaggagtttgagaaatataagcagtcacctgaatataagcgtgtgaaaagggatgaaccttgaagattttaagttcatatattggatggagtatgctcatcgaatgtggggaagaggattgggaatcatgtttgctttgccgttttcttatttcctccgtaaagggtatattactctacggcttggagttcagctctctgggttatttccccttggtgctggacaaggtttcattggtggggggggtaggtgaaaaaggggttttacggggnccncccctngggaattcncaacccgggggnaanccaaccg

SEQ ID NO: 95487 - DNA, 701 bp, Arabidopsis thaliana columbia
acccacgcgtccggcaagggcaggtttcaaaacctggacttgaaggaggaaacaaaagggttagtagtgaaggtggttcgaagaaagatgatggcgatggtggtaataaggccaaagttagtaccttgactaatggtcattccaatgggaatcatcaaatggaagatgattctcaggagactaatgatcttgctaacgggaaagaaaacacgagttctaatgttgctgttgatttaagtaaacttcagaaacttagaagtaaaggagtcagaggtagaggaggtgtaaggaaaactgacagtataggtaataagagttccaaggtagcggaaccagccaaaaaggcgacaaagaaaaacagggtttgggatgatgcggctcccaaacaatcgaaattggacttcacggattccatcgatgaaaatgggaacaatgatcatgtagatattgtggctgctgaccaaggagaaagtatgatggacaaggaagaggttttcagcagtgatagtgaaagtgaagatgatgacgaaccaggaagtgatgagaagcctgctcaggctaagaaaaagggatggttttcttctgttttccagagtattactgggaaagcgaatcttgaaaggacagaccttggaccggcgttgaaagctctgaaggaacggctcatgaccaagaatgtggcagaagagattgctgagaag

SEQ ID NO: 95488 - DNA, 449 bp, Arabidopsis thaliana columbia
atcattgacgagaaaccccatccagtgtttacccgtgagggcaacgacctgattgtcacacagaaagtctcactagctgatgccttaacaggatacaccgcaaacatagcgacccttgatggccgtacacttacaatccccgatcacaaatgtgatccatcccgagtatgaagaggtggttcctaaagagggaatgccactccagaaagctcagacaaagaaagggcacttaaggatcaagttcaatatcaagtttccagcgagattaactgcggaacagaaagctgggtttaagaagcttattgggtgatgattaaagcatctctgtcttgtgatgtgtggagattgggataaatttggtcatataccatttatagggaattatctccctcttcattaaatttcgtgttgttaaacaagtcttctttttaaagaatagttttttcaag

SEQ ID NO: 95489 - DNA, 409 bp, Arabidopsis thaliana columbia
tacgactcactttagggaaagctgcgtacgcctgcaggtaccggtccggaattcccgggtcgacccacgcgtgcgggcaccaccaagagagccaaagccaagtactctctgctcttaaaaccctaacgtatctgcgataaaccctcgcgcctttgctaaaatagctgcctttatataacttagccgccactttaattctcgaaagtcatgttctttcacttttcttcgctggttcttcttcgcgctctctcttcttgccatggttggatttcccgctaatcaagcaaaaaccgttgaagaagagctacctttgcaagtcgtagccgatcaagaccccaaggtaaaaactttcaaggactcttttgatttcccttccatcgattcctttccggatttcgattctatcact

SEQ ID NO: 95490 - DNA, 490 bp, Arabidopsis thaliana columbia
gcttaagctctctcgagtctgcctcaagtgtttttgggggaaattgatttcgttgagaaaaaccctaaattccgaacttgaagcaatttttcaatttcgtttgcagaaaaatggcaaaggataatgaagcaatcgccattaacgatgcggttcacaagcttcagctctatatgctcgaaaataccactgatcagaaccagctcttcgcggcgaggaagttaatgtctcgatcagattacgaagatgtcgtcactgaacgagcaatcgctaagctctgtggttatactctttgccagagatttctcccttccgatgtttctagaagagggaagtatcggatttcgttgaaggaccataaggtttacgatttacaggagacgagcaagttttgctccgctggttgtttaattgatagcaaaacgttttcggggagtttgcaagaggctcgtacattggagtttgattcggtgaagttgaatgagattttgga

SEQ ID NO: 95491 - DNA, 456 bp, Arabidopsis thaliana columbia
gtcaatgtgactttgatgattacacatttgctagcccccataacgtaagcacggcctgcaatgaagctattagtgaaactgaaaacattatcactgagtatgtcaacaactatgatgttctcctcgatgtatgttatccgtctatcgtccagcaagagctgaggctcaagaaaatggctactaaaatgagcatgggagtggatgtgtgtatgacctatgaaagacggttctactttaatcttccagaggtacaaaaggcgcttcatgcgaaccgtactcatctgccttattcatggtcaatgtgcagcggcgtgttaaactactctgatatcgatgggaacatcgacatgcttccgattctgaagagaattatactgaacaaaactcctatttggatcttcagtggagatcaagattctgtagttccattcgggggttcaagaactctcgtaagag

SEQ ID NO: 95492 - DNA, 664 bp, Arabidopsis thaliana columbia
  unsure (1)..(664): unsure at all n locations
cactatcgtttttcctgctttttcatgcattgaatgatctgatccatgttctaaaaaagggtgcttgcatcagtaaccgaagcaatggctcggaggtctggaaattgcatgagatgtctagtgatattctcggtggtttcagcattatttgtgtgtggacctgctctttactggaaattgaataagggtttcgttggatctgctcgtagcaccaactccatttgtcctccttgtgtctgcgattgtcctcctcctttgtctctcctccagattgctcccgggcttgcaaacctctctattacaggttgtggcagcgatgatccagagctcaaagaggagatggagaagccgtttgtggatcttctcacagaagagctgaagcttcaagaagcagtggcagacgagcatagtcgtcatatgaattgttacactttgccgaagctaaaagggttgcttcacaagtaccaaaaggaggctgagaagtgtaaccgttgccactgaaantttgcgnatcaacttaggggggggnnctcaagcatttttggctcaaaagagggggagntcactttttttttgggggcccanacctnggcaattaggtttggaaagtnnggaannaaatcncnttttnagggcctttttanangttcttttncnggggttt

SEQ ID NO: 95493 - DNA, 714 bp, Arabidopsis thaliana columbia
  unsure (1)..(714): unsure at all n locations
atgggcacgtgtgaccccaaccggaacacctaacatcatctacacatgtgtgtctcctcgaggctattctgcataaaggtcttctaaaagaacatcaggtgcagattctcccacaaaggcaacactctggtgcccgtcaagtcagcaatcatcggctgcgaattattcttctcgcaaccgcacactcccagcttgtacaccgcggatggatggtaaagaattcttccggcaagccaggagccgattatcctatgaccaatccagttccttcttagctaacatcaaagagctcaacgcccagaagcaaacccgagaggaaactctgaggaaagcagatgagatatttggggaagagaacaaagatctttatttatctttccaaggtctccttaacagaaacatgcgttaaactttcataagccggtatcttgaatctgggccaatgtgataggatggatattaaccattgtagtatgtgtattccctacgggatttagtttgcaaagtgttttttttgtttcttcccaaccaaagaagaagaagtatctcgttttgggaagtgttgagtttctctcttataattggctttgaataaagctttatatgnnnnnnnnnnnnnnnnnnnnnnnnnnnnnnnnnnnnnnnnnnnnnnnnnnnnnnnnnnnnnnnnnnnnnnnnnnnnnnnnnnnnnnnnnnnnnnnnnnnnnnnnnnnn

SEQ ID NO: 95494 - DNA, 860 bp, Arabidopsis thaliana columbia
  unsure (1)..(860): unsure at all n locations
tgttgttgttgttgttttaggcaacatgctcgttctttagccagccagcaaactttgccccggacattaacctatcactatcggagctcgctgctctcgacatgtgtaataaaagggtgattttcaagccgatgaatgaagaagaacgtcaagagatgaaacgtaggtgcggaggatcatggaaattagtccttcggtttttgctggctggtgaagcgtgttgtcgaagagagaaatctcaagctgttgctggtcctggtcatagtgtagcagtcacatcgaaaggagaagtttatactttcggatataataactctggacagctaggacatggtcataccgaggacgaagctcgaattcaacctgttagatcattgcagggagttcgaatcatccaagcagctgctggtgctgctcggacaatgctaataagcgatgacggaaaagtttatgcgtgtggaaaagaatccttcggggaagctgaatacggagggcaagggactaaaccagttacaactcctcagcttgtaacatctttaaaaaacatatttgtagtgcaagcagctattgggaattactttaccgctgttctctcccgagaaggaaaggtttatacattctcgtggggcaatgacggtagactaggacaccaaactgaggctgcggatgtcgagcctcgtcctttgttaggcccactcgagaatgtacccgttgtgcagatttgctgctggttattgctaccttcttgccttagccttgtcaacccaaatcggcatgtctgtttaacctcaagtttnggttgcngtttttggngggcaaactttggtcatngggtncaaagancannttgnggaangntc

SEQ ID NO: 95495 - DNA, 507 bp, Arabidopsis thaliana columbia
  unsure (1)..(507): unsure at all n locations
tgannnnnnnnnnnnnnnnnnnnnnnnnnnnnnnnnnnnnnnnnnnnnnnnnnnnnnnnnnnnnnnnnnnnnnnnnnnnnnccacgcgtccgcgcaagctctcatcttcttcagctcaaaaagccatctcaaaggtatattttgaatcaaaaacaatggcagggactaatgattcttgtcctttggtaaagaacattcttcttctagactctgaaggaaagcgtgtggctgtcaagtattactccgatgattgggcaactaatgcttccaagttagcttttgaaaaatatgtcttctcgaaaacctccaagaccaatgctcgcacagaagctgagatcacactgttggagagtaatattgttgtctataagtttgcccaggacctgcatttctttgttactggaggtgaaaatgaaaacgagctcgtcttatcatctgttcttcaaggcttttttgatgctgttgcgttacttctgaggaacaatgttgaaaagatggaagcccttg

SEQ ID NO: 95496 - DNA, 519 bp, Arabidopsis thaliana columbia
  unsure (1)..(519): unsure at all n locations
gcgtccgcaaacgagtccgcccacgcgtccgcccacgcgtccgcaactttcagccaacaaaattagggtttcaagctgagattttctacttctgttacacaaaaatacccaatgagtaaagcttcggtgatcctatacattacggtaggaatcctggtgctcttcctcgtctcttattcaccgaagaagaagggtgaccacgatcaccaccatggtggtcacaatcaacatcaccgcttaaaactccggtcttctttcaatttcaaacccactcgtcacgatccagttccgtttgatcctcttgtcgccgacatggagcgccgccgcgaggataaggagtgggagcgacagtacattgagcattctcacccggagcttgtctctcattctcagaaagaaacaaccggtggtggacatgaacatgcacctggtcacgagtcgcagcctgagtggggagaattcatggatcctggggtttcttaaaannttgggggggagttcaatntcactnnttgggnt

SEQ ID NO: 95497 - DNA, 328 bp, Arabidopsis thaliana columbia
gtttgcgtgaggttccttcgctttactttaaggaggattgtgctcttgaggacggagctacatttcgttctgcttgccctttctcgagccttaatgagaatctagcgcttcaagagaagttgtcacagtatcttgatgtggtggagctgcatcttgtgaaggagatctctgtgaggtctgattcgtgtttcgaggctcaaggacagttacaggatttgaatgtgaagattgctgagggttgtagtaggattcgggagatgaaagagactattcggctcctggataggaatttggtagattcagctcgacagattcaagagctgagctc

SEQ ID NO: 95498 - DNA, 761 bp, Arabidopsis thaliana columbia
  unsure (1)..(761): unsure at all n locations
cnnnnnnnnnacgactcactatagggaaagctggcacgcctgcaggtaccggtccggaattcccgggtcgacccacgcgtccgcccacgcgtccgcgactccaaaataaaatcaaatcaaaaatcaaattctctacacgcaactttctttcaaatacaaaaccaatcatctcgattcatccaacccgcgaagacccagaaaccaaaatcgaagacccaacaaaacccacaagtcgaaatctcgaaatccgttgagagtttgttcctttttttgtttgctcggagatggaggctttgccggaggatgaagagtacagtttcagggaagtagtgttgccgtctttgattccggtagtgccggagccggaacttgagagagagagcggagagaggagaagaggaagagatgttatcgtagccgttgatcatggtcccaatagcaaacacgcttttgattgggctcttgttcatttctgtcgtctcgccgatactctccatcttgtccacgccgtctcaagtgttaagaacgatgttgtgtatgagacgagccaagccctcatggagaaacttgctgttgaggcgtatcaagttgccatggtaaagagtgtggctcgtgtttttgaaggcgattctggtaaagtaatcttcaaggaagcagggaaagttaagccttcttcctttaattttaggcacacgnggcagcgctttttagaanggtnttcagggngngtanggtttttttcccaattcaaatttntccgg

SEQ ID NO: 95499 - DNA, 1129 bp, Arabidopsis thaliana columbia
  unsure (1)..(1129): unsure at all n locations
ttgcagtaccggtccggaattcccgggtcgacccacgcgtccgcacgcaactttctttcaaatacaaaaccaatcatctcgattcatccaacccgcgaagacccagaaaccaaaatcgaagacccaacaaaacccacaagtcgaaatctcgaaatccgttgagagtttgttcctttttttgtttgctcggagatggaggctttgccggaggatgaagagtacagtttcagggaagtagtgttgccgtctttgattccggtagtgccggagccggaacttgagagagagagcggagagaggagaagaggaagagatgttatcgtagccgttgatcatggtcccaatagcaaacacgcttttgattgggctcttgttcatttctgtcgtctcgccgatactctccatcttgtccacgccgtctcaagttcgttctctcttcaatgtgttaagaacgatgttgtgtatgagacgagccaagccctcatggagaaacttgctgttgaggcgtatcaagttgccatggtaaagagtgtggctcgtgttgttgaaggcgatgctggtaaagtaatctgcaaggaagcagagaaagtgaagcctgctgctgtgattgtaggcacacgaggcaggagcttagtaagaagcgtgctacaggggagcgtaagcgagtattgtttccacaattgcaaatctgctcctgtcataatcgttcctggaaaagaagctggagacgagtcgatcgtggactggacacgctcagaagatcctaaaccctgaagaaaaagttcaagtgttgtttccacgaagactgttttgtttttcatctttctgtcgctactgttgcagtctttgtttctgtatgtccctaaaaatcttagattgcttcttcttcgtctctctgtgtgtgtatgtgttttgatttgggtttttgtagtttcaaaatttctgtataaaacctttgctcaggaatgaatgtattgtatgcagtggtgtgatgtgtttcagacttttcagtaaacaagcctatagcagcccnnnnnnnnnnnnnnnnnnnnnnnnnnnnnnnnnnnnnnnnnnnnnnnnnnnnnnnnnnnnnnnnnnnnnnnnnnnnnnnnnnnnnnnnnnnnnnnnn

SEQ ID NO: 95500 - DNA, 566 bp, Arabidopsis thaliana columbia
  unsure (1)..(566): unsure at all n locations
aaaacattacatttccactctcacattcagacgcaccaatcctctgttttggattttgaagagaaaatggcaagcagcgacgtgaagctgatcggtgcatgggcgagtccctttgtgatgaggccgaggattgctctaaacctcaagtctgtcccctacgagttcctccaagagacgtttgggtctaagagcgagttgcttcttaaatcaaacccggttcacaagaagatcccggttctgcttcatgctgataaaccggtgagtgagtccaacatcatcgttgagtatatcgatgacacttggagctcatctggaccgtccattctcccttccgatccttacgatcgggccatggctcggttctgggctgcttacatcgacgaaaagtggtttgtcgctctaagaggtttcctaaaagccggaggagaagaagagaagaaagctgtgatagctcaacttgaaggagggatcgtttttggggaagggggttntttntttaagcaaaggaaaccgttttaacggggcaanatnggtaccttgnatttnnttnggggtttttggttgtt

SEQ ID NO: 95501 - DNA, 546 bp, Arabidopsis thaliana columbia
caaagccaatcaaattgagagagatatcaagaaagcaaaataatgatgttggccgtggtctcagtcgtcgccatactcggagttctcgtggcttggccggtatcggcttggccgaaaagacttacctggagcgggaggatacggaggcgatgacgatgatgatacaaagtcattgttccctttggacaacctattatcgttgaattattatgataggatttgtcctgattttgagaaaatcgttgttacgaaagtgagggaatggactaagagtgactcttcccttggtcccgccctcctccgccttatcttccacgattgtggcgtcacgggatgtgatgcgtctgttcttctagactacgaagggacagagagaagatctccggctagcaaaacactaaaaggcttcgagctaattgacgatatcaagtccgagatggagaaatcatgccccggcaaagtatcctgcgccgacatcctaacattagccagccgtgccgccaccgtccaacttggtggtccttactggcccaacgtctacggacg

SEQ ID NO: 95502 - DNA, 587 bp, Arabidopsis thaliana columbia
  unsure (1)..(587): unsure at all n locations
gagaggaggatccataatcttcaaaaaccaacgtgcatttgcattatctggttttgcctcttggtttctctctctcaccatggaagagcatcatcaacctcagcatctatcttcaatctttctctcccacaccaacacccattccctgaacatgttgttcttaatgttcaaagaaaactcaacgattctctctcaagaagacaacttctcacttaccaacaagacgacggcaccacggcgtcgtcaccaataccttcttgcatcaccggaaacccaatcgacgattgttggcgctgcgacccaaactggtcggcaaaccgccaaagactcgccgattgctcaattggtttcggacaaggaacactcggaggaaaaggcggtcagttttacctcgtcaccgattcctccgacaacgacgcagcgaatccaattcccggaactcttcgacacgccgtgattcagccagaaccactatggatcatctnctcagcgncattgggatcaaatcaaanagnggtcatcatcgnagctacaagaaatcgtggagagncgatttcaatcccggcatggtgccaggttagaggnga

SEQ ID NO: 95503 - DNA, 567 bp, Arabidopsis thaliana columbia
  unsure (1)..(567): unsure at all n locations
cggacgcgtggggtgacagtgaggtgctaatgactatgcttgagcttctcaatcagcgggactgattcgaggcgtcgggcaaaatcaaggttttgatggctacaaatcgtattgatattctggatcaagctcttctccggcctggaaggattgataggaaaattgaatttcctaatcctaatgaagagtcacgttttgatatcttgaagatacactcaaggaaaatgaatttgatgcgtggaatcgatctgaaaaagattgcagagaagatgaatggtgcttcaggtgctgagctgaaggctgtatgcacggaggcgggcatgtttgcacttcgtgagaggagagtacatgtgactcaggaagactttgagatggctgtggcgaaggtattgaagaatgacacagtgaagaacatgtctctgcgtaagctctggaagtaggaatttcagagtcacagattaatttcgattatttcttctctnctgtctgtggttctttctgaaaccttttcggctagcgctttaagcttttctaaacaatgtttgtacactagtttctctcgtgccg

SEQ ID NO: 95504 - DNA, 886 bp, Arabidopsis thaliana columbia
gaaacaaggatctaattcatagtgctgcttcttcttctctctgagactctcacaaaatagaaacacaagatcgttaaaaagcttttagctccagatctgtggaaccgccatagctatggagttttatagaagttctagaagattacaaattcttggatctgtgattcttctgctctctattcatgtcgctcactctttttaccttcctggtgttgctcctcaggatttcgaaaagggagatgaattgaaagtgaaagtaaacaagttgacatctataaagactcagcttccatattcgtattactctcttcctttttgtcgtcctaagaagattgtggacagtactgagaatcttggtgaagttcttcgtggtgaccgaatcgaaaatgctccttattcgtttaaaatgcgtgaggcgcaaatgtgtaatgttctcggtcgtgttatgcttgatgcaaagtctgccaaagcgtttaaagagaagattgatgatgagtatcgagttaacatgatccttgataatcttcctctagtggttccgatcgaaagaattgatccgggtcagggttctccttctgttgtgtatcagctaggatatcatgttggtcttaaaggccagtatgaagggagcaaagagcaaaagtattttatgcacaatcacttggcattcactgtccggtatcatagagatatgcaaaccgatgctgcaaggattgtgggatttgaggtcaaaccatacagtgtcaagcatgaatacgagggacaatggagtgagaagacccgtttgactacctgtgatccccacactaagcgactggttgttagctcagctacccctcaagaagtcgaaaataagaaagaaattatcttcacatatgatgttgac

SEQ ID NO: 95505 - DNA, 492 bp, Arabidopsis thaliana columbia
ctaagattaggatcctctttttcaaggaaaacaatttaaaaaatcttataatttacaatcaattcattcagtatttccctttttagaagacaaattaggacattttaattatgtgttagatgtactaataccttaccccatccatctagaaatcttggttcaaaccctacgttaccgggtaaaagatgcctcttctttgcatttttttcggttctgtttatacgagtattgtaattggaagaatttttatattaaaaaaaaatcaattttgaatccaagatttttcttgttcttatataattcttatgtatgtgaatacgaatccatcttttttttttctacgcaagcggtcttcgcatttacgatcgacatcttatgaagtcctttttgagcgaattgtattctatggaaaaatacaccattttttcaaagtttttgttaataattttccggcaatcctagggttgctcaaggatcctttcatacattatg

SEQ ID NO: 95506 - DNA, 661 bp, Arabidopsis thaliana columbia
gttctttaactcctgtcaaccattcttaactatattgaccctcgctcacgcataggctgatggtcatgctacgttctggccatgaaaagctcattttttactgcatccctttgatttcttccgaggcctcaaccatcatcctctacagctctaagaccgcagaaacccgtctatatcacgatgatggttaagccggcgctccaatgtatccaagggacaggttgagatgacaatccctgatgttaagctgactcgatcaagagacggatgcaacggaatggcactgttctctttcgaccaaccatccgttttcgactcgagcggtgaagtcggagagattacaggattgtacatgattgatgaggaaggtgtgattcagtcgacggatgtgagcgcgagattcgtgaatgggaaaccggaagggattgtggcgaaccacatagtgcgatcgccgaaagaatgggacaggttcatgaggtttatggagcgatactcggaccagaatggcttgcagtttgttaagaagcaatgaggttggagagaattttcaatgagcaaaacaaaatgtgtatgttacattaaattttttcactcttttgatttataatcttgtactctcctagttttgatctttacttgagtttcaacttacaatggtaaa

SEQ ID NO: 95507 - DNA, 516 bp, Arabidopsis thaliana columbia
gcgtccggcattacaaaaacccttcactactctttctcagagtctcaagcatcattttcccgagaaaactatgaattcaaacattttcccaccatcgaaacaacaaaacgagcttaataatatacaacaatccttctcaaatctccaatctcaatgctccaatttactcctcaacgtttcacaaacccttaatcctctcttcaacgccaacacgaacaacaacaaacctaatatattctctgctctcaattcgtttcgtgatcaagctaagcaagctttagattctagaatctctcgattcaattctggtaaggcacctgtctgggcgagaatttctgacgacggtggtggtgcgagggcttcagggtgacggttccgattcgcggaagcgggtaaggattatcttgcttgttgctattgaggagagattggcgggagttcctgtttacgcgttgagtaattcgaatgaggagtttgtgttggtttcagggacttcctctgggaaatctctgggtt

SEQ ID NO: 95508 - DNA, 883 bp, Arabidopsis thaliana columbia
  unsure (1)..(883): unsure at all n locations
cacagaaccaaatggactggagatgtattgtctccgtaataaacaatcattgctcgagttcgctccaagnatgttcggttcatgtctggttaataatgctggttgcttgagaacaaacgtactactacacctgaaggattcgagttaagttttgcggtgaatgtacttgggacatacacaatgacagagttgatgcttccattgttggagaaagcaacaccagacgccaaagtcatacagtttgcctctggtggaaagtacacttcgccgcttactacagatcttcagtttagtggtgaaaaatttgatggagtggaacaatacgcacggaacaaaagaatccaggtggctctgacagaaaaatgggctgataagtacaaaaataaaggcatagggttctactcaatgcaccctggctgggctgagacaccaggtgttgccaagagtttaccgagtttcagtgaatcgttcgcgggtaagcttagaacaagcgaacaaggagccgatacaatcgtttggttagcactgcagccaaaagagaagcttgtctctggtgcattctatttcgatagagctgaagcaccaaaacatctaaagcttgcaggtacaagcaagtctcatgaccttattgactcagtcattgattctgtgcattccatggcagctcttaatccttaaatgtccatcttcgacatagtttttttcttgaaaataaaatgtgattgcacgtaacagtattagtcttttctcattattgtggaaatattatagtatggaatatttatatcttttacttattaaaaaaaaaaaaaaaagnnnnnnnnnnnnnnnnnnnnnnnnnnnnnnnnnnnnnnnnnnnnnnnnnnnnnnnnnnnnnnnnnnc

SEQ ID NO: 95509 - DNA, 493 bp, Arabidopsis thaliana columbia
  unsure (1)..(493): unsure at all n locations
gtagcnncagcggtgcancntangtggcaatacgatctgagttnnncccaaatatgagtntagttgtanaanntttgcagccactctcaaaaccaccagcaccagccccagcccccagtaccggaatcctgagtttgtgcaccttttaaataccagccatcttcttcgtgcaatagaggtgggttctttgttcatacaaagtgagaattatactctgatttgggaaaaacatagacatgatcttactattagttttcattttggtgttaaagaagagtgcttaatatttctcatttgttatgtgaggtattggaaacaggctttttttacttgattggcgtggagaacaaacatgttttgcatttggtgtcttttttttttgttctccttttctgaatatattgacaagctctgtttaagggtttctgaaaaaaattaattctatataattgtcattaatttatgttaatatggggcggccgctctagaggat

SEQ ID NO: 95510 - DNA, 473 bp, Arabidopsis thaliana columbia
  unsure (1)..(473): unsure at all n locations
ggcgttgctctctcgtccccaagaaaatcttttcttttatttttttgtttactaaatgtggacattatctttttaaagggagaaagtcctaaatttcatatgattcgatgttcttttcagacatggagcgaaaaaccctagcgattacgcctccttccttcttcttccaccttggaggaggagcatttggttcatcaaaggcggttcattgtcttctccttctctcatggctatttgctttcatcagtcaattcattgcatatcttagcttgaatatgggtacaacactggttctgctgctttggagtttcagggctttattaatggtgaagattctgggagtgtagcaatccagaaatntgnccagaatgtttgncctagtcanaagctgntttggtttccttaaagcnttagggtcagagaatcgggcctnnnccnntttgggttggntttnnccccaaagaatcacgggg

SEQ ID NO: 95511 - DNA, 401 bp, Arabidopsis thaliana columbia
ggggcgggcccacgcgtccgcgcactctccgccaccttcttccctaattctctctctctcgctacctctctacgtgataaacaagaatggcgactgtacgaatctcctccactagcatgaccaaggccgttcttagaagccagacaaccaacaagctcattactaacaagagctacaacttatctgttggatcaacgaaaagggtttcgagatcttttggtttgaaatgctcagcgaattctggtggtgctacgatgtcggcggtatacaaggtcaagctcttaggacctgatggtcaagaagatgagtttgaggttcaagatgatcagtacatcttggatgcagctgaagaggcaggagttgacttgccttactcttgcagagcccgtgcgtgttctact

SEQ ID NO: 95512 - DNA, 553 bp, Arabidopsis thaliana columbia
accacggacgcgtgggcggacgcgtgggcttcagcacatgatcctcgtctctctttctttctctctctcaatcacaagtttcagttacacagctgaacccaaagtatctcacattctgatctaatcagaacactgttttgtctgtgtaacataaacaaacgatcctgtttttatggaaaatttaatgaaacagtgacgattcttctacacttctttataatgacaaacatttcatagtaccaaaatacacaaataccttttctttattcttctcacccttctctgtttctttatcattcatggctccaaattcagtagcagtgacaatggagaagccagacaacttctctttacctagagatcaacggctcagatccatcctcattccccgacaaacgtaaatccatcagtccaaaacaattttaatggttcctttttttaaaagctaataaactcatttggggtttttgggggttggtcttttcggttaaaaagcgaatcgcgttctccgcgaggaccattaccgaagaagaggatcctaaaggcagaggaa

SEQ ID NO: 95513 - DNA, 721 bp, Arabidopsis thaliana columbia
  unsure (1)..(721): unsure at all n locations
gaaaagnccggggccaaggccaccaattcancaatggncccccacctgttacttccccctttttcnancncatggacccccaaaggnttttttttccagttgntnggaatccctatttgngngttcaaggaccccgagccaattgggagttccgttcccaccgagcaacccaatgagggctctacgcgagtctctgggaagccgagcatttgggctacaaggggaggattagagaaaacagattggtcaaaagctccttttactgctttttatagaaactacaatgtcgatggatgtgtatgggctaatggaaaatcatcttgttccgcgaattccccatggttcactcaaaaactcgattcgaacggccagacaagaatgaaaggtgtgcaaagtaaatacatgatctacaactattgcaccgataaaagaaggtttcctcgaggagttcctgccgagtgcacttaaattcttgattctttgatacatgaatatgttacttggcattgcctttgtaactcaatccagtttttacttatttttttcatccttttgttgtgtagccgcatatattccaggantggtgggtgtttgtgtaagatgtttttaagattgaggtantaaaaataaattttgggaaaaaaaaaaaaaaangggnggcccctctngggggnccnaggnttngnccgggnnannngcggcatggcntttttagggcccc

SEQ ID NO: 95514 - DNA, 522 bp, Arabidopsis thaliana columbia
agccccaacaatttactggtgttaagctcaaaattatgttcttggggcttaacactcgtcaagggtattaaaaccggttgccgagaaggagttttcccgttgggttccaatcggcgaatttcccgatccaagagtttttggaatcgcctcagtgtggttgtggctttgagtgcaaggattcgaaattggacatgattgagagaatcccttttctttcttcgtcttgaaattgaaaaagggacaatccttttttgtgatttgtccccaaaaaatcttacccttcgaaaagatcgcatcttttatgtattgtcccattatatgagcgtagtgtctggaatttgtaattgtttactttagttctatttattggattcaagttctgtaatggtgaaaagaaaagatactgaagggagatgtgaacctcctggaaaaaaaaaaaaaccgaaaaacacaaaaagcgaccgctctagaggatccaagcttacgtacgcgtgcagtcgacctcataactcttctgagagt

SEQ ID NO: 95515 - DNA, 594 bp, Arabidopsis thaliana columbia
  unsure (1)..(594): unsure at all n locations
nnnaatccgactcactttagggaaagcacgtacgcctgcaggtaccggtccggaattcccgggtcgacccacgcgtccgtacggctgcgagaagacgacagaaggggacaggcggagaaatcaaaaaaccaaaaatccaatctttggattcttacttctacgatttgtgtgtttcctcaaacccaaatgtctcgtctcccgattttaatcgcttcgtgtctcttcctctcttcactcaccgccgccgtcgtcaccgccgccgaatccgatactccgacggcttattcactcctccaaagctacaacttccccgtcggaatccttccaaaaggagtcgtagcttatgatttagacacaacaacaggcaaattccatgcgtatttcaacgattcatgtagcttcaatcttgttggttcttaccaattgaattacaaatcaacaatcagggggtacatctccgggaacaagctcaagaaattgacctggtgttaaaggcaaagttttggtctttgggggttaaaacccggcgggggtattaggaaccggttccgggttggggtttcccgttgggggcagaaggggngggntttgggt

SEQ ID NO: 95516 - DNA, 999 bp, Arabidopsis thaliana columbia
  unsure (1)..(999): unsure at all n locations
nnnnnnnnnnnnnnnnnnnnnnnnnnnnnnnnnnncgcagtaccggtccggaattcccgggtcgacccacgcgtccgcgaaaatccacaggcggagaaatcaaaaaaccaaaaatccaatctttggattcttacttctacgatttgtgtgtttcctcaaacccaaatgtctcgtctcccgattttaatcgcttcgtgtctcttcctctcttcactcaccgccgccgtcgtcaccgccgccgaatccgatactccgacggcttattcactcctccaaagctacaacttccccgtcggaatccttccaaaaggagtcgtagcttatgatttagacacaacaacaggcaaattccatgcgtatttcaacgattcatgtagcttcaatcttgttggttcttaccaattgaattacaaatcaacaatcagtggttacatctccgagaacaagctcaagaaattgactggtgttaaagtcaaagttttgttcttgtggcttaacatcgtcgaggttattagaaacggtgacgagatggagttttccgttgggatcacatcggcgaatttcgcgatccaagagtttttggaatcgcctcagtgtggttgtggctttgagtgcaaggattcgaaattggacatgattgagagaatcccttttctttcttcgtcttgaaattgaaaaaggtacaatctttttttgtaatttgtccccaaaaaatcttacctttcgaaaagatcgcatcttttatgtattgtccaataatatgagcgtagtgtctggaatttgtaattgtttactttagttctatttattggattcaagttctgtaatggtgaaaagaaaagatactgaagggagatgtgaacattgtgaagtgaacctttggaatcttagattgaaagttttcatttttgttcccaaaaaaaaaaaaaaaaaaaaaaaaannaagggcggccgctctagaggatcccagcttacggacgcgtgcaagcgaagttctgg

SEQ ID NO: 95517 - DNA, 471 bp, Arabidopsis thaliana columbia
ccggcggacccggcccggaattccggggccgcccacacccgtccggtaaagaagaccaagggtttcctttatgcttttttccgttactatggtggcttttccggttggggcgcgattatggacgttcctttaagggggcgtaaaaacctccgttgctttccaagccacccgaagggttaacaccgccattacttcaataacaggcaacgggggagggagttaactgcttgcagggggggcctccgatgggaaagaaaaagtttgggacttttttttaccttcctgaccttaccgattccgaattggttaaggaggtggtcatacctaatccgaaacaggtggtttccttggttataatccaattgggaccacggtatttttgttccttaggcacgttacctaacccgtttcctataatggacggatctggccaatgtggaaccttcctttgttcggttgaaccgactccgt

SEQ ID NO: 95518 - DNA, 792 bp, Arabidopsis thaliana columbia
cagctctattcgactcactctatggaaagctggtacgcctgcaggtaccggtccggaattcccgggtcgacccacgcgtccgtgcggctgcgagaagacgacagaagggtactgttgcgataagacgacagaagggtgcggctgcgagaagacgacagatgggttcggctgcgagaagaccacagaggggggaacgacgacgggacaaaagcttcaccggagatcaaagacgcgagggtggtgaacattccaaagacttagaactcttactgtaagaacaaggaatgcgataagccttctttgcacaaggttacccaatacaagaagggtaaagacagtcttgctgctcaaggaaacgcgtcgttatgaccgtaaacaatctggtaagggtggtcagactaagcctgtcttccacaaaaaggctaagaccacgaagaagattgttttgaggcttcagtgtcaaagctgcaagcacttttcgcagcgtcctatcaagaggtgcaagcatttcgagatcggtggtgacaagaagggaaagggaacatctctgttttaagttggtttcatcttattttctgcgattttcgtacttgctggatttgggaatccattttgttttagctctctcgtataagattgtctcatctttgcttgattaactctatattttgaatcatcaagatatgggttttgctgttaaaaaaaaaaaaaaaaaaaaaaaaaaaaaagcggccgctctagaggatccaagcttacgtacgcgtgcatgcgacgtcatgatcttctataggt

SEQ ID NO: 95519 - DNA, 1041 bp, Arabidopsis thaliana columbia
tacggctgcgagaagacgacagaagggtacggctgcgagaagacgacagaagggtacggctgcgagaagacgacagaagggtacggctgcgagaagacgacagaagggacaacaagaagtatgtaatggcttttctctatgctctcctcccgccgctgaggtgtagcgagtcgccggctcaggccaccatggtcgcttccattcaccgggttgaaagttcatccgcttcttttcccgggtcaccccgcaaagaccaaacaagggacattcacttttccattcgcaaggcaacggggggaggaggtaacctgcatgcagatgcaggtgtggccaccaaatcggaaaagaagaagttttgagactctcttcttaacctttcctgacccttaaccgatttccgaaattgggctaaggaaagtttgactaacctttatcccgcaacaaagtgggattcccttgtgtttgaaattcgaagtttggagcaacgggatttttttgtacccgtgaagcaacgggtaaacttaaccccgggttacttatgattggacggggtacctggacaattgtgggaaggtttcccctttgttccgggttgaaaccgacttccggtcaaggtgttgaaagggaagttgaaagaatgcaaagaagggagtaaccctggggggccttcaattaggggtcatcgggattccgacaacaccccgtcaaagtccaagtgcatcaagtttcatttgcctacaaagccaccaagctttcaccgggttaattttccctttttgctttttggtgtaaaccctcaaaaacttttatccccccatcttttgatttttatccccttggttttcttgcttttttccttcttttcttggggtttaaatttccggacttaaacggtttgttttcccggtttcgcgagacaatattctatcggattggtcaaatggtctgatttatgaaatatgtaatttatatatccgggcgtcttgattttttccgatggttaactagtttgaaaatttccgatgagataagacaacatac

SEQ ID NO: 95520 - DNA, 1387 bp, Arabidopsis thaliana columbia
  unsure (1)..(1387): unsure at all n locations
atgatactgccnnnnnnnnnnnnnnnnnnnnnnnnnnnnnnnnnnnnnngttctcacccttacttggcaaacactcaacgaagaaaggagagagagacggtaatggcgatcaagaacattctcgcccttgtggttcttcttagcgtggttggagtttctgtcgccattccacagttgcttgacctcgactactaccggtctaagtgtcccaaggcagaggaaattgttcgtggtgtcacagtacaatatgtttctcgccagaaaacccttgccgctaaacttctaaggatgcatttccatgattgtttcgtcagaggatgtgatggttccgttcttctgaaatctgcaaagaatgatgcggaaagagacgctgtccccaacctgaccctgaaaggttatgaagtggtggatgcggccaagacagcgctggagaggaagtgtcctaatctcatttcttgcgctgatgttcttgccttggtcgccagagatgccgtggcagtgatcgggggaccatggtggccggttccattgggccgcagggatggacgcatctcgaaattgaacgatgcattgctaaatttaccatctcctttcgccgacataaagacgctgaagaagaactttgccaacaagggtcttaacgctaaagaccttgtggttctctcagggggtcacaccattggaatctctagttgcgctctcgtcaacagtcgtctctacaacttcacaggaaagggcgattctgacccatccatgaaccctagctacgtgagggaattgaagagaaagtgcccgcctacagatttcagaacctcactgaacatggacccaggcagtgcgttgacattcgacactcactacttcaaggtcgtggctcagaagaaagggctcttcacatctgactctacgcttctcgatgacattgagaccaaaaactacgttcagactcaggccattctccctcctgtgttttcttctttcaataaagatttctccgattccatggtcaaacttggtttcgtccaaattcttaccggcaaaaatggtgagatcaggaagagatgcgccttccctaactaatttggatcgatcagaccgggtttcggatgattttgagtctacacgtttttctctgcttattttctttctttttcttttttctttcacggaagtttgagctttggtgttgtcttcttctgtttcttccatgaataattgttttttgttgagtaactttacatttgtattctttacggtgactgtgttttgtaatggaaaaagtttgtttcgaattcaaaaaaaaaaaaaaaaaacggccgctctagaggatccaagcttacgtacgcgtgcatgcgacgtcagagnnnnnnnnnnnnnnnnnacattc

SEQ ID NO: 95521 - DNA, 534 bp, Arabidopsis thaliana columbia
ggatgtctttgagacagatatggatcatgaaattggttctgatagagataacacaagcgctgtgtttgaggaagctgagagtatctcagtgggtgaattgattaaaagtccggttttcagcgaagacgagtcatcagatagctccctctggattgatttgggtcagagtcctgctgattctgataatgcaggtcatctgaacaagcaaaagagccccttactggttcgaaaaaaccacaaacgaagaagctcgcctaaaccagcttcaaaggctaataatggcagcaacggtgggaggcatgttctctctttcgatgctgctgttttgtcagtatcacatgaagtgggtgaaaggaagtcatagaagaagaaaattctgaaatgaatcagatagacacaagtcgtcggttgcgagttactgagatcgaagaggaagaagaagaaggagggagcagtaagctaactgctcatgcaaatggttcgagctctggaatcaaagacagtgcgataagaagagaaactgaaggcgaattt

SEQ ID NO: 95522 - DNA, 409 bp, Arabidopsis thaliana columbia
gcgtcccaacttctacacagtgacggtttatgaaaagggagctgaggtcgtcaggatgtacaaaactctactaggaactcaggggttccgaaagggaattgatctctattttgaaagacatgatgagcaagcagtgacttgtgaagacttctttgctgctatgcgtgatgcaaataatgcagactttgctaatttcttgcaatggtactctcaagctggaacgcccgttgtcaaagtggtatcctcttacaatgctgacgctcgtactttctctttaaaattcagtcaggagatacctccaactccaggccagccaacaaaagaacctacatttattccagtggttgttggtcttttggactcaagtgggaaagacattactctttcctctgttcatcatgatggtaca

SEQ ID NO: 95523 - DNA, 822 bp, Arabidopsis thaliana columbia
  unsure (1)..(822): unsure at all n locations
atacgactcactttagggaaagcacgtacgcctgcaggtaccggtccggaattcccgggtcacaaattaagaagagagaaatggggaaagacggagaaggagacaagaagcgagaaacaatggcggtgatgagcttaatgaaggatcaacagaatccaattcaacagtttcaagtcaaattcaaggagattgagactggtttcaagtcgtggttatcaaaacagaagttaccggtggaagccgccgttgtcacggccatgggtggtgttcagggagcttttatcggtggtttaatgggaactttatctcctgaaatgcctcaggctggtattgaccctcaagctatggcttcgctaaagcaaactcaggctcttgttggtgggcctttggttcaagctcggaactttgctgctataactggtgttaatgctggtattgcttgtgttatgaaacggattagaggcaaggaggatttagaaatctcctgtggtcgcagcattcggatctggagttgcatattctcttgtgagcgcaggattacaaggacagcctatgaatgcaatcaccactgctgctggtttcgctgtttttcaaggagtgtttttcaagttgggtgaaaggttctctaaaccaagtgttgaaagatccatattacacccggggaaagatctatnttgttgaaactgggtctagaggagtatgagaagaacttcanagaaaggtttattagctgacccaactcttgnccaattnctcanttgntngcgcgnctaaggaggncgtnaagcantcccncccttggcccaagggctacctgattac

SEQ ID NO: 95524 - DNA, 518 bp, Arabidopsis thaliana columbia
ctctatacgactcacataagggaaagctggcacgcctgcaggtaccggtccggaattcccgggtcgacccacgcgtccgcggacgcgtgggcggacgcgtgggctttctctctccatgagaactctaatctctcaccggcaatgtgtgacgtcaccgtttcttatctccgccgcatctccaccgtttcctggccggtgctttaagttatcctcctttactcctccacgtcataggcgtttttcttctctctcgatcagaaacatttcgcatgaatccgccgatcagacttcttcttctaggccgcgaactctttatcctggtggttacaagcgtcccgaactcgccgttcccggtttacttctccggctagacgccgacgaggttatgagcgggaatcgtgaagagactcttgatttggtcgaccgcgctttatctaaatcggctcaaatcgtcgtgattgatggcggagccaccgctggtaagctctaccaggcggcttgtttgctgaaatcacttg

SEQ ID NO: 95525 - DNA, 421 bp, Arabidopsis thaliana columbia
gaaaggaagaggcagatctgttattctctgttgaagtctgattgatctgatcggagctattgcggaggaggggtttactgcaattgcacggtggtaatggctgcggttccgcctgaaaacggcgtggacggagatgacgaaagagaggaagaagaagaggacgaggaggaggaagaagaagaagaagaagaagagaacggagatgaggctgaggaggagccacgtctcaaatatcagaggatgggtggcaacgttcctgcgttgctatctaacgatgctgcttcctgcatcgctgttgctgcgaggatgatcgcgcttggtacgcacgacggtaccgtgcgtatcctcgatttattggggaatcaggttaaagaatttcgtgcccacactgctccggttaatgacatcaactttgacactg

SEQ ID NO: 95526 - DNA, 455 bp, Arabidopsis thaliana columbia
aaacgaaatcgtggtcttactctctcttctgagttctgacctgagcacacacacagagattttgattgtgtcactcatggaacccaatatttaccaacttgccctcgcggctctattcggagcttccttcgttgctgtttctgggtttttcatgcatttcaaggcactgaatctagtccttgagcgtggtaaggagcgtaaagagaaccctgatggagacgagcctcaaaatccgaccttggtgaggcggcggagccaagttagaaggaaggttaatgaccaatatggtcgcagtcctgcttctcttccagatgccactccttttaccgatggtggcggcggcggcggcggtgatacaggacggagcaacggtcacgtttatgtcgatgaaattcctcctggtctccctaggcttcatacgccatctgaagggagagcttctgtacatggagcta

SEQ ID NO: 95527 - DNA, 467 bp, Arabidopsis thaliana columbia
  unsure (1)..(467): unsure at all n locations
acgggncgggaattccggggtgggcccagccgtccggaaaggaaaggtggggtcctatctccctcttaaaccaacctttcaaaaggtggcgtcctggctccctttaatcttttttttgggctctatccaaggcctttgttaaggatttttgggtcgaaaacctgaaacgcgctgaaccccctgcgggttaccctggctttcgtccaattaatgtaaaagttccagacttggttttttttggcttaggccctctgggaaccactccaaacttattaaacgccgttgtaacacccgttttggcagttaagttccgggttttgaacggtttaggcctttttccagttggactggccttagttcttaagggggtgatccaaatgcacactaaccttggggcttttgaggtttttttggtcctaacgggttccataaccgttgggttggtttcttcggcaaacgttgtttac

SEQ ID NO: 95528 - DNA, 469 bp, Arabidopsis thaliana columbia
  unsure (1)..(469): unsure at all n locations
cnnnnnnnnnnnnnnnnnnnnnnnnnnnnnnnnnnnnnnnnnnnnnnnnnnnnnnnnnnnnnnnnnnnnnnnccacgcgtgcgggaacgtattgtttcaagaaactgattcagctgtagatttgaatcataatgtacaaatgatgaaccacccggtaagcaaaaccactagaatcgagcaggaggcaatgaaagtccaaccaccgagtaagattcctatagtgtagactatgagtggaggcaacaaggactttactatagccgttttgttcacccaacgtcccttgaaaagcactagtgtcgcgagattcaccacgttccatccgcctgactttatagatagacggttcaggttgttggcgaggaagaagacgaagaagaagaggagcagctactaccatggttctcaagacggagctttgtcgtttcagtggacagaagatttactcaggaagaggaattaggtttat

SEQ ID NO: 95529 - DNA, 767 bp, Arabidopsis thaliana columbia
cccacgcgtccgcggacgcgtggggagaattagggttttctagtctagtgtttccgggagcagcctgagcaggaggaagaagacgaagaagaagaggagcagctactaccatggttctcaagacggagctttgtcgtttcagtggacagaagatttacccaggaagaggaattaggtttatccgatctgattctcaggttttcttgtttcttaactcaaaatgtaagaggtacttccataacaagttgaagccatccaagcttgcatggactgccatgtacagaaagcaacacaagaaggatgcagcacaagaggctgtgaagagaaggagacgtgccaccaagaagccatactcaaggtccattgttggtgctaccttggaagtaattcagaagaagagagctgagaagcctgaagttcgtgatgcagccagggaagctgctctgcgtgagatcaaggaaagaatcaaaaagaccaaagatgaaaagaaggctaagaaggtggaatttgcttctaagcaacagaaggtcaaggctaatttccccaaagctgctgctgcatccaagggtcctaaggtgggaggtggtggtggcaaacgctgaagagcttaaagccatcttttctcactctgcgtcttttctgctagtagctacttttagtagttgatgttcatttctgaatatttgcaaaacataaaccttgttattttcgtttttgtctctcacttttgctactcttataatatcagacttgagaattttgctgct

SEQ ID NO: 95530 - DNA, 627 bp, Arabidopsis thaliana columbia
  unsure (1)..(627): unsure at all n locations
aacgcatcatacgacctctctctncctctactacacacttccgtttccatttccctctccgccacactcacgcaccgtatctattaatgctcgctctccaccagcttacttcaccacccgtccccgccgtgtctgtcctcctcgacttctcgtgttacaaaccagacccttcactgatctgctctcgtgaaacattcatggacagatctcaacgtgtaggcatcttcacagaagacaacttagctttccaacaaaagatcctcgaaagatccggtctaggtcagaaaacttacttccctgaagctcttcttcgtgttcctcctaatccttgtatggaagaagcgagaaaagaggcagaaacagttatgttcggagctattgacgcggttcttgagaagaccggtgtgaaacctaaagatattggaatccttgtggtgaaattgtagcttggttaatccaacaccgtcactttctgctatgattgtgaataagtataagcttagaggcaacattttgagctataatcttggtggaatgggatgtagtgctggccttatctccattgatctcgctaaacagatgcttcaggtaaaatatcttattattcggtttggtttaatccggttt

SEQ ID NO: 95531 - DNA, 1290 bp, Arabidopsis thaliana columbia
  unsure (1)..(1290): unsure at all n locations
cgccatatagaaatttcaactaaaaatggccgtgaagatctcgaccattgaagtattgatcctatcccttgctctacttagcttcggccatggttgttatggccagcttcgactcggattctacagtcaaaattgccaaaacgtcgaaaacatcgtatctaaagttgttggagaggcattcatcaaggattcatcgattgcacccgcaatgatccgcctttattttcacgattgttttagcaacgggtgtgatgcatcgcttcttctagatggttcgaacagtgagaaaaaggcgtcaccaaatctaagtgtacgcggatacgaagtgatagatgacattaagtctgcggtcgaaaaagaatgtgacagggtcgtttcttgtgctgatatcatagctctcgcgactagagatcttgttactcttgcaagcggagggaaaacacgatatgagataccaacaggacgattagacggtaaaatctcttcggctttgcttgtcgatttgccgtctccaaagatgaccgtcgcggaaactgctgctaaatttgatcagaggaaacttagccttaccgatatggttctacttcttggtggacatacgattggagtgacacattgttccttcattatggacagattatataactttcaaaacacgcaaaagcctgatccatctatggatcctaaattggtcgaagaactaagcggcaaatgccctaagggttcgtcaaccgatggcatcattaatctggatcaaaatgctactagctcgaatactatggatgtatctttctacaaagagataaaagtcagccgcggagtccttcatatcgatcaaaaacttgccaacgacgatttgacgagaaagatggtgacggatatagccaacggtaacgatttcttggttaggtttggtcaggctatggtgaatttgggatcggtgagagttattagtaagcccaaagacggggagataagaagatcatgtcgttctacgtgcaacaatccattatgcgtataaacagttgaataaagttacgccctatattttttgttttgtttaatgttattgtgttcacattttttttattcatatgtcattatttttttatttgggttgttaagtattttatattgttatggcatctaagtttttttgtttattgttattgtgttaacttttttttctttatctgcctttgttaatttgggttgtactatcactgagtctcacagttctggtgcttcaacagttcgactaccnnnnnnnnnnnnnnnnnnnnnnnnnnn

SEQ ID NO: 95532 - DNA, 798 bp, Arabidopsis thaliana columbia
  unsure (1)..(798): unsure at all n locations
tttcttcatcactgcgagagagacgaacaagagagagagagagagagagggagatgcaatcgctgcaagataaggcatcggtgttaagcggcgtcgatcaggctgaggcgttcgccatcgacgagtccaatctgttcgacaagcttggtcttcagacattcatcaacctatccaccaatttctataccagggtatatgatgacgaagaagaatggtttcaatcaatattttctaactctaacaaagaagatgccatccaaaaccagtatgagttctttgtccagcgtatgggaggccctcctttgtattctcagagaaaaggtcatcctgctttgatcggacgtcaccgtccatttccagtgacccatcaagctgctgagagatggctagagcacatgcaaaatgctctggacgattcggttgacattgaccaggactcaaaaatcaaaatgatgaagttctttagacaccccgcatttttccttgtggctggaaacgagctgaagaatcagaatgagaaaccgaagcataagcctcaatgtgcttgttaacacgcaccccattaaccagcagaagaattattttactccagattcttggtttaccttaaagttcccttcaaaggccccaaagatttttcggaaaaatggttttttctggaaaactaagtaaaaaaaaaaaactggttttanaaaaaaaaaaataaaaaacaccaaaaccnaaggggggcnnnnnnnnnnnnnnnnnnnnnnnnnnnnnnnnnnnnnnnnnnnnnnnnnnnnnnnnnnnnnnnnnnnn

SEQ ID NO: 95533 - DNA, 560 bp, Arabidopsis thaliana columbia
  unsure (1)..(560): unsure at all n locations
catnnnnnnnnnnnnnnnnnnnnnnnnnnnnnnnnnnnnnnnnnnnnnnnnnnnnnnnnnnnnnnnnnnnnnnccacgcgtgcgaccttttattaccgacaagattctgccacacaattattacatatttttgttcccatgaagcaattgttcctttcaagcatgtttacgagcaaaagagtgaaagggtagcttgatttttgtctactctagcttcattttctggcgatctttacttgagatttaaacattttgctctcggattgataataaagaagaatttggaatatcagtaggtttggttaggactctcggattctgttgtcggttagatatttgttttgtttaatccctagatttagcagagaaatccctcaaatctcacacaatccatgtaaggaagaagatgacctccagtatcaaatcaagtctgctaaatctagggctccttattatatttttcgtcttcttcttcctggtgattaactgtcgaggggaatcttgtacgtgtttggcggtttacaaacaaggcggagcttcagctgtgtttcaatcaccca

SEQ ID NO: 95534 - DNA, 508 bp, Arabidopsis thaliana columbia
taggtacacactatagaagagtctatgacgtcgcatgcacgcgtacgtaagctcggaattcggctcgagcttttctctctctccttatctttctcttcgcgacattgacaaaagaaaaattgctcaatctttgaaaaaccagaacaattaacgccggtgattgtttgtatttcgctatgttatctgagactttcaacgatggattcatcaaggcaacaaacgatgttcacatcggcggaagtttgcttaaatcgaaaaatagcaaattggattcggagagttatcgccgacgccttccccaaattaggtatgaatcaattctaatctttattacgtgattagatgttgtatttggtggtttaatcaaaaaaattagggttttggaattgaagaaaatttagggttctgtttttaaaaattagggttcttcgtttgtagcaagattagggtattttttgatatatcttgaagcattttctatagttttgtatggtcatagatcgttttg

SEQ ID NO: 95535 - DNA, 552 bp, Arabidopsis thaliana columbia
  unsure (1)..(552): unsure at all n locations
agtaaatgtaaactttgttgtttaatatctgtttctgtgattgaatcaaattggaaagttacctgtaaatgctaattgttgttttttttctctatgcttttggtgagtgttaatggcggataagcaagtggttgtgagttaaggagaaactgtaaaggaattcgtctatgcacttcaatgaagtttatcatcaccggttggagacaaagatagacaaagacacgtaacttgcaactcatgttccacttgatgccaaaagagacatatgattcgtttgctttgttgtcttttttttagctttgtatgtttccaccacatgtatctttttagctttgtattttcttacacaccttgtcttttatttaactttgtatttggaccacaagttgtcttattttagctttgtatggtcatgtatattcgatccnnnnnnnnnnnnnnnnnnnnnnnnnnnnnnnnnnnnnnnnnnnnnnnnnnnnnnnnnnnnnnnnnnnnnnnnnnnnnnnnnnnnnnnnnnnnnnnnnnnnnnnnnnnnnnnnnnnnnnnnnnnnn

SEQ ID NO: 95536 - DNA, 553 bp, Arabidopsis thaliana columbia
  unsure (1)..(553): unsure at all n locations
ttgtaataaccccattggtgatcatnatcttttnaaatctgtgaagaacaagattgattattgtaggcttcatggaattnagattgtntataacatggctcatttggataaggaactcgctggctattgggcaaaattaccaatgattaggaggttgatgttgtctcatccagaagttgagtggatctggtggatggatagtgatgctttgttcactgatatactgtttcagatccctttggctaggtatcagaagcataatctagtgattcatggttatccggacttgttgttcgatcagaagtcgtggattgctttgaacacaggtagttttctgctgaggaattgtcagtggtcgttggatttgttagatgcttgggcgcctatgggacctaaagggccaattcgtgatgaggccgggaaggtattgacggcttatctgaaaggtagaccagcttttgaggcagatgatcagtcatgcattgatctatctcctgctttctcagtaagatacatggatggagaaagtgtttgtggagaatccattctattt

SEQ ID NO: 95537 - DNA, 438 bp, Arabidopsis thaliana columbia
cacgcgtccagcagagtaggaggagacggtggaggaactggaaggtggccgagacaagaaaccctaactctgttggaaattagatctcgtcttgatcatatattcaaagaagctaatcaaaaaggacctctttgggatgaagtttctaggattatgtccgaggaacatggataccaaaggagtgggaagaaatgcagagagaagtttgagaatctgtacaaatactataggaagactaaagaaggcaaagccggaagacaagacggaaaacattacagatttttccggcagctcgaagcgctatacggggattctaataacttggtttcttgtcccaatcataacacgcagttcatgagcagtgctcttcatggtttccatactcaaaaccctatgaacgttactacaacaacgtccaacatccataacgttgatagt

SEQ ID NO: 95538 - DNA, 818 bp, Arabidopsis thaliana columbia
  unsure (1)..(818): unsure at all n locations
aannnnnnnnnnnnnnnnnnnnnnnnnnnnnnnnnnnnnnnnnnnnnnnnnnnnnnnnnnnnnnnnnnnnnnnnnnnnnnnnnnnnnnnnncggccgcgcttctgcttcttctcttccatttccatatttacacttcataatatctcttcacccacttctcttcttccccatttataactcacaaatatatacatactcttacatttatatatcttgggctagctaagtagctatagtaattttctaatatctctttccatttcttgaaatggtcctcctctcaccttaactttataagaatctgaccacctctcaggtttccagtttcttcactttctcgttctctggacactgaatgtgatacatatatagaagaagaaagctataagagattgatcgatggaggtgaatgttcttgcatccaagagaagtcttctcctttttcttcttattgtaagtctctctttgagccagaaggtcagacatatctctgcctttaacgacaccaaaccatacagacaagtcagtagcttgagacttgcgaggatccaaaagcacttgaacaagatcaacaagtctcctgtcttcaccattcagagtccagatggtgatgtaatagattgtgtacccaaaagaaagcagccagcttttggatcatccactctttaagcatcacaagattcagaaagcaccgaagaaaatgccgttgatgaagggttttgatgatgatgttaaagaagcatataattgttttgtgaggttcatgtgtattgtggcacgtgtacatctcgtggtgctctattgttttctatttcta

SEQ ID NO: 95539 - DNA, 654 bp, Arabidopsis thaliana columbia
gcgtccggataaattgcagacgtggcatatagacgaaatacaagattcagagataataaatacgtcaccaaaagttatcacccacaacgaatcttcttcttccatcgccattgccatggctaagctctctctttcctccatcttcttcgtcttccctctcctcctctgtttcttttccccttcttcttcttcatcggatggcttagaatcctacatcgtccatgtgcagagatctcataagccttccctcttctcctcccacaacaactggcacgtctctctccttcgctctctcccttcttctccccaaccagcaacgctgctctactcttattcacgcgccgttcatggcttctccgctcgtctctcccctatccaaaccgccgccctccgccgtcatccttcagtcatctccgttatacctgatcaagcgcgtgagatccacacaactcacacgcctgccttcctcggtttctcccaaaactctggactctggagcaactcaaattacggggaagacgtgatcgtcggcgttttagatactggaatctggccggaacatccaagtttctcggattcaggtctcggtccaattccatctacctggaaaggcgagtgcgagatcggacctgattttcctgcctcatcttgcaa

SEQ ID NO: 95540 - DNA, 539 bp, Arabidopsis thaliana columbia
  unsure (1)..(539): unsure at all n locations
taaagattttcaccattatgctattctttgtagccctagagaaatcatatttttggtggaggatattcccatatgaagatgcccaatgaagagtgcgtctacatttccgttaagaccaatgtggctttatggttccatatgggatgcttcttcttgggcaacggaagacggtaaatacaaagccgactataaatatcaacctttcactgctaaatacaccaattttaaagcgctcggctgcaccgcctactcgtcagctcggtgctatccgttgtcggcttcgccataccgttctggcggattaacccgacaacaacaccaagccatgagatgggttcaaacacatagtatggtatacaattattgcaaagattataagcgagaccattctttaacgccggaatgttggcgttaggaaatattcgatgaaagtcccaaagtttgagagttttaatcacatcaaagttaataccagaaagagcttggtacaattttgggatttttttcatcactattattatgtggttggttgtttcncg

SEQ ID NO: 95541 - DNA, 536 bp, Arabidopsis thaliana columbia
agaatctcgtgtactgtgtttagtgccccttttctctcgtttaatgctcttcttaaaacttgttcagcatatgcatcttccttaccaaagcatttaaatcccgaggtttctcaggagctgaccccatcttggagtatcctcatcaaaaatgtaggtcaaaggtgaaactaatacccccctgcctccggccgctctaagttgcttcacagagtcgtatagggccttttttggtacacaaatcacgatggcatagtagtcaaccgatacttttccattttgtgtacagtacactggccccattgtcggtccctgcaatcctgacaatgatggttggctcagcacacgctcagccacttcctgagcactatttcctctcatgtttgcaacaacagtgaattggccatccgcctttagatgggcctccaatctctcaagaatctcgtgtactgtgtttagccccccttttctcctagagccgaattccgagcttacgtacgcgtgcatgcgacgtcataaatcttcgtatagttgcacct

SEQ ID NO: 95542 - DNA, 803 bp, Arabidopsis thaliana columbia
  unsure (1)..(803): unsure at all n locations
cttatagaacagctatgacgtcgcatgcacgcgtacgtaagctgggatcctctaaagcggccgcccttttttttttttttttaattaaaaaaaggctggtttttatggttccaccgggattaacaccaccgaatgggatccttccaaaaaaaaaatgtaaaaattacaacagcccggaggacaacaactgcagcaaaaaggggaaggaaaaaaaaaaggagacccccaaaggtcccaaaaaactcaaagatttacaccaaagagtcttcttaaaactggttcagcatgtgcatcttccttaccaaagcatttaaatcccgaggtttctcaggagctgaccccatcttggagtatcctcatcaaaaatgtaggtcaaaggtgaaactaataccccactgcctccggccgctctaagttgcttcacagagtcgtatagggccttttttggtacacaaatcacgatggcatagtagtcaaccgatacttttccattttgtgtacagtacactgggcttattgtcggtccctgcaatcctgacaatgatggttggctcagcacacgctcagccacttcctgagcactatttcctctcatgtttgcaacaacagtgaattggccatccgcctttagatgggcctccaatctctcaagaatctcgtgtactgggtttagtgccccttttctctcgtttaatgctcttctacttgccacaagtgcncgctggctttccagcacaacaccttctttcattttctttcaagttgttctctttgagtggtataccactacctcacaagatcca

SEQ ID NO: 95543 - DNA, 428 bp, Arabidopsis thaliana columbia
cgtttttcctctgcaacttctcgttgcctcacactatatgaatcatctgtaatttgtagcttctttaacaaccaaaaagtttcaagattcctatatcctaagcaaaaaatgaagttaccatcgattctttcacttgttgtttcttccatctttctctgcatgagcttttgctcctctctcaattccgacggtttatctctcctagctctcaaatccgccgtcgataacgacccgacccgagtaatgacccactggtctgaatccgacccgactccttgccattggtccggaatcgtcttgcacaaacggccgagtcacaacttcttgtactcttcggaaaaagtctctccggttacattccatcagaactccgtttactcaactcgctaaacccggcttgatctagctcacaacaatttctctaaaac

SEQ ID NO: 95544 - DNA, 416 bp, Arabidopsis thaliana columbia
aaatagttgcaacttcaccttttcggatatctcgtcgtggtggtggtggatattgcagcagggcttgtatcccttatcgggggaaatttacttgttatgcaacactatctgctgtggttaaggagcaagcatcagactgtgggggaaaagaagcagcttggcttggacatgagctcagaagcaacttcaactctggcagaacgaagagctacgagtggtgaatttctcagcttcaaaacattgctaggatgattgttgagaaggagaaatgcatcacccaagctttgtatcaagatctttctaagcctgagcttgaagcttttctagctgtgatttcgaattacaaaatcatcctgtttgcttgcaatcaaagagttaatgaactggatggctccagaaacgttcaaaacttctga

SEQ ID NO: 95545 - DNA, 519 bp, Arabidopsis thaliana columbia
cgattctattaggtgcactatagaagatctatgacgtcgcatgcacgcgtacgtaagctcggaattcggctcgagaaaagaagcagctttgcttgtacatgagctcagaagcaacttcaactctggcagaacgaagagctacgagtggcgaatttctcagcttcaaaacattgcgacgatgattgatgagaaggagaaatgcatcaccgaagctttgtatcaagatctttctaagcctgagcttgaagcttttctagctgagatttcgaatacatgatcatcctgtatgcttgcaatcaaagagttaaagaactggatggctccagaaacggtcagaacttctgtgacaacatttccctcgtctgcacaaatagtctcagaaccgcttggagttgttttggttatttcagcctggaatttccctttcttattgtctgtcgagccagtcattggagctattgcagctggtaatgcggttgtgctaaaaccttctgaaattgctccagcagcatcttctct

SEQ ID NO: 95546 - DNA, 764 bp, Arabidopsis thaliana columbia
  unsure (1)..(764): unsure at all n locations
gatgaaacgaggagtgaagaagagtcgatgaattattctcggagatagaagtaacaaaatcattttcatatcccaacacatttgcttttaaactccaagataaaaagggacgaatgcatagatttatgtgtgaaacacagagtttgacaactctgataacagcaatcctacaaagaatgggggatgacattgagcctgataacttgcctcagataatgtacgaagatgaagacaatgacaaagttgttttagcatcagataatgatcttggagctgctgtagaacatgcaaaatcaataggctggaagggtttaaaattgcatttggactacacagaagaaagagggcacaggagaggtctaagttcagaggatatggactacgaccagtcaaactcatgggcagccgcttacaaaacggttgcagccggggctgctcttgctgctggacttggagttttggtgtaccttaagcgcaactcaaactaacagattcattttggggagatacaaaagtgaatgcttttgcaaaccaatttttaaacctaagcttgtgaagtgtatacctcttcattgattcgtgtttttttttttttttttatctgggggcttatttgtttctcaaccttacacatgaattgtatataaataagtaaacattttgcggccgnnnnnnnnnnnnnnnnnnnnnnnnnnnnnnnnnnnnnnnnnnnnnnnnnnnnnnnnnnnnnnnnnnnnnnnnnnnnnnnnnnnnnnnnnnnnnnn

SEQ ID NO: 95547 - DNA, 527 bp, Arabidopsis thaliana columbia
  unsure (1)..(527): unsure at all n locations
nnnnnnnnnnnnnnnnnnnnnnnnnnnnnnnnnnnnnnnnnnnnnnnnnnnnnnnnnnnnnnnnnnnnnnnnnnnnnnnnnnccacgcgtccgaaaaaaaaaaattggagaggaagagaaaggaggaaatcgaaaccattcggttggtgatgggccaagcgccgtcgtctacggcggaatcgaacggacgagagttagatttgaggttatggtctccggtgattgttgctggaggtgaatcgatggctgtggggaatgttgtggatcgggatttcaccggagatctgccggatgagtgtttagctcatgtgtttcagtttcttggagctggagatcggaagcgatgctctcttgtttgtaaacggtggttgctcgtcgacggtcagagtcgtcatcggttatctctagatgctaaggatgagatctcctctttccttacctctatgttcaatcgattcgattcggtgacgaagcttgctctccgatgtgatcggaagtctgttagcttgagcgatgaagctttggct

SEQ ID NO: 95548 - DNA, 814 bp, Arabidopsis thaliana columbia
  unsure (1)..(814): unsure at all n locations
ccagcactaatacgactcacttagggaaagccggtacgcctgcaggtaccggtccggaattcccgggtcgacccacgcgtccgaccggatctaagtcttgtaactaaggcacgtcacaatggccaaaattatgtctttgctctgttgactggttatcgtgatcctcctgctggaatttcgatcagagaggggctacactacaatccttatttccctggtggagcaatcgctatgccaaaaatgctcaacgatgaagctgtggaatatgaagatggaactcctgcaacagaagcacagatgggtaaagatgttgtatccttcttgtcctgggcagctgaaccagagatggaagagaggaaattgatggggttcaaatggatattcttactgtctttggctctgcttcaagctgcgtattacaggagactgaaatggtcagtactcaaatcccgtaagcttgttctcgacgttgttaactaatcccgtgaagatcaccttttctctgggtaataatcattaatcttgaaagggataaatggtgaatcccactttttgtctcaaaagacatgtttctttgtttattgtttagaaagtctaatgaggcaaagaagtaaagcttttttaacctcaagtcacacatgattttgagattatattatttctttttggtttgttgtctcctaaaccggactcggtttgtcttaataaaaatgtggttttacaaaaaaaaaaaaaaaaaannnnnnnnnnnnnnnnnnnnnnnnnnnnnnnnnnnnnnnnnnnnnnnnnnnnnnnnnnnnnnnnnncgtcctaa

SEQ ID NO: 95549 - DNA, 981 bp, Arabidopsis thaliana columbia
  unsure (1)..(981): unsure at all n locations
nnnctccnnnnnnnnnnnnnnnnnnnnnnnnnnnnnnnnnnnnnnnnnnnnnnnnnnnnnnnnnnnnnnnnnaattttccacgcgtccggtttacttcttcttcttcttcttcttcttcttcctcctcctctgttcgtcaatcgccgatctcgttgcttcattttccttgagatcgattggtacaagtgttcatccaatggttggaggaggagttatccggcagcttcttagaaggaaacttcattcccaatcagtcgcaactccggtattgtcatggttgtcttcgaagaaagcgaatgaagatgctgggtctgctggtttaagagcatttgctctcatgggtgctggtattaccggattattgagtttttctactgttgcatctgctgatgaggctgaacatggtctggagtgtcctaactacccttggccacatgagggcattctcagctcatatgaccatgcttcgatccgtcgtggtcaccaagtttatcagcaagtttgtgcgtcttgccattcgatgtctctgatctcataccgagacttggtgggtgttgcctacacagaggaagaagcgaaggccatggcagctgaaatcgaggttgttgatggaccaaatgatgagggtgagatgttcacccgacctggtaaactcagtgatcggcttcctgaaccatactcaaatgaatcggctgctaggttcgccaatggaggagcgtatccaccggatctaagtcttgtaactaaggcacgtcacaatggccaaaattatgtctttgctctgttgactggttatcgtgatcctcctgctggaatttnagtaaatttctctcctattttnnctttnagacttgttatnacaacttcaaaattnttgggaagttagaaaataatccctggtganctaacgggggaccagttcaggggnnggggntacaatnanaaancccttantttnccctgggggggagaatttgntt

SEQ ID NO: 95550 - DNA, 662 bp, Arabidopsis thaliana columbia
  unsure (1)..(662): unsure at all n locations
anctttcccnggggcatctcccgaatccccagntgactttggttaantngccccccncagggcccnntgggtaaggnttgaccatctggcctggccgctgacccagaaatggaaggggggaactgangggnttcaaaanggatatccctactctctctcgctcttctccaagctgcttacttacaggcgactaaaatggtcggttctcaagtccccgcaagctggttcttgacgtggttaactaaagcgccgctgaaaagcttttgcattggcctggccacacacagtcgtattttcaacaaaggatgttaaatagagaagagcctttctctgggtaataacgtatcatcatttttatgtgtcataaaaatctttgatgagaccagttctcacctgaaggtgaaaagacctcatcgttcttctttttccttcgattattactagagagttttatgaggataatcacgaaaacttgtttttttcgcctcataataatcacacatgattttgagattatatcatttgttatgtttttcctcttgtctcaataaaaaataactttgtaaaaaaaaaaaaaaagggcggccgctatagaggatccaagcttacgtacgcgtgcatggtacgctcatagtaannnnnnnnnnnnnnnnnttgaatcg

SEQ ID NO: 95551 - DNA, 628 bp, Arabidopsis thaliana columbia
  unsure (1)..(628): unsure at all n locations
atacgactcattaagggaaagccggtacgcctgcaggtaccggtccggaattcccgggtcgacccacgcgtccgcccacgcgtccgcggacgcttgggcggacgcgtggggttcgttcccaaactcttctccctcgatcgtctccgtcgccgatctcgtttcttcattttccgcgtgttgattggtacaaaggtttaatcaaatggttggaggaggagttatccagcaaattcttaggaggaagcttcactcccaatcacttgcaactccggttttgtcttggttttcttcgaagaaagctcatgaggatgctggttcttctggtgtaagagcacttgccttgttgggtgctggtgttacaggactgttgagtttttctacagtagcatctgctgatgaggctgaacatggattggagagtccagagtacccttggcctcatgatggcattcttagctcatatgaccatgcttcgatccgtcgtgggcatcaagtttatcagcaagtctgtgcatcatgccttaaatgccctaaactatanccgnattgggggntcgcctcaaagggaggggaaggnatggactaaaccgggtgaagnggcccaatntggggnatttnccccccggaa

SEQ ID NO: 95552 - DNA, 878 bp, Arabidopsis thaliana columbia
  unsure (1)..(878): unsure at all n locations
gatgttcaccngccctggtaaactcagtgaccggtttcctcagccatatgcaaatnaatcagctgcaaggtttgctaatggtggagcgtatcctcctgatctaagtcttataactaaggcacgtcacaatggtccaaactatgtctttgcgcttctaactggttaccgtgatccccctgctggcatatcgattagagaggggttacactacaatccttatttccctgggggggagcaattgctatgccgaaaatgctcaatgatgaagctgttgagtatgaagatggtgtccccgccacagaggcaccagatggggtaaagatatttgtatcattctttggcctgggcagctgaaccagaaatggaagagaggaaactgatgggtttcaaatggatattcctactctctctcgctcttctccaagctgcttactacaggcgactaaaatggtcggttctcaagtcccgcaagctggttcttgacgtggttaactaaagcgccgctgaaaagcttttgcattggcctggccacacacagtcgtattttcaacaaaggatgttaaatagagaagagcctttctctgggtaataacgtatcatcatttttatgtgtcataaaaatctttgatgagaccagttctcacctgaaggtgaaaagacctcatcgttcttctttttccttcgattattactagagagttttatgaggataatcacgaaaacttgtttttttcgcctcataataatcacacatgattttgagattatatcatttgttatgttttccctcttgtcaaaaaaaaaaaaaaaaagggcggccgctctagaggatccaagcttacgtacgcgggcataggacggtcatagtgcgaacggag

SEQ ID NO: 95553 - DNA, 1229 bp, Arabidopsis thaliana columbia
  unsure (1)..(1229): unsure at all n locations
nnnnnnnnnnnnnnnnnnnnnnnnnnnnnnnnnnnnnnnnnnnnnnnnnnnnnnnnnnnnnnnnnnnnnnnnnnnnnnnnnnnccacgcgtccgggactgttgagtttttctacagtagcatctgctgatgaggctgaacatggattggagagtccagagtacccttggcctcatgatggcattcttagctcatatgaccatgcttcgatccgtcgtgggcatcaagtttatcagcaagtctgtgcatcatgccattcaatgtctctgatctcataccgagacttggtgggtgtcgcctacacagaggaagaggcaaaggcaatggcagctgaaatcgaggtagtagatggacctaatgatgagggtgagatgttcacccgccctggtaaactcagtgaccggtttcctcagccatatgcaaatgaatcagctgctaggttcgccaatggtggagcgtatcctccggatctaagtcttgtaactaaggcacgtcacaatggccaaaattatgtctttgctctgttgactggttatcgtgatcctcctgctggaatttcagtaaatctctctcctatttttgctttagacttgttattacaacttcaaattgttggaagttagaaataatcctgtgactaacgggtacagatcagagaggggctacactacaatccttatttccctggtggagcaatcgctatgccaaaaatgctcaacgatgaagctgtggaatatgaagatggaactcctgcaacagaagcacagatgggtaaagatgttgtatccttcttgtcctgggcagctgaaccagagatggaagagaggaaattgatggggttcaaatggatattcttactgtctttggctctgcttcaagctgcgtattacaggagactgaaatggtcagtactcaaatcccgtaagcttgttctcgacgttgttaactaatcccgtgaagatcaccttttctctgggtaataatcattaatcttgaaagggataaatggtgaatcccactttttgtctcaaaagacatgtttctttgtttattgtttagaaagtctaatgaggcaaagaagtaaagcttttttaacctcaagtcacacatgattttgagattatattatttctttttggtttgttgtctcctaaaaaaaaaaaaaaagggcggccgctctagaggatccaagcttacgtacgcgtgcatgcgacgtcaaagctcttctaa

SEQ ID NO: 95554 - DNA, 531 bp, Arabidopsis thaliana columbia
  unsure (1)..(531): unsure at all n locations
aacaaaaaatgggagagagcaaacgcaccgagaaaacgcgcgttttggtggttggagcgactggatacatagggaagaggatagtaagggcgtgtttggctgaaggtcacgagacttacgttttgcagaggccagagattggtctcgaaatcgagaaagtccaactctttctttctttcaagaaactcggcgcacgtatcgttgaaggttctttctccgaccatcaaagcctcgtatccgccgtgaaacttgttgacgtcgttgtctccgccatgtccggtgttcacttccgtagccataacattctagtccagctcaagctcgtcgaagctatcaaagaggctggtaaccgtnaaaggtnttataaaactttaaatttaagtttattaatgnttgatccggttttgaaaaattntncgggaatcttnaaaaanttnttttaggaaaggaacccccccggggttnantttanaaagccngggggtttttttttttnttncntattnnaacccctttttnggnnaaaaccgg

SEQ ID NO: 95555 - DNA, 543 bp, Arabidopsis thaliana columbia
  unsure (1)..(543): unsure at all n locations
nnnnnnnnnnnnnnnnnnnnnnnnnnnnnnnnnnnnnnnnnnnnnnnnnnnnnnnnnnnnnnnnnnnnnnccacgcgtccgatctcccgcctatatcgacgccgtctaattcctatcatttctcgttgctccaaaaccctaactttactaccgtcggtcattattttcactttctcggctcgatttggtgttggaggttggtaatcagttatgggcgctccggaaaagtctcaatctaataccaattcgatgcagagagtgaaagtctatcatttgaatgaagatggtaaatgggatgatcgaggaactgggcacgtaagcatcgactttgtggagcgatctgaagaactcagtctatgtgtaattgatgaagaagattacgagacgttacttgttcatccccatcaaccctgaggatatttacagggaacaagaagacacaataatctcatggagagacccagagcgctcaacagaattggctttaagctntcaagagactgcagggtgctcttatgtatgggatcaaatctgcactatgca

SEQ ID NO: 95556 - DNA, 1210 bp, Arabidopsis thaliana columbia
aaatcaaattttctaagtgtctcataaaaaatgacgagattcggattagctcttttgatgattcttgtgattcaagggtttgtgatcttttcagaagcacaattgaagatgggattctacgaccaaacgtgcccttacgcagagaagatcgtacaagatgttgtcaaccaacatataaacaatgcaccctctttggctgctggcctaattaggatgcattttcatgactgcttcgttcggggttgtgatggttcgatcttaatcaacgcgacatcgagcaaccaacaagtggagaagcttgctcctccgaatctaactgtgagaggtttcgattttatcgataaagtaaagtctgctctagaatcaaagtgccctggaatcgtctcttgcgctgatatcatcacacttgctactagagactctattgttgctattggtggaccgacatggaacgttccaacggggcgcagagacggacgtatctctaactttgccgaggctatgaacaatattcctcctcctttcggaaacttcacgactctgataaccctctttggaaaccaaggacttgatgttaaagacctcgtcttgttatccggtgcccacacgattggagtgtctcattgctcctccttctcaaaccgtctcttcaatttcaccggcgttggagaccaagatccatcgctcgacagcgaatatgccgacaatctcaaatcacggagatgtttatctatcgctgacaataccacaaaagtcgaaatggatcccggtagtcgaaacaccttcgatcttagctactaccgtcttgtcctaaaacgtcgtggactttttgagtctgacgctgcattgactatgaatcctgcggcattggctcaggtcaaacgcttcgccggaggatcggagcaagagttctttgctgagttctccaactccatggagaaaatgggaaggattggggtcaaaacagggtcggatggggagattcgaagaacatgtgcatttgttaactaaaagtgtttcttactttttctttcgcaacttttttgttttgttttaaatatcttttatattggtttttatgttccttttgtcaacttttttgggtgtttggaagaatttcgagatatgtattattgtatgtggtgaatatgtgattttcaaataaatttcacgtctgtgaaaatcgttgaactaaaaaaaaaaaaaaaaa

SEQ ID NO: 95557 - DNA, 590 bp, Arabidopsis thaliana columbia
  unsure (1)..(590): unsure at all n locations
nnnnnnnnnnnnnnnnnnnnnnnnnnnnnnnnnnnnnnnnnnnnnnnnnnnnnnnnnnnnnnnnnnnnnnnnnnnnnnnnnnccacgcgtccgatcattctctctgatctcaagaaataatctcaaatctcttacactcatagtcttcaagcaacttctcagattcagctcttatggatcatttgttacaacaccaggatgtttttgggaattataacaaagcaagagaagcaatgggactatcatattcatcaaacccaacaccgttagataacgaccagaagaaaccttctcctgcaacggctgtgacaaggccacagcctccggagctagctctcaggtgtccacgttgcgactcaacaaacacaaagttttgttactacaacaactacagtctcactcagcctcgctacttctgcaaatcatgccggagatattggactaaaggtggaactctaaggaacatccccgtgggtggaggctgccggaaaaacaaacgatccacatcttcggctgcaagaagcctcagaaccactccagaacnncgcgtccacgacgggaaagtcttctcggcggcaggttttaatggg

SEQ ID NO: 95558 - DNA, 444 bp, Arabidopsis thaliana columbia
acccacgcgtgcgagactatcgtcatcgatccttaatccaaattttcgcgctcgattcgtcttttctgtatctcccggagcgccgggacttgggcggatagaggagatgaggagcttgttgttgtggattgcggtggtcgtgtgcttgctatgttcagtcgcggcggtggttcaaagcggatctagcgacggatttgggaaacccagagatactgagactgcgatatcttttctggagtataaattgatggcgccttcggttccaatgatacctctcaccttgattcacggagctgactctaaaggagctgtgtgcttagatgggacgctacctggttatcatctagatcgtggttttggatcaggtgctaacagttggcttatccagcttgagggtggaggatggtgtaacaaccataggagctgtgtgtatcgcaaaacaag

SEQ ID NO: 95559 - DNA, 465 bp, Arabidopsis thaliana columbia
  unsure (1)..(465): unsure at all n locations
gcgatcaaacccttatgcaatccatggagctaaatatcaaagaacaattgaatgcanagtcggtgactgtgacggatatgtctggagatggacntcatgtctgcatcaatgtggtatcatcggcttttgagggtcaatctgcagtgaacagtcaaaggatggtctacaaagccatttgggaagagcttcagaacgttgttcatcccgttgatcaaatgacatcaaagactccttccgaagtttgaagcgttaaattttccgaactctaaaaggcttcaatatcttatattatttgattagctgacaatgcggtttgttttatcaaaaagaaaaaagccaaaggaactgatatccagcctttgggtattttttaagtactttgattggttctcttgcaacccgccaacacatgttaagtgttggagcctttgcagtttgcgggtacacgtgttttgcggtttcaat

SEQ ID NO: 95560 - DNA, 739 bp, Arabidopsis thaliana columbia
  unsure (1)..(739): unsure at all n locations
nnnnnnnnnnnnnnnnnnnnnnnnnnnnnnnnnnnnnnnnnnnnnnnnnnnnnnnnnnnnnnnnnnnnnnnnnnnnnnccacgcgtccgcccacgcgtccgcccacgcgtccgcaatggcgcagacattaatggcgacaactcgtccgtacgttcttctctcttccacaagagcgagtctttatcgcctttttcaatcttcaaagagacccttcgcttcattctcagctcctctcgtgagattcactaactcgagatgtgtaagcgccgttttgtctcgtaaagagactgcgccgtcgtcgatttacggcaatagagtttctagggtttctgggtttggtgctttggacattcgcagccttaatttcagtactaaatcctctcaaatcaatgatgctggttctattgatcaaacccttatgcaatccatggagctaaagatcaaagaacaattgaatgcagagtcggttactgtaacggatatgtctggagatggacgtcatgtctgcatcaatgtggtatcatcggcttttgagggacaatctgcagtgaacagacaaaggatggtctacaaagccatttgggaagagcttcagaacgttgttcatggcngttgatcaaatggcaacaaaggcttccttcttnaagttttnaggggttaaattttccgnaccttttaaaggggtttcaaananccttaaaatttatttngatttggnnggcaaacctnntttggtttt

SEQ ID NO: 95561 - DNA, 758 bp, Arabidopsis thaliana columbia
  unsure (1)..(758): unsure at all n locations
nnnnnnnnnnnnnnnnnnnnnnnnnnnnnnnnnnnnnnnnnnnnnnnnnnnnnnnnnnnnnnnnnnnnnnnnnnnnnnnnnnnnnnnncggccgcggattcgtcagatatcttcgatttctcgtcgtttcatcggttccaggtcaaatccagtttgcagggatttgatcgttggtaagctatctttcagcaaacatgcatggttatgaagatgaccttgatgaggaagctgggtatgatgactattacagcggtgatgaggatgagtatgaagatgaggaagaggaggatgaagaacctcctaaggaagaattggaatttcttgagtcacgccaaaagttgaaggaatcaattcggaagaaaatgggaaatggaagtgctaatgctcaatcttcacaagagagaagaagaaaacttccttataacgactttggttctttctttggtccttcacggcctgttatttcctcaagggttatacaagaaagcaaatccttgcttgaaaacgagctacgtaaaatgtcgaattcgagccaaactaagaaaagaccagttccgacgaatggttcaggctctaagaatgtgtcacaagagaagcgacctaaagttgggaatgaggtgagaaggaaagttgagactcttaaggatacaagagactattcggttttgtttttcgatgacgcggagcttcctgttccgaagaaggaatctctttcacgaagtggctcttttcctaattctggttttttgctgatgttc

SEQ ID NO: 95562 - DNA, 525 bp, Arabidopsis thaliana columbia
cccacgcgtccgttttcttcatcatctttcccatgatcgtctctcgcttctcaacgcaatcttcttcacccaatctctaaatctctcctaaattccatgtctctcgcttccatttcgccgtttagctgccggagctgccgtaattgccgctgcatccggtggcgctgtctacctgtctccgtcggttgcctccagcgacaaaggacgtggtccgattctagattcgttgaggcgtaggcttggtgatcccaccgcttctgtaccgtctcgatctgctcaagagtctgctctgattgcagccaccgcttctgatccgctcgatgttctcgtcattggcggtggagccaccggttctggagttgctctttacgctgatacacgtggcctccgtgttgttttggtggatcgcgaggatttctactctgggacttctttacgatctacaaagctgaatcattgaggggttcgttacttggttaaaactgtttttaattttttttatgtactagttaatgtttatatttt

SEQ ID NO: 95563 - DNA, 1032 bp, Arabidopsis thaliana columbia
  unsure (1)..(1032): unsure at all n locations
aattcttggtccaaggattggggggttgggggccccctcttaatggccgttccacactccatgttcgtcctggaactcatcaccctataaccctaaactctctcaaaccaatcaccaccaaatcacagccatgtaaaaccccagaaataccctccactcccaacgctcttcagctccttaaatcatcctctctccctctcgcagtcatcgcattgcctttcttcctcgacccacaggatgcagcagcagctggaggagaattcggaatattagaagggagatcatttgcgttgatacacccaattgtgatgggaggtttatttgcatacactctttggactggttacttaggttggcaatggagacgtgtccgtacgatacagagtgagattagtgatctcaagaaacagcttaaaccaactcctgtttcccctgatggttccacagccgttgattcttcgtcgcctccttctacgactgagcttcagatccaacggctaactgaagagaggaaagagttggtcaaagggtcttacagagacaaacactttgacgctggctctgttttgttaggtttcggtgttttggaagctgtctttggtggtgttaacacttatcttcgtactggtaaactcttccccggtcctcatctttacgccggtgcaggaataacggtgttgtgggcggcggcggcagcattggtgccggcaatgcagaaaggggacgatacggcgaggagtctacatatagcgttgaatgcagtaaatgttcttcttttcatttggcaaatcccaacaggtcttgatatcgttcttaaggtctttgagttcactaaatggccatagatattaatatttggatgtgttatttatgagtttgtgactctatatatgcaaatattcttcaactttttttgaaaaaaaaggatgatgaattnnnnnnnnnnnnnnnnnnnnnnnnnnnnnnnnnnnnnnnnnnnnnnnnnnnnnnnnnnnnnnnnnnnnnnnnnnnnnnnnnnnnnnnnnaaatcat

SEQ ID NO: 95564 - DNA, 482 bp, Arabidopsis thaliana columbia
  unsure (1)..(482): unsure at all n locations
cgcgtccgcatctacatcaccggtaaaaatggcgatgtgggtattcgggtacggatctttaatatggaaaacgggttttcctttcgacgaaagcctccctggtttcattaaaggctatcgccgtgtcttccatcaaggtagtactgatcatagaggaactccggattttccgggaagaacagtgacattagaagctgctcatgaagaagtttgttgtggagttgcttacaagataactaaagaggaagataaaagagatgctttattgcatttggaagtgagggagaagcaatatgatcagaaagagtatcttgatttcttcactgactctaatgcttcggaaccggctgtggcaggagtaatggtgtacatagcttcaccctgaccagaagggcaccaccacctacttagggcccgctcctcttgaaggtattgcccaccaggtngttaagcgganggccttnngggccancagggcttnt

SEQ ID NO: 95565 - DNA, 523 bp, Arabidopsis thaliana columbia
  unsure (1)..(523): unsure at all n locations
cccccaacactgatggttctgaancacccacggttgcacaagaggagggaagacgatgaagatgttgatgagactgttgttgaacccaaggacattgatcttgtgatgactcaagccggnttgctcgaggcccaaggctgttaaggctcttaaagagagtagcggagatattgtttccgccattatggaactcactacataggtgttagtgagttccaaaagacttgtgatggttcgtctttgttgcttcatttctgattcggttagcaattttctcgaacatctctgtttctccacttttttgaggctatttctttttacctttctctgagccataaacaatgttgcttcacatctataatttgagacgtttatgtctagtgttgtttttattaaattaaaaaaaaaagaaaaaagagggcccctaaggttataaggttataaaacgctaggagaggaactaaaaccccttcaaaaaagggaccgaaaaaaaaataggggggcccccaaaggatcaaagctt

SEQ ID NO: 95566 - DNA, 341 bp, Arabidopsis thaliana columbia
gcgtccgcacccaattggcgcgtgttgtcttcatcttcttcctcctctcgacgacgaagagattaaagagagacggccttttctcagtttctgctccgattcgtatatcttctgtttcgtacgagtgttgtaagacgtttgttttgcctgagactagacgtttgtcatggatatagatcttcgactacattcaggtgacctttgcaaaggagatgatgaggatagaggacttgataatgtgttacacaatgaagaagatatggatattggcacaattgacgatgtttctgttgaggttaatactgatgagagtgtaggcatgggtgttccaactggggatt

SEQ ID NO: 95567 - DNA, 592 bp, Arabidopsis thaliana columbia
  unsure (1)..(592): unsure at all n locations
accacgcgtgcgcacctntctctcgccgacgacgctacaaccatggcgtctctcgctctctccggctcctgctctctcgctttccctctcaaatctcgatctctctctctccctcgtcctccttcttcctctctcaatttgacgaaacctctccgatctctcgattctcgcttctccttactcaaatctccacttcccgtctctttacgccggagatcatcaactctcgttaaagcctcttccaccgtcgcttcagcttcctcttctccaactcctcctttggttccagctccggttccatggcaaggagctgccattaagcctcttctcgcttcgatcgctactggtttgattctatggttcgttccagtccccgaaggtgtcactcgcaacgcgtggcaattactcgcgatctttccttggcaacaatcgtngggntnaataantaagccggttnctttnggtgctgtnncntaaatggggttaaggggttccgttttaccaaaaccnaaggttggcggcgggttntcggtttngngnnccaatcccgnggtaatggtttgcctttttttggtngggttaaaaaangntc

SEQ ID NO: 95568 - DNA, 373 bp, Arabidopsis thaliana columbia
cccacactaatatatttgactttcttctctgtcttatatattcagctaaaagcagacctagggtttttgtatccgttccagccacggacgacttctccgttctctgaactctcctaaagcctctatattcatcggattgttcatctccagttaaccaatctccagtttggtgaatttgtaagaatgagttaacgaaaacgtccggatccgaaatcatcgggaggtgatctaaactagccacacgagaagaagcttctggatctgattcgaattaaccaatgaagaggcgcaactatgttcgaattgaaacgcgagaaaacgatcccagcaactatagttactcgattgaacgcttctttaccgtagatgattt

SEQ ID NO: 95569 - DNA, 1184 bp, Arabidopsis thaliana columbia
agaaattaaaggagaaaaatcgatcacgatggatattcgtagtgatgatgcaaaaaaacctatgatgatgtggttcttagggatgctgttgttttccatggtggccgagtcaaatgctcaactgtcagagaattactacgcctcgacatgtcctagcgtagagctcatcgttaagcaggcggttactacaaaattcaaacaaactgtcacaacggctcctgcaacgttgcggatgttctttcacgactgcttcgtcgagggatgtgatgcgtctgtgtttatagcatctgagaatgaagacgcagagaaagacgcagatgacaataaatctctcgccggagacggatttgacaccgtgattaaagctaaaaccgctgtagaatctcaatgtcccggagttgtgtcatgtgccgatatactagctctcgccgctagagacgtcgtcgtgctcgttggagggccagagtttaaggtggagctagggagacgagacgggctcgtgtcgaaagcgtctagagtgaccggcaagttacctgaaccagggcttgacgtgagaggtctagtccagatcttcgctagtaacgggctttcattgaccgacatgatcgctctttcaggcgcacatacaattggatcctctcactgcaaccgtttcgccaaccgtctccacaatttctcgacgttcatgccagtggaccctacgatggacccggtctacgctcagcagctgatacaagcctgctctgaccccaacccagatgctgtagtagacattgacctaacgtccagagataccttcgacaatagctactaccagaacctcgtggctcggaaaggacttttcacctccgatcaagctctgtttaacgatctctcgtctcaggctacggtggtcaggtttgctaacaacgctgaagaattctacagcgcttttagctctgctatgaggaatcttggccgcgttggggttaaggttgggaatcaaggcgagattcgaagggactgctctgcttttaactagctttattgaacaaatgtctataacctaaaacatataaattatgaagcttttgatttaagcttttgctatactaaaatgtcataatccacaatggaacttctcaaaaaaaaaaaaaaaacctatttttcaggattataaaaaaaccataacattatttgaaaac

SEQ ID NO: 95570 - DNA, 417 bp, Arabidopsis thaliana columbia
gactatctggacactttcgatttctgaagttgagagacgactatggcgacgaacaatggtgatgtcttgatgttggaggcgacgccggaggctgcgaggccctgggctagtgcggcgaatgcagaagttatcgatgcgcttccttatatagacgacgactatggcaatccattgattaagtcggaggtagaccgtttggtggaggaagagatgcgtcggagctctaagaagccagctgactttctaaaggacttgcctcctcttccgaagttcgattttaagaactgccctgttcttggcaaagagtatgagcgtgttagagctgggaagcctcctgtgcggatagatttcgaatcccgatacaaacttgaaatgccacctgccaataagaggaatgatgatgctgcctggaagcag

SEQ ID NO: 95571 - DNA, 552 bp, Arabidopsis thaliana columbia
aacattttacacaacatcattcaccaaaatgggaaattgcttgggaaccaagaaaacagcgacaatcatgaacatcaatggcgagagtttcaaactgaaaacgcctgtggaagctggtacagtggttaaagattttcctggccacgttctcttggaatccgaagcgggggagcgtttaggaatcagagcggagcccttggagcctcaccaaaacttggaatccaaaaggatttacttcatggttgaacttccaagaacatggaaagagagaactccaagaagggttcggtcgggaatccagatgagtgcgaaggagagattagagaatctgaagctgtctcgtagatcatcatctgatctcttggtaatgaagaagaagacagatgttaatgattaataaagagaagtgagttgcgtgaagtttaatttaccaaagtggtaaattgagaaactgaggtaagagagtgagagtggctttgatttctcaacaagatcacacaacttttgcttcttcacatcccagtggtttgattaataaagaaacatttgctt

SEQ ID NO: 95572 - DNA, 469 bp, Arabidopsis thaliana columbia
gctttcggtgaaggaaacaagcgtcgtctccttggaaagcgcggacccgcagacatcaacacattctcttggggagtcgcgaaccgtggagcgtcagtgagagtgggacgtgacacagagaaggaaggtaaagggtacttcgaagacagaaggccagcttctaacatggatccttacgttgtcacctccatgatcgctgagacgaccatactcggttgatgacacatttcatgatttgatttctctccaatttggttttttttttttcccttttgattgcacttttcgataataaaaaaataattcttattatgggcgtattgttgtgacattttgtgttttgtttcgaataattaaataagcgcttcttaaggtgaaaataaaaaataattagtgatataaaaaaagaaaaaacacaaagggcgaccgctctagaggatccaagcttacgtacgcgtgcgtgcgacgt

SEQ ID NO: 95573 - DNA, 541 bp, Arabidopsis thaliana columbia
gtaattgtcagcttcgacccgaaaccagtcccgggtgactggaatggagctggagctcactgcaacttcagcactaagacaatgagaaacgatggaggattagaagtgatcaagaaagcgatagggaagcttcagctgaaacacaaagaacacattgctgcttacggtgaaggaaacgagcgtcgtctcactggaaagcacgaaaccgcagacatcaacacattctcttggggagtcgcgaaccgtggagcgtcagtgagagtgggacgtgacacagagaaggaaggtaaagggtacttcgaagacagaaggccagcttctaacatggatccttacgttgtcacctccatgatcgctgagacgaccatactcggttgatgacacatttcatgatttgatttctctccaatttgggtttctttttttcccttttgattgcccctttcgaaaataaaaaaataaattttaataaaaaaaaaaaaaaaaaaaaaaaagggcggccggtttaaaggaatccaggctaaggaaggggggaagggaa

SEQ ID NO: 95574 - DNA, 688 bp, Arabidopsis thaliana columbia
  unsure (1)..(688): unsure at all n locations
cgaccacgcgtccgctgtagctaccccaatggctctccatctcttctagataaactcccggtcgaaaccagcagagaaaacgaggacctgtcgtccaaagctatggcaaggttcaacatattgctaagaagtttgtcacagccgatgtcgctcaaagacatagccaagacatgggacgcctgtgctcgggcagtgatctgtgagtacgcacagcaatttggcggtggaactttcagctcaaaatacggcacttgggagaaatatgtagcagcttcctgaatctgacggatctctctcgtcttcaatagcagctctgtgattcacttgcaggttcatgtcaaaactaaagaaaaaaagccaaaaagttttttcctcactttttgttgtatagtataagttgttttcccacacacgtgattgggattttttgttatctgtttgcaaaagcttatgctatattattgaatatatttaaataatattattttaactttattgtatgtattttgtgaatcttgttagtatattcgtcattttcttctaattctgaagcgcaattaccccttttttggggtcttgctgaatgttgtaaaaaacaaaacaaaagggcggccgctctagaggatccaagcttacgtacgcgtgcgtgcgacgtcaagatcttgtagagtgcacctannnnacaatc

SEQ ID NO: 95575 - DNA, 331 bp, Arabidopsis thaliana columbia
ccataacttaatggataatctaattcttgaagataacgttggtgttctgcgtggagccgctaaacgcgccgctacttctgcttggcatctgcgccacaacagcgttcgtaagcatgtggatgcataacgtagcagctgcagtcatgatgatgcctgtcgctacggggatacttcagagactgccctcgtcatcatcgacgacggaagtggtgcatccggccgtggggaagtttaccacggcggtggtgttaggtgtgatatactctgcggcggttggtgggatgagcacactcactgtaacaggactgaatctgagtcttgttggaatgtg

SEQ ID NO: 95576 - DNA, 508 bp, Arabidopsis thaliana columbia
  unsure (1)..(508): unsure at all n locations
nnnnnnnnnnnnnnnnnnnnnnnnnnnnnnnnnnnnnnnnnnnnnnnnnnnnnnnnnnnnnnnnnnnnnnnnnnnnnnnnnnnccacgcgtccgggggacacttttgtttttataacttacgcttaaaatcctatgaattcgccgccggttgacgcaatgattacccggagaatcatcgtcacaaagatctatcccaacgccgtttctcacagggacgtttaacctcgttgaagatagttccatcgacgatgttatctcatggaacgaagatggttcctctttcatcgtatggaatccgacagatttcgctaaagatttgcttcctaaacacttcaaacacaacaatttctctagtttcgttcgtcagctcaacacttacggattcaaaaaagttgtaccggatcgatgggagttttcaaacgatttctttaagagaggagaaaaacgtcttctccgtgagatccaacgtcggaaaataacaacgacgcatcaaacagttgttgctcc

SEQ ID NO: 95577 - DNA, 465 bp, Arabidopsis thaliana columbia
cagacgcgtgggcggacgcgtgggtcgcgatcacaatctctgcttcgatttcttcttcttcttcagaattcagatcagatctccggcgataatctttgagatctgaaatttcttacaatcaggagagaaagatgtacggattcgaggcgcttacgttcaatatccatgggggatacttggaggcgatcgtcagaggccaccgtgctgggcttctcaccaccgccgattacaacaatctatgtcagtgtgagaacctagacgatatcaagatgcatctctctgccaccaaatacggtccttacctccaaaacgaaccatcacctctgcataccactacaattgtggagaagtgtacgctcaagcttgttgatgactacaagcatatgctttgccaagctactgagccaatgtctacctttttagagtacatcagatatggtcatatgattgacaatgtcgtgctca

SEQ ID NO: 95578 - DNA, 784 bp, Arabidopsis thaliana columbia
  unsure (1)..(784): unsure at all n locations
ggccngaatcccagggcagcccactgcgtccgggatttcttcttcagatctccggcgacaatcattgagatctgaatatcttacgttaaggagagaaagatgtacggattcgaggcgcttaccttcaacatccatggcggatatttggaggcgatcgttagaggccaccgtgctgggcttctcaccaccgccgattacaataatctatgtcagtgtgagaacctagacgatatcaagatgcatctctctgccaccaaatacggctcttatctccaaaacgaaccgtcacctctgcataccaccaccattgtggagaagtgtactcttaagcttgttgatgactacaagcatatgctttgccaagctactgagccaatgtctacctttttagagtacatcagatatggccacatgattgacaatgtcgtgctcattgttactggaaccctgcatgagagagatgttcaagagttgatcgagaaatgtcaccctttaggcatgtttgacagtattgctacactagctgttgctcagaacatgcgggaactctataggttggtgcttgtggacactcctctggctccatacttttctgaatgcctaacatcagaggatctcgatgacatgaacatagagattatnaggaataccccccttncaaagcatanccttgaggggttttaacaaactccttntcaggaantttngtgggcgcaacancagnagnttatgtnttncccttttggcctttnaagccgncagngnagcaantggatntcacttt

SEQ ID NO: 95579 - DNA, 724 bp, Arabidopsis thaliana columbia
  unsure (1)..(724): unsure at all n locations
gcccacnccgnntntccccccttccccttggncaaggagcccgggatcccctccaccgcattgcctggcccccagggaagcagaaggcctgnccccacacttggccaccccaacccattggccccgagggcttgctatctgcgaggatatggcccaggttcgtggtgttatggagaaatatcccccgtatcaagctatattcccgaagatgtcttatggagagagccagatgctcgacaaagcattttatgaagaagaagtcagaaggctttgcttagcctttgagcagcagttccattacgcggtattctttgcgtatatgaggttaagagagcaggagatcaggaaccttatgtggatatctgaatgtgttgcacagaaccagaagtccaggatccacgacagtgtcgtctacatgttctgattctggtggtgagtcaaaaacacataaacaaatgtgaaatcttgagtctggttttcttcatcgctcctcatgtacaatcgttggtttttacattccctgtttctgtcgctctgtgtttaccagagtgcgtgtattgagtatctcccaataagaatctcttttatttgtttgtttgttgttggccatacactcttgtaagatcaaatttatttatgatgcataaaaattacttaaaaaaaaaaaaaaagggcggccgctctagaggatccaagcttacgtacgcgtgcatgcgacgtcagg

SEQ ID NO: 95580 - DNA, 1094 bp, Arabidopsis thaliana columbia
tatacgaccactatgggtaagctggtacgcctgcaggtaccggtccggaattcccgggtcgacccacgcgtccgtacatcagatatggccacatgattgacaatgtcgtgctcattgttactggaaccctgcatgagagagatgttcaagagttgattgagaaatgtcaccctttaggcatgtttgacagtattgctacactagcagttgctcagaacatgcgggaactctaccggttggtgcttgtggatactcctttggctccatacttttctgaatgcttaacgtcagaggatctcgatgacatgaacatagagattatgaggaacaccctctacaaagcataccttgaggatttttacaagttctgtcagaaacttggtggcgcaacagcggagattatgtctgaccttttggcctttgaggccgatagaagagcagtgaatatcactatcaacagcattggcactgagctcacaagagaagacagaaagaaactgtactctaactttggtctactctatccatatggtcacgaagagcttgctatctgcgaggatatagaccaggttcgtggtgttatggagaaatatcctccgtatcaagctatattctcgaagatgtcttatggagagagccagatgctcgacaaagcattttatgaagaagaagtcagaaggctttgcttagcctttgagcagcagttccattacgcggtattctttgcgtatatgaggttgagggagcaggagatcaggaacctgatgtggatatctgaatgtgttgcccagaaccagaagtccaggatccacgatagtgtggtctacatgttctgagtctggtaagaagtgtaatctgtctgaaaaaagcggagaataagaggaacccatatccttcttcttccttttcttcattactccatttttattagagaatctgctgtacaatcttgcggtctacattcactgtttatgtcgctctgcgcggatctaaaactcctcaatacccatctatccaatttgtttgttttttttcttcctcatattcttgcttggttccggtaaactctttgtaatgtcgaataatttcgatga

SEQ ID NO: 95581 - DNA, 747 bp, Arabidopsis thaliana columbia
  unsure (1)..(747): unsure at all n locations
gaaggacctaaggatcttcctcctcaattggagtcaaacggtgcaagaggttcaggaagtgcaaacagtgttggttcaagcactacaagacccaaatctccatggatgccatttcctactctgtttgcagcaatctcacataaggttgcagagaacgacatgttgttgatcaatgctgactaccaacaactgagggataagaagatgacgagagcggagtttgtcaggaaactgcgggtgattgtaggagatgatctgctaaggtccaccataacaacccttcaaaaccagccaaagtcgaaggagattccaggaagcatcagagaccatgaagaaggtgcaggtggattgtaagtaaagtggatgatgatgatgacgaatatcaaaaggaagctgctttttatctatctacctgcctttgtggttctccttttgactttttctaattttagacttttggttttgggtcgggtcgttggtagagtttaaaatgtgtcgacttttctttctgtcgtgaaaaatcgtactatattatatgattctacttagtcaatgatgtcgttgggtctttgtttctttagctgcaagcaaaacattgttgtggaagtcgttgaatcttgacgaaaatttggtcgttaaaaaaaaaaaaaaagggcggccctctagaggatccaagcttacgtacgcgtgcaggcgacgtcaagatcttctatagttgtcnnnnnnnnnnnnnnnnnnnnnnnnnnn

SEQ ID NO: 95582 - DNA, 582 bp, Arabidopsis thaliana columbia
tcatgtgcttcctgctcttatgaggaggttccacgaggcgaaagtgaatggagcggaggaagttgtggtgtggggtacaggtagtccgttgagggagttcttgcatgttgatgatttggctgatgcttgtttttccttgctcggacgcgtgggcggacgcgtgggtgttaacattggaagtggtcaagaagtgactattagagagttggctgagttggtgaaagaggttgttggttttgaagggaagcttggatgggattgcactaagccagatggcacaccgaggaaacttatggacagctcaaagctcgcgtctttgggttggacacctaaggtttctcttagagatggtctgagccaaacttatgattggtatttgaagaatgtttgcaaccgataagttaatggtttctcttctcatatatacacaactattgagtctcaggtaaatcagcttatcaccacattgtgatttaaacctttctttgagattcgagaattgctttttttgttatcaaaattgattcatttagagataagacttgcttctttatacaacattgtctgaggaattttaataat

SEQ ID NO: 95583 - DNA, 436 bp, Arabidopsis thaliana columbia
  unsure (1)..(436): unsure at all n locations
cgcgtccgaggacgcgtgggtaaatcgccagtattcgccgcaagaaagatgtctccggcgaagaagagccgaagttttcctccgataagcgagtgtaaaagcagagagtatgattcgatcgctgcggatctcgacgggactctgcttctgtcaagaagctctttcccttacttcatgctggtggccattgaagcaggtagtctcttccgtggattgatccttcttctttctcttcccatcgtcatcatcgcttatctcttcgtctccgaatctctcggaatccaaatccttatcttcatctccttcgccggtatcaagatcaagaacatcggactcgtctctcgcgccgttcttacacgggttttacgcggcggatgtaaggaangatagtttttacggccgtttgataaaggnaaagaaccgggaatgtagttgt

SEQ ID NO: 95584 - DNA, 1266 bp, Arabidopsis thaliana columbia
acccggccgcacttcccgggtcgaggctcaatttatatacaacactctctctctctcggttttgtccaaacaatggctcgcttcgatattgttctactcataggtctttgcctcataatctctgtctttcccgatacaaccaccgcacaactaagccgcggtttctactccaaaacttgccccaatgtcgaacaaatcgtgagaaatgctgtccaaaagaaaataaagaagacattcgtcgccgtccctgccactctccgtctcttcttccacgactgctttgtcaatggttgtgatgcatctgtcatgatccaatcaacgcctaagaacaaggcagagaaggatcatccagataacatttcgctagctggagatggatttgatgtggtgatccaagctaagaaagcccttgactctaaccctagttgccggaacaaggtctcatgtgccgatattcttactttggccacccgagatgttgttgttgcggctggaggaccgtcctatgaagttgaacttggtaggttcgatggtttggtatcaaccgcgtcaagtgtcgaagggaacttaccaggaccttcggacaatgtagacaaacttaatgctcttttcacgaaaaacaaacttacccaagaagatatgattgctctttcagcggctcacacccttggattcgcacattgcggcaaggtctttaaaagaatccacaaattcaacggcatcaactccgtggacccaactttaaacaaggcttacgctattgagcttcaaaaggcttgtcctaagaatgtggacccaagaattgcaatcaacatggacccagtcacgcccaagacgtttgacaacacttacttcaagaatcttcaacaaggcaaaggtctcttcacctccgatcaagttctcttcacggatggtcgctctaggcccaccgttaatgcttgggcctcaaactctacggcctttaaccgcgcttttgtgatagccatgaccaaacttggccgtgttggagttaagaatagcagcaatggaaacatccgtcgtgattgtggtgcgtttaactagagctggtaatgggaaaatataagttgtcttatctcctaatttttttttcttttatccaattcaacctattttcttttcgtttattaatgtttgaatgttcattttgacgatgagaagatattattggtttttccaaaaaaaaaaaaaaaaacggccgctctagaggatccaagcttacgtacgcgtgcatagcacgtcaatagt

SEQ ID NO: 95585 - DNA, 687 bp, Arabidopsis thaliana columbia
gaaaccggggccgacccacgcgtccggatttcttggtcctccgcaggtacttgtggtttccggggtacaagaagaggaacacccttggctgcccaaaccgcagcaggaaatgctattcgagcagtagtggatcaaggtatgcaacgagctgaagtaaggataaaaggccctggactcggaagagatgcggcattacgagctattcgtagaagcggtatacttttaagtttcgtacgagatgtaacccctatgccacataatggttgtagaccccctaaaaaaagacgtgtatagaactaaaaaaaggctaaaagggtttcaagagaaataaacgattcaacgatctgatcaaataaaattactatggttcgagagaaagtcaaagtatctactcggacactacagtggaagtgtgttgaatcaaaaagagacagtaagcgtctttattatggacgctttattctgtctccacttatgaaaggccaagccgacacaataggcattgcgatgcgaagagctttacttggcgaaatagaaggaacatgtattacacgtgcaaaatttgaggacataccacatgactattctaacatagcaggtattcaagattcagtacatgaaattttaatgtggtttttgaacgggatttgtattaaggaggaatctttttgggaccgggaacggttt

SEQ ID NO: 95586 - DNA, 1056 bp, Arabidopsis thaliana columbia
cacgcatcatcagtccaaagataccgcaatttttactaagcgaaacaaaaggaaaggtttgggatggttttaaattccgtttggaatgacccgcttactataagtaaagcagataatcttgcagctcaaatagcaagagacttccatatcggatggtttattcacccaccagtatatggagagtttccaaagacattgcaaaacattgtgaaagagaggcttccaatgttcacggagaaagaagtgaaaatggtgaaaggttccatagattttgtgggaataaaccaatacacgacttattacatgtccgaaccacatcccaccaccaaacctaaggatttgggttatcaacaagattggaatgtggaatttggctttgctaagttggggaagccaataggtccaagggcttactcgtcttggttatacaacgtaccatggggaatgtacaaggccttgatgtatatgaaggaacgttacggcaaccctactatgatcctctctgaaaacggtatggatgacccgggaaacgttactctagctcaaggactacatgacaccacgagaatcaagtattacaaagattacttaaccaaccttaagaaagctagggatgatggagccaatgtggttggatattttgcgtggtcattgctagataatttcgaatggttatcaggatatacttcaaggtttgggatcgtttatgttgattacaaaacattgaagaggtaccccaagatgtctgctcagtggtttaagcaacttctgaaacgaaacaacaaatgatctcaatgtatcaatgccgggtggatttagtttttaaaaaggttggaaatgatgattgaagaaataatggggccggtttagtcactttgtttattataaggggggtgaattgtaacttgaactctctccttcttcagttctttgacttttcaacacaaataaaataaaagtttaagaataaaaaaaaaaaaaaaaaaaaaagggcggccgctctagaggatccaagcttacgtacgcgtgcagtgacgctcatagatcttctatagt

SEQ ID NO: 95587 - DNA, 446 bp, Arabidopsis thaliana columbia
acgcgtccgggagttacagtagattgagatttgaacgtgaaattctccgagtccagaaacattcctctccttccgtcgtcgtcaagaagatcaatttcattgaaatcgaaagagtgtgcttgaatcacagcttatgcagacgctacaccagtcccaacttctccagaatccggccgaggcggcgaacaatcagtctgaatcggacgcgccgccgaaacaggtggctcaggccatggaacgactcaatcaagcggctagggttatcgccgatatccgcctcggcgctgaccgtatccttgaagctatgttcgtggcttcgcaacctcgtcacacagacatgcctcttcagctctttctcagagaagacgcctccatgcgtcaacatcttcaggatcttcgcttaatacggaagaaattggaagaatctggagtgttaactgaatcac

SEQ ID NO: 95588 - DNA, 537 bp, Arabidopsis thaliana columbia
caaatctgagccgtccggtgtgatataagtttttttaaagagagagagagcggttcgtttggctgcaacggcaccaagtctttgacaatggctgaagatgaaatagtagtcgaagaagagcaatcacagccacaggagattactccagttccaccatcttcttcgtcttcgccttcgttagtggtggaagacgacgatgagatgaagctcaagcacttggaattcattcaagtcgcggcggtttacttcgccgcctgtttctcgaccctctacgagttggctaaagacaacgctggtccactcaaactcggcgtcgagaacattgaagattgcgttcgaaccgtgcttgctccattatacgaaaaattccacgacgttcctttcaagcttctccttttcgtcgatcgtaaggtggacgatgtgttcttcgatgttgagacatatgttccgtcattggtgaagcaagcttttagccaagcgctcacggtggcccacgaggtgcagcgcaaccgcgttgtggacactaccaagagcatt

SEQ ID NO: 95589 - DNA, 759 bp, Arabidopsis thaliana columbia
  unsure (1)..(759): unsure at all n locations
ggtggaaaattaaantcgtnaacccggttccccattttcgaaaantccccgnggttccttnaaaggtccccttncgnnnanccaaaagggtggccgatgtgttccccgatgttgagacatatgtcccgtcattggtgaagcaagcttctagccaagcgctcacggtggccacggaggtgcagcgcacccgcgttgtggacactaccaagagcattgcaagaagcgtccgggacaagtacgagccaccggcagagtattacgcagcgacgctgtggcgtttactgaatcaactgccgttgttcccctgaagttgcgcatttagtgatccccacggcgttttactggtcagagaagtacaacgatgcggttcgttacgttggcgacagagactactttggggcagagtatctacccatgattcctattgagaagatctctgatattttggaacaagatcagtgtcgagctgattgactatttactcttctgaagccaaagattccttcttctatagagtatatatactgtatgtactctgtttttctttcctttctgcaatttgctatcccaagagatgttatctttcttcaatatttcattaaaacaactgtgtcttctaaaaaaaaacaagaaaaagggcggcccgtctagaggatccaatcttacatacgcgtgcatgccaaaacaatagctcttctatagtgtcacctaaaatttaaccactggcccgccgttaaacaaacgacgtgatttgggaaa

SEQ ID NO: 95590 - DNA, 769 bp, Arabidopsis thaliana columbia
tttacacacatataaacatctgaattctcttacaggaaccgaacatggagtcatcatcgtcgacttttctcaccacgacaagcttagacaagaaaaaaccatctccggtttcaagaaaatcaccaaagcaaaagaagaagacgacttcgacgaataaacccatcaaagttcgttacatctcaaaccccatgagagttcaaacttgtgcttctaagttcagagagctcgttcaagaactcacaggccaagacgccgtcgatcttcaaccggagcccatctattccccttcctccgacgaccacaacctttctccaccggcggagaatcttgcgccacgtgttcttcatcaggagccgttcggtgagagagacagtgattgttatgagccgttgaatgcggaagacatgtttttacctgatcagatgtcggcaggtttttctgggtttttctctaatgggttttacaatgtcaatgactttggaagcatcgattctatgtgataatctttcagagtttttattaggggtttcatctagtagatatatatcattatgatatcgatacataaatttaacccccaaattgatacatggatatgttaattactatagggtttgggatgcgaattagtatatgagtaagttgttttgtaaacagtttttttttcttaaatttgtttgtttgttttttcttacatcaaaacttcggtaatgtatgaacatattttctatttaatcaagaaacatgtgataatctaaagttagcgatt

SEQ ID NO: 95591 - DNA, 579 bp, Arabidopsis thaliana columbia
  unsure (1)..(579): unsure at all n locations
nnnnnnnnnnnnnnnnnnnnnnnnnnnnnnnnnnnnnnnnnnnnnnnnnnnnnnnnnnnnnnnnnnnnnnnnnccacgcgtccggaaatcaataacgtctttggctttaaacctttgtgactttgtgtacaaattccggagtgtctctctcccaaatcagcatcgcagattcgatttctcatcctaagagagctgaaaaatggaggttggattcaaggcattgctcgatgatcttgacgttctcgagaaatctctctcagatccggctctgatcaacaagctgcgatcacatgttgagaatctagccactctgtctaaatgtaatcctcaccggcgttccaaagtcaaggaactaagctcggaagtggtagatagtaatccttacagtaggcttatggcacttcagcggatgggcattgtggacaactatgagagaattagagagttttccgtcgccattgttggaattggtggtgttggaagtgttgcggctgagatgcttaccagatgtggtattggtcgtcttttgttgtatgactatgacactgtcgaactagctaacatgaacagactgttttt

SEQ ID NO: 95592 - DNA, 516 bp, Arabidopsis thaliana columbia
  unsure (1)..(516): unsure at all n locations
gagagtatctaaaattaagctttgtgtttgatatcgaaatcgaatcgagaagaagagaatcgcaatggaagctgatgacgatttctacagcggcaccgaaaactactccgattacgccgactccgacgaagatgacgccgacggcgagtacgagttcgttgacgacgctgctgatgattccgatgaccttatcttccgtcgccgccagcaaaattatagtgtgttaagcgaagcagatatttgtaagcttcaagaagatgatatttcaaggatttctactgttttgtccatttcgaggaattcatctgcgatcctgcttcgtcactacaattggtgtgtgaccagagttcatgatgaatggtttcctgatgagggaaaggttcgagatgctgttggtttattagagaaccctgttgttgattcccaactgattggggaccttntttggggaatttttttananttcctttttngcaaatgannctcccctttgggcacccttntnggcccnttttg

SEQ ID NO: 95593 - DNA, 506 bp, Arabidopsis thaliana columbia
  unsure (1)..(506): unsure at all n locations
nnnnnnnnnnnnnnnnnnnnnnnnnnnnnnnnnnnnnnnnnnnnnnnnnnnnnnnnnnnnnnnnnnnnccacgcgtccgggaagcagcagttgagaaccgcgtaacagatcttcttacccgttacaatgggaaatttagacactatgatgtgaacaatgagatgctccacggatcgttctatcgagatcgactagactctgatgcaagagcaaacatgttcaagactgcacacgagttagacccattagcaactctgtttctgaatgaataccacatagaagacggatttgactcgaggtcatcacccgagaagtacataaaactcgtacacaagctgcaaaaaaagggtgcacccgtgggaggaatcgggattcaaggacatataaccagccccgtcggtcacatcgttcgttctgctttagacaagctaagcacactcggattaccgatctggttcacagaacttgatgtgtcctcgactaacgaacatataagaggggatgat

SEQ ID NO: 95594 - DNA, 678 bp, Arabidopsis thaliana columbia
  unsure (1)..(678): unsure at all n locations
atttaggcgcactatagaagtagcttgacgtcgcatgcacgcgtacgtaagcttggatcctctagagcggccgccctttttttttttttttcggaatgatgtatcatgtatatactcatgcttccattattgacttcttcttcaaaacgatgtatctcttagattttgtgttcttgaggaacaaaagaaaagaagataaagaacaacaacaaaaaaaaggtcatatcttttgtttagtatcataggacttcttgactaagagctaactgatgataattcatgtaatcaatcccatttaaccggatgcaacacaaaatctgctccggtaactcctccggtttattcccctgaattgtgagtccaacatcaagaacacagttctttagcctgtctaaaaatgcttcaaatcctttccgcgatatataactgaatctatgcatatcaatatcaatctcaaagtatttttcacccgagtagaactcgggctggggacgtgaaagcacaggtttttcggtataagcattcatgagtttttctctgcaccattcaactgaggtcggctacattnggaacaaggcccannnntttaaccgtctttaangggtcattcgngcagnagngtngccctactttntaacctcatnactggantcccggatnttcttgaatggggggggg

SEQ ID NO: 95595 - DNA, 956 bp, Arabidopsis thaliana columbia
tacgactcacttagggaaagccggtacgcctgcaggtaccggtccggaattcccgggtcgacccacgcgtccgaatatttttctctactcaattcactcacactccaaaagcggtagcaatgtcagccaccgccgccgcctcctcctcgatcgccgttgccaccaactctctcaggaacgtgactctgtcttccagatcgccccttccatcagccatctccgtggctttcccttcccgtggacgcaatactcttcagcgacgcctcgttctcgtttcctgcagtactggagacggatctaagcctacgattctcgtggcggagaagctcggtgacgctggtattaagcttttggaggatgtcgcgaatgtcgactgttcgtataacatgactcctgaggagctcaacattaagatctcgctctgtgacgccttgatcgtgaggagtgggactaaggttggccgtgaggtgttcgaatcgtctcacggacggctcaaggttgttggtcgcgctggtgttgggatcgacaacgtggatctgagtgcagcgacggagtttgggtgtttggttgtcaacgctccgacggcgaacacgatcgctgccgctgagcacggaatcgctcttatggccgccatggctaggaacgtagctcaagctgatgcgtctgttaaggctggagagtggaagaggaacaagtatgtaggtgtttcacttgtgggaaagacccttgcagtgttgggattcgggaaagttgggacggaagttgctcgtcgtgctaagggtcttggtatgcgtgtcattgctcatgatccctatgccccagcagaccgtgcacacgccattggtgttgacttagtgagctttgatgaagcccttgccaccgcggatttcatttctcttcatatgcctcttacgccaacaacatcgaagatactaaacgacgaaacctttgccaaa

SEQ ID NO: 95596 - DNA, 303 bp, Arabidopsis thaliana columbia
acacccacgcgtccgtttccttcctaatttccaacctctgttcttagcaatatattttttctccaaaaataattctcagtttgattttcttcttctagctcttaagtatatttctttgttgttatttatcttttaatcctttaatctcatctttgtttatctttaatcaaaacccattctttacatgggttcttgaaaatctagaagaaataaaggaaacataacacaaatagaaagaaaaagaagctaatggtcttaaatatggagtctaccggagaagctgttagatcaaccaccggtaac

SEQ ID NO: 95597 - DNA, 512 bp, Arabidopsis thaliana columbia
atgatactgccagctaccatacgactcactttagggaaagctcgtacgcctgcaggtaccggtccggaattcccgggtcgacccacgcgtccgctctttcccttaacctcaaaagccatttagactcttcttctctctttcagatctctcttcttcttctgtttcttctgctcacgtagagcacaaacaagccaagaaccatctctgctctttctttcaccttcagcaaccaaagatgatgaacagctgtggaatccaacaaaacgcttttgaagagatgaggagaaacgccgccgtttctgatcggagagacgccgtgatttgtcctaaacctcgtcgtgttggtgctcttaatcaccactcttctcgatctctccgttggcaactcaagtaagatacttttttgtataaagttcaaaacttttttgaggcaaatcacttgaagcaatcagatttattggtttttgattttggagtcatcagatggaattatgtgaatcgaattcaggaag

SEQ ID NO: 95598 - DNA, 1088 bp, Arabidopsis thaliana columbia
gcgtccgcacttacccttaacctcaaaagccatttagactcttcttctctctttcagatctctcttcttcttctgtttcttctgctcacgtagagcacaaacaagccaagaaccatctctgctctttctttcaccttcagcaaccaaagatgatgaacagctgtggaatccaacaaaacgcttttgaagagatgaggagaaacgccgccgtttctgatcggagagacgccgtgatttgtcctaaacctcgtcgtgttggtgctcttaatcaccactcttctcgatctctccgttggcaactcaatcatcagatggaattatgtgaatcgaattcaggaagtgagattttggatttcatcctcacaaagggtggtggtggtggtggtgagcaagatcagacgaggacggtgatgacgccacctctgttctttacagggtcacctccaagtagagtttctaacccattaacaaaagattcgctttttcgagaagagcttctcatggtggcttctccgagtccatcgactccacgagcaaccaaaccgcagccaccgtcttctccaaggaacggtagttgtgttatggcggcgacgagtttcgggaacaatcctgtggttcgtgttgtggggtttgattgtgacagacgcagcagcaacaggagcatttcgactcttgcataagagtagtccaatatgcatatatatataacagagagagtattaaaagaccaactaagaaaggtttaggtattgattatgtgggagggttttgttggtgaaaatgtgtaaatatgttgaaaaaaagtggggggatttataaatgggattgttataaatttagggttttggtttgggtgtccattttctaaaattttgtaattaaaaaggggggagagagagtggttaatttggtatctttagtgggaaataagagcgtagtgtaatcttccttattgtaacaaaaggaaaggctcgaaagagttttgaaatgtaaagatatcatttctctgccaaaaaaaaaaaaaaaaaaaaaaagggcggccgctctagaggatcccagcttacgtacgcgtgcatgcgacgtcatag

SEQ ID NO: 95599 - DNA, 786 bp, Arabidopsis thaliana columbia
actctcttgtcaaaagagaaaaatagttcttgtaatggatgattcaagctttatggatttgatgatcgacactgacgagtatctgatcgatgactgggaatccgatttcccgatatgcggggaaactaacaccaaccccggttccgagtctggatctggaaccgggtttgagttgctagcagaatgaccaacgaagcaaatgaaaaccaacaacaacatgaattcaacatcttcttctccgtcgtcttcttcttcttctggttctcgcacgtcacaagtgatctcatttgggtctccagacacgaaaaccaacccggtcgagacatctttgaacttctccaaccaagtaagcatggatcagaaagtggggtcgaaaagaaaagattgtgttaacaatggaggaagaagagatccacatctattgaacgaacatgttttggctgaacgaaaacgtcgacaaaagctcaacgagcgtttgattgctctctctgctcttcttcctggcctcaaaaagacggacaaggcaacagttcttgaagatgccatcaaacatttgaaacaacttcaagagcgggtaaagaagctggaggaggagcgagtggtgaccaagaaaatggatcaatcaattatattggtgaagagatctcaagtgtatttagatgatgattcttcatcttattcttctacttgctctgctgcgtctcctcttggcttcttcttccggacggaggtttcgatcttcaaacaaacaatgcctatgatcgaaacccgagtttcaaacagaga

SEQ ID NO: 95600 - DNA, 702 bp, Arabidopsis thaliana columbia
  unsure (1)..(702): unsure at all n locations
nnnnnnnnnnnnnnnnnnnnnnnnnnnnnnnnnnnnnnnnnnnnnnnnnnnnnnnnnnnnnnnnnnnnnnnnnnccacgcgtccgcggacgcgtgggcggacgcgtgggcacaacttctacaagactcaaatagtttctatttaattactaaaaagaaaaataggagtcgtggttacaatttgctattcgttctagtaacgtttttagtattggttgcagctgtaaccgcacaagggaaccgtggctcaaacagcggtggtggtcgaagaccacatgttgggttttatgggaatagatgccgaaacgtagagtctattgtgagatctgtagttcagtctcatgtccggtctatcccggctaatgcacctggaattttgcgaatgcatttccacgattgctttgtccatggctgcgatggctcggttctcctcgctggtaacacctcagagagaaccgcagttccgaaccgttcattgagagggttcgaagttattgaagaagctaaggctcggcttgagaaggcttgtcctcgtaccgtttcttgtgctgatattctcacccttgcagcccgagacgccgtcgttttgancggtggacaacgctgggaagtgcccttgggacgtctcgacggccgaatctcgcaagccttaacgctgggaagtgcccttgggacgtctcgacggccgaatctcgcaagcctt

SEQ ID NO: 95601 - DNA, 545 bp, Arabidopsis thaliana columbia
  unsure (1)..(545): unsure at all n locations
tattctcacccttgcagcccccgccgtccgtcgttttggtaatatactgagattattacatgcattacatatttcattcgatttcttactttcttatttatgtgtgtatttcacatgattaaaatatataacatatatatatggtcgtgtttagcggtaatttaatattggtttatgcagaccggtggacaacgctgggaagtgcccttgggacgtctcgacggccgaatctcgcaagcctcagacgtgaacttgcccggaccaagcgactccgttgctaagcagaagcaagacttcgctgctaaaactctcaaacacattagacctcgtgactcttgttggcggggcacacaataggaactgcttggctgcggtctagtaaggggaaggttcgttaacttcaaacggcacagggcaacctgacccatcaattggccccggttttttncccgtgnatttggctcagtgcccnaaaatnggggncccggtgggtttnacggggggagttttanaagtttaaaaangtncnaagnnggtccgnaaag

SEQ ID NO: 95602 - DNA, 1375 bp, Arabidopsis thaliana columbia
  unsure (1)..(1375): unsure at all n locations
tgtgcacgtaccggtccttaatttccgggtcgacccacgcgacgcgcaaacacaacttctacaagactcaaatagtttctatttaattactaaaaagaaaaatgggtcgtggttacaatttgctattcgttctagtaacgtttttagtattggttgcagctgtaaccgcacaagggaaccgtggctcaaacagcggtggtggtcgaagccacatgttgggttttatgggaatagatgccgaaacgtagagtctattgtgagatctgtagttcagtctcatgtccggtctatcccggctaatgcacctggaattttgcgaatgcatttccacgattgctttgtccatggctgcgatggctcggttctcctcgctggtaacacctcagagagaaccgcagttccgaaccgttcattgagagggttcgaagttattgaagaagctaaggctcggcttgagaaggcttgtcctcgtaccgtttcttgtgctgatattctcacccttgcagcccgagacgccgtcgttttgaccggtggacaacgctgggaagtgcccttgggacgtctcgacggccgaatctcgcaagcctcagacgtgaacttgcccggaccaagcgactccgttgctaagcagaagcaagacttcgctgctaaaactctcaacacattagacctcgtgactcttgttggcggacacacaataggaactgctggctgcggtctagtaaggggaaggttcgttaacttcaacggcacaggacaacctgacccatcaatcgacccgagttttgtgccgctgattctggctcagtgccctcaaaatggaggcacccgagtggagttagacgagggaagtgttgacaagtttgacacatcgttcctaaggaaggtgacgtcaagtcgcgtggttctccaatccgatctagtcctatggaaggatcccgagacccgagccatcattgaacgtttattaggattacgccgaccatccttgaggttcggaaccgagttcgggaagtcgatggtcaaaatgagtctcatagaagttaagactggatcagatggggagattcgtcgggtttgttccgccatcaactaagatttaaaaaaacacaaatgtgagctttgtttttcatttatgaattcgttaattaataatcacttgttttaaataaaagcttgctacagcattttgtggtcgatggttacgttttgattttcaagtgtaagattgtacttgtaaacaaaaaatgtattatataaaagtgttatttgtttccaaaaaaaaaaaaaaaagaaaaaggcggccgctttaaaggaatccaggctacggaagggggccagccaacgtnnnnnnnnnnnnnnnnnnnnacaatcg

SEQ ID NO: 95603 - DNA, 750 bp, Arabidopsis thaliana columbia
  unsure (1)..(750): unsure at all n locations
nnnnnnnnnnnnnnnnnnnnnnnnnnnnnnnnnnnnnnnnnnnnnnnnnnnnnnnnnnnnnnnnncgccacgcgtccgcttgttctcctcaccgcttctttcttccctgaactcagaacttagaacaaagaactctcgtagacgaagaagaagatgacggtagaaggagtgaaccctaaggcgtatccgttagctgattctcagttatcgataacgattcttgatcttgttcaacaagctacgaattacaaacagttaaagaaaggagctaatgaagctaccaagacattgaaccgtgggatctctgagttcattgttatggctgctgatactgagcctctcgagattcttcttcatcttcctcttcttgctgaagataagaatgtgccgtatgtgtttgtgccatcgaaacaagcccttggaagagcatgtgatgtaaccagacccgtgatcgcttgttccgttacatcaaacgaggctagtcagttgaaatctcaaattcagcaccttaaggatgccattgagaagctcctcatctagattcttggtggaatgaatgaatgatgggtctctccatttatgaagaggcttggactgaagtgagtttatgtgcaactttttagcctatgagaaaaacaaaaatcttgtgaacgaatcctatcctttttgaagattgtaatgctttttatttgatattgtgttggtgccaatgcatttatgaacaacaagaatccttttaaagtgagtttc

SEQ ID NO: 95604 - DNA, 430 bp, Arabidopsis thaliana columbia
tcgggttatgcaaatatgctcgatatagtaagtttgaaactcggggtgtgctgaggaccagtgagttgaacaacacttcaaatgtgatttgttctctgggttttgatcgggacgaggattattttgccacagctggtgtgtcgaaaaaaattaagatatatgagttcaattcccttttcaacgaatctgttgacattcattatccagccatagaaatgccaaatagatcaaagcttagcggcgtttgctggaacaactacattaggaactacctagcttcctctgattatgatggtattgtcaagttatgggatgtgacaacaggacaggccatttcacatttcatagagcatgagaagagggcttggtctgttgacttctctgaagcttgtccgacaaaattagccagtggaagcgatgattgttctgt

SEQ ID NO: 95605 - DNA, 530 bp, Arabidopsis thaliana columbia
aaaaaccggggccgccccacgcgtccgcacaataaggatctcacatttctgttattttcccctgaaattttcgcaaaccctaaaaagagagagaaacataaaaatctccattgaaacagattggattgagcaagagaaagagatcatgtatttctaaaaagagagagaaatcctctgatctcctctctgattcgatcgagatcgcatcatttccctaatgatttcaaaaacctaaaacgatctcttcttttttttcgcttcgatctccattgaaaaggatgatttcaaatccaagtttattatcgtacacttgcattgcgaaaggaaccgtagttctcgcggagttcgtttcaaggcaagagccaggaatcgaagctatagctttacgatgcatcgagaacacgcctcctcatcattcaatgttttctcatacagttcacaagatgacgttttcattcgcaatcgacgttgattcctttggttatttctcgatttctgatgaatccatggagaaacctgaatcattctgg

SEQ ID NO: 95606 - DNA, 505 bp, Arabidopsis thaliana columbia
  unsure (1)..(505): unsure at all n locations
gattcagagatcatcgtcgtcgtcgttcagaaaccttcaaaaatggctggaaaactcatgcacgctcttcagtacaactcttacggtggtggcgccgccggattagagcatgttcaagttccggttccaacaccaaagagtaatgaggtttgcctgaaattagaagctactagtctaaaccctgttgattggaaaattcagaaaggaatgatccgcccatttctgccccgcaagttcccctgcattccagctactgatgttgctggagaggtcgttgaggttggatcaggagtaaaaaattttaaggctggtgacaaagttgtagcggttcttagccatctaggtggaggtggacttgcttgagttcgcttgtttgcaaccgagaagctgactgtcaaaagacctcaagaagttgggggccactttaagaagcaatttttacctttngggggggtntaacccngttttcccaaggntttnaaattaacccncggggggnttnaaa

SEQ ID NO: 95607 - DNA, 631 bp, Arabidopsis thaliana columbia
gtacttatcttccaattataggaataaacatttcgccagtgaaaaaaggtctcattccttccttacttgtggagatggagatctgaatctctaaagtttcgatttttatttattcacttttatgcccaaaaagaaaaatcgttactttaaagccaaaaagaagaatacacaaacttcattcactctctcccattctcggatctctctcagtgcacagtggttgtcactcttctcctttggtcgaaactctttcttggaaagagcattttgttatcaagactctgaagagctcttttgggaggatagtaaggttggatgatgagagggagatctgatggaggcctaaagaagcggcttattgcttcggtctgtgtcgtggctctattcgtctgtttcttgtttatgtactatggttcctctagccaaggtgcatcagcattggaatatggaagatctttgagaaaactcggatcgtcttatttgagtggagatgatgataatggtgataccatacaggatgattctgtggctaatgcagaagacagtcttgttgtcgccaaaagttttcctgtttgtgatgaccggcactcggaaatcatcccttgcttagattggaattcatctccaaatg

SEQ ID NO: 95608 - DNA, 768 bp, Arabidopsis thaliana columbia
  unsure (1)..(768): unsure at all n locations
cccaccctatcgcccctnnggaaactggtcccnncaggtccggncgggatcccggcgcttagatctttctttaaaaacaaatcagaaattttcttaagagtcaagaaaatttcaagaaccaattctataatgatctcagtggtgattcttactgagctactagtagagtacacggcagctctagctaaactcaccgccgggattcttccacggcgtaccggagatagaaacgccgtaaggatcggtggttttctccttccttcaccttcttcaacgacgtcgatgattcctgatttctcttctcatctagttgatttctgatttgccaacttttttattttggctgatttattcagtttttgacttcagatcctagctcccttctatgatctagtcgatgagaagcgactgagatttttactgagtgtctcgtcgtcttgaatcacgttttcttgaatcgtatagagctttgtagaatctgtatctaatttttatatatagagatgggtgatagttttgaagagctaataaggttactagatctttttttgtttccatgtgatgtgtgtttttatagcactttcacatttgttagaggctatgatcttgatctgtaatttcataactagacctctattttgctttatggtcaatgaaaacttgcgagcatttgttcacaaaaaaaaaagaataaaaaaaacaagggaggccgctctagaggatccaagcttacgtacgcgtgcgatgcgacgtcntagctcttctata

SEQ ID NO: 95609 - DNA, 634 bp, Arabidopsis thaliana columbia
tcttaatcttctctatgttgattatactcaaagaggtcttctcttccccaaacccgacccggaaacccatttcatctctcgattaagaacctctctttcttctgctctagatatttacttccccttcgctggtcgtcttaacaaagttgaaaatcatgaagacgaaacggtgtcgttttacatcaattgtgacggctctggtgctaaattcatccatgccgtagtccgattctgtttcggtaagcgatcttcttcgacctgatggctctgttcctgactgggtcaggattttctatcccatgaacggtgtcaaaagcatcgacggcctctcggagcccttgcttgctttacaagttaccgagatgagagatggagttttcatcggttttggttacaatcacatggtcgcagacggtgcttccatctggaatttcttcaggacttggtcaaagatttgctctaatggtcaacgggagaatcttcaacctcttgctctcaaaggattgttcgtggacgggatggatttcccgatacatattccggtttcagacacagagacgtcaccaccaagccgtgagctttctccgacattcaaagagagagtttttcacttcacaaagaggaatatctcaga

SEQ ID NO: 95610 - DNA, 717 bp, Arabidopsis thaliana columbia
attctcaagtcttctctttcatttttttgttgtcgccgtctggttttactttttttctttcttcaaaatcattcattctttaacatcaagcaagaatcaaattctgggcatactcaaattcttcatctttttaatatatatttttgccaagaacaagtcttttactttatctctgcagtttttgtttgctcctttgtgcatttggtgatgattcaatcaatgattgtctcttacctttgatctaatcgtttccgcaaaattctcttctcgttttctctgatttcaagctcaacaatctcaaaataatcaatttttggtagtgtgttaaatctgagaacggtttttgggttttgggtataaagcttgttactttgatctttattttgtgaattcgaagtggaaatggaatcgttaccatctccatttggcgatccagctcctaatttatccaattcggagctccgagaaactgcttacgagatcttagtcgctgcttgccgtagcactggaagtcgtccgctgacttacatccctcaatcgccgaaatctgatcggagcaacggtctgacgacggcgtcgttatctccgtctccgtcgcttcatagatctctgacttctacagctgcgagtaaggtgaagaaggcgttagggatgaagaaacgaatcggagacggagacggaggagcgggagaatcgtcgagtcaaccggatcggagc

SEQ ID NO: 95611 - DNA, 664 bp, Arabidopsis thaliana columbia
  unsure (1)..(664): unsure at all n locations
gcgaaaatgctgactctactcttcttctctctcggagcgcttcttcttatcgctctgctctgcaaatttgcattcgccgatggagattttcccttgatttcgaagaagcatgtgaagcgtgaggccatacaaggcaaggtcgtctggatcacaggggctagccgtggaattggtgaaattcttgctaaacagtttgcaagtttagatgccaagcttattctctctgctaggaataaagctgaactggatcgggttaagagtgagcttaaaggtaaatttgcaccagaagatgtcaaggttttccctttagatttagctagcggcgaagagtcactcaaacatgttgtagagcaagcagtgtcgcttttccctggagctggtgttgattatttggttcacaatgctgcctttaagcgtccgaaatccaaggcatcggatgcaagtaaggaaactntcaagactacattcgatgttaatgtctttgggacgntatctctgacaaagttggtagctcctcatatgctaaaacaaaggngggggtcattttnttgtgataagcagttctncagggaaggtaccatcacctgggncaggntttatnttctgctttaaaancatgctcttnatgggntcnttccccaggttggttcctgggtntttnnag

SEQ ID NO: 95612 - DNA, 1280 bp, Arabidopsis thaliana columbia
  unsure (1)..(1280): unsure at all n locations
atgannnnnnnnnnnnnnnnnnnnnnnnnnnnnnnnnnnnnnnnnnnnnnnnnnnnnnnnnnnnnnnnnnnnnnnnnnnnnncccaccaagtaacaaaaatggctatctcaaagcttattcctactcttgtgctctttgttttgttctcttttgatgttagtgttgctcatccaggtctaggatttggatggggaagtaatagtcccattggaggatctttttactcaaatctttacccacaattttaccagttctcttgtccacaagctgatgagattgttatgacggtgctcgaaaaagccatagctaaagaaccaagaatggcagcatctttactcagacttcacttccacgactgcttcgttcagggctgtgatgcatcaatcttgttggatgatagtgcaaccataagaagtgaaaagaatgctggaccaaacaagaactccgttagagggtttcaagtaatcgacgagatcaaagccaaacttgagcaagcttgtcctcaaactgtctcctgcgccgacattctagctctagctgctcgtggctcaactatactgagtggtggaccatcatgggagcttccactagggaggagagactcgaggaccgctagccttaatggcgcaaacacgaacattcctgcacctaactcaactattcaaaatctcttaaccatgttccaacgtaaaggtttgaacgaagaagaccttgtttccctatcaggaggacatacgattggagtagcgaggtgcacaacgtttaaacaaagactatacaatcaaaacggtaataaccaaccagacgagacgctagagaggtcttactactatggtctcaggtcaatttgtccaccaacaggcggtgacaacaatatttcacctctagacttagcctctcctgcaagattcgacaacacatacttcaagctccttctatggggcaaaggcttattgacatcagatgaagtgcttctcactggcaatgtaggcaagactggtgcattagtgaaagcttatgccgaagacgagagacttttcttccaacaattcgcaaagtcgatggttaacatgggaaacattcagcctcttactggttttaatggtgagatcaggaagagttgtcatgtgattaactaaagaaactgtgtgtttttgcattattattgtattaaggggtgattaagaataagtcgtgttatgtttttcgatatgttagtgatctaattaacgtctttgaatggnnnnnnnnnnnnnnnnnnnnnnnnnnnnnnnnnnnn

SEQ ID NO: 95613 - DNA, 1045 bp, Arabidopsis thaliana columbia
  unsure (1)..(1045): unsure at all n locations
tttaagaagcatccctaggtatctactcgctgagaccgtgggacaatgctcacttaagatcacatattcagctcatacagatctgactgtcaaatttcagagtcatcggagcagggacgatactaatccttaccttcccgttgctccatcagccattgatagtactggtcaggtggctgtgggtgtagacgggaagaagatggaacctgaaagtaatgttcttctcgcatctattgaaaacatgcagtatgcagtaaccttggatgttttacacatggtttttgcggcttttggggaagttcaaaagattgcaatgtttgacaagaatggtggggtacaggcactgatccaatactcagatgttcaaacggctgtggtggcgaaggaagcattggaaggacattgtatctacgatggtggtttttgtaagctccacattacttattcacgccacaccgacctcagcataaaggtgaacaacgatagaagcagagactacacaatgcccaacccaccggttccaatgcctcaacaacccgttcagaatccatacgccggcaatccacagcaataccacgcagcaggtgggagccaccaccagcagcagcagcagccacaaggtggatgggtccaaccaggagggcaaggctctatgggaatgggtggtggtggtcacaatcattacatggcaccaccatcttcaagctcaatgcatcaaggtccgggtggtcatatgcctccacagcattatggtggtcctggtccaatgcattagagagagaaaagaaagtccctcaaaagtcgaagacaaagaaagatgtttaatctctctctttatttctcttagctctgttttttaaagtttggaacacttgtacttgtgtccaaaagatgtttttttaaggataaaaccatttgagaaatgtattagaagctcttgatttctctaaaaaaaaaaaaaaaaagnnnnnnnnnnnnnnnnnnnnnnnnnnnnnnnnnnnnnnnnnnnnnnnnnnnnnnnnnnnnnnnnnnnnnnnnnngcaat

SEQ ID NO: 95614 - DNA, 536 bp, Arabidopsis thaliana columbia
  unsure (1)..(536): unsure at all n locations
cnnnnnnnnnnnnnnnnnnnnnnnnnnnnnnnnnnnnnnnnnnnnnnnnnnnnnnnnnnnnnnnnnnnnnnnccacgcgtccggaagaaacctgtttccacctcggtaaacaactctttggttgagctgagtaattacaaccagaaaagagaagagtttgaccctgaatatgacaatgatgctgagcaactcttggcggagatggagttcaaagagaacgatactcctgaagaacatgaactgaagctgcgtgtgttgcgtatctattcaaaaaggcttgatgagaggaaacgtagaaaagaattcataatagaaagaaacctgttgtacccaaatccctttgagaaggacctgtctcaggaggagaaagtacaatgccgacgtttggacgtttttatgcgtttcattcacaagaggagcacgacgagctactccgtaatgttgtaagcgagtaccgcatggtgaaacggctcaaagatctcagggaagctcaagtggcaaggtgtcgttcaacggctgaagcagagaggtatctg

SEQ ID NO: 95615 - DNA, 497 bp, Arabidopsis thaliana columbia
tgattctctccggcgagattccgaccgaaaacaaggtaaagtgttgttcacgattgcgaagcgagttacgggggtggtgactcgtccgagtctaaaccagcagttgcagcaagagcgagggataagagtgaaggtgttctccaatgatttagacaaggctactgacgatttctgcagaagaagatgcaatcgagtggaatggagaggctgatcaaagggactcagactcatcacattaagaattcggagaagaaggttctcgtctaggaagaatcttgtacgcagaatcaaatccattgactttgctcgaaaactccaatcaatcctcatcaagaaagtcagaggtttatgagagctgaggtgaagcaagagtgctgctatgttgatcagtactagtatctgtgtgtgatataacacagttttacattttgaacttttgttgagttgatcctatgtggaattggaattttggttttgaaaaaaaatacttattatcc

SEQ ID NO: 95616 - DNA, 1083 bp, Arabidopsis thaliana columbia
taggtccactatagaagagctatgacgtcgcatgcacgcgtacgtaagctcggaattcggctcgagcttagctacaaaagaacagtcgccggcaaaagtctcagcctttttcctctccgccgttcacagttcaccggcatttctctcttctttctttttctccgactagatttccttgtctctttggtttcttggcgatgggagacgagaagccggtgattgttatggccaatcgagaaagagatcgagagcttctgattcccgtcgctgattccggcgacaaagacgacggttcttcttcgaagccttcttcttcttcctctgcttcttcttcttcgcatcaatccagccacgagactttaagcttgttcattaggggctgggcgtcaaagaagttcatgacaggctgtgttatcctacttcctattgcaattactttctatataacatggtggtttattcactttgtcgatggattcttctctccaatatatgcactacttggaatcaacggatttgggttcggttttttgacttccattgcattcatcttcttggttggggtgttcatgtcttcgtggttgggggcatcggttctgaacttgggagagtggtttatcaagcggatgccatttgttcgtcacatctacaacgcctccaagcaaatcagcactgccatatcgcctgatcaaaatacacaagctttcgaggaggttgcaatcatcaggcagccccgtgtaggtgaatatgcatttggcttcattacatcaactgttgttctccagaactacccaaccgaggaggaactttgctgtgtatacgttcccacgaaccacctttacattggagatatactacttgtcaacagtaatgacgttatcaggccaaacctctctgtccgggaaggaattgagattgttgtttccggtggaatgtcaatgccgcagattctatcgactcttgataaacctttggcctcgattggaaatgaatcttaaagtgactattcaaaaacctttggccgatcgataggaaaaaaacaaaaatcagaagagacgtttcacaaaatctgagcgaatagag

SEQ ID NO: 95617 - DNA, 602 bp, Arabidopsis thaliana columbia
  unsure (1)..(602): unsure at all n locations
aggaccaatagttaccgatgatgagnctcttatcactatcactttaacccctcagaaatgggctggagaagatatactctctaagtctccattgctcgaagagcattgtgatgctaatctgacatcagacactactcttggtgatgaaaaaccaataattacggatgatgagtcttggatcagtaacagtttaacctctcagaaatcttctgctggaaactcttgggttttttcaggcgaggatagtgtagaagaagttaaagttaaatcgtgcagagatgttgtttccacagaatctcaatctactcaaagttctatggaaagttttgggactgtagtaaaatgtaatgatggccccgttctagctgcacttgggtgttttagggataatgattcaagtcttaatccactcgtcaccaaggttccagatgaaaacatgagatcctctaatgcggataatccagatgatgtgattaataattgcaaatctgacgttactccattggataccaaggacattgcatttcaaaaagaaccctcgtatgttaatgacacagtgcgtgttaggatcatggctgaactgtgcggcatggaatctcgag

SEQ ID NO: 95618 - DNA, 775 bp, Arabidopsis thaliana columbia
ggcgtcttcttcttcatcatcaatctctcaagacatgctctcttttttctctaaccagatcgaccggcaaaaagatgtgtctaatgaggaaaaaaccctaaccaatctcgaaaaatctgacggttcacaattccctggcgatgactaccgtccgtccgatcggaaaaactggatggctggtcttacgttggagaaactaactctaaacaagatcgtgtggccaggaacgcatgattcagccaccaacgatatcggaatacctctgatctctcgtcctttagctgaatgccaatcgctctctatctacgagcagctcgtcctcgggacacgtgtcctcgatatccgtgtgcaagaggatcgccaaatctgccacgggattctgacgtcatacgaaattgatgttgtcattgatgacgttatcagattcttgtcggagactcactcggagattgtaatcctggagataaggactgagtttggacacaaagatcctccggggttcgagacttacttggcagacaagttaggtcaattcttgatacatcaagatgatagcttgttcaacaagccggtatcagagattttgccgaaaagggttatatgcatctggaaacctagagagtctccaaagccgagccgtggtggaattctctggaactcagattatctaaaagataattggatcgatacggatcttccatggacgaaatttcagagcaatttgaagcatctgagtgagcagcagccgacatcttctagaaaattcttttaccgg

SEQ ID NO: 95619 - DNA, 942 bp, Arabidopsis thaliana columbia
  unsure (1)..(942): unsure at all n locations
atgatttgccnnnnnnnnnnnnnnnnnnnnnnnnnnnnnnnnnnnnnnnnnnnnnnnnnnnnnnnnnnnnnnnnnnnnnnccacgcgtccgctttctttgcttctctaacaaaccaacttcagcgacaagataacaaaacgctttcacacgatcggataaaatggcggagaagagctttaagtacatcatcctcggcggcggcgtctctgccggatacgcagctaaggagtttgccaatcaaggggttcaaccaggagaattggctgttatctcgaaagaggcggtggctccatatgaacgccctgcacttagcaaggggtatttgtttcctgaaggggctgctagacttccaggtttccattgctgtgttggtagtggtggagaaaaactgcttcctgaatcctacaagcagaaaggaattgagttgatactaagcacagaaatagtgaaagctgatctctctgccaagagtcttgtcagtgcaactggggatgtcttcaagtatcagacgctcataattgcaactggttctactgttctcagattgactgattttggagtaaaaggtgcagactctaagaatatcctctatctgagagagattgatgatgccgacaaattggttgaagcaattaaagctaagaaaggtggaaaggctgtagttgttggcggaggttacattggtcttgagcttagtgcaagttttaagggatcaacaatttagatgtcactatggttttcccctgaaccttggtgcaatgcctaggctttttcanccgccgntatttgcttgcttttctatggngcctttctttttcaaaccaaggggggtgaaggtcccttaaaagggaccagtgggaatcttgggtcccaagntnagccaaattggggggntaagggaagtcacctcaaggttnggggggcatttganncgcnntttt

SEQ ID NO: 95620 - DNA, 849 bp, Arabidopsis thaliana columbia
cctgttttggggggggacaataaaaacggcccttctatgggcgtttcggttgcctggtaaaagggggagcttagccacggcaaggttcggttttcccagccaaaaaaacaaggaccagttttttaggctgcaagcggtcaagaaaaatactggtgtccaattttttgatattgaaaaataattaacaaaacgggtcaacattttttaagggacattcctcaaatgtacattctgtttgttggagcccaaacggagagttggtggcgtctgttagtgaagacgctgtaaaattatggtcactggagttcaggagattgcatccacgagcttagcaacagtggaaacaagttccactctgttgtttttcaccctagctatcccgatctcttggtcatcggtggctatcaggctatagagctgtggaacacaatggagaacaaatgtatgacggtagcaggccacgagtgtgtgatctctgccttggctcagtcgccttcgacgggagtggttgcgtctgcaagtcatgacaaatccgtaaagatttggaagtagaaatatttctatgttcgtctgaaaagaaaaggaaaaaagaagaaatagcagagagctcaggaactttttttgggtctaattttttttttttttttaatgttacattaataagttggttttttttttaaattgggtttgtttatgtcaaaagcaaagagacttgtgatatttccaatctttgtctaatgatcctacttctttacttcgttgttttgatctctagtgtttagagtgaaagagagatgtaagtaatttctctagaccaactacattgttgaataataatttcttataatc

SEQ ID NO: 95621 - DNA, 480 bp, Arabidopsis thaliana columbia
atcaagagattagtaagacctaactcttaacgaacttttagataaaagcttataactgagagagacatagatcgacaaaagtctctataccttcttgtaacgtggtggttaattaatcatggccgatcaaatctccggcgagaagccggccggagttaatagattcgctcttcaatgtgctatcgtcgcctccatcgtctccatcatctttggttacgatactggtgttatgagtggagcgatggtgtttatagaagaagatttgaagacaaacgacgttcaaatagaagttctcactggaattctcaacctttgtgcccttgtcggatcattgctcgccggaagaacgtcggacataatcggacggcgttacacaatcgtcttggcctcaatactattcatgttaggctcaatattgatgggttggggtccgaattatccggttcttctatccggtagatgcaccgcttgactcggagt

SEQ ID NO: 95622 - DNA, 1339 bp, Arabidopsis thaliana columbia
  unsure (1)..(1339): unsure at all n locations
tttcatttcatcatcatggaccacaaaatgtcaatgtatttgtttgtgtcttacctagcaatctttactcttttcttcaaaggctttgtctcctcgtttccttcgggatataacaatggttacaacaatggtcacggacatggactaactagcaatctcaactatcgattctatgaccggtcttgtccgcgtcttcaaacgattgttaagtccggagtttggagagcttttaaagatgattctcgaatcgctgcatctcttcttcgactccatttccacgattgttttgtcaatggatgtgatggatctatacttctgaacgattcagaggatttcaaaggagagaagaacgctcagccaaaccgaaactcagtccgtggattcgaagtcattgaagacattaaatctgatatcgaaagttcttgtcccttaacagtttcatgcgctgacatagttgctctcgcggctagagaagctgtcgtcctcactggaggaccgttttggcccgtgcctttgggacgaagggactcattaacggcgagtgagcaagcggcgaatacaaatctgccatctccgtttgaggcgttggagaatataacagccaagttcgcgacccttggactcgacctcaaggacgttgttgtcctctcaggagcacatactataggatttgctcaatgtttcgtgatcaagcatagactcttcaacttcaagggctcaggccagcctgacccaaacctagccgcttcctcagcacttctctctaagctaaaggacacgtgtcctaacgtggactcctcagactctaagctcgctgctcttgacgcagctagctcagtcaagtttgacaatgcttactacgtgaacttaatgaacaacataggactgttggattctgatcaaaccctaatgacagatcctacggctgccgccttggtgaagtcgtacagcgagaatccgtacttgttctcgagggatttcgcagtttcaatggttaaaatggggaatatcggagttcagaccggaagtgatggagtaattcgaggaaaatgtggatttccaggttaagttatatatagactcttcacaaaatccaaatcagtctattatatatctagagctaatctagctttaatgaggaatcaaataaaccaaagtctatgaataaaatatgttttatatatatggtgtaaaagcgtccttatgtatcaatatatatatatatggatcccataaacaaaaatacttggacttgtatgtgtgttacgtttgtgtgtaatggaaaatgtatttgtctttgtnnnnnnnnnnnnnnnnnnnnnnnnnnnnnnnnnnnnnn

SEQ ID NO: 95623 - DNA, 497 bp, Arabidopsis thaliana columbia
  unsure (1)..(497): unsure at all n locations
cnnnnnnnnnnnnnnnnnnnnnnnnnnnnnnnnnnnnnnnnnnnnnnnnnnnnnnnnnnnnnnnnnnnnnnnccacgcgtccgcaattttttctaaacaacaaatccagcatcgagaaaagtttctatttttggattttccaaatattaacagttatagcttcgtgacttcaagaaatatccatttcaagattatttaacctttttttgtctagcaagtcatcgtattctactttggtgtgggcaaatgggaagttcatgtttacctccagggttccggtttcatcctacggatgaagaactcatcgaatattacttgaaaagaaaagtcgaaggtctcgagattgagcttgaagtcattcccggcatcgatctttatagttccgatccttgggagttaccagacaagtcgtttctcccaaaccgggacatggaatgggacttcttgtgctcaagggacaaaaaatatcctaggggttttcgcacaaagcgaggaac

SEQ ID NO: 95624 - DNA, 761 bp, Arabidopsis thaliana columbia
aaaacccagtattaaaaaaaaggaattgaagtaatgcccaccgaaataaaaaaaaagcctgaagggaaaaagtttatcccaatggccagggcggctggtgttttttgcgttccttgccatggtccaggtccctcgggtgatcaatatttggagccatttgtaatcccagatcccgaagtacgttttatgccacaagctagagaagacgagtgtctaatattggccagtgatggactttgggacgtaatgagtaaccaagaagcttgcgattttgcgaggagccggatcttggcttggcacaagaagaatggagcattgcctttagctgagagaggtgtagtacaagaccaagcgtgtcaagctgcggctgaatatctctccaaactcgctattcaaatgggaagcaaagacaatatctcaatcatagtgatcgacttgaaagctcaaagaaagttcaagaccagatcttgaaacagtgtatgctcgagctcttacactattataattttattatttctcatttattgaaaaaatttccgcaagtttacataaaaataagaagtgaaatgttggggggaagaagaattaagaccttgatgcatagctgaagtccattcctttttctcatggacttgaatgtgtatgtttgttatgtataagaagaatagagaagaaatgtttttactttggagtcttgtaggtggatatgttgttgtaatattggagatgtggcttcaggacttgttaagtgagggttgttt

SEQ ID NO: 95625 - DNA, 533 bp, Arabidopsis thaliana columbia
gtccggaagtcttcaaatagcacagaagcagagacatatagcgggaacgcgtttagtcacagcttgctggctcctttagcttttctctctacacttgcttctctctctctctcctttgggttatccttcttgagatctgtgcttgcgtttcttcttcattcgacgacactttatctcgggagatttcagatttgtcgatttgttcagcaatggcgccaccgattgaggtttctaccaaaagctacgttgagaaacatgtttcacttcctactcttaatgagaggatactttcgtccatgagtcacagatcagtagctgcacacccatggcatgatctcgagataggacctgaagccccaattatcttcaattgtgtggttgagataggaaaagggagcaaggtgaaatatgaactcgacaaaactacgggtctcattaaggtcgaccgtattctttactcatctgtcgtatacccacacaactatggggttcattccgcgtacccttttgtgagggcagtgacccctaattgg

SEQ ID NO: 95626 - DNA, 725 bp, Arabidopsis thaliana columbia
aaggcggtggtgagtactggtgagagtgtgtgtgaaaaaacaaaaaaaacaattcagctgggaaaatgagttccggaatcggaagcttagtgaaggtcatctttaagatcttcgatgtcatcgctggacctgtgattagcttggtttatcctctatatgcatcagtgagggcaatagagtcgaggagtcatggagacgaacaagcaattggttgacgtattgggctctctattcacttatcaaacctctttgagcctcacttttttcagactcctcgaatggatcccattatatccatacgcaaagctagccctaactagttggttggtcttaccgggcatgaacggtgctgcttatctctacgagcactatgtgcgttcattccttttaagcccacatactgttaacgtatggtacgtgccagccaagaaggatgacgacttgggagcaaccgctggcaaatttactccagtaaatgattccggtgcgcctcaggaaaagattgtgagctcggtggatacatcagcaaaatatgttggtcattcggcttttgatgacgcctatatctactaggctagtagctagtaaactacttccggctagttgtagctgagcatcctgatcttagtgtatcgaaatacttgttttctcctctttttctttgttttcgggttttatgaagtttgttgttactgctaaggaattttaatatcaaaataaatgtt

SEQ ID NO: 95627 - DNA, 831 bp, Arabidopsis thaliana columbia
tatcgaaaaggggatcactagaaataaatcagtcgatgtggtttacattaaaatacagaggccgatagtaattctccagggaattatgcttaaaacaaatgttcaatagaaaagaaaaaaagaagtgatttttagcctctcattgtgtgaaggaagaaacaaaaactgttaaaaagaaaccacatcgaggtttagagtcagagtcgttctaagacttacgtggccttcctcttcttccaccggtcttcacgggtggagcctttccgttactggtgcggccgccgcgtccacgtgctccacgaccacgtcctctaccacgagcactctgtttcttgccattggcctcttctccatcttcactgtagtcactgtctgcgtcactaccttgaacttccttctccttgtcgctgttatcttcatcactgtcttgttcagaatcagaggaagcttttgatgctttcctctttttagaagcacctcttttggtaactgcttgttgctttggtgccaaagtttcttccttgacttcttctacactctcttctaatgatcctttcccgtcatagacctcgagctgctcaagcctatcagcgatatctgttctgtcaacaatgaccattgaatggcaaaaaccgcatgccacacccattacatgcattccctcgagcatatccaccttcttaggtgctgcagaggatttttgaccgttggggccataaccaagttctccatactgagcatgaccccaacttatgcaagaactgtcggcaccaacaaaatgatgcatgcttcctgaatccatccaacgcaagttccaaccacttaaatcca

SEQ ID NO: 95628 - DNA, 455 bp, Arabidopsis thaliana columbia
tgcgccaaaagtgagactgatgctttccgaccgggcacttatcgcatagaagaggttatgggagctgtcagtggtgttaaagttacctttattgatacccctggttttcacccactgtcatcttctagcacaagaaaaaaccgaaagattctcctatctattaagagatatgttaagaagcgtccacctgatgtagttctttacttggaccgccttgatatgatcgacatgcgatacagtgatttctccctcctgcagcttataactgaaatctttggtgcagctatatggttaaacacgatacttgtaatgacgcattccgcagctactacagaaggacgtaatggacaatctgtgaactatgagtcatatgtgggccagcgcaatggatgtggttcaacattatatacatcaggctgtgtctgatacaaaactagaaaacccttgtctgtagt

SEQ ID NO: 95629 - DNA, 609 bp, Arabidopsis thaliana columbia
  unsure (1)..(609): unsure at all n locations
gccnnnnnnnnnnnnnnnnnnnnnnnnnnnnnnnnnnnnnnnnnnnnnnnnnnnnnnnnnntttctctgtaattccacgcggccgctaccttccatctctctcacccactctcctcggaaaccacagcgacggacggacggacggacgataaaacttttgcctctaatttgctcctacaaatctggaatcagccggagcgaatctcgaagcttatgatctcgacttgctgaagaggctgggaatggctggtaaagaggagactgatgtatctgcacaagggtctttaaccagggaggccactgagatatggaggagtgagttggaatctcgccggtttcaggtagatagtttagaagctgaacttgtggatgtcaaggcttaccttgagtttggctcagaagaagatgccagaaaggagttaggagttctttcgggtagggtcagatcgactgcaactatgttgcgttatttgagatcaaaagctagagtcttggccattcctgatgatctagcaaatgtgtcatgcggtgtggaacagattgaagaactgaaaggattgaaccttgttgagaaagatggtggttcattttcttttgacggggctagga

SEQ ID NO: 95630 - DNA, 382 bp, Arabidopsis thaliana columbia
gcggttctctactagatcccatccgaaaaatcctacttgcttcccaaagttgcaatctttgaggatcgttgacatagccataaatatcctctggtggatgtgagtaaggttgcattgattccaaggacatggcgatggggaagtattcccgtgtagacgggaagaaatcatcgagctatggtttaaccattaccattgttctgttactttccctctgtttagttgggacatggatgttcatgtcttcttggtcagcccctgctgattctgctggctactcctcaactgatactgctaaagatgtttctaagaatgacttgagaaaagaagaaggcgatcgagatccgaagaacttttctgatgaaaagaatgaagaaaatga

SEQ ID NO: 95631 - DNA, 414 bp, Arabidopsis thaliana columbia
  unsure (1)..(414): unsure at all n locations
gcgtccgactgtggtttacgagcaggaggagtctgtttctcacggcgggggcaagcacaggatccttgcagagcttgcccgcgttgaacaggaagtcgctttcttggagaaagagttgaaggaggtcgagaacacagatattgtatcaaccgtgtgtgaggagctgctatctgtcatcgagaaaggacccgatcctctgttgccactaaccaatggacctttgaacttaggatgggaccgggggtttgaaggaccaaatggaggagaaggctgcagatgcttaatactttgattcgctagacagaatcttgttgaaagaagctgaaatgtgcatagtgatatttgggggctaatagngtaatagcctaatnaggaagtngggacaatctttaaggccgtaagggtgcccttttt

SEQ ID NO: 95632 - DNA, 789 bp, Arabidopsis thaliana columbia
  unsure (1)..(789): unsure at all n locations
gggaaggttgtacccctggcaggtcccggcccgaatttcccggttcaaccaagccttccggaaaagaccaacagaagggggacgacaattcaaacttgtacggactaagaccagactctctctgacgttgtcagatctgcgacctgctagcgagaggatgcgagaggaaactgtggtttacgagcaggaggagtctgtttctcacggcgggggcaagcacaggatccttgcagagcttgcccgcgttgaacaggaagtcgctttcctggagaaagagttgaaggaggtcgagaacacagatattgtatcaaccgtgtgtgaggagctgctatctgtcatcgagaaaggacccgatcctctgttgccactaaccaatggacctttgaacttaggatgggaccggtggtttgaaggaccaaatggaggagaaggctgcagatgcttaatactttgattcgctagacagagtaatgtgttacatatactagtttcttgctaggatatcattttacatgggatccaaaatgggggctgtagcagagaaaaagcgtacagattaatgagcattggaattgcatagaacggcttagtcgcacctacgtaaacagtattatatgtatatgtaatgtatgggatccggatctgacatacgagtaatggagtttcaggcttcccgctcnnnnnnnnnnnnnnnnnnnnnnnnnnnnnnnnnnnnnnnnnnnnnnnnnnnnnnnnnnnnnnnnnnnnnnnnnnnnnnnnnnnnnnnnnnnnnnnnnnnnnnnnnnnnnn

SEQ ID NO: 95633 - DNA, 551 bp, Arabidopsis thaliana columbia
  unsure (1)..(551): unsure at all n locations
gaccnttttgggaanattaaggngccggaccccngtttttnncaccgttgtgngngntntttcttcatcgggaaggccccgaccctctgttccnctaccaatggcccttggacctaggatgggaccngtggtttgaaggcccaaatgggggagaaggctgcagatgcttaatactttgattcgctagacagaatcttgttgaaagaagctgaaatgtgcatagtgatatttgggggctaatagagtaatagctaatgaggaagtgggtacaatcttgaagaccgttaagtgtgtctctcttttttctttttagataacttttggccacatccgccctccatgatacacacacgctagtttcgaggatcagaatacatacatacctatgtttattatatagatagaacgataatggaacacagagcacatgcctcatctgttgtctttttattattacttattactcttctcctccacttctgtattattacagtctgttaaagtagatatccccttttgtttttttcaaaaaaaaaaaaaaagggcggccg

SEQ ID NO: 95634 - DNA, 506 bp, Arabidopsis thaliana columbia
  unsure (1)..(506): unsure at all n locations
ccgttnccaccctcttcccccaggatttccatcgttncccacgttancccccccgacatttttggntganaattcccccatnttcccncggtaatctgtccggcttcccacaatcctggtgggaagagcagaaaagacgaaagatccggattatccggtggagacggtgactgagatagctaccggcggtgcccagagatttgggctacggcgacggccacaggcggatttgaccgttggtggtgagaggatcagacggagcaagagtgagctggagggtatggcttcaatagcagccgtcggtgcgtgacgtgatcgagtgggcggatcgtggccgttggataattttaacgtctagtggttgggattgtacaggtggcgttaaaatgttgataatgcatatgtgaatataaataatagtggtggtggacaatattcatcccatgtggacaccaaatgtgaatacgcaatcagatcatattatgtatgatgattatgatttcaat

SEQ ID NO: 95635 - DNA, 549 bp, Arabidopsis thaliana columbia
ctgtaattataataatctccgttatcactgccgggtaaatatgtcggagattcgcacagattctcagtgtgaagagtagaaaaacatcgaagatgcggattatgcggtggaggatggttattaaaatagataagccggtgcaaaaattttgggctacgtaaaggctcacagtgggatttcaggttggtggtaaaaggatcagactggagtaagagtgagctggagggtatggtttcaatagcacccgtcggtgcgtgacgtgatcgagtgggcggtttgtggccgttggataattttaacgtctagtggttgggattgtacaggtggcgtgaaaatgttgataatgcatatgtgaatataaataatagtggtggtggacaatattcatcccatgtggacaccagaatgtgaatacgcaatcagataatattatgtatgatgattatgatttcaagggaaaacacaaaagggcgaccgctctagaggatccaagcttacgtacgcggcgttcgacgtcatagtcttctaagtgtcacctaatagaaatcg

SEQ ID NO: 95636 - DNA, 312 bp, Arabidopsis thaliana columbia
gtcgaccacccgtccgctcaagcgaccggaatcgcagagcaaactatagactacagaaaacacttccgtcaccggcgaatttactcaggcggtaatctcaccggacatatctcagaaaagagggtttttttattttctggaggtaataacattatcaacaggaatttcgagaggaacgatgacgacgagcctgagcgaaagcgtcctgctcttgctagtgtgattgttgaggctctgaaacttgacagtttgcacaagctttgctcgtctttgcaacctatcctccgccgagtctgtctagtgaggaggtgg

SEQ ID NO: 95637 - DNA, 861 bp, Arabidopsis thaliana columbia
accaaaactgcgacgactcaaaacaaagagatactatactatcatcaaaacgattagcttgatatcgaattcgcggtcgcttccaattcaacgccggtggcttttaatcggcttttacactttctgatttctcggtctccgattaactgatctaggttttttttggggaggagaatgcaaaggtagatgatggatagtggtaataataatatgaatagagccaagaggaatttggatgggaacgatgatgatcagcctgagcgaaaacgccctgcttttgctagtgtgattgttgaggctctgaaagtagatagtttgcagaagctttgctcctctttggaacctattctccgccgagttgtcagcgaggaactggaacgtgctttagcaaaactaggccctgctaggcttactggaagttcgggctcttctccaaagcgaattgaaggtccggatggtcggaagttacagttgcacttcaaatctaggttatctctcccgttattcactggggggaaagtataaggagagcaaggtgctgtgattcatgttgtcttgattgatgcaaacactggccgtgctgtgggatatggtccagaggctttggcaaagcttcacattgttgtgcttgagggtgactttaacactgaatatgatgaagactggacacaataaagaatttgaaaggcccatgttggtaaaaaaaccgtttccaggaaaagaagaaccggttggctggactgggaagaaagtggtcttgttttaccaccttcaaaggggaaaaggggggtttgggaaaaccttttgggggcccgaagccttagattctttccacccgggaattaaattcttcgagagttt

SEQ ID NO: 95638 - DNA, 1203 bp, Arabidopsis thaliana columbia
tctcatacgactcactttagggaaagctgctacgcctgcaggtaccggtcccgaattcccgggtcgacccactcgctccgtcttttaaacaagctatctagataatgaaaacacaaaccaaagtgatgggaggacatgtcttgcttactgttttcactctttgtatgctttgttcaggggttagggcacagctaagccctgacatttatgctaaatcgtgccccaatctagttcaaattgtccgtaaacaagttgccatcgccctgaaggccgagatacggatggctgcttctctcattcgtcttcatttccacgactgctttgttaatgggtgtgatgcgtcgttattgttggatggagctgacagcgagaaactcgcgatcccaaacattaactctgctagaggatttgaagtaattgatacaatcaaagccgctgtggaaaacgcatgtcctggtgttgtttcttgtgctgatatcctcactttggccgctcgtgactccgttgtattgagtggagggcctgggtggagagtggcattaggaagaaaagatggattggtggcaaatcagaacagtgcaaacaatctaccatctccttttgaacctttagacgccattatcgccaaatttgtagccgtaaaccttaacatcaccgacgtcgtagctttatcaggagctcacacctttggacaagcgaagtgtgctgtcttcagcaaccgtctgttcaactttaccggcgcgggaaatcccgacgcaacacttgagacatcactcttgtctaatctgcaaacagtttgtccgctcggaggaaatagtaacataacagcacctcttgacaggagcactacggacaccttcgacaacaattatttcaagaacctgcttgaaggaaaaggtcttttgagttctgatcagattctgttctcgagtgacttagccgtgaacaccacaaagaaactagtggaggcttatagtcggagccagagcttgtttttcagggacttcacatgtgcgatgatcagaatgggaaacatttcgaatggagctagtggggaggttaggacaaactgcagggttatcaataattagcatgtgtgtgtgttttcgagtttatgtaatgtttgggagttgatcggtctcgtgtgtatcagaatgatcacgtgtgtaataataagaattaatggggtttgttggtttgcct

SEQ ID NO: 95639 - DNA, 555 bp, Arabidopsis thaliana columbia
  unsure (1)..(555): unsure at all n locations
aacggcgtcgggttagtccgacggaggaaccatgtctttgcgtccacttatgtccgcctttacaggaaaattctcggttaagtggtcggctacgcttgctacattgggacacctggaaaaggtattttggctggtgatgagttcactggtaccaatggaaagcgtgttgcgagcattaacgtcgagaacgttgagaccaacagacgttacctccgtgagcttcttttcaccgcccctggtgctcttccatgcctcagcggtgtcatccttttcgaagagactctgtaccaaaagagttccgatggtaagcttttcgttgatatcttgaaggaaggaggagttctttccaggtatcaaggtttgacaagggtaccntttgaactagcttgaacccgacgggtgaagaccnnccactcaaaggtctttaacgggtcttcgggtgacaagatttcaaaggangtacttacgggaggctttggtgcctcgttttnggccaaagttggnggttgcaangtcnccttanaaaatnccggnggnggaaccggggccnatttt

SEQ ID NO: 95640 - DNA, 572 bp, Arabidopsis thaliana columbia
  unsure (1)..(572): unsure at all n locations
agggaccnggcctgnattncctgggctgcccactgtgtccgggtctctggtgacagactgcaagaatgtactacagaagcttggtgctcccgtttcgccaagtggcgtgcagtcctcaagatcggagagaacgagccatctgagcattccattcatgagaacgcttacggattagctagatacgctgttatctgccaagagaacggtcttgtaccaattgtcgagcctganatcctagtcgatggatcccatgacatccagaagtgtgctgccgtgactnagcgtgtccttgcagcttgctacaaggctcttagcgaccaccacgtcttgctcgaggggtacactctttgaagcctaacaatggttactnccggttctgacacagccccaaggtttccaccctggaagtaatcgggtgagcaaaacggtccgtgcccttnaggaaccgtccaagaagtttttcagcaattgttttnttaattttgnggcanancnaggaanaagntnccagganttttaaccgcatnanccantttaaggccaaaaagccatgggaattnttttttaatttg

SEQ ID NO: 95641 - DNA, 489 bp, Arabidopsis thaliana columbia
  unsure (1)..(489): unsure at all n locations
tccgcatcttttttnatttctntctgatttctcgatctctccgtccaactatgtctgccttcaccagcaaattcgccgatgagttgatcgccaacgctgcctacatcggcacacctggaaaaggtattttggctgctgatgagtccactggtaccatcggaaagcgtcttgcgagcatcaacgtcgagaacgttgagaccaacagacgtaacctccgtnagcttctcttcaccgcccctggtgcttcttccatgcctcagcggtgtcatcctttttcgaagagactctgtaccaaaagaagttcccattggtaaagcttttcggttgatattcttgaaagggaacggaggggtttcttccccggtttcaaagggttgacaaaggggtcccgtttgaaactagctggaacccgccgggttnagacccaccacttaaaggtcttttaanggtnttgggtgaaagntnnaaagaggttcttcgaaagctggg

SEQ ID NO: 95642 - DNA, 530 bp, Arabidopsis thaliana columbia
  unsure (1)..(530): unsure at all n locations
atgatcttnnnnnnnnnnnnnnnnnnnnnnnnnnnnnnnnnnnnnnnnnnnnnnnnnnnnnnnnnnnnnnnnnnnnnnnnnnnccacgcgtccgcccacgcgtccgctttagtgatggcggcgcttatccggtgttgctcctccttctctcatacttccggtggccaaccaccgccgcgtgacaagtctcgagctccagagattggaaaatttgctacatctattggctactcagtagtcagaaaacctggggatcatcctcctttctccaaaattatacattcgtcttcacagcctaaggagcgacaaggaaagggaatcttacaaacgccatttgccagtgtgggatctcttgacaagttttcagcttttgagggaattgggaggctcaaattaccggtgatggcagtgttgttgacaaactcccttcagatggctacacctcttgaagctttggctgctgagatatgtgagcctgagagctccatgttcagcatgcctattttgttgcttggtgctcttattggagc

SEQ ID NO: 95643 - DNA, 1638 bp, Arabidopsis thaliana columbia
  unsure (1)..(1638): unsure at all n locations
nnnnnnnnnnnnnnnnnnnnnnnnnnnnnnnnnnnnnncactatacggatagctggtacgcctgcaggtaccggcccggaatccccgggtcggcttccgcatctcttttcatttctctctgatttctcgatctctccgtccaactatgtctgccttcacaagcaaattcgccgatgagttgatcgccaacgctgcctacatcggcacacctggaaaaggtattttggctgctgatgagtccactggtaccattggaaagcgtcttgcgagcatcaacgtcgagaacgttgagaccaacagacgtaacctccgtgagcttctcttcaccgcccctggtgctcttccatgcctcagtggtgtcatccttttcgaagagactctgtaccaaaagagttccgatggtaagcttttcgttgatatcttgaaggaaggaggagttcttcccggtatcaaggttgacaagggtaccgttgagctagctggaaccgacggtgagaccaccactcaaggtcttgacggtctcggtgacagatgcaagaagtactacgaagctggtgctcgtttcgccaagtggcgtgcagtcctcaagatcggagagaacgagccatctgagcattccattcatgagaacgcttacggattagctagatacgctgttatctgccaagagaacggtcttgtaccaattgtcgagcctgagatcctagtcgatggatcccatgacatccagaagtgtgctgccgtgactgagcgtgtccttgcagcttgctacaaggctcttagcgaccaccacgtcttgctcgagggtacactcttgaagcctaacatggttactcccggatctgacagccccaaggtttcacctgaagtcatcgctgagcacaccgtccgtgcccttcagagaaccgtcccagcagctgttccagccattgtcttcttatctggaggacagagcgaggaagaagctaccaggaacttgaacgccatgaaccagttgaagaccaaggaagccatggtcattgtctttctcattcggacgtgcgttgcagcagtctaccttgaagacatgggcaggtaaagaggagaatgtcaaggcagctcaagaggcgttgtatgtgaggtgcaaggctaactctgaagccacactcggaacctacaagggtgacgctaagcttggtgatggagcagctgagagccttcacgtgaaggattacaagtactgagcatcgtccacgggttgaattgtgacgtttgtcatcttcctggatatatttctagggatttttcgtttttctacttgacattatcggattataagtgttttttcttcattttccttttggatttgtgttttgattttgattgggttttgttttttagaattgagtattttaaaaacacgcccaaataaaaaagtcatttgaggttatttctggtgaacctcttgtggaatttgaaaatcagtttctgttgatttaccgcttcttgagcctaaattattgtatttggttctctgattcgtatatgaaatctcgtcttttaaaaaaaaaaaaaaaaagnnnnnnnnnnnnnnnnnnnnnnnnnnnnnnnnnnnnnnnnnnnnnnnnnnnnnnnnnnnnnnnnnnnnnnnntagaatc

SEQ ID NO: 95644 - DNA, 543 bp, Arabidopsis thaliana columbia
tgtcgtccgcattattctcgatcagtggttgttacctgagaaaccctagatttcaattcccaacaccttaattttgttcgacaaacccaagaagattcgatgggtaagaacgattttctaaccccaaaggcgattgcgaatcgaattaaagccaaaggacttcaaaagcttcgatggtattgtcagatgtgtcagaaacaatgccgagacgagaatggattcaagtgtcattgtatgagcgaatctcaccagaggcagatgcaagtttttgggcagaatccgactcgtgttgtcgatggttactctgaagaattcgagcagacgtttctcgatctgatgaggcggagccaccgtttctctcgtatcgctgccactgttgtctacaatgagtatattaacgatagacatcatgttcacatgaattcgacggagtgggcgacgttgacggagtttatcaagcatcttgggaaaactggtaagtgtaaggttgaagaaactcctaaaggttggtttattacttatatagatagagattctgagact

SEQ ID NO: 95645 - DNA, 643 bp, Arabidopsis thaliana columbia
ctgatctgactccaaagagcgccctggatgcatctttgtcccctgttccttacatgtttgggcgagtgagaaaaacaggtgcagttctggagaaagtgattgagagaaggcaaaaaaggatgataaagaatagggaatcagctgcaagatcccgcgctcgcctaagcaaccttatacgatggaactggaaccaaaattccgcaactcaaaagaatttgaatgaagagttgcagaagacaaccaagttgaaatcatggaaaagcagaaaaatcagcttctggagcctctgcgccagccatggggaatgggatgcaaaaggcaatgcttgcgaaggacattgacgggtccctggtagagcttataatggcgtctaaggaacccaacaaagcgccgaagttatagaacaactcagaagatagaaagctagctttgtacgtagtttaggcaggttctgtgggtgattgtaaatcttgaagtgtggcggatttgacagagatagataaacacatatctgttctattttcctaaatcttttggttttatcttcctgatgtaatggatctttatcatttgtcttgaacatctttgtgacttaaccagagtgaatttatcttgtatcttgtctgcaattttttctttagcc

SEQ ID NO: 95646 - DNA, 606 bp, Arabidopsis thaliana columbia
  unsure (1)..(606): unsure at all n locations
cnnnnnnnnnnnnnnnnnnnnnnnnnnnnnnnnnnnnnnnnnnnnnnnnnnnnnnnnnnnnnnnnnnnnnnccacgcgtccggtctcttctttctcctgatttgactctctcgagtctcgtcgatttcctccgggaggagacttgaaattcgtgactttccgattgtgaattccccgatggatctgcctagcctcgctttaatcgttggcgcggctgctttcagtcccaatcctgacgagcgcagagctgctgagcagagccttaatcagttgcagcacactccacagcatttgataaggatattgcaaataattgttgatggtggctctgatctttctgtacgccaatctgctagtatccatttcaagaatttcattgctaagcactgggaacctcattctggtgaccagaacataatcttgccaagtgataagaatgttgtcaggaaccagattcttgcatttgtctctcaagtgcccccgattctgagagttcagatgggagagtgcctgaagaccataatttacgctgactatcctgagcaatggcccgaactcctggactgggtgaagcaaaacttgcaaaaaccacaagtttatggagcg

SEQ ID NO: 95647 - DNA, 827 bp, Arabidopsis thaliana columbia
  unsure (1)..(827): unsure at all n locations
gcgtacgcttgctcaacgttaccagcctcatgagacaagtttcatagacacatgcaacggaagtctctaggcggcgaagcacgtgtaagagaggctccgattccagaaaacgtagcaaagcttcaactagcggaagcaaaaatgcaagagctaaaagcaaatatggcagtccttggtaaagaagcaactgctgcattagccgctgttgaatcacagcaacatagactcactttccagaggcttgtggctatggttgaaggggagaagaattatcacttaagaatagcagccatcctcagtgacattgaagccgagatggtaaccgagaaacaacacaaagaatctgctcctcctgcgattccaacagagaacggctcagagaaaacgtcatactttcttgctgaagtgattcatccattttccgctgcttcagagaaagagttagacttggacaaaggagattacatcgttgtccgaaaggtgagccaaaccggttgggctgaaggagaatgcaaaggcaaagctggttggtttcctatggcttacattgagaagcgacagagacttcccactaccaactttgctgctgaagtttactgagtctcttcttcaaagatttcattttttcttacatttgtgtctgaaaactttgtttcagttatgtcctgtccccaacaaactactactcttgttcatatttgttgatccaaaatagagtttccctccaaaaaaaaaaaaaaaaaaaaaaaccaaagnnnnnnnnnnnnnnnnnnnnnnnnnnnnnnnnnnnnnnnnnnnnnnnnnnnnnnnnnnnnnnnnnnnnacct

SEQ ID NO: 95648 - DNA, 608 bp, Arabidopsis thaliana columbia
aagaaacttgactgctaattgctaaaggtaatgcttctgagaattggaagctaatgaagctggtcgtcaatagcaatctgctgagaaactctattttcttcaagatctccgcctttgttttgatctccgttgcttgtttcttcctcggtaagcattggtctgaggatggcttccgccgtctcatcttcttctccgccgagccttcccgatctcccattgtcgcactctcacctgatttcggtataacccttctcatctctggtttgatctatgacagtcacccgggttgtgcctccgtctttgtgtccgccgccgccgccagattctgttgagttgaaggtgtttggaatcgttaatgagaacggaacaatgtctgatgagtttcagattggtgattacgacgttgagtcggcggggacgttggggaatcagacggaattcgagagtagcgacgacgatgatattaaatccaccacagctagagttagtgtgaggaaatttgagatttgttcggagaatatgactgagtacattccttgtttggataatgtagaagccatcaaaaggcttaattcaacggcgcgtggtgagcgattcgaacggaattg

SEQ ID NO: 95649 - DNA, 535 bp, Arabidopsis thaliana columbia
aggtattgatgtagaggaaatacgtggtgaaatcgaagaaagctgcaggaggatcaatggagagtttgggaaacctggatatcaacctatcatatatattgatactccggtttcgattaatgaaataaatgcttattaccatattgctgagtgcgtggtcgttacagctgttagagatggtatgaaccttactccctacgaatatatcgtttgtagacaaggtttacttgggtctgaatcagactttagtggcccaaagaagagcatgttggttgcatcagagtttattggatgttccccttcgcttagtggggctatacgcgtaaacccatggaacgttgaagctactggagaagcactaaatgaggccctctcaatgagtgatgctgagaaacagctacggcatgagaaacatttccggtatgttagtactcacgatgtagcttattggtcaagaagtttcttgcaagacctagagaggatatgtgtggaccatttcaagaaaaggtgttgggggatggggattagttatggt

SEQ ID NO: 95650 - DNA, 748 bp, Arabidopsis thaliana columbia
  unsure (1)..(748): unsure at all n locations
nnnnnnnnnnnnnnnnnnnnnnnnnnnnnnnnnnnnnnnnnnnnnnnnnnnnnnnnnnnnnnnnnnnnnnnnatttgttgatcccacgcggtgggattcttcctttagttcctctgttgatctatccaatcgaatcttacgaaaattttcgagtgaagatgaggtcgcttcaagcaccggttgtttgccctagtgttcgtcccagacaattgggtgtctctgctttacttgtcaactgctctgtttcgaaaactaggagtctcagaaaacaattctggggtaaccagaccaaaaatgacaagtctcaggctgctacagtgaatcttcgtctgcatcttcggaggtataagagtatcaaatgtcttttcagctcgcactctgatggtaccggaagcacagcagagaatttcaacgagaacgatgaggattatgtcaagtctagtgtattggaagctgttgaggtaaaaagtggaccagatggtttcatggtgaagatgaaggatgggaggcaacttcgatgtgtccacaataatcctcaaggagggaatctttccaaattatgctccacattctgcaattgtcctgaaaatggaaggtggacctggtcttcttctcccctttcgcctcttggggatgcctagtgtgttaccttatgggcagcaatgncaaattttcaaaatggcaaaggnccccttttttttcaaagnggtnaagggncnttgntnggcaaaantngggtttngngggt

SEQ ID NO: 95651 - DNA, 833 bp, Arabidopsis thaliana columbia
gcagtaccggtccggaattcccgggtcgacccacgcgtccgagcaactgccgctctttcttctttcttactgtctcagatccgccattgttacttcttcagttcttcttcttcaacaacaacaagaagtaataattagggttgagaaacttcgaattccgaaacaacagagagacgtactagttttagccatcttcttttcttagtttcatcgaacttggtgttacctcaataggtcgacgctcaaatcttgcttattctctggtttttagagcttcttttagattctttcgacatgccagccagcaaaaagatttcggaccggaatcacttagggcaagtgttcgacaagctattgaatcagattggagaatctgaagaattcgagttaccggagtggttgaataaaggaaaacctactccttatatcttcatcaggcgcaatatatacttgacgaagaaagtcaaaaggagggttgaagatgatggaatcttctgttcttgctcctcctcgtctcctggttcttcttcaactgtctgtgggagtaattgccattgtgggatgctattctcaagctgttcctcaagttgcaagtgtgggagtgagggtaacaataaggccgtccaacaacgacatgtcaagaagatgaagttaattcagacagaaaaatgcggatcagggattgtgggataagaagaaatcgaagctggagaagttattattgaatatgttggaagagttattgatgattagacttggagaagagagggcttgggaagaagaaaacaccgggggcgggaccaactttttattattgggagaaaacccgaaga

SEQ ID NO: 95652 - DNA, 474 bp, Arabidopsis thaliana columbia
aaaaccgggccgagcacgcgtccggaaatgtcaacggcaacggccccccttttcctcccccccttccttcttccttcttctcggttcttcatcttcaggttccgatggcgatctctgagctattcgacgactggtgccagaaacatggcaaaacgtacggttcagaagaagagaggcaacagaggattcaaatctttaaagataatcacgacttcgttacgcaacacaatctcatcactaacgctacttactctctctctctcaatgctttcgcggatctgactcaccacgagttcaaggcttctcgtcttggtctctctgtttccgctccgtcggtgataatggctagtaagggacagagtctcggtggtagcgtaaaggttccagattctggtgattggagaaagaagggagctgttactaatgtcaaagatcaaggaagctgcggggcatgttggtcgttctcggcgactg

SEQ ID NO: 95653 - DNA, 844 bp, Arabidopsis thaliana columbia
  unsure (1)..(844): unsure at all n locations
gctcnnnnnnnnnnnnnnnnnnnnnnnnnnnnnnnnnnnnnnnnnnnnnnnnnnnnnnnnnnnnnnnnnnnnnnnnnnnnnnnnnnnnnnnnnnnnncggccgcgcgaaaaaagaaggaagaagaagaaaaattgaggaaggaggaagaggagcgccgcaggcaggaagagcttgaggctcaagctgaggaggctaagcgtaagagaaaagaagaaggtaaaagtagagcttttttgggaatcagaatcatcatcgatggtgaatccaaagcgtggcaataggtttttcaaatacagaattgtgtaaattgctctctatcttcttctctttcaaattctcttccttttgttgtattcaataactttttccccactttgatgggctgcaaccacatattcttcttctatctttaacttttcccaccaaacttctccttttttttctttttttttgggttctgggtctgcttttttgttgttgttgttgttgaatgaaggtccgtaagggaagaagacagatgattgcgaaagagcaagacgaatacaaattacgccaacaaggtcttgtttttcaaatggcttctcttttcctctctttcgattactccttactcttcttttggttgctcttccgcgttttcttatacgagaatcacgaacgaaaactccagattttctagcacacctcttctctctgcatcgccatcttgttttttcccccaaattttcgatttttttttttgtataacttttgagattctgatagatccggtacggagtcatgtatatggagatttcttctgcttccgatgattcgatcgcttacgttgagacagatccttct

SEQ ID NO: 95654 - DNA, 477 bp, Arabidopsis thaliana columbia
cttttgtggcggctttttttcacgaactgctttaaaccctaaaaactccaacctttgttctctgtgtaacaacaacaacaacagtgcgggaagaatctcacatcgagggggttgaaatccaaaacaaactcgaagttgctcctgcatggatttccgttcatccatctcagaaatctgtcgctgtcgctgtcggctcggatcttcgtattttcgatcttatagagaattgcccagttagtttggtggatgaatctgatgggcctatccgtaaggaatccattagagctattcggttcagtacaagtggcaagctctttgtgtccgcaggcgatgacaagcttgtcaagatttggtccgcagattctttggcgctgtcttaacacagtatgttctgagaaaagagttatgcgcagttgctataagtagtgatgactcacatgtttgctatgcggacaagtttggtgtttgatgggtgat

SEQ ID NO: 95655 - DNA, 385 bp, Arabidopsis thaliana columbia
acccaagcgtccgcccacgcgtccgcgctttttatgtgactttcagatccgccgagtcgtctgtttgtggaatcttttcatggagctcagtattctatatacacctctctttgtttgatcgatttcacaaaccctagcttcggcgatcttaaatctgcataaagtctatggcgtcttctcctggtaatactaaccctcacaatcctcctccgtttgatctcggtattctcttcaaaccttcatccaatccttatccgccgccgccggcatcttatcctccgcctacaggtccttttcttcacaaccagtacgatcagcagcactacgctccgcctggtatctccgctcaaccatctccggtgactcagcagcaacaagatgtgtc

SEQ ID NO: 95656 - DNA, 2424 bp, Arabidopsis thaliana columbia
  unsure (1)..(2424): unsure at all n locations
ccacgcgtccgcaccccaccaccgataactcaattaactctcttctcttggcttctgccgcgctgagccaccatcgtcctcttctcttcctcttcgatctctcctgaatcctcaaaccctggagagagagagagagagtgacgggggaagaagatgacttctgctttgtatgcttccgatttgtttaagcagctcaagtcaattatggggacagattcgttatccgacgatgttgtacttgtgattgcaacgacgtctttggcactagtagctggatttgtggtgttgttatggaagaaaacgacggcggatcggagcggggagctgaagcctttgatgatccctaagtctcttatggctaaggacgaggatgatgatttggatttgggatccgggaagactagagtctctatcttcttcggtacgcagactggaacagctgagggatttgctaaggcattatccgaagaaatcaaagcgagatatgaaaaagcagcagtcaaagtcattgacttggatgactatgctgccgatgatgaccagtatgaagagaaattgaagaaggaaactttggcatttttctgtgttgctacttatggagatggagagcctactgacaatgctgccagattttcaaaatggtttacggaggaaaatgaacgggatataaagcttcaacaactagcatatggtgtgtttgctcttggtaatcgccaatatgaacattttaataagatcgggatagttcttgatgaagagttatgtaagaaaggtgcaaagcgtcttattgaagtcggtctaggagatgatgatcagagcattgaggatgattttaatgcctggaaagaatcactatggtctgagctagacaagctcctcaaagacgaggatgataaaagtgtggcaactccttatacagctgttattcctgaataccgggtggtgactcatgatcctcggtttacaactcaaaaatcaatggaatcaaatgtggccaatggaaatactactattgacattcatcatccctgcagagttgatgttgctgtgcagaaggagcttcacacacatgaatctgatcggtcttgcattcatctcgagttcgacatatccaggacgggtattacatatgaaacaggtgaccatgtaggtgtatatgctgaaaatcatgttgaaatagttgaagaagctggaaaattgcttggccactctttagatttagtattttccatacatgctgacaaggaagatggctccccattggaaagcgcagtgccgcctcctttccctggtccatgcacacttgggactggtttggcaagatacgcagaccttttgaaccctcctcgaaagtctgcgttagttgccttggcggcctatgccactgaaccaagtgaagccgagaaacttaagcacctgacatcacctgatggaaaggatgagtactcacaatggattgttgcaagtcagagaagtcttttagaggtgatggctgcttttccatctgcaaaacccccactaggtgtattttttgctgcaatagctcctcgtctacaacctcgttactactccatctcatcctgccaagattgggcgccaagtagagttcatgttacatccgcactagtatatggtccaactcctactggtagaatccacaagggtgtgtgttctacgtggatgaagaatgcagttcctgcggagaaaagtcatgaatgtagtggagccccaatctttattcgagcatctaatttcaagttaccatccaacccttcaactccaatcgttatggtgggacctgggactgggctggcaccttttagaggttttctgcaggaaaggatggcactaaaagaagatggagaagaactaggttcatctttgctcttctttgggtgtagaaatcgacagatggactttatatacgaggatgagctcaataattttgttgatcaaggcgtaatatctgagctcatcatggcattctcccgtgaaggagctcagaaggagtatgttcaacataagatgatggagaaggcagcacaagtttgggatctaataaaggaagaaggatatctctatgtatgcggtgatgctaagggcatggcgagggacgtccaccgaactctacacaccattgttcaggagcaggaaggtgtgagttcgtcagaggcagaggctatagttaagaaacttcaaaccgaaggaagatacctcagagatgtctggtgattgatgatatgatttattggtaattctcttctgctttctcaacttttcttggtacgctgtccttaccatttagatatttatttgtttattttccttcgtctcccttcttttagtcaaacatgaatgatttgtcaaagttttctttgtatgaacaaaagtataaactacaaaataaatctgtgagagtgatna

SEQ ID NO: 95657 - DNA, 331 bp, Arabidopsis thaliana columbia
tttgacgcgtgggtgggaactgtgtttcccatggcgttcgggatgatgtaaatttgtttagtagagatgatgatgaaaacttttccaagtacattcacccgcgtgttacaggacattcacctaggactgtacctcgtattggggacagaagaatcaggaagatattggcttctagacattggaaaggaggttcaaggcattcagatacgaaaccgtggagaaattattacttgcaccagcagaggagctatcctatcaagaaaaggaaaaactttgaccacatatctgattccgttactgatgattaccgtatgcgtactaagatgcatag

SEQ ID NO: 95658 - DNA, 587 bp, Arabidopsis thaliana columbia
  unsure (1)..(587): unsure at all n locations
nnnnnnnnnnnnnnnnnnnnnnnnnnnnnnnnnnnnnnnnnnnnnnnnnnnnnnnnnaaatttatctttccccacgcgtccgcacggagtcacggttcctcgttcgtcctctcccgtcgtctctccgcactaaattgatgggcacatcatctgggtccaatcttcctcaccagatgctacctccacgtcagcaactacaaacatctctttcgcttgtatcttcagatccccacttgtcacggtctaattctggcattgtgcgtgaatcaccagctgaaagtgctagctctcaagaaacttggccaacctcaaaatctattatgggaaggaagacagatagcggaaagacagggcctgactctcatgatcaacatgtgatccgccatgtttccattgctgataaggtatcgctacgggacatagctagagagagacttgacatagtcgctgagagaatgcatcgattaccagaagaatatctcgaggagttaaagaatggtcttaaggctatccttgaggaaatggtgcgcagcctatagatgagtttatgtttctgcagagtttgtccagacgagatctgatttaac

SEQ ID NO: 95659 - DNA, 645 bp, Arabidopsis thaliana columbia
ctgcggtaccggtccggaattcccgggtcgacccacgcgtccgcatgtttccattgctgataaggtatcgctacgggacatagctagagagagacttgacatagtcgctgagagaatgcatcgattaccagaagaatatctcgaggagttaaagaatggtcttaaggctatccttgaaggaaatggtgcgcagcctatagatgagtttatgtttctgcagaagtttgtccagacgagatctgatttaacttcaaagacacttgtcagggctcaccgagtgcagcttgaagttcttgtggttataaacactggtatccaagcattcttgcacccaaacatcaatctctctcagtcatcactcatcgagatctttgtgtacaagagatgcagaaacatagcttgccaaaacgaactcccgggctgatgggttgtccctgtgagatcatgcgctaatagggaaaggcttctgcaacctgtgcatgtgtgtggtatgtaacaaggttgactttgcaggcaacacatgccgctggattggctgccaccggtgttctcattggactcatacggattgtgctattagggatggggagatttcgatgggagtttctcccaagagcgtatctgggatgggagaaatgctgttct

SEQ ID NO: 95660 - DNA, 567 bp, Arabidopsis thaliana columbia
  unsure (1)..(567): unsure at all n locations
aaaagcaaaaaataaaccctaagaagcttgatctcatcgattatggcggattttgggtatttttcaggtgcagacgattcagcagtggaggagctaatttcgcaagccaaggagctttctgatttggagcaagtagctgctatcaattgttctggattcaccgattctactcttccagatgatctcgaatctcgcttccgtcgcctcaaatctcttccagctgctccacgacacgtaccggtatcttcatcttcttcgatgaataggcagaagcctctctcacattccaaaagcgtgaatgtgaatttgtcagggaatcgaagaaatccaggtaaaaaaactggctctgtgagtttatcctgatgaagattcgcagtaatctctcgaggaaaaaaacgggatcctggattttgaaatcgaggttctcaaagctgagcttgtccttaatgggagtggggcatttctcagattcttgggaacatcagtnggggtaaaatcctctngccagtnaacaacaaacgggggaggagcttcctaaagggnaccggggattgnttnccctnttta

SEQ ID NO: 95661 - DNA, 423 bp, Arabidopsis thaliana columbia
  unsure (1)..(423): unsure at all n locations
aagttaacctgcgcttgcttattggagctcttaacctacgcggatgctccgattttatgacagctgagctcgatttggttgataaacaaaggcttcaagaattctaccggaatcaatggaggttctggtaggttctacgtttagggatcgtagcagcgtcacgacgcatgatcaggccgtaccggcgtctctgtctagccggattggtttgaggagatgtggtagatctcctccgccggagagttcgtcgtccgttggagaaaccagcgaaaacgaggaagatgaagacgacgccgtttcgtcatcacaaggaagatggctcaattcgtttagttcatctttggaagattctcttccgattaagagaggattatcannacattacatanggaaatcganatcgtttgggaatttatggaagcg

SEQ ID NO: 95662 - DNA, 497 bp, Arabidopsis thaliana columbia
  unsure (1)..(497): unsure at all n locations
cgtccgctccaccaccaccatactactctccttctttttattagtctacaagtctcccccaccaccgtgcgtntacagttctggacgagcaccatattattctccttctcctaaggtagtctacaagtcttctccaccaccgtatgtctacagttctccaccaccaccatactactctccttctcctaaggtagtctacaagtctcccccaccaccgtacgtctacagctcaccaccaccaccatactactctccttctcctaaagtagtttacaagtctcccccaccaccgtacgtctacagctcaccaccaccaccatactactcaccttcccctaaggtagactacaaatctcccccaccaccgtacgtctacagctcaccaccaccaccatactactcaccttcccctaaagtagactacaaatctcctccaccaccgtacgtctatagctcaacaccatcaccatactactcacctttcccgaaggtagact

SEQ ID NO: 95663 - DNA, 1046 bp, Arabidopsis thaliana columbia
  unsure (1)..(1046): unsure at all n locations
aagaaacccaatcgaaaacctaaaacccgattagattttcttagatacgaaacctctcttacgacgctccttcctcaatctctctcgatcgtcggagattctttcttcaagagtcatcttcttcttcttctccttctccctaaaccctaatttatcgcgtttggatcgaatcagctgtcaattcttgttttggttttcacggccagggccatgtctgccgtatattgcggaaccaagagatcttacttcgacgataattcttctccgccctcttctaagaggttccgatgtttttcgccttccaattctccaatctggtcctctcctccttcctcatcgctcgatcagcttcactctgcgtttcctcatattgaactcacggttctcgtcaaggcactagaagataatggaagtgattttaatgctgctatgaagagcttatactctttcgcatcttctgaggagaagaaagctgaagaattggccgcaggaggtgctgctactcaggaaactgatgccgtttgtggtggaaaccccccgaccagtggtgatgactgggttgaattgttagtcagggaagtgttacaatcgtctggtacagatgatgcaaaagtacgtgcagcaagagtccttgaggccttagagaagatgttaagtgcacgtgctcgtgaagaagctggaaacaaattccaagaggagaaagtggcagtgcagcaacaggtggagaccttggtgaaggacaacacagtcctcaaacgtgctgttgctatccagcatgagcggcagaacggcattggaggatgcgaaccatcagcttaggacttcttgaagcaactggttcctcaagttatcaggaaaagctttagaaaatcttggaggtgaacaattacgggttggggaattcagcttcagcaaagtgggaccattggcaactcaattcccncaaggttnaatccggncgnntttttaagtnttcccaggnggcaaggnccttttcaggggggggangcnattnaccngantttggggggggngggnatagngcc

SEQ ID NO: 95664 - DNA, 1241 bp, Arabidopsis thaliana columbia
cacaacttcggagcgaatctattcttcttcttcttcttcttcttcttcttcttcttcctccgtttttttcatcttcttctctgtttcgagagatccactagtgaaagagtcagcaccatggccatggtcaaagagaaagaacaaaacactaaagacaaaaaactcctcgtcggcgtcatttggaacttctccgccgagctcaagctcactttcatggcgttacttgttctctgcactttagctactctcttacctttcataccttcttcattctctctctccacttccgatttccgcttctgcatctcacgcttctcctccgccgtccctctcaacaccaccaccaccgtagaagaatcatcatcctcaccgtcaccggagaagaacctagatcgagttttggataacggagttattaaacggacgtttactggctacggctcagcagcttataacttcgtctcaatgagtgcttacagaggcggcgttaactcattcgccgttatcggattatcatcaaaaccattacacgtgtacggtcatccttcgtatagatgcgaatgggtctcattagacccgactcaagatccgatttcaacaaccgggtttaaaatcttaaccgattggggttacggacggatctacacaacagtcgtcgttaactgtactttctcatcaatctccgccgtgaatccacaaaactccggtggaactctcatcctccacgccaccaccggagatccaactctcaatctcaccgattcaatctcagtcctaaccgaacctcccaaatccgtcgatttcgatctctataactccacgaagaagacgaagaagtacgattatctctattgcggatcgtccttatacggtaacctaagtccgcaacgagttagagaatggatcgcttaccacgttagattcttcggtgaacggtcacatttcgtgctacacgacgccggagggattcatgaggaagtgttcgaggttttaaagccatggattgagctagggagagtgacgttacatgatattagagatcaagaacgattcgatggatattatcataatcagttcatgatagtgaatgattgtttgcatacgtatagattcatgacgaagtggatgttcttctttgatgttgatgagtttttacatgttccagtgaaagagacgatttcgtctgtgatggaatctttggaggaatattctcagtttactattgaacagatgcctatgag

SEQ ID NO: 95665 - DNA, 677 bp, Arabidopsis thaliana columbia
  unsure (1)..(677): unsure at all n locations
nnnnnnnnnnnnnnnnnnnnnnnnnnnnnnnnnnnnnnnnnnnnnnnnnnnnnnnnnnnnnnnnnccacgcgtccggcaaaactctcgtccgagatatatcgactccgcgaccctccactactctgctgatctacacacacacacaaaaaaaaaaaaaaactcaatcgccagcaacaatggcgaagctcacacttctcttcttcctttcctttctcatcttctcctcatccatcgctttccaatcagacgagctcctcgttgacgacgacgaatttggtctagaaggagcaaagccccgctccaccgatctttacacatcttcttcttcttcgccacagcagcagcaacagactccaactatccggagaagatactcagatcctaccgatttggattcaaaagtccaatttactctcgaacatgccttcggtgactctgatttctcccccgccggtactttctccgctcgtctcaaaacctggagtcatggcggaaagacattaacgaagctgcgnttctntagaaatgattttcctgctgaagagaaagatgcattcaagaatctgctgaaaggagatgacttttatcggattcggcttccatctaatgtggttagtccaccagggagagagtttgtgattgcatcagtgagngctagatgtctaccacgggatgg

SEQ ID NO: 95666 - DNA, 509 bp, Arabidopsis thaliana columbia
  unsure (1)..(509): unsure at all n locations
cnnnnnnnnnnnnnnnnnnnnnnnnnnnnnnnnnnnnnnnnnnnnnnnnnnnnnnnnnnnnnnnnnnnnnnnccacgcgtccgcagagagtcgccgaaataaattgaaatccggtgagaagattttggattcactccttccttctttcttcttctttatcatcatttgagctggttttggtatctctcctgacgaatttgaatctctcagccattttctcttctcgcatctgtgttttcgtgcttggagctgtacacgtttctttaatttgaatagtgattttgcgttcgttaattagccttctcgtacgagtgggctattttgggaatgatttaggtggttttaagttactgggtagtagtcactgctgagcgatttctgtttctcctgttgaatgattgattcagaaatttgaaattcacatcgaaaccaaatcttaaatcatattggtagctttttttttgttttgtgattagatactgtttttttatagtattaaattcgttttg

SEQ ID NO: 95667 - DNA, 1192 bp, Arabidopsis thaliana columbia
gctacgccggcactaatacgacttacttagggaacgctggtacgcctgcaggtaccggtccggaattcccgggtcgacccacgcgtccgagacaaccacaagaacacaaaacacacaaaaacaaagaggttctttctttgaagaagaaatggaaaaagttgatgtttatgatgagcttgttaacctaaaggcaacagagctgagattgggattaccagggacagaagaaactgtttcttgtggaaaaagcaacaaaagagttttacctgaagctactgagaaagagattgaatccactggaaaaactgaaaccgcttctcctccaaaggctcagattgttggatggccaccagttagatcttacagaaagaacaatgttcagacaaagaagagtgaatctgaaggtcaaggaaactatgtgaaagtaagtatggatggtgctccatatctaaggaagatagatctaacgatgtataaacaatatccagagttgatgaaatcacttgaaaacatgtttaaattctctgtgggagaatattttgagagagaaggatataaaggctcagactttgtacctacttatgaagacaaagatggtgattggatgcttgttggtgatgttccttgggagatgtttgtttcgtcttgtaagaggctaaggatcatgaaaggatctgaagttaaaggtttaggttgtggtggtctttaacaaacctaattgagagataaagatcaaagagaaagattccaaaccagagttttttgttctgtttcttgaaacagagtaaatatagctctgaaactgctcgggttcttggggagagatgtttcatacaatcatactttgtgaatgtttacctcatcggtaaaaagagagatgcttaaaatggtcttaagcataaaagtgtgagaaagatctaaatctaaactttagctgtaactctgtctccattaaagagaaaggttttgtggtattagaaagatctaatctgaagattatctttgtgtttttcactttttataatgttcttatcgaacaactttgatgtttttgatgtaattacccatttttctgttctgtttctcttcaaattaagatctgtctttacaaaaaaaaaaaaaaagggcggccgctatagaggatccaagcttacgtacgcgtgcatgggtcgtcatagctagtctatagtgt

SEQ ID NO: 95668 - DNA, 501 bp, Arabidopsis thaliana columbia
  unsure (1)..(501): unsure at all n locations
tctatacgacttatatagggaacgctggtacgcctgcaggtaccggtccggaattcccgggtcgacccacgcgtccgcccacgcgtccgcgagattctacaaatggttcaccgaggggaatgacagaggagaatggcttaagaacttgaagtatggagtgtttggattaggaaacagacaatatgagcattttaataaggttgccaaagttgtagatgacattcttgtcgaacaaggtgcacagcgtcttgtacaagttggtcttggagatgatgaccagtgtattgaagatgactttaccgcttggcgagaagcattgtggcccgagcttgatacaatactgagggaagaaggggatacagctgttgccacaccatacactgcagctgtgttagaatacagagtttctattcacgactctgaagatgccaaattcaatgatataaacatggncaatgggaatggttacactgtgtttgatgctcaacatccttacaaagc

SEQ ID NO: 95669 - DNA, 528 bp, Arabidopsis thaliana columbia
gcccccccctggctgaggagggaaaccataagctggatatcgaattcggggccgcgctaaagcacgatatgaaaagaccagattcaaaatcgttgatttggatgattacgcggctgatgatgatgagtatgaggagaaattgaagaaagaggatgtggctttcttcttcttagccacatatggagatggtgagcctaccgacaatgcagcgagattctacatttggttcaccgaggggaatgacagaggagaatggcttaagaacttgaagtatggagtgtttggattaggaaacagacaatatgagcattctaataagggtgccaaagttgtagatgacattcttgtcgaacaaggtgcacagcgtcttgtacaagttggtcttggagatgatgaccagtgtattgaagatgactttaccgcttggcgagaagcattgtggcccgagcttgatacaatactgagggaagaaggggatacagctgttgccacaccatacactgcagctgtgttagaatacagagcttc

SEQ ID NO: 95670 - DNA, 2689 bp, Arabidopsis thaliana columbia
  unsure (1)..(2689): unsure at all n locations
cagctctctacgactcactattgggaaagctggcacgcctgcaggtaccggtccggaattcccgggtcgacccacgcgtgcgctctcacctacaccacacctaaccaaaccccctacgattcacacagagagagatcttcttcttccttcttcttccttcttctttcttcttctttcttcttctagctacaacatctacaacgccatgtcctcttcttcttcttcgtcaacctccatgatcgatctcatggcagcaatcatcaaaggagagcctgtaattgtctccgacccagctaatgcctccgcttacgagtccgtagctgctgaattatcctctatgcttatagagaatcgtcaattcgccatgattgttaccacttccattgctgttcttattggttgcatcgttatgctcgtttggaggagatccggttctgggaattcaaaacgtgtcgagcctcttaagcctttggttattaagcctcgtgaggaagagattgatgatgggcgtaagaaagttaccatctttttcggtacacaaactggtactgctgaaggttttgcaaaggctttaggagaagaagctaaagcaagatatgaaaagaccagattcaaaatcgttgatttggatgattacgcggctgatgatgatgagtatgaggagaaattgaagaaagaggatgtggctttcttcttcttagccacatatggagatggtgagcctaccgacaatgcagcgagattctacaaatggttcaccgaggggaatgacagaggagaatggcttaagaacttgaagtatggagtgtttggattaggaaacagacaatatgagcattttaataaggttgccaaagttgtagatgacattcttgtcgaacaaggtgcacagcgtcttgtacaagttggtcttggagatgatgaccagtgtattgaagatgactttaccgcttggcgagaagcattgtggcccgagcttgatacaatactgagggaagaaggggatacagctgttgccacaccatacactgcagctgtgttagaatacagagtttctattcacgactctgaagatgccaaattcaatgatataacattggcaaatgggaatggttacactgtgtttgatgctcaacatccttacaaagcaaatgtcgctgttaaaagggagcttcatactcccgagtctgatcgttcttgtatccatttggaatttgacattgctggaagtggacttacgatgaaacttggagatcatgttggtgtactttgtgataacttaagtgaaactgtagatgaagctcttagattgctggatatgtcacctgatacttatttctcacttcacgctgaaaaagaagacggcacaccaatcagcagctcactgcctcctcccttcccaccttgcaacttgagaacagcgcttacacgatatgcatgtcttttgagttctccaaagaagtctgctttagttgcgttggctgctcatgcatctgatcctaccgaagcagaacgattaaaacaccttgcttcacctgctggaaaggatgaatattcaaagtgggtagtagagagtcaaagaagtctacttgaggtgatggccgagtttccttcagccaagccaccacttggtgtcttcttcgctggagttgctccaaggttgcagcctaggttctattcgatatcatcatcgcccaagattgctgaaactagaattcacgtcacatgtgcactggtttatgagaaaatgccaactggcaggattcataagggagtgtgttccacttggatgaagaatgctgtgccttacgagaagagtgaaaaactgttcctcgggcggccgatatttgttaggcaatccaacttcaagcttccttctgattctaaggtaccgatcatcatgatcggtccagggactggattagctccattcagaggattccttcaggaaagactagcgttggtagaatctggtgttgaacttgggccatcagttttgttctttggatgcagaaaccgtagaatggatttcatctacgaggaagagctccagcgatttgttgagagtggtgctctcgcagagctaagtgtcgccttctctcgtgaaggacccaccaaagaatacgtacagcacaagatgatggacaaggcttctgatatctggaatatgatctctcaaggagcttatttatatgtttgtggtgacgccaaaggcatggcaagagatgttcacagatctctccacacaatagctcaagaacaggggtcaatggattcaactaaagcagagggcttcgtgaagaatctgcaaacgagtggaagatatcttagagatgtatggtaacgaaactattgaagccacacactcactgtgtacttatatttatatatatacggcacagaaattgccacattatgatgatcattaagtttgtgatcgcaagaagaaaggaactcaaaatgttttccatttttaatttcttttcatatattttgacaactctatttttttaactcttgttatatatcccccacccaatagtaagaaaaaatgcataagatgttatggggtaaaaaaaaaaagcggccgnnnnnnnnnnnnnnnnnnnnnnnnnnnnnnnnnnnnnnnnnnnnnnnnnnnnnnnnnnnnnnnnnnnnnnnnnnnnnnnnnnnnnnntnnnnnnttagc

SEQ ID NO: 95671 - DNA, 922 bp, Arabidopsis thaliana columbia
ttaggtaacctatagagaatcttgacgtcgcatgcacgcgtccgtaagctgggatcctctagagcggccgccctttttttttttttttggaatacaatcttagggtgggttcgctttattaaattccattgcgtctttgaccatcattattactcacaagtgtattttgcaagtaatcaacatttattagattgatcacactcacacatgtggcattacccattattagattgatcacactcaacacaattctgaattctgttccgatttccatagaaatccttgatttagcgaaaaaactaaacccagatatctgaggtgcagtcgccacccggatatctcatctcgtgagcgagcgaaggaccatccggttcggtcccaaagtcgacgaagaagttagggtttatggagagaccacctttatctgtatcaacatctatctgcaacatgtgtgaccctttctccacaagttccgggtaaaactgtctgtcccaaacactaaacagcgagttcgtcacgtacaatcgcttcccatctaggctcagctgaaacatctgaggacctcctcttagacgctgacccttgatcttagggacatcaaactgaaatgcttttccttcttctcctaaggccaagacaagacttcccttttggactagcccgcctacatgtatttgaccagttaaaacaggggttttcgggtcctcgatgttgtactgacgaatatctccatgaagccagttggaacaatagaggaatcggtcgtcaagtgagattagaaagtcggtgataagccctggcatttctgggagaatccagttttcaactttcagaggttcaactgatatagccacctcgtggctccatgtttcatcatcgttcttgaaaaatcttactaaagtactcgacaacgcacaccctg

SEQ ID NO: 95672 - DNA, 767 bp, Arabidopsis thaliana columbia
  unsure (1)..(767): unsure at all n locations
cgccaatacaggatcagactgacttctcaatagacaaagctcctgatggggtgacggaggggaaatcaactcggagggggccaagttctcggtttagccgctttggtattggcatattgaagaacactgtagggaaggtcttcccatctcgaccatctaatgaggcaaaactgggtaatgagaatcaattctactatgacgataacctaaagagatgggtggaaagaggtgtggaacccccagctgaggaagctgcactacctcctcctccaacgtcagtcccattccgaagcaactcattggggcatgaaaacaagtctgagataaagaacgagatgtctccatctagtgggagctggagtagtggcagcccaactccgtcagagaattctccgggaatcccaccagtctcacagggctcaaaccaattctcagctcgtggacgtatgggtgtgcgtgcaaggtacgttgacacctataatcaaggctcctcgagcatgtatcagtcacctcccgtgcaatcttctaaaccaccgattcctgcgaaagaaaattctttgtcccagcagcaccggcatcgtttgcaaacgaccaggtaatggaatcggttagtgctgaaaccagacaagagaactcaggagatgaagcagtagtaggctctncaggngntncaggnccaagncagggttcattccagtccccgacaccatcttcaattgcaatgcagngnttttcaagtgtnggcaacatcagaagnagttggtcag

SEQ ID NO: 95673 - DNA, 704 bp, Arabidopsis thaliana columbia
  unsure (1)..(704): unsure at all n locations
cggattatcgtgtttgggagtggcatggtcatatcatgttgtttgatgaanagagggggtgcacgcctgagtatatctacgggaattacttcgagaggttgcctgtgaagcttcctaataaccgcccgtgtggagaaggagaagaagaaggagatgaaagaagaggaggtggagaatttggggcttagagagttgatcgatggtggtgacgctgctcctggtaggattcttcataggaacaacatcaacatcggttcctcaagggtctaagttcctaagagcgtcttggtagggagaggtcacattgttcgggaagatttcagatgtgtgaacaactcgcgacaacaaaacataaggtgctggtgggtctacgggttctattccgttttatttaaaccgggaaatccatgggtgaatctgttttctttaagaaattcatctgaagttgtttctgaaccaaatttcaatactatgttaatgaagagagaaaagattcaagtgcatggtcatcgaactcggaagctttcaagtttccccatgtttgtttattttgtgtcttaaatcagaatcatatgtttgctcaaaaannnnnnnnnnnnnnnnnnnnnnnnnnnnnnnnnnnnnnnnnaaanaaagnnnnnnnnnnnnnnnnnnnnnnnnnnnnnnnnnnnnnnnnnnnnnnnnnnnnnnnnnnnnnnnnntca

SEQ ID NO: 95674 - DNA, 1082 bp, Arabidopsis thaliana columbia
  unsure (1)..(1082): unsure at all n locations
gctggtacgcctgcaggtaccggtccggaattcccgggtcgacccacgcgtccgcttcaagcttcaaagaggtcttaagctattggcggccgagaattcttcaaacgctattaacgtcgatacgagtctcgattccgattcaaaacctaaccgtgacgctaatgatatgactgatcatgactcttcttctaaagcattggtaatccctgctcccgccgtttgtcttgtacgtttcgccggagatgctgctagtggcgcattcatgggctctgtatttggctatggctctggattgtttaagaagaaagggtttaaaggatcatttgtggatgcgggtcagtctgcaaagacttttgcggttttatctggagtacacagtttagttgtttgccttctaaaacaaatacgaggcaaagatgacgccattaatgttggagttgctgggtgttgtactggccttgctcttagtttccccggtgcaccgcaagcaatgctacagagttgtctcacttttggtgccttctccttcatccttgaaggactcaacaaaagacaaacggctttggctcactctgtctcgtttagacaacaaaccagaagtccccaacatgatttaccgctgctctcgttggctatcccaatccatgatgaaatcaaaggagctttctcttctttctgcaactccttaacgaaacccaagaagctcaaatttcctcatgctcgttgatttttttcctactttattcttttgcctttttgtagattttgaaaacagattgaaaaatggtttttgatgcatgagccaatgagaaaaaggtgttttacctttatttgttttcataatatagtttctaggactaattaagtccagaactaattatggaaatgtcaaattgaaatttcgaaatctttatatggtcgtctctaaatagtaattgatcattgtcattttaaaaaaaaaaaaaaaaaaaaggnnnnnnnnnnnnnnnnnnnnnnnnnnnnnnnnnnnnnnnnnnnnnnnnnnnnnnnnnnnnnnnnnnnnnnnnnnnnnnnnnnnnnnnnnnnnnnnnnnnnnnnntcat

SEQ ID NO: 95675 - DNA, 521 bp, Arabidopsis thaliana columbia
  unsure (1)..(521): unsure at all n locations
nnnnnnnnnnnnnnnnnnnnnnnnnnnnnnnnnnnnnnnnnnnagtccaaacatatctcaagcttcttcttcgtgttacgcactttcttcttcttcttctctctctctctttcttcttcgtcttcgatcacagaagacagaattcaatgtcgtcgacctacaagctcaatcacactgattcatttgcaaatggagatgcaaagagtttgttgccgaacccagagaatggtttcactcatttgacttcacttgctcaatcagagaaggctgttcaggagcttcttcttcaacagactcctatgcaggctactgacgaccatctcgttgagttctctgaggctttgagaactgttgcaaaggcactaaggggagctgctgaaggaaaggcgttggctcaagctgaggctgctgaatggaagcgtagatacgagttagagaggtctaagaacgtggagttgcagcataaagaactgtcaaatggagtgtgtgccgatgaatctaatggtcaaaggatggagcac

SEQ ID NO: 95676 - DNA, 792 bp, Arabidopsis thaliana columbia
ggtcttcagctgtgtacagaatcaagtttccaagagagaaagagagtaaaagcaaattaacaaaggaagactctgattcaccgagaaggttttggcttaaagatgacgaacactcgcgcgatctacgccgtcatcgcgatcctggcgatagtaatctcagccgtggaatcaaccggagacttcggagattcgctagatttcgtgagagccggatcttcatcgctcttctctggatgcacaggatcgatcgcagagtgtatagcggaagaagaagagatggagttcgattcagacataagccggcgtatattagcacagaagaagtacattagctacggtgctatgaggaggaacagtgtgccttgttcacggcgtggtgcgtcgtactacaactgccagcgtggagctcaggcgaatccttacagccgtggatgcagcaccatcactaggtgcaggcgttgaagaagatgagtcacttgaatttcctattttgcccctttctttttgtgtctctgtctctcttctcgattttcatttttttaattatttttattttccgggatatatgggtttgattttacacattgaaaaaaaaacttctactatagtctttgatttgaaaggaaaaaaaacgaaattgcttctttgtttttttttctggttgttgtctatatacataaataaaaaattcaaagttgcgtagattaaaaataaaaaaaaaaaaaaaaagggcggccgctctagaggatccaagcttacgtacgcgtgcatgcgacgtcatagctcgtctat

SEQ ID NO: 95677 - DNA, 724 bp, Arabidopsis thaliana columbia
  unsure (1)..(724): unsure at all n locations
tagagagttaaagaagaggagataaaaatcattcgtgttcctgtagtgagattgaggtttggagaagtagcgggagcgagttccgtcgttgttttaccggtttgtaaagcagaggaaggagaagagaagcttcttgaagcaccgatggagtttgaaagtggaggagagtttggtgtagtggaagcagagaaagattggagtagatgggtggttttaccgggttgggatcccgtggtggcgattaggaaaggaggagtggcgatttcgtttagcgatgatagggaagttttaccgtggaacgggaaaggagaggcgataatggttgtgatcgatagggaaaagaagacggtggaagctgataatggatactactatcttgttgtggctgatggtgggatgaagttggatagaggattggtgttgaaggagaaaggagtgaatgagagcttaggaatggttgttttggtcgttaggccgccgagagatgatgatgatgagtggcagataaatgatgaagattgggattagaattcaattagaagaatagttaaacaaatacttatatgcttttggttttggcaaatatgtaattttttgtttgattgctttttatctcataaatgtttctttcaaaaaaaaaaaaaaaaaaagnnnnnnnnnnnnnnnnnnnnnnnnnnnnnnnnnnnnnnnnnnnnnnnnnnnnnnnnnnnnnnnnnnnaacgga

SEQ ID NO: 95678 - DNA, 526 bp, Arabidopsis thaliana columbia
  unsure (1)..(526): unsure at all n locations
atgatactgccnnnnnnnnnnnnnnnnnnnnnnnnnnnnnnnnnnnnnnnnnnnnnnnnnnnnnnnnnnnnnnnnnnnnnnnccacgcgtccgagattcttctccggagcgatcagatttcaccgacgacggttgtttttgcctcctctttcaatcagaggaagccaaagcttagagcaacagttgtaaatctatatatagagagggagagagagagagagagctcctctcgtccagtattagggttttaaaggcaagaactactagaacaagagaaggtacaaaaaaaaaatgtcgggcctccatcgatcatcaagttcatcgaagaacatcggaaattgccttccctccaaagaactccttgatgatctttgcagtcgatttgttttgaatgtccctgaagaagatcaacagtcattcgagagaattttgtttctggtggagtatgcttattggtactatgaagataatgctgtagagaatgatccaaagcttaagtccctgtctttgaaagagtttacttcgc

SEQ ID NO: 95679 - DNA, 552 bp, Arabidopsis thaliana columbia
  unsure (1)..(552): unsure at all n locations
taacccttactanaggggacaaaagctggagcttcaccgggggggggggcggtttagaattaggggatcccccgggcttgaagaatttgggggccggaatcttccgctggttcttagttgggctaataattggccaaaaaccattttatggacggttcaggaattccgttcaagccttccaaaggaagaagagtggaaggtaaggacctttacctttctgtttagaagccttaaggaagactctgaggtaaaggaccagcctgaatggcagccaccaggggttaaggaggtcagtgataaggatctgttggtggaaacaaagatggcgaaaatgggaccggtgagtcctgtggagaagattgttagcatggagaataccagcaggtttattgaaaaggatgttgaaggggtttcatgggaaacagaagaggctaccaaagctgctcctacaagcaactttactgtcggatctgatggtcctccttcattccgcagcttaaagtgggggaggggggaaagtggttctggaagcctttcactggttgcatggtt

SEQ ID NO: 95680 - DNA, 529 bp, Arabidopsis thaliana columbia
gtgcttcaacaacacatgcgtctctcagaaatctttccgccccagatccatctctctctcaagcaaacactcttaaacccttttgatttctcctcataattattctcgaaagctccattgtttattagttattcctgcaaattattcaattttaccattttgcttctggtttttttagtcgtctctctctctcttcaatctcttgaaaggtacttgctttatgcacaaaagttataatcctgggtttttttgtactacactgtagttattaatgcctgaacaatcttcttgatctgggtacattttgcagattgagtaaaaatcattccttttttttctgggttatatacactgttcttcgagttctagggttccttaatttcgtttctcctttttggaaagtctctgactttatgtgttttaatgggtctagttttttcatgtggtccatttaattagctagtggaagaagatggatgaattgtgtaaagattatttttggttctaagtatcaaaaaaatttgggggt

SEQ ID NO: 95681 - DNA, 497 bp, Arabidopsis thaliana columbia
  unsure (1)..(497): unsure at all n locations
cttccnggnccnatatnngccggcttcntgcngctggnaaccttcaatcccnaatgncccttgnttccgtcctcccaaactcaaggttgaagatatgagaccatccnccgtntctgtcgaacactctgaatacctcaattaactccatcccggatgctgatccctgagaagtgttttgagcccataatatacaaagaaatcattaaaagtgatgccaccgttgccaaagatgtcaacatcgctcatcatctgttgcagttgttccgcctttggattcttccccatcgacttcattactttcgttagcttctccttcgtgatgaacccatcggaatctttgtctatgagacagaaggcttcgtaaaactcttggatctgttcatctgtgaaagcatccgccatatcttcgatcacaaaggaaagttcaaagtcttgtctttgattcaattctgactgatcacgattcncnttaaattccggacngcagtgggccgccc

SEQ ID NO: 95682 - DNA, 673 bp, Arabidopsis thaliana columbia
  unsure (1)..(673): unsure at all n locations
atgatcctgccagcaannnnnnnnnnnnnnnnnnnnnnnnnnnnnnnnnnnnnnnnnnnnnnnnnnnnnnnnnnnnnnnnnnnccacgcgtccggaaatgataaacgtaaagccaatggagcaaatgatttctagcaccaacaacaacacaccgcaacaacaaccaacattcatcgccaccaacacaaggccaaacgccaccgcatccaatggtggctccggaggaaataccaacaacacggctacgatggaaactagaaaggcgaggccacaagagaaagtaaattgtccaagatgcaactcaacaaacacaaagttctgttattacaacaactacagtctcacgcaaccaagatacttctgcaaaggttgtcgaaggtattggaccgaaggtggctctcttcgtaacgtcccagtcggaggtagctcaagaaagaacaagagatcctctacacctttagctgcaccttctaatcccaaacttccagatctaaacccaccgattgcttttctcaagccaaatccctaataagtcaaataaagatctcaactngctatctttcccggtcatgcaagatcatcatcatcatgctcttgagcttctaagatccaatggagtctcttcaagaggcatgaacacgttcttgcctggtcaaatgatggattcaaactc

SEQ ID NO: 95683 - DNA, 1557 bp, Arabidopsis thaliana columbia
gtggaaagaaagaaaaccatcgccatcaaggtcggcttctcggaccatatgctccgcttcttctgctgttatcttcatccccatgtccttcattccttctcccaactcaagttgagatatgagaccatctccgtctctgtcgaacactctgaatacctcaattaactcatccgatgctgattcctgagaagtgttttgagccataatatacaagaaatcatcaaaagtgatgccaccgttgccaaagatgtcaacatcgctcatcatctgttgcagttgttccgcctttggattcttccccatcgacttcatcactttcgttagcttctccttcgtgatgaacccatcggaatctttgtctatgagacagaaggcttcgtaaaactctttgacttttctttgtgttggtggctccggaggaaataccaacaacacggctacgatggaaactagaaaggcgaggccacaagagaaagtaaattgtccaagatgcaactcaacaaacacaaagttctgttattacaacaactacagtctcacgcaaccaagatacttctgcaaaggttgtcgaaggtattggaccgaaggtggctctcttcgtaacgtcccagtcggaggtagctcaagaaagaacaagagatcctctacacctttagcttcaccttctaatcccaaacttccagatctaaacccaccgattcttttctcaagccaaatccctaataagtcaaataaagatctcaacttgctatctttcccggtcatgcaagatcatcatcatcatgctcttgagcttctaagatccaatggagtctcttcaagaggcatgaacacgttcttgcctggtcaaatgatggattcaaactcagtcctgtactcatctttagggtttccaacaatgcctgattacaaacagagtaataacaacctttcattctccattgatcatcatcaagggattggacataacaccatcaacagtaaccaaagagctcaagataacaatgatgacatgaatggagcaagtagggttttgttccctttttcagacatgaaagagctttcaagcacaacccaagagaagagtcatggtaataatacatattggaatgggatgttcagtaatacaggaggatcttcatggtgaaaaaaggttaaaaagagctcatgaactatcagctttcttctctttttctgtttttttctcctattttattatagtttttactttgatgatcttttgttttttctcacatggggaactttacttaaagttgtcagaacttagtttacagattgtctttttattccttctttctggttttccttttttcctttttttatcagtctttttaaaatatgtatttcataattgggtttgatcattcatatttattagtatcaaaatagagtctatgttcatgagggagtgttaaggggtgtgagggtagaagaataagtgaatacgggggcccggtgtgtaatcagtgagatctgtattcatcgtttaaaaaatttgtagaagtatttctgtaatttattcatattttacaaccc

SEQ ID NO: 95684 - DNA, 785 bp, Arabidopsis thaliana columbia
  unsure (1)..(785): unsure at all n locations
nnnnnnnnnnnnnnnnnnnnnnnnnnnnnnnnnnnnnnnnnnnnnnnnnnnnnnnnnnnnnnnnnnnnnnnnnnnnnnnnnnnnaccgacccctttttttttttgtttcagtaacacacacttttaattatatgcttgggaaaatatagtaacatattgaaatatagttgtaattgtgcaaaaacaaactcttaaatcatggcatttcacaaaatgctaattagaggcagcagtcatcattttagagaattcgtggaaagaaagaaaaccatcgccatcaaggtcggcttctcggaccatatgctccgcttcttctgctgttatcttcatccccatgtccttcattccttctcccaactcaagttgagatatgagaccatctccgtctctgtcgaacactctgaatacctcaattaactcatccgatgctgattcctgagaagtgttttgagccataatatacaagaaatcatcaaaagtgatgccaccgttgccaaagatgtcaacatcgctcatcatctgttgcagttgttccgcctttggattcttccccatcgacttcatcactttcgttagcttctccttcgtgatgaacccatcggaatctttgtctatgagacagaaggcttcgtaaaactcttggatctgttcatctgtgaaagcatccgccatatcttcgatcacaaagaaaagtcaaagtctgtctttgattcaatctgatctcgagccgaattccgagcttacgtacgcgtgcatgcgacgtcatagtcttctataggtcacct

SEQ ID NO: 95685 - DNA, 661 bp, Arabidopsis thaliana columbia
aaatccttcaattttcaagctccttgaagaagatgaggatgaatcgatgcattcaggagctgacgtagacgcgttccaagctgctctgaatcgtgatattgaaggttctatgacaacttcaataccccacgtgacaaacccaggaaacaaccattcttccaggcagcagttttcgacatggaagaatggtattggagattctaatatcaatgtccagactcagcatagccttgaaagtactcagatgaaggagcaagaaggttcgactttagaaaatcaacatcaacatgatttgaaacgcgcaaatgaacctcatttacaacacaaccagcctcaagaccttcatcgagctggtcaactctgggagaatccctcgcaggtcccccaatcaactgggttaccgattagtgaaaagaatcctactggtaatgaatcagatagatcccataatcaagagagtgaatctcagtatatgaaactgcaaaagatgagtagtcaacaggctcggggagtggaaccgcctgttaaccctatgaatgttaaccctataaaccgcaaccctaagcaagtaccatttgctgctttgcttcctactttaatgaaccaactcgataaagatagagcactgcagcttcgtaccctatatgctagacttaagaaa

SEQ ID NO: 95686 - DNA, 538 bp, Arabidopsis thaliana columbia
  unsure (1)..(538): unsure at all n locations
nnnnnnnnnngccnnnnnnnnnnnnnnnnnnnnnnnnnnnnnnnncccacgcgtccggaagaatctttcaactatcactccctccacgcgtccggagaaaattcacttttccaatcaaaacgtaaagaagaagaggaagaatggctacatgtcctcctttcgatttctcgaccaaatattacgatggtgacggcggatgccagaggcagagcagcttcttcggaggcacgacggtgctcgatcaaggcgttggctacgccgtgattcttggttttggtgctttctttgccgtcttcacatcttttttggtatggttagaaaaacgatatgtgggagctcgtcatacatcggaatggttcaatacagcgggaagaaacgttaagacaggacttattgcaagtgtcattgtatcacagtggacatgggctgcgaccatactgcaaagttcaaacgtagcatggcagtatggggttagtggaccgttttggtacgctagtggagccaccatacaggtgctgttgtctggtgtgatggcgat

SEQ ID NO: 95687 - DNA, 416 bp, Arabidopsis thaliana columbia
  unsure (1)..(416): unsure at all n locations
gcgtncgcatcgtcatagaaatcctgctctttcttcgattctcgactaagctttgaaatctgctgggtggttgaaaatggaactacaagatgctatgaatgatgagaatgagaaagcccctgaggcttcggtggttcagaatgatgaagtttccgggaacaatggggatgtagtggttgaagctgaggaaaaggatgggaatgaggttgtagaacccgttgattcaggaaaaagtaaggctgatgacgagtttgttgaaagtctgttggataccaatcaggatttggctaccttcaaaataccggtagaggaaaatgattcggaaaatgtgactgttgtagatccttctcttcctgcctctgttgatgcatcttcttctggaatgaaaaagccttatggtttactattcgtattct

SEQ ID NO: 95688 - DNA, 383 bp, Arabidopsis thaliana columbia
tgtacctgtgtctgacaaggccattgaggaggtagaagaaaaatttactagcgaatcagactctattgcagactcctctaagttagaatctgtggataccagtgctgtagagccagaggttgtagctgccgagagtgggagtgaaccaaaggatgtggaaaaagccaacggattggagaagggtatgacttatgctgaagtaatcaaggcagctagtgcagtagctgacaatggaaccaaagaggaggagagtgtgctcggtggcatagtcgatgatgcagaagaaggtgttaagttaaacaacaaaggagactttgtggtggactcatctgctattgaagctgtgaatgtagatgtggcaaagccaggggttgttgttgttg

SEQ ID NO: 95689 - DNA, 659 bp, Arabidopsis thaliana columbia
  unsure (1)..(659): unsure at all n locations
ggtgacaatatagaagagttatgacgtcgaacgcacgcgtacgtaagctcggaattcggctcgagtctgcaacggagggtttggtggattgaacagacttgcggagcttatgggagtggagagagttgggatttgtcatcaagctgggtcggatagcttgctcaccttagggtcgtttaggaagctcaaggaacgttatttcccgggatcaactgagaaatacacttttgtcttgtatggtctaggtgtggaagatggctctactactactgttgctaattaagaagaaagggatggaagatccctttgaacattcccagggaagtgccgatcaggtatatccctttagcctttgtgagtgtgagaagacccaaaataggaatcgtcgttgtgtaaatggccaaatgggtgttagtaagtgacttgttgtgtctttgttgcttttgttttcaggaaaaccccttgtgatcaaaatttgaggggtttttgttttagcttgagtttctgaatgtatatcaattcagctacccgtttatntnataaataatctccaattttaaatgttactctcttttctttttgtgtgttttcttcttactagtgaccaatgtaacttgacagtgtcttcttgtactagcgtactagcgtttgcttgtccc

SEQ ID NO: 95690 - DNA, 1212 bp, Arabidopsis thaliana columbia
gtttgttgtatatctagaaatggcggagactttgaaagaagattcgattatgattcgagaggtttgggattacaatttgggggaagaattcgcgttgatccgtgagattgttgacaaattcagctatatcgctatggatactgagtttccaggtgtggttttgaagcctgttgctactttcaagtacaataacgatcttaactacaggactctcaaggaaaatgtcgatttgttgaaattgattcaagttgggttaactttttctgatgagaatgggaatcttccgacttgtgggacggataagttctgcatctggcaattcaatttccgtgagttcaacatcggggaggatatctacgcgagtgagtctattgagctgttgcgtcagtgtgggattgatttcaagaagaacattgagaaaggtattgatgtggttaggtttggtgagcttatgatgtcgtctgggattgttttgaacgatgctatctcgtgggttacgttccatggtggatatgatttcgggtatttggttaagttgttgacttgtaaggaattgcctctcaagcaagctgatttcttcaagcttctgtatgtgtatttccctacggtttacgatatcaagcacttgatgacgttctgcaacggactgtttggtggattgaacagacttgcggagcttatgggagtggagagagttgggatttgtcatcaagctgggtcggatagcttgctcaccttagggtcgtttaggaagctcaaggaacgttatttcccgggatcaactgagaaatacactggagtcttgtatggtctaggtgtggaagatggtactactactactgttgctaattaagaagaaaggaatgaaagatactttgaaaattccagggaagtgcgattagatatatttctttagtctttgtgagtgtgagaagaccaaaatagaatcgtcgttgtgtaaattggcaaattggtgttagtaagtgacttgttgtgtctttgttgctttgttttcaggaaaaccccttgtgatcaaaatttgaggggtttttgttttagcttgagtttctgaatgtatatcaattcagctacccgtttatttaataaataatctccaattttaaaaaaaaaaaaaaaagggcgtcctccgtggagtgagctcgtcgacccagcaattaattccggcccggttcctgcaggcgtgcgtagctt

SEQ ID NO: 95691 - DNA, 604 bp, Arabidopsis thaliana columbia
  unsure (1)..(604): unsure at all n locations
tacgacaagaanaataccggtccggaattcccgggtctctctctggttgacccgataatttctctctcgcagacgcacagatctctcttcgaatctgctagatctgttccttttcttacatctgtattgcgaaacctctgatcggaaggtttcgtttacagatctaccgatacgagtttcgcagtatttccgagttccgacgtatgctttgttttcagatctgggtttgttgtatatctagaaatggcggagactttgaaagaagattcgattatgattcgagaggtttgggattacaatttggttgaagaattcgcgttgatccgtgagattgttgacaaattcagctatatcgctatggatactgagtttccaggtgtggttttgaagcctgttgctactttcaagtacaataacgatcttaactacaggactctcaaggaaaatgtcgattttttgaaattgttcaagggtggggtaaccttttctttggggaggggggatttccgtcttttgggccgggaagncntcaactgggaatcaattnccggnggnaanaccggggggttnntcgggganagctttttgnnttcgcngnnggttc

SEQ ID NO: 95692 - DNA, 545 bp, Arabidopsis thaliana columbia
cgaaattcgaccgaataaagagctggtccggttgcgaaggcgttcatgccttacccactagggagagatccttcctcactcccaaagcttgatccggtatctcatcagctatatcgatagccgcccaattgctcggcgctacagagtcagggcagtgatcgagatgtctaatctcgacgaagcctcgaagctctcgcggctagctgtcttgaacggatttctagtcgacagagacaccgtcttcatctgcaattccgtaatcggcgccatgtgtagcgccaaacggtacgacgatgccatctctctgttcaattactttttcaacgagtctcagactcttccaaacacgctctcctgcgatctcatcatcaaagcacactgcgaccaaggtcacgtcgacgatgctcttgagctctaccgtcacattttgctcgacggacgtgtagctccagggatcgagacatacatgatactcgcgaaagccttggttgatgctaaaagattcgatgaagcttgtgttttggcgagatccatgagctgttgta

SEQ ID NO: 95693 - DNA, 464 bp, Arabidopsis thaliana columbia
tctcgttcgagcttccatttttcctcatcgcaatcttcatcttcaatctccagctatctcaactcgatccttctcgaatcaccatcatgagtgaccatggcgagaagacttgcccactttgtgctgaagagatggatctgactgatcaacaattgaagccttgcaaatgtggttatcacatttgtgtttggtgctggcatcacatagcggacatggcacagatagatcaattagaagggcgttgtccagcttgtcgcactccatatgacattgactcgattgtagggatgactgttaattgtgacagtctggcttctgaaggcaatatggagcgcaagaagatccagaagtcaaaatcaaaatcttctgaagggagaaagcaacaactcaccagtgtgcgagtgatccagaggaatcttgtttacattgttgggttgcctcttaatctagccgatgaagatcta

SEQ ID NO: 95694 - DNA, 957 bp, Arabidopsis thaliana columbia
  unsure (1)..(957): unsure at all n locations
atgatactttcnnnnnnnnnnnnnnnnnnnnnnnnnnnnnnnnnnnnnnnnnnnnnnnnnnnnnnnnnnnnnnnnnnnnnnnccacgcgtccggttcagaaagtcaaagatggagacctaggattgctgttaggagatgattggattcggaaacacaatgtcaaagtgaaacaataccatatgaattatcagagaagctcatggaataagatgctggggttgctgaaggtggataatactgcagcaggcatgaacggtttggggaagaccatgaaggagaagctgaagcagttcaatattcagtttgatgagatatgtaaagtgcattcgacgtgggtagtgtttgacgagcagctgaaagaagagctaaagatctcactggccaggcttttggtaccggcatacgggagcttcatcggcaggttccaaaaccttggagacatagggaaaaacgcagacaagtacatcaagtatggagttgaggacatagaggcgcgtattaacgagctgttcaaagggactaccccgggaagaaaatgaaggtaacgaacccaaaaatagcctcttgtaacatcttcgtaacgaaccacctgctaaatgaccaatagcgaagtcttgcagggaggatttgtaacatgtattgtgtatccttttagacagttagctcagctctgttgtgttgttgtgtaatgttgtattgtaactggatcactttttttgtcattgtaaaaagagaaaacagttgaaaaagatgacatgttagggacttggatctacttctaagtcttgagtgcatattttatcaatatgttcttacatctaagtcttccctttttnnnnnnnnnnnnnnnnnnnnnnnnnnnnnnnnnnnnnnnnnnnnnnnnnnnnnnnnnnnnnnnnnnnnnnnnnnnnnnnnnnnnnnnnnnnnnnnnnnnnnnnnnnnnnnnnnnnnnnnnn

SEQ ID NO: 95695 - DNA, 425 bp, Arabidopsis thaliana columbia
  unsure (1)..(425): unsure at all n locations
tgtgcagagaaccggtgaacaangactcagcgattgagaagatagtgagagaagctcataactcggtgttgcctgcgtcaagcgaggctacgtttcttgaagcagtatctgtggccatggatcgtcgtctggacgagctaactaagtaaccagtcttaagtacataataaagtttggttttatggtatgtatatgtatatgatgtaatgtatctattatgtttgttttcgttgagaaaaacgttgataggctcttcttggataattttttccttccatgaaagaagcctttaagcttttgtgttttgcggccgaaactgataaataaancgttgttgctaaaaaaaaaannnnnnnnnnnnnnnnnnnnnnnnnnnnnnnnnnnnnnnnnnnnnnnnnnnnnnnnnnnnatggaagtgcaattca

SEQ ID NO: 95696 - DNA, 748 bp, Arabidopsis thaliana columbia
gcgtttcctgttgaggaagtgcacaaaatctgtgtctttgacataagaatggcaaatgcggatcgacatgctggaaacatattgaccgggaaaagcgaagaaggaaaaactcttcttattcccatcgatcatggttattctttgccccagaattttgaagattgcacatttgagtggctctactggccgcaagcgaaactcccgttttctgcagacacccttgtactacataaactctctagactccgaacaagacattgcgcttctgcaactccatggctggaatgttcctgaagctgtctcacgcactctacgtatctccacgatgctgctgaagaaaggcgttgagagaaacctgacgccatatcaaataggaagcgtaatgtgcagagaaacggtgaacaaagactcagcgattgaagagatagtgagaaaagctcataactcggtgttgcctgcgtccagcgaggctacggttcttgaagcagtatctgtggccctggattgttgtctggaccagctaactaagttaccagttttaaggacaatataaagtttgggtttaagggaaggaaaaggaaaagaagtaaaggatctattaaggttggtttcggtgaaaaaaacggtgataggcttcttctggaagcggcccgcgaattcttgcaagcccgggggaattccactagttctagaacggccccccccccggtgagctccagctttgtcccttaggaggttattgtagctg

SEQ ID NO: 95697 - DNA, 681 bp, Arabidopsis thaliana columbia
  unsure (1)..(681): unsure at all n locations
cttcatgatatcaacaaaacacacctcaacaaaaaaaaaaaaaaacttcatctctctcagatttcgaaattgacccgtcggtgattcttaatctctcctctctgttcttctccgatcaaacctcattccaaagaaacaaaccatggatctccaaccagaagagcttcaattcttgacaatacctcaactacttcaagaatcaatctcaatcaagaaacgatctccaagaaccttctacctcataaccctctccttcatcttccctctctccttcgctatcctcgctcactcactcttcactcaaccaatcttagccaaactcgacaaatccgacccaccaaactcagatcgttcacgtcatgattggactgttcttctaatcttccagttcagttacttgatcttcctctttgccttctctcttctctcaaccgctgctgttgtcttcaccgtcgcttctctttacaccggaaagcctgtttctttctcgtcaactctctctgcgattcccaaagtctttaaacgactctttataactttcctttgggttgctctgttgatgtttgcttataacgcagtcttctttgtcttcctcgtgatgcttctcggtagctcttgatttgaaatagtttaggtttagctattgtaggccggggntataaatctctggttcctatactt

SEQ ID NO: 95698 - DNA, 1073 bp, Arabidopsis thaliana columbia
  unsure (1)..(1073): unsure at all n locations
tatcataactcaccaaccaatcaactaaccatggattccgagatcgccgtcgactgctctccattgctcaaaatctacaagagtggccgcatcgagcgactcatgggtgaagccaccgtcccaccttcttccgaaccacaaaacggagtcgtttccaaggacgttgtttattctgccgacaacaacctatccgtccgtatttacctcccggagaaagccgccgccgagaccgactcgaaactccctctcctcgtttacttccacggtggaggattcatcattgagacagctttctctccaacttaccacactttcctcacgacgtctgtctctgcgtcgaactgtgtagcggtctctgttgattaccgtcgtgcaccggagcatccgattctccgtcccgttcgatgattcttggacagctctcaaatgggtattcacccatatcactggatctggtcaagaagattggttaaacaaacatgctgacttcagcagagtgttcctctccggagacagtgcaggagcaaacatcgtgcatcacatggcgatgagagctgcgaaagagaaactcagtcctggtttgaacgatacaggaatctctggaatcatcttgcttcatccttacttctggtcgaaaacaccaatcgacgagaaggatacgaaagatgaaacgttgaggatgaagatagaggcgttttggatgatggcaagtcctaatagcaaagatggaacagatgatccggttgctcatcgtggtgcaatcagagtcggtggatttgtctgggttgggttgtggtaaggttttggtaatggtggctgagaaagatgcgttggtgaggcagggttggggttacgcggctaagcttgagaagtctggttggaaaggagaggttgaagtggtggagagtgaaggagaagatcatgtttttcatttgttgaaacctgaatgtgataatgctattgaagtcatgcataaattctcagggtttattaagggagggaactagctttgtgctctctagagatattggaataatttggtactacatnnnnnnnnnnnnnnnnnnnnnnnn

SEQ ID NO: 95699 - DNA, 577 bp, Arabidopsis thaliana columbia
  unsure (1)..(577): unsure at all n locations
agagaaatggggagatctatggtgctaatctcggcggttgtactggcttttctagtggcggcgccgataccagaagtaacagccaagaaatatttagtcggcgacaaaaagttctggaaccccaacattaactataccctatgggctcaaggcaaacatttctacgtcggagactggctttattttgtgttctatagagaccaacacaacattcttgaggtaaacaaggctgattatgaaaaatgtatctccaaccgcccaatacgtaattatacacgtggagctgggagagatattgttcctctctatgagactagacgttattatctacttgatggaagaggtggttgcgttcaaggcatgaagctagatgttttagttgagactcctcctcctccttcctctttttagttctcctcctcngnaccattaggantcatttttatgnggancccanaagtggtttngattttttccggngggtcaccacttngtaagggaatnttntttcggnctagggngngttttntggaaaattcnaaaaaggttttggaacggtaannggttaaaaaaagga

SEQ ID NO: 95700 - DNA, 786 bp, Arabidopsis thaliana columbia
cgcggtaccggtccggaattcccgggtcgacccacgcgaaatggggagatctatggtgctaatctcggcggttgtactggcttttctagtggcggcgccgataccagaagtaacagccaagaaatatttagtcggcgacaaaaagttctggaaccccaacattaactataccctatgggctcaaggcaaacatttctacgtcggagactggctttattttgtgttctatagagaccaacacaacattcttgaggtaaacaaggctgattatgaaaaatgtatctccaaccgcccaatacgtaattatacacgtggagctgggagagatattgttcctctctatgagactagacgttattatctacttgatggaagaggtggttgcgttcaaggcatgaagctagatgttttagttgagactccttcttcttcttcttcttttacctcctcctcctgcagcacaataagaaatcaattttatgtgtatctatataagttgttttggatttttttccggcgagttcaccaacttgataaggcaaatgttgttttcgtactaagagaagtgaacatggtggtatatttcataatatgtttttatgaatacgttataattcagatttataaataaataaaagggttttggtttggggggggttaaaaaaaaaaaaaaaaaaaaaagggcgcgggtctggtttcttaagaagggattcccaaaggcctttgacggataaccccccgtggccattgtccaaaacggtcaaaataaggatatattttctttat

SEQ ID NO: 95701 - DNA, 747 bp, Arabidopsis thaliana columbia
gaaaaataaaaaacctttaaaccctttttttgtgtatccgattccgtcgcaagtacattcggactctttcacggcgtcaatgtctgagaacgcagccaacaacatcatggagaccaagatttgtacagacgccatcgtgtctgaattacagaagaagaaagttcatctcttttactgcttagagtgcgaagaacttgctcgcaacatcgccgctgaatctgatcacatcactctccaatccatcaactggaggagttttgctgatggattcccgaatctatttatcaacaacgcacatgatatccgaggccagcacgttgcgttccttgcttcattcagttcccctgctgtcatctttgagcagatctctgtcatttacttgctccctcgattgtttgttgcgtccttcactttggtgttgcctttcttccccactggctcctttgagagaatggaagaggaaggagatgtagcaactgcttttaccatggcaaggattgtctctaatatccccatttcacgcggtggtccgactagtgttgtcatctatgacattcacgctttgcaggaaaggttttactttgccgatcaggttcttccttggtttgagactggaatcccgttgttgactaaacgccttcaacagcttcctgaaactgagaaagtcatagttgcatttcctgatgatggagcctggaagcgtttccataagctgttggatcattatcccacggttgtgtgtacaaa

SEQ ID NO: 95702 - DNA, 623 bp, Arabidopsis thaliana columbia
gcacgcgtacgtaagctgggatcctctagagcgggcggcgaaggggtttttattgttgttttatgatggctcaacaacaaactttccattcacccatttatagatacacagtctagctcaacagagcttttaacccaaattggtacaatagaatacaactttagatcataattctcaaaagaaagagattccttagctattctatctgccactccatttccttctcggcttgtatgcacaagcataaaatcctcaaacttgctaagtagatactttatgtcttggataattgaattgagacttgacaagcataactttcatgtaaccaaagacacaagttgctgagaatccacctcaaaaatgatcttcctataattgaatcgggataatgacagcacagcccatctaagagcctccacttctacttccagcacgcttcttacttttaccacagctcttgcacctaaccataacaccttccctgtatgatcgcgaagcacccaccctaagccacattttaatccttctgtcgtcttctcgcagccgtacccttctgtcgtcttctcgcagccgtacggacgcgtgggtccccccgggaaaaccggaccggtacctgcaggcgt

SEQ ID NO: 95703 - DNA, 517 bp, Arabidopsis thaliana columbia
  unsure (1)..(517): unsure at all n locations
gcgcaaaaaacctagccagaacaagccctcgtgtgagcgtggacatgtctaacatacaggttgagacaaaggcgagtgcctcggcgtggtctatggtnattgtgactggcagtctacgaggcgaaatcagaatatttcagaattttggatttccagttcgtctatgatgcaaggagaaggttttacaatatcaaaatcctaaggcaaagtgaaattttcccttagtaaaaccatctcctgtcaaaagtgtatagattgagagaaggtttggttcatccactgacttctctcgttttttttttttaccacgctgcttttatttatctgatttgttatctctaaaattcaaatctctagcaaatatatataatgttatttttaagaaagattcaaataggcagaaaaagaaacttcatataccaatatagtttgcttcgatgaaagtctgtgctattcaacttgaagtttgtagaatttgtctctgatattataactcttcaaggagagaatatatggt

SEQ ID NO: 95704 - DNA, 507 bp, Arabidopsis thaliana columbia
  unsure (1)..(507): unsure at all n locations
nnnnnnnnnnnnnnnnnnnnnnnnnnnnnnnnnnnnnnnnnnnnnnnnnnnnnnnnnnnnnnnnnnnnnnnnnccacgcgtccgggggaaactctctctctctcgggaccggaacacagactgaatagggaaggaagaatgtcgtcgccaatcaagaaggtcaaacactttacggaccttgaccagaaatgtgtcaacacgatccgaacgctgtgtgcggatgtcgtgcagaaggcgaacagtggacaccccggggcgcccatgggatgtgccccgatggcccacgttctcttcaccaagtgcatgaagttcgcgccgtcccaccctcactgggcggaccgtgatcgctttgttctctctaacggccacggttgcgctctgttgtatgcgctcctgcacctcactgggtatgaacgacccacgatggacgacttgaagaaattcagacagcttgactcggtcacacctggccaccctgagcgcaaccacggtcttgagggtatcgag

SEQ ID NO: 95705 - DNA, 1216 bp, Arabidopsis thaliana columbia
  unsure (1)..(1216): unsure at all n locations
ctcactatataaacacacactcacacattcactctacaaacactagaaaccacaaagacaaaatcaaggtcttaaacaatgagatcccatctcttgattttgttaatctctctcttaatcttgaaatctgaatccataaactgcaatgaaaagagccattcctcagatctaagagtgttccacattaacagtctatgttctccattcaaaacttctgtttcatgggcagatacacttcttcaagataaggctcgtttcctatacttgtcaagcctcgctggcgttaggaaatcatcagttccaatcgcctctggtcgggccatcgttcagagcccgacttacatcgtgagggctaacatcgggacaccggctcagcccatgctcgtggctcttgacactagcaatgacgctgcttggattccttgttctggctgcgttggctgttcttcctctgttctctttgacccttccaagtcaagctcctctcgtactcttcaatgcgaagctcctcagtgtaaacaggctccaaatccaagttgcacagtaagcaaatcatgttggtttcaacatgacctacggtgggttcaaccatcgatagcatatctgacacaagacacactaacattggccagtgacgtcatcccaaactacacctttgggtgcatcaacaaagctagtggaacatcgttgccagcgcaaggactcatgggcttaggtcgtggtccattgtctttaatctcacagtcacaaaatctttatcagtctacattctcgtattgcttgcctaatagtaagtccagcaatttctccggatcactaagattgggacctaagaaccaaccgatccggatcaagaccactccattgttaaagaaccctagaagatcatcgctttactatgttaacttggttgggattcgtgtcggaaacaaaattgtggatattcctacaagtgcactcgcctttgatccggccaccggagccggcaccatctttgactcggggacggccttcacaagggtagccgaccagtttcgtggcggtagaaccgagtcnggngacgtgttagaacngaacggaactttccnngngggtttngacatgaancngggccggcgggtccgccggngnggtttgtncccggataanggacttnccccanaaacttttnnaagcccgnggaaccnnggncnccaagggnaccccggnaagaanc

SEQ ID NO: 95706 - DNA, 698 bp, Arabidopsis thaliana columbia
cgaatacggtaacgtatagccatttgattcacgggttttgtaatgaagatgattgggaggaagcgaagaagttgttaagattatggtgaacagaggatgtaagcctgatagtgagtgttacttcactcttatatattacttatgcaaaggaggagactttgagacggctttgagtctttgtaaagagagtatggagaagaattgggttccgagttttagtatcatgaagtcgcttgttaacggactagctaaggattcgaaagtcgaagaagcaaaggagcttattgggcaagtgaaagagaagttcactagaaacgttgagttgtggaacgaagtcgaagccgcattaccgcaatgaatcaaaagatagttcccgagatcggtattttcaaaattttacgaattttctctcttcatttgtcagcaatgaaataagtttatatcttcttagaagatagtaatcttttgctcatcatggtagctatagattaatggtttatcttgttagtttttggatttggaatcagagagatgttgagcagtttatctgtaagatttggtcaaagcattgtagcaatgttaagtgtcttcctatgtttatattatatagtatgacgcctatatagggcggccgctctagaggatccaagcttacgtacgcgtgcaggcgacgtcataatcttgtatagtgtacctaa

SEQ ID NO: 95707 - DNA, 850 bp, Arabidopsis thaliana columbia
cttcatcatcatcatcaaatcccagctttcttccaagtgatccttcactctctatactgcgatttaccgttcttctgactcttgttgcgaattcggatcggctgacgcagctccgattgcacaacaatggcttctcgtatcatcaatcattccaaaaagttgaaacatgtttccgctttactgcggcgtgaccatgctgtggcagtccgctgtttctccaacagtacccacccctctctcgttggaagagaagatatcttcaaggcccgcctgaattattcctctgtagagagaatttcaaaatgtggtactggcaatgtaacaatgcttagtggtatttcaacaacgagcacaaaactaagcagcccaatggcaggaccaaaactatttaaagaatttataagctcccagatgcgatcagtgagaggattttcatccagttcagatcttcctcctcatcaagagattggaatgccttctctttcgccaacaatgactgagggtaacattgccaggtggctgaagaaagaaggtgataaagttgctcctggtgaagtgctttgtgaagttgaaactgacaaagcaacagtcgaaatggaatgcatggaagagggttttctcgccaagatagtaaaggaggagggggcaaaagaaattcaagttggggaggtgattgctatcacagttgaagatgaagatgatattcaaaagtttaaagattacacaccctcatccgatactggtcccgctgcgcctgaagcaaaaccagctccttccctaccaaaggaagagaaggtagagaagccagccagtgctcctgaagccaagatctctaagccaagctcagctc

SEQ ID NO: 95708 - DNA, 392 bp, Arabidopsis thaliana columbia
aataaagagatcgatgtactctttcgaatctccattagaggcgttggcgtttgaatacgctagcttaggtgttttcgccggcgtcaacaacgtctggacgtggatcgccgtcgtgactgccgctgtcagcttctggaggatcagagtcacatccataggagtcggagacggccatgcatgtgtctttgatagtagaattaaccggttctaaatctgaaaacgaatccggtcgtctcgaaccgaaatcaataaccggtccggtcaaagaaacggttgcacgagtgaaggaaacggttacgaaaacggagccgttaatatgcgatgacggagtgacaaaggggaagcttgcgatgtgctacgaggtagacgttgacgttgacggtgggaggtgt

SEQ ID NO: 95709 - DNA, 761 bp, Arabidopsis thaliana columbia
  unsure (1)..(761): unsure at all n locations
nnnnnnnnnnnnnnnnnnnnnnnnnnnnnnnnnnnnnnnnnnnnnnnnnnnnnnnnnnnnnnnnnnnnnnnnnnnnnccacgcgtccgtacggctgcgagaagacgacagaaggggggggtcaaaattttaacaaaaaggaggggaaatttgtgtctgaaaaatgtggtgtgcttgctatcatcagccattacctgccagttccgtcgtgttgaatcagcaggcgaagcaagaagagagtctgagaagaaaacaagtgttcttcttcttatcctcatcatctccttcaagcttaagcaccaaacatcaatggcaaatcagtaattatcctaaaaatgggttcagactaaaaccaaaagcgagtgtgttgcctccttctgagtctggtgatatcactacattcctctttgttagtggagcaatgatctccatgtatttggtaaccaattttctggttccatcgttgcttttcaagtctctccaaggtgaagaagaggaagaagaggaagactccgattaaactatgaactattaaacgagttcttattaaatcatgggttaatatccggatactaaagttttacgatccaaaaaaaataggaaccaaccacctgtnnnnnnnnnnnnnnnnnnnnnnnnnnnnnnnnnnnnnnnnnnnnnnnnnnnnnnnnnnnnnnnnnnnnnnnnnnnnnnnnnnnnnnnnnnnnnnnnnnnnnnnnnnnnnnnnnnnnnnnnnnnnnnnnnnnnnnnnnnnnnnnnnng

SEQ ID NO: 95710 - DNA, 629 bp, Arabidopsis thaliana columbia
acttcacgttacttttctatctacattttcactttcaatggctttgattatcacctgctccgctctacccacgatccgagcatcttccggatccggatcccttaacccggatcaaaaccgtaagaaatctgctgcttggtgggctcctctcttcggtttaccctccgatccagattacctcaacatcgaaagctcatgctccaccgtgaatccggataaaaccgatatttccgggtcgggtcaaaagtttcgtcgcggttgttttacggaggagaaagctaagcagttgaggaggaaaaccgcagaagcttccacgttccatgacgtaatgtatcactccgccattgcttctcgacttgcgtctgatatcaccggccgagtcgaggattgaaacggattcgggtcagatctggagacgaatcaattaatgaataattaatcttttttttcttaattcagtgttcttgtaggatgcagaccatcttctatcggtgctcctttttcatttgaaccgttggcttgtgtttggtctttgtgtgttgtaaactctagttccctttctgtttcttctgtaatcaaccgttggatttccccttgttatttttagacatgtgttccctagttagctc

SEQ ID NO: 95711 - DNA, 542 bp, Arabidopsis thaliana columbia
cggacgcgtgggccggttcactactcaccttctccagtcgtataccactctccaccaccagcggttcactactgacctgctgcagttgtataccactccccaccaccacccaagaagcactacgaatacaaatctcctcctcctccggtccattactctccccctacggtataccattctcctcctcctccagtacaccactactcacctccacaccaaccctacctttacaaatcaccacctcctcctcactactagattacttaatcgtctctaatggagtcgacgacggtcacacaagaaaacaaagaatcgtttggtgatataataaaagacacaagatcgttgacgggagaattgaaacggatacatatgtcaaaagagaaagtttcccattttaatgtctcttctttatttattaatacgttactgtaataaacttcaaacatgttaatgagtgtgatcccttcatgcatgcaaatcagttatatggtttgtaagtagaagtcctgttttttgcttcaaatccttcaatattcaaa

SEQ ID NO: 95712 - DNA, 516 bp, Arabidopsis thaliana columbia
ctctacacgactcacttagggaaagctggtacgcctgcaggtaccggtccggaattcccgggtcgacccacgcgtccgccacactaatcggaaaaaatggcacagaagcttaacttgcttaatctcgccgtccctccggtcacccaccgctctaacttcccttccaccttcaccttcggcggtcgccactttccgcttaccagattgaaggaggttggcatgaaggtaaaaagggaccacgtatatgggataagttcactcatatcgaaagggaagattcttgatggaagtaacggcgatgttgctgtggatcattaccatagatacaaggaagatgttgatcttataggacaattaggattcggtgcttacagattttctatatcttggtctcgaattttccctgatggcctgggaactgaagtcaatgaagaaggcattgctttctacaacgatcttattaatacacttcttgaaaaaggtattcagccgtatgtaactctgtaccattgggaa

SEQ ID NO: 95713 - DNA, 610 bp, Arabidopsis thaliana columbia
  unsure (1)..(610): unsure at all n locations
nnnnnnnnnnnnnnnnnnnnnnnnnnnnnnaattcccggggtcgacccacgcgtcccgaagctatcaaagctaaaagttatggcgagccatttttgcttgcttctgatcttcactttcttcactctagtgtttccgtcaaacggatcttcactgtcttcttccaagcttttacctcgtttccctcgctacactttccagaaccgagaagccagaatccagcagttccggggagatcgaaacgagtatcgatacgagactaagttcttctcacagcagctggaccacttcagcttcgccgatcttcccaaattctctcaacgctacctcatcaattccgatcactggcttggtgcttctgcgcttggacctatcttcctttactgcggcaacgaaggtgatattgaatggtttgctacaaactctggattcatttgggatatcgctcccaagttcggtgccttgcttgttttccccgagcataggtattatggagagtctatgccttatggaagcaggaagaaggttacaagaacggtaccactttatcatatctcactactgggcaagcttttgctgtttctggttttgcacggatttaaagaacttttt

SEQ ID NO: 95714 - DNA, 627 bp, Arabidopsis thaliana columbia
  unsure (1)..(627): unsure at all n locations
tttacaaacaataattatcattataaaaggagtgacttgtcggctgcaaacgtgattacgtgaaccttactggttataatccaaaaatcacagctctaatttgccaacccaatccagatctctctagttttcaacttctcatataattattcattaatatatttattttgagattttggttgattttttgatatataaatattggacttgccattttctattacaaccatcaaatctcaataaagcaaaacgaacaagaaaatggcgagcacggaagctctcttacccgtcacgtccctacaagatccattatctgagtcaagatccgaccagatcccggagacccgtcggagacgacccatcaaagttcatcttgcagtctattccggtttgctcttgatcgctttgtacgtcactctcatcgtcacacacgacggctccaaggctgaaatagcgacggagtcacgtcctcgtatggccggcgtgtcggagaagagcaacgacgggggttggatatcatccgatgatgggaaagttgaagcgttcccgtggaacaatactattttgtcggggcaaacgggtcgaccntgggcgacccgggatccgacggactgagggananttccc

SEQ ID NO: 95715 - DNA, 842 bp, Arabidopsis thaliana columbia
  unsure (1)..(842): unsure at all n locations
nnnnnnnnnnnnnnnnnnnnnnnnnnnnnnnnnnnnnnnnnnnnnnnnnnnnnnnnnnnnnnnnnnnnnnnnnnnnnccacgcgtccgcccacgcgtccgacgacgttgcagagaaggtttgggctgaggtcttcttctacctcgctcagaacaacgtcatgttcgaaggtattctcctgaagccaagcatggttactccaggagctgaggccacagacagagctactcctgagcaggttgcttcctacactctcaagctccttcgcaacagaatccctcctgctgtccccggaatcatgttcttgtctggtggacagtccgagttggaggcgaccttgaacttgaacgcaatgaaccaggcaccgaacccatggcacgtgtccttctcctacgcacgtgccttgcagaacacttgcttgaagacatggggaggcaaggaagagaacgtgaaggcggctcaggacattctcttggccagagccaaagccaattcgctggctcagctcgggaaatacactggagaaggcgagtctgaggaagccaaggagggtatgtttgtaaaaggctacacctactaagctatttgtaataatggttccatagatcaaaactcaaaaacttgagcttgattctggtcatttgagttattatactcttcttcaggtataaaagtcagttctgtgttaaaaaaaaaaaaaaaaaaaaaaaaaaaaaaaaaaacaataaaaaaaaaaacgggtctaacgattttaagaaatccaagctaactgttccctaacatgcgacctgtttattgttttattggtggcccaaatttcaattctctggccgccgttttaca

SEQ ID NO: 95716 - DNA, 551 bp, Arabidopsis thaliana columbia
attgggtgacactatagaagagctatgacgtcgcatgcacgcgtacgtaagctcggaattcggctcgagaaagcgttctcttccgtcagccttcttccgcttctgtcgtcctccgcaaccgtgccacctccctcaccgtccgtgccgcttcctcctacgccgatgagcttgttaagacagcgaaaactattgcgtctcccggacgtggaatcttggcgatggacgaggcaaacgcgacttgcgggaaacgtttggattcgatagggctagagaacactgaggcaaatcgtcaagctttccggactttgctggtctctgcaccgggactcggacagtacgtctccggcgcaattctatttgaggagactctgtaccagtctaccaccggaggccagaaaatgggcgacgtcctcgtcgagcagaacattgtccctggtatcaaaggcgacaagggtttggtgccacttggtggatccaaccatgagtcaatggtgccaaggactcagatggtctatcatctcgaactgctgcttactatcaacagggtgcgc

SEQ ID NO: 95717 - DNA, 1217 bp, Arabidopsis thaliana columbia
gcacagactttataatctccctatctgcaaccacccgcccgcggagcagcagtacttatgttggcaaattaaggtctggttttctgggaaccaagttcacaatatatgacaaccaaacagcatcatccacagcacaagcccaacctaaccgaagactccacccgaaacaagcggctcctaaactacctacgaatagctctaccgtaggaaacataacctacgagctcaatgttcttcgcacaaggggacctagaagaatgcactgcgctatggattctatacccctctcttctgttattgctgaaccgtcagtagttcaaggcatagaagaggaagtctcttcctctccttcaccaaaaggagaaaccatcacaacagtcaaagagattcctgataattctctaagcttaagggaccaaccgctagttctcaaaaacaaatccccaagatggcatgagcagttgcagtgctggtgcctcaacttcaagggaagagtgactgtggcttcagttaagaacttccagcttgttgcagagattgacgcttctttggatgcaccgcctgaagaacatgagagggtgatcttacagtttggcaaaatcggtaaggatattttcaccatggattatcgctaccctctatctgcttttcaagcctttgctatatgcattagcagctttgacaccaaaccggcatgtgaagggtaaactttaacccaccgagttaaatccatctctgcaaatcatcatagaaggcttttcttatctttaggtttcaatgtatcaatccacgaaaagctctttgtatgtagattgttgtagctcttttgaactatgctttaaatccggatctccaaaatcactgtgtcaaatgttttatggaggtcttggttgataagcttactgaagttatgattgttatatccaatgtaatatataaacaaaagccattgcacaacaataataactaatctgattatagactcttcatgtggtatcaacatcagtatctttcatagtccatgttcttcaaacttctcctgctcaaatttctcatctcagtgttgaataagtgagaaactccatcgatgtaaactgaaaaggttggtgcggaataggatttggtctagggccgtaaactttgatctggcggatatgagtatctctcccgttgaggtgatttgacaaaatggctatttgtaacataaatgtattgac

SEQ ID NO: 95718 - DNA, 704 bp, Arabidopsis thaliana columbia
  unsure (1)..(704): unsure at all n locations
tncgttcattccnggnccttttccnatcccaacnctatcnnngaanggnanctgtnggcccgggtacattccgnttcccggngnccccccgtccggnnttcccctggcaggtgcttcctacactntcaagctncttcgcaacagaatccctcctgtntccccggaatcatgttcttgtctggtggaccagtccgatttggaggcgaccttgaacttgaacgcaatgaaccaggcaccgaaccccatggcacgtgtccttctcctacgcacgtgccttgcagaacacttgcttgaagacatggggaggcaaggaagagaacgtgaaggcggctcaggacattctcttggccagagccaaagccaattcgctggctcagctcgggaaatacactggagaaggcgagtctgaggaagccaaggagggtatgtttgtaaaaggctacacctactaagctatttgtaataatggttccatagatcaaaactcaaaaacttgagcttgattctggtcatttgagttattatactcttcttcaggtataaaagtcagttctgtgttgaaaaagactgaaacatgcttaaaaagagaacttacaaagattagagaggcgggtcttccggttctagttctctggactattttccttaaagtagctcctgcatatggtttgattgttgcccagattgtcgagatgatgactcgg

SEQ ID NO: 95719 - DNA, 652 bp, Arabidopsis thaliana columbia
  unsure (1)..(652): unsure at all n locations
cccacgcgtccgcccacgcgtccgcccacgcgtccgcctgaagccaagcatggttactccaggagctgaggccacagacagagctactcctgagcaggttgcttcctacactctcaagctccttcgcaacagaatccctcctgctgtccccggaatcatgttcttgtctggtggacagtccgagttggaggcgaccttgaacttgaacgcaatgaaccaggcaccgaacccatggcacgtgtccttctcctacgcacgtgccttgcagaacacttgcttgaagacatggggaggcaaggaagagaacgtgaaggcggctcaggacattctcttggccagagccaaagccaattcgctggctcagctcgggaaatacactggagaaggcgagtctgaggaagccaaggagggtatgtttgtaaaaggctacacctactaagctatttgtaataatggttccatagatcaaaactcaaaaacttgagcttgattctggtcatttgagttattatactcttcttcaggtataaaagtcagttctgtgttatcatgtgagactagttttgtttcttcatggttaatatcttagtacctactcgttactactaaaaaaaaaannnnnnnnnnnnnnnnnnnnnnnnnnnnnnnnnnn

SEQ ID NO: 95720 - DNA, 1323 bp, Arabidopsis thaliana columbia
tttggtccgggagagtccagctaaataaagaatgcggaggcccccagaggagctcggctattgtcacccgggaacttccagtcagcctagtagattgcagctaggctcttttgatttatggggtgggcaggccgtcttagtggtgacgtttgtctgttaattcgttacgacgagcctcagctgtaactagttcgtgaggctcccttccggccggcttctagagggactatgccgtttagccaaggaagtttaggcaaaaccaggttgtgaccccttaatgttatggccccacgcgcgctacactgatgtattcaacgagttcacaccttggccgaaaggcccgggtaatctttgaaatttcaccgtgatggggatagatcattgcaaattgttggtcttcaaccggaggaattccttagtaagcgcgagtcatcagctcgcgttgactacgtccctgccctttgtacacaccgcccgtcgctcctaccgattgaatgatccggtgaagtgttcggatcgcggcgacgtgggtggttcgccgcccgcgacgtcgcgagaagtccactaaaccttatcatttagaggaaggagaagtcgtaacaaggtttccgtaggtgaacctgcggaaggatcattgtcgatacctgtccaaaacagaacgacccgcgaaccaaagatcaccactctcggtgggccggtttcttagccgattccttgcccgccggatccgtggtttcgcgtatcggcatgatcgggagcttttatctcggtcttgtcgtgcgcgttgcttccggatatcacaaaaccccggcacgaaaagtgtcaaggagaaaaaaaaaaaaaaaaaaagattcgcctccccggagacggagtgtgggcggatgctgtgctgcgaactgaagtctaaaacgactgtcggcaacggatatctcggctctcgcatcgatgaagaacgtagcgaaatgcgatacttggtgtgaattgcagaatcccgtgaaccatcgagtctttgaacgcaagttgcgccccaagccttctggccgagggcacgtctgcctgggtgtcacaaatcgtcgtccctcaccatcctttgctgatgcgggacggaagctggtctcccgtgtgttaccgcacgcggttggcctaaatccgagccaaggacgcctggagcgtaccgacatgcggtggtgaacttgatccattacattttatcggtcgctcttgtccggaagctgtagatgacccaaagtccatatagcgaccccaggtcaggcgggattacccgctgagtttaagcatatcaataagcggaggaaaagaaac

SEQ ID NO: 95721 - DNA, 604 bp, Arabidopsis thaliana columbia
  unsure (1)..(604): unsure at all n locations
ttaggtgacactatagaagactatgacgtcgcatgcacgcgtacgtaagctcggaattcggctcgagctcgagccgattcggctcgagcggcataagcgtttactgtgagtctctcaaagaaaccaaaggcagagaaaagagataacacacacaaaaaaaaatggcatcaacctcactcctcaaggcttctccggtgttggacaaatccgaatgggtcaagggacaaagcgttctcttccgtcagccttcttccgcttctgtcgtcctccgcaaccgtgccacctccctcaccgtccgtgccgcttcctcctacgccgatgagcttgttaagacagcgaaaactattgcgtctcccggacgtggaatcttggcgatggacgagtcaaacgcgacttgcgggaaacgtttggattcgatagggctagagaacactgaggcaaatcgtcaagctttccggactttgctggtctctgcaccgggactcggacagtacgtcttccggcgcaattctatttgaggagactctgtaccagtctaccaccgaaggcaagaaaatggtcgacgtcctcgtcgagcagaacattgtccctggtttaaagnngg

SEQ ID NO: 95722 - DNA, 722 bp, Arabidopsis thaliana columbia
  unsure (1)..(722): unsure at all n locations
cggccaaattaaattttccaggctggcggaaaccaaaacgggagggcttccccacaagcggcgttgggttgctttaagggggccttttggaatttctcgggttcctcgctaacgaggggcttgtcagaacaaactccggtttacttctatgtgactaagggaaaacattcaaaactcaatactgtcttctgcactgacacctcaaggtcgactttggcaaacgatgtggtgaaaccaatctatggaagcttcgtaccggtcttaaaaggagaggaattggcaatgagaatcttggttgatcattcgatcgtagaaggaattcgcccaaggtggaagatcatgtattacctccagagtatatcccacaaaagctatctatggagctacccagctcttcttgttccataacgccaattgatgcgaccggtacggcgtcgttttcggtctggccaaatgaaccaaggcttttaattcatccttacttcttcagacggtctcggtggtccttccaagcacctgatgaagttttctcaccctttctggttagtcttttgattggtggtaaaataataggggttggattttatcggggttggatccaccaggtgagtgaagaggcggccgtaccattaattttttccttttttgaaaaattaagcgcccgcgaattcaatatcaagctaatcgataccgtcgactcgaagggggggnnnnnnnnncaa

SEQ ID NO: 95723 - DNA, 1545 bp, Arabidopsis thaliana columbia
  unsure (1)..(1545): unsure at all n locations
nnnnncagctctctacgactcactatatggaaagctggcacgcctgcaggtaccggtccggaattcccgggtcgacccacgcgtccgcggacgcgtgcgagcgttttaagctctcactagcaagcaagtactagcaacaatggcgtcaagcactgcgactatgctcaaagcctcaccggtgaaatctgattgggttaagggacagagtcttctcctccgtcaaccttcctctgtctcagctattcgcagccacgtggcaccttccgctctcaccgtccgagccgcttctgcttacgccgatgagctcgtcaaaaccgctaaaacaatcgcgtctccgggacacggaattatggcgatggatgagtccaacgcgacttgtggaaagcgtttggcgtcaattgggctagagaacacggaggctaaccgtcaagcttacaggacgttgcttgtgtcggctccaggacttggacagtacatctccggagctatcctgttcgaggagactctgtaccaatccaccactgatggcaagaaaatggttgatgttctcgtcgagcagaacattgtccctggtatcaaagtcgacaagggtttggtgccacttgttggatccaacaatgagtcatggtgccaaggactagatggtctatcatctcgaactgctgcttactatcaacagggtgcgcgtttcgccaaatggcgtactgtcgtgagcattcctaacggtccgtctgccctcgccgtcaaagaagctgcttggggtcttgctcgatacgctgccatttcacaggacagcggtttggttccgattgttgagccagagatcttgttggatggagaacacgacattgacagaacatacgacgtagcagagaaggtttgggctgaggttttcttttaccttgctcagaacaatgtcatgtttgaaggtatcctcctaaaaccgagcatggtgactcccggagctgagtctaaagacagagctactcctgaacaagttgccgcctacaccctcaagctcctccgcaacagagtccctcccgcagtccccggaatcatgttttttgtccggaggacagtccggaggtggaggcaacactcaacttgaacgcaatgaaccaggcaccaaacccatggcacgtgtccttctcctacgcacgtgcgttgcagaacacttgttctgaaaacatggggcggcagaaccccgagaacgtgaacgcagctcagaccactcttctttggcccgtgccaaggccaattcgttggctcacttccggaaaataccaccggtgagggtgagtccgaagaggctaaggagggcatgttcgtcaaagggtacaccttttgaagggatgatgctgtgaaaaaggagttgaggcagttgttttaatcacatttgttttggagtttgcttgttattaatcatgtcaaatcattattttcgtctgcggactccgcgttagctactccttctaataagttctattatattgaagttatctatctctcttgatctatttaaacttgaaactacaactattccat

SEQ ID NO: 95724 - DNA, 798 bp, Arabidopsis thaliana columbia
  unsure (1)..(798): unsure at all n locations
aagggaaagttggtaccctgcaggtaccgttccgaattcccgggtcgacccacgcgtccggggctgaggttttcttttaccttgctcagaacaatgtcatgtttgaaggtatcctcctaaaaccgagcatggtgactcccggagctgagtctaaagacagagctactcctgaacaagttgccgcctacaccctcaagctcctccgcaacagagtccctcccgcagtccccggaatcatgtttttgtccggaggacagtcggaggtggaggcaacactcaacttgaacgcaatgaaccaggcaccaaacccatggcacgtgtccttctcctacgcacgtgcgttgcagaacacttgtctgaaaacatggggcggcagacccgagaacgtgaacgcagctcagaccactctcttggcccgtgccaaggccaattcgttggctcagctcggaaaatacaccggtgagggtgagtccgaagaggctaaggagggcatgttcgtcaaagggtacacctattgaagagatgatgctgtgaaaaaagagatgaagcagatgttttaatcacatttgtttttgagtttgcttgttattaatcatgtcaaatcattattttctctgcttactttgcgttagctactccttttaataagttctattatattgaagttatctaaaaaaaaaaaaaaaaaaaaaaaggaaaaagggcggccgctctagaggatccaagcttacgtacgcgtgcatgcgacgtcataactcttctatagtgctcctaannnnnnntagctggaaaaatcat

SEQ ID NO: 95725 - DNA, 2251 bp, Arabidopsis thaliana columbia
tcggctctcgcatcgatgaagaacgtagcgaaatgcgatacttggtgtgaattgcagaatcccgtgaaccatcaaatctcaataaagcaaaacgaacaagaaaatggcgagcacggaagctctcttacccgtcacgtccctacaagatccattatctgagtcaagatccgaccagatcccggagacccgtcggagacgacccatcaaagttcatcttgcagtctattccggtttgctcttgatcgctttgtacgtcactctcatcgtcacacacgacggctccaaggctgaaatagcgacggagtcacgtcctcgtatggccggcgtgtcggagaagagcaacgacggggtttggatatcatccgatgatgggaaagttgaagcgttcccgtggaacaatactattttgtcgtggcaacgcacggcgtttcatttccagcctgagaaaaattggatgaacgatcctaatggtccattgttctataagggatggtaccatttcttctatcaatacaacccaaatgcagctgtgtggggtgacattgtttggggtcacgccgtgtcaaaagaccttatccactggctttatctcccaatagccatggttcctgaccaatggtacgatgcaaacggtgtctggaccggttcagccacttttctagatgatggctccattgtcatgctctacaccggttccactgacgaattcgtacaggttcaaaaccttgcctatcctgaagacccaagcgacccacttttgttgaaatgggtcaagttctccggtaaccctgtcctcgtaccgcctccaggtattggtgcaaaggacttccgtgacccaacaacagcctggaagacatcttctggaaaatggcgaatcaccatcggctcaaagatcaatagaaccggaatatctctcatttatgacactaccgatttcaaaacctacgagaaacacgaaaccttgttgcaccaagtccccaacaccggaatgtgggagtgcgttgatttttacccggtgtcgaagactcagctcaatgggctcgatacttcggtcaacggaccagatgtcaagcatgtcatcaaggctagcatggacgatactagaattgaccattatgccattgggacgtacgatgattcaaacgctacatgggtccccgataatccttctatcgatgtcggaatcagtaccggtttgagatacgattacgggaaatattatgcgtcaaagacgttttacgatcaaaataagggacgaagaatcttatggggttggatcggtgaatctgacagtgaagctgctgatgtacaaaagggttggtcttctgttcagggcatcccaagaactgttgtcttggacacaaggacgcataaaaacttagtccagtggccagttgaggaaatcaaatcattgagactaagcagcaagaaatttgacatgacgattggaccagggactgtggttccggtcgatgtgggttccgccactcagctagacatagaggctgagttcgagatcaagaccgatgatctcaagttattctttgatgatgactctgtggaggccgacaataaattcagctgcgaaacaaacggaggctccacagcgcgtggtgctttagggccttttggattctcggttctcgctgacgagagcttgtcagaacaaactccggtttacttctatgtgactaagggaaaacattcaaaactcaatactgtcttctgcactgacacctcaaggtcgactttggcaaacgatgtggtgaaaccgaatctatggaagcttcgtaccggtcttaaaaggagagaaattgacaatgagaatcttggttgatcattcgatcgtagaaggattcgcacaaggtggaagatcatgtattacctcaagagtatatcccacaaaagctatctatggagctaccaagctcttcttgttcaataacgccattgatgcgaccgttacggcgtcgtttacggtctggcaaatgaacaatgcttttattcatccttactcttcagacgatctcggtgttccttccagcacctgatgagttttctcatcctttcttgttagtcttttgattgttgttaaataatatgggtttgattttatctgtgtttgattcatcatgtgagtgaagagaagaaaataacatttattttctccttttttgaaagagtaaattattttctttgtacaacatcaacaaatatgaaagaacaacgtcaccgattaaaaaaaaaaaaa

SEQ ID NO: 95726 - DNA, 504 bp, Arabidopsis thaliana columbia
tacgactcactttagggaaagctcgtacgcctgcaggtaccggtccggaattcccgggtcgacccacgcgtccgcgtaatttctcatcaaactccacttttcttctttttaagagaatctagggtttcttctactacttcttctttcttctttaggtggtcaaatttccaagttcttcttttagctctctcttttgtttccaagaaacctgagaagaatttttgtagatatgggaagaggaagggttcagctacggcggatcgagaataagataaggagacaagtgacattttcaaagcgaaggaccggtttggtaaagaaagctcaagagatctcagtgttatgtgatgctgaagttgctttgattgttttctcccccaaaggcaaactctttgagtactctgctgggtccaccatggagagaattcttgatcgatatgagaggtctgcctacgccggtcaagattttcctaccccaaatttggattcacagggagagtgctc

SEQ ID NO: 95727 - DNA, 628 bp, Arabidopsis thaliana columbia
  unsure (1)..(628): unsure at all n locations
nnnnnnnnnnnnnnnnnnnnnnnnnnnnnnnnnnnnnnnnnnnnnnnnnnnnnnnnnnnnnnnnnnnnnnnnccacgcgtccggggacagatgttacctatgtagctgaagccattatacctttatttgaaaccgcaaaagagttgatcttacggaaaatgggagacgacttagaggtgcaagagaagccggcgttgattctatgccatgttttcagaagggttgatgaaccttctcttctgtcagctgcatctaagtttgggtttaagcttgcagacagatgggctgcaaattcaaaggaatctcctattgggaacatcattgacagttggttttccgaaaaggatttggtcgcagaaatcccgagttctgcgttgcatattctctattttcagatggagtaactatgtggtagaggagcaaatgttgattaactggagagttcttttatattaaaaaatcctcattgaatctcaaatcaatgaatgtcctacatgtattcttctatattagcaatggattttttgggtatccaactattacataaaaaaaaaagggcggccgctctagaggatccaagcttacgtacgcgtgcgtgcgacgtcataaatcttctatagtgcaccta

SEQ ID NO: 95728 - DNA, 570 bp, Arabidopsis thaliana columbia
  unsure (1)..(570): unsure at all n locations
gtcctaagtatacatgtcttttttgtctttggtctgaatctttctcgtcggaaacacagatctcagttccttacagaagaatctccgactcgtttctttgccggcattctcagatttccggatactagccatgagcagtgatggttccgccggaaaggcggttgttgaagccaaaggattgaaccctggattgatagtgctgcttgttattggaggtctgcttgtgacatttctcatagccaattacgttatgtacatgtatgctcagaagaatctacctccaaggaagaagaagcctctttccaaaaagaagctcaagcgtgagaagctgaagcagggagtccctgtgcccggcgaatagattccagcttcttcaacagtctgtgtttttaacctgtaatcacaatgtcattgagacttttgtatgggagagtagcaaacgtcccttgttctgttttggttagactacaaaaattgaatctcatcaacttctgttttcccttcacatatttgattgcagttgtagagctaaattacacacacttgcnggcctcncggtngntctncagc

SEQ ID NO: 95729 - DNA, 511 bp, Arabidopsis thaliana columbia
  unsure (1)..(511): unsure at all n locations
agctcnnnnnnnnnnnnnnnnnnnnnnnnnnnnnnnnnnnnnnnnnnnnnnnnnnnnnnnnnnnnnnnnnnnccacgcgtccgcggacgcgtgggcatgcgtgggttagagaaggcgggaatgctactgatatccctgtcgacatttcagttctgaacaacttaagacaatttgtgagatacagccgtctaaagcaatttgctttaagggcgcttgctagcacacttgacgaggcagagatctctgacctcagagatcaatttgatgcgattgatgtggataaaaatggcgtcattagtcttgaagagatgagacaggcacttgccaaagatcttccttggaaactgaaagactcacgagttgctgagatccttgaagcggtagttatatttttgttttccattgcaattgcatctctgggggtatcagagggagacgtagtttcataatgacccggtggggacttgtatctttggtggtcacagattgatagcaacacctgggggttagg

SEQ ID NO: 95730 - DNA, 438 bp, Arabidopsis thaliana columbia
cgacgataggaggattgttaatggggattggaagatcattcagaagaaagagagcttcttctcttgacatcctctctcccaaaacgagctcctagagacttctacaagggcaaaaactgcaaacctactggtttccacacgagaaaaggaggatatgttgtgcagccagataagttgccgaattacgtagtccctgatctcaccggctttaagctgaagccatatgtatctcagtgcccgctacaagtcaacacaaaacgagtcaactgaagcttccaagtgaaaaatagtcagtcaggagatatatgtttttaagtcttcttcataaagctttaagttaggactctgttcttctattgtccgtaatccttttgtgctattcttaaaatgggagatttgatttgatattttcacgaaacgacatgcaaagtaattggt

SEQ ID NO: 95731 - DNA, 594 bp, Arabidopsis thaliana columbia
  unsure (1)..(594): unsure at all n locations
ttgttttaggtgcactatagaagagctatgacgtcgcatgcacgcgtacgtaagctccgagtcccgcccctcgtgaaaatctgaaactctgcgttcgaattttcgaagaacattagagatctggtattatctggatccgatctgttcaccatggaggagaagaagacagaatcaaccaacaagaatgttaagaaggccaatctattggaccaccactcgatcaagcacatccttgacgaatcccggctccgatatcgttacgagccgtggctataaggaggatgtgagattgagcaacctcaaactgattttgggaacgattatcatcgttgttgctcttgttgctcaattctacaacaaggaattccctgagaacagggatttttttgattggatgcatcgcattgtatgtagtgttgaatgcgggtgttgcagctgattctgtacactaaggggaaggatgcggttttgttcacctatccccctgaggggtcattcaccagcactggtttgggggtatcttcaaaggtggccccgattctttgttagaaacctttaccattgcagnnttgtcccaaaaaaanttagtnggtc

SEQ ID NO: 95732 - DNA, 1085 bp, Arabidopsis thaliana columbia
  unsure (1)..(1085): unsure at all n locations
tacgactcactttagggaaagctcgtacgcctgcaggtaccggtccggaattcccgggtcgacccacgggtgcgagtatatcgtcttcttcctcctcgaaccaaaaacatcagtctctcctagtctcagcgctcgtgaaaatctgaaactctgcgttcgaattttcgaagaacattagagatctggtattatctggatccgatctgttcaccatggaggagaagaagacagaatcaaccaacaagaatgttaagaaggccaatctattggaccaccactcgatcaagcacatccttgacgaatccgtctccgatatcgttacgagccgtggctataaggaggatgtgagattgagcaacctcaaactgattttgggaacgattatcatcgttgttgctcttgttgctcaattctacaacaagaaattccctgagaacagggattttttgattggatgcatcgcattgtatgtagtgttgaatgcggtgttgcagctgattctgtacactaaggagaagaatgcgattttgttcacctatcctcctgagggatcattcaccagcactggtttggtggtatcttcaaagttgcccagattctctgatcagtacactctcaccatcgacagtgctgatccaaaatcaatctcagctgggaagtcagttcagctcaccaaaagtgtcacccaatggttcacgaaagatggagttcttgttgagggtttattctggaaagacgtagaagcactaatcaagaactatgcagaagaagaaccaaagaagaagaaatgatcatcttccagagaaatatatgcttttgaaactccatatgttggcgttttagaatactaaatcgatggtgactttgtttagagatgaaactaatatttggatttttccttatagccaactttttgaattaatccgagattttatgatcactatttagaaaagaataaaaagctttaccttaaaaaaaaaaaaaaaaagnnnnnnnnnnnnnnnnnnnnnnnnnnnnggaaatcatnnnnnnnnnnnnnnnnnnnnnnnnnnnnnnnnnnnnnnnnnnnnnnnnnnnnnnnnnnn

SEQ ID NO: 95733 - DNA, 811 bp, Arabidopsis thaliana columbia
  unsure (1)..(811): unsure at all n locations
ggcgagcatcacaacacccacttaccaggggggagtggtcaatccttcaagcacaggggtggttcacagaatggaggatggagatttatgtgtatctttctgtttcctagacaggctatggctatgtaaagccggggaactggaacgcataagaccatttagaattggagaccgggttaagataaaggatggactggttacacctcggtggggttggggaatggagacccatgcaagtaaaggacatgttgtgggagtggatgcaaatgggaaattgagaataaaattcctgtggagggaagggcggccctggattggtgatcctgcggatatagttctagatgaaacttctggctgaatctcccaatgtatgattatgttttgaatctggaagattggtcattaggctatgcatgaggctgctctgtccattgtaagacataaagctcacagagcccttgtgccaacagctcaggtaatctatatctatctctcatgatgatttattaatatttttgttaataaagttaaaactatagagtggtaggagatatttaggatgtatcatctattatgtctagacaccactttcatatctcagatctctttttgtttatatgtttttcttcttctttgtataaaataatgaatcgcatgtacggacagatttccttagtattaacaaatctttttgaaaaaaaaaaaaaaaggnnnnnnnnnnnnnnnnnnnnnnnnnnnnnnnnnnnnnnnnnnnnnnnnnnnnnnnnnnnnnnnnnnnnnnnnnnnnnnnnnnnnnnnnnnnnnnnnnnnn

SEQ ID NO: 95734 - DNA, 805 bp, Arabidopsis thaliana columbia
  unsure (1)..(805): unsure at all n locations
cgtttgaccgtctgcagtaccggtccggaattcccgggtcgacccacgcgtccgcaactctctcttctatctctctccgccgagaatggttggagttttccgacgatcactctcattccctaacaaaccttgcggccgatcatctccatcgtcaaagccacgtgtctctcatcacacaagatccatcagtctaccctgccggtctcatcccttaatctcccacgttaaccacgagatctctcagctcaaatcctggttctcattcgccggagaaactcacagccgcaccacctcttggatcaccgacggtctcagtctcctcaaggacgttcaagaaacgctcgctgatatacttcagctcccacaatctcaagaatctctacgaaaccgtcctgttttcttcgagaatcttctagaagatcttctccgattcgttgacgcttacggaatcttccgtacgtcgatcctctgcctccgtgagcaccagtccgccgctcaagtcgctctccgtaaaaaagacgacgagaaaatcgcatcttacctaaaatctcgccgatctctcgcaagagatatcgcgaaactgacgtcatcgatccgtgagccgaagacaaaacaccaacactgccacgtagacaacgttaacggaacgtacggtgacgcatagcttgcgtcagttatagagccaccaaaaacacggcgtttatagggtnttttgaaacgatcccgcaaaaaagagaaactataccaaagaatcgtggagttgaaagcaagtgaagaaaaagcttgattgtttaagcaagaagaa

SEQ ID NO: 95735 - DNA, 459 bp, Arabidopsis thaliana columbia
cgggaaggaatggccggaccgaaaaagttactcagatctcacgatttgagcagaatacgcaatgaggacaccgacgacgattctccttcttgtcggagctatcctcttctccggcgccggctatgtcagatccgacgcctccgaccaccgttacaaggaaggagacaccgttcctctctacgccaacaaggtcggcccatttcacaatccaagtgagacgtatcgatattttgatcttcccttctgtatcccagagggtgtgaaagagaagaaggaagctcttggcgaggttctaaacggggatcggctagttagcgctccatacaagctcaacttcagagatgaaaaagagtctgaggtatactgcaacaagaagttgagtaaagaagaggtcaaacagttcagaaaagctggtgaggaggactactacttccagatgtactatgatgatctacctat

SEQ ID NO: 95736 - DNA, 519 bp, Arabidopsis thaliana columbia
ctcagatctcacgattttcttcttcctctcacattaacacacatcatcatgagattaccaacgacgctgctcctttttatcggagctctcatcttctccggcgccggtactgtcagatccgatgcctccgaccaccgttacaaggacggtgactccgttcctctctacgccaacaaggtcggcccctttcacaatcccagtgagacgtatcgctatttcgatctccccttttgtattccagagggtgtgaaagataagaaggaagctcttggtgaggttttgaatggggataggcttgttagtgctccatacaagcttaactttagagatgagaaagactcagaggtgtactgtaaaaagaagcttagtagagaagaagttgaacactttcgaagagctgttgaaaaagattattactttcagatgtattatgatgatttgcctatttggggaatcattgggaaggtggacaaagagagcaaatctgatcctagcgaggttaaaatattttttacaaca

SEQ ID NO: 95737 - DNA, 1137 bp, Arabidopsis thaliana columbia
  unsure (1)..(1137): unsure at all n locations
nnnnnnnnnnnnnnnnnnnnnnnnnnnnnnnnnnncgcctgcaggtaccgggccggaattcccgggttgacccacgcgtccgagagggtgtgaaagagaagaaggaagctcttggcgaggttctaaacggggatcggctagttagcgctccatacaagctcaacttcagagatgaaaaagagtctgaggtatactgcaacaagaagttgagtaaagaagaggtcaaacagttcagaaaagctgttgagaaggactactacttccagatgtactatgatgatctacctatctggggattcattggaaaggttgacaaggatatcaaatctgatccgagtgaattcaaatatttcttgtacaagcacattcagtttgagattctatacaataaggaccgtgtgatcgagatcagtgctagaatggatcctcattcgcttgtggatctcactgaggataaggaagttgatgcagagtttatgtacactgtgaagtggaaggaaactgagactccttttgagaaaagaatggagaagtactctatgtcttcttctcttccacatcatttggaaatccactggttctccattattaactcctgtgtcactgtccttcttttgactggattccttgcaactatcttgatgcgagtcctcaagaacgatttcatgaagtatgctcaagatgaggaagctgctgatgatcaagaggaaactggatggaagtacattcatggcgatgtgtttcggttccctactcacaattctttatttgctgcatcgctcggtagtggcactcaattgttcacgctcaccatatttattttcatgcttgctcttgttggagtgttctacccatacaaccgaggagcactctttaccgctttggtggtcatttacgctctcacttctggaattgccggatacacatctgcctctttctactgtcaacttgaaggaaaaagctgggtgaggaacttgttactcactggatgtctcttctgtggcccattattcctaaccttttgcttccttaacaccgtagccatcacctacactgcaaccgctgcattaccctttggaaccattgtggtgatcgtccttatatggactctagttacctcacctttactcgtcttgg

SEQ ID NO: 95738 - DNA, 544 bp, Arabidopsis thaliana columbia
gttgcaaacgatgtcgttaaaccgatatacggtagcgtcgtaccggttctaaaaggggagaaactgaccatgagaattttggtggatcattcgatagtagaagcattcggacaaggtggaagaacatgtataacatcaagagtctatccaacaactgcaatctatggagcagccaagctcttcttgttcaataatgctcttgatgcgacggttacggcgtcgtttacagtttggcaaatgaacagtgcttttattcatccttactctgacgaagctgtccgtgctctctcccgtacctgattatttttacttccttctcattttttatacatagatttatctgtaataattaatggttttttccgattttatttgatatttgatttagaaaaaaaaggcactgaaacatcattatctcaatttacaattttggagaaataaatttgtttaatagttaaaaaaaaaaaaaaaaaagggcggccgctctagaggatccaagcttacgtacgcgtgcatgcgacgtcaagattctttataggtgacc

SEQ ID NO: 95739 - DNA, 2253 bp, Arabidopsis thaliana columbia
agctctctacgactcactatagggaaagctggcacgcctgcaggtaccggtccggaattcccgggtcgacccacgcgtgcagagaaactcgaaaacgagaaaaatggcgagctccgatgctctcttgccaatctccgccagagaagaagaaccattatgtccttacacgagattaccaatggccgacccgaatcaagaaacccatggcccccggagaagaagaccctttaaaggtctcctcgccgtctcatttggtctcttgttcatcgccttttacgtcgctctcatcgccacacacgacggatctagatccaacgacgaagggatcgatgaaacagagacgataacgtcacgtgcacgtcttgctggtgtgtcggagaaacgtaacgatgggttatggaaactttccggtgatcggaacacgccggcgtttgaatggaacaatagtatgttgtcgtggcaacgaacggcgtttcattttcagcctgagcaaaattggatgaacgatcctaacggtccattgttctacaagggatggtaccatttcttctaccaatataacccaaacgcagccgtatggggtgacattgtttggggtcacgccgtgtctagggacctaatccattgggtccatttgcccatagccatggtcgctgatcaatggtacgactccaacggtgtgtggaccggctcagccacatttctccctgatggctctatagtcatgctctataccggttccaccgacaaagcggtgcaggtccaaaaccttgcctaccctgaagaccccaacgacccacttctgttgaaatgggtcaagttcccggggaacccggttctagtacctccgcccggtatcctccctaaggacttccgtgacccaacgactgcatggaagacatcagaaggaaaatggcggatcacgattggttccaagctcaacaaaactggaatctcactcgtgtacgacacaatcgactttaaaacatacgagaaacttgacacattgttgcaccgagttcccaacactggaatgtgggagtgtgttgacttttacccggtgtctaagactgcgggcaatgggcttgacacatcggtcaatggaccggatgtgaagcatatcgtgaaggctagcatggacgacacgaggttcgatcattatgctgtaggcacgtatttcgattcaaacggaacatggatccccgatgatcctactatcgatgttgggatgactgccagtttaagatatgattacggaaagttctatgcttcaaagtcgttttacgaccagaacaagggtcgaagagtcttgtggagttggattggtgaatctgatagtgaggcttctgatgtacaaaagggttggtcttctctccagggtatcccaagaaccgttgtcctcgacacaaagacaggaaagaacttggttcaatggccagtagaagaaatcaaatctcttagactaagcagcaagcaatttgatctcgaggtcggtcccgggtcagtggtaccggtcgatgtaggttccgcagctcagctagacatcgaagcagaattcgagattaacaaagaatctctagacaaaatcatcggaaacgcttcggtagtggctgaagccgaggaatttagctgcgaaaaaagcggaggctccaccgtccgtggtgctttagggccattcggattctcggtacttgccacagagagcttgtctgagcaaacaccggtttacttctatgtagctaagggaaaagattcagagctcaaaactttcttctgcacagacacctcaaggtcatctgttgcaaacgatgtcgttaaaccgatatacggtagcgtcgtaccggttctaaaaggggagaaactgaccatgagaattttggtggatcattcgatagtagaagcattcggacaaggtggaagaacatgtataacatcaagagtctatccaacaactgcaatctatggagcagccaagctcttcttgttcaataatgctcttgatgcgacggttacggcgtcgtttacagtttggcaaatgaacagtgcttttattcatccttactctgacgaagctgtccgtgctctctcccgtacctgattatttttacttccttctcattttttatacatagatttatctgtaataattaatggttttttccgattttatttgatatttgatttagaaaaaaaaggcactgaaacatcccgctctagaggatccaagcttacgtacgcgtgcgtgcgacgtca

SEQ ID NO: 95740 - DNA, 425 bp, Arabidopsis thaliana columbia
aaaacctctctttctctctctctccgacgatggcttccggtgaccagagcaagaagagaaaacagcattatcgccctcaaaacagaccagtgaagaagaagggatcttaccctttgaagccaggtgttcaaggttttttcatctcttgcgatggcggacgcgaattccaagctgctcaggaagctattaacgtcattgattcctttttcgaggagctaatacaagggactgactcgaaagtgaatcctggtttgtttggtaatccaataaacaaaaaagttacattttcgtatagcgaggatgaggatgaggaggaagatgagagtaataatggcgaggaagaggaaaacaaaggagatggggataaggcagtagtgagtgaaggcggtaatgatctagtgaatgagaaagaaatagctagtgaa

SEQ ID NO: 95741 - DNA, 753 bp, Arabidopsis thaliana columbia
gtggcaaaaccctaatcgacttcgatttagctcttttattggaaccatgtatgcttcttggagttagtattggtgtgatctgtaatcttgtttttccgaactggttgattacgagtctcttcgctgtgtttcttgcgtggtcgacgttgaagacttttggaaatggactttattattggagattggaatcggagatggtgaagattacagaatcgaatagaattgaagaagatgatgaagaagataagattgagagtctaaagttgcctctcttggaggattatcagagaccaaagaggtttccatggattaagcttggagttttggtcattatttggctttcttacttcgcagtttatcttcttcgaggaaacaaatatggcgagggaatcatatcgatcgagccatgtggaaacgcctactggctcatttcatcgtctcaaataccactaactctcttcttcactctctggatctgcttcagtgacaatgttcaaagccaacaacaatcagattaccatgtctcagtaaaggatgtagaagatttgaggtccaaatgatggagcaagatcaaaccaagtgtatgtccccctgtaaatcggctcttattagcctggggtttttgggtgggtgttttgggtatttggaggtgggaatgcccattaggccccttccttctcccaagttggtatcgctcccgggggaactgcagcgacatgttctttcatggttcttttttcatcaacgatgtct

SEQ ID NO: 95742 - DNA, 592 bp, Arabidopsis thaliana columbia
  unsure (1)..(592): unsure at all n locations
tctcctaaaatctcccaaacttttaaaaagttaaccaaaacccccaaacaaaaaaatgagaaacaatttcgtccctataattctctccttcatcatcttcttgactccatcaatcgcagaacaagaaccttcaattctttctcccgtcgatcaactcctcaacaaaacaagctcatacctcgatttttcaacaaaattcaaccaaccaagaatcgaactaacaacatcaacgatcatcgccggcttactctctttcctagcttcatcaatctcaagcgccggtggaatcggcggtggaggtttatatgttccgataatgacaatcgtggccggtctcgatctaaagacagcttcaagcttctcagcttttatggttactggtggatctatagctaacgtgggatgcaatctattcgttagaaaccctaaatctggtggcaaaaccctaatcgacttcgatttagctcttttattggaaccatgtatgcttctttgggggtaggtattggggtgtccgtaaacttggttttccgactggtggtaangggctcttcgtgtgttnttngtggngcggtaaggcttttgaatngtg

SEQ ID NO: 95743 - DNA, 993 bp, Arabidopsis thaliana columbia
  unsure (1)..(993): unsure at all n locations
aggtgacactatagaagagcttgacgtcgcatccacgcgtacgtaagctcggaattcggctcgagcatatcgatcgagccatgtggaaacgcctactggctcatttcatcgtctcaaataccactaactctcttcttcactctctggatctgcttcagtgacaatgttcaaagccaacaacaatcagattaccatgtctcagtaaaggatgtagaagatttgagatcaaatgatggagcaagatcaaacaagtgtatgttccctgtaatggctctattagctggagttttgggtggtgtttttggtattggaggtggaatgctcattagtcctcttcttctccaagttggtatcgctcccgaggtaactgcagcgacatgttctttcatggttcttttttcatcaacgatgtctgcgattcaatacttattactaggcatggaacataccggaaccgcaagtatatttgcggttatatgttttgtggcatcactcgtgggactaaaggtggttcaaaaggtaataaccgagtatggaagggcttcgatcattgtgttctcggttggtatcgtcatggcattgagtattgtgttgatgacaagctatggagctcttgatgtttggaatgattatgtctctggtcgttacatgggtttcaagttaccttgttgagaccaagtttcataatacatgtgtatatcatatcaccatgttgttgctctttcatccatttggtcatttagagttaacaagctttctatttctttcttttgtatgatttttaaatcactattcagaatgcacatctcgtgcattcgaatatatggtcaaataaaagttatgttctggacctaaattcagattccaatatccatttttagcctttggttgttgtnnnnnnnnnnnnnnnnnnnnnnnnnnnnnnnnnnnnnnnnnnnnnnnnnnnnnnnnnnnnnnnnnnnnnnnnnnnnnnnnnnnnnnnnnnnnnnnnnn

SEQ ID NO: 95744 - DNA, 337 bp, Arabidopsis thaliana columbia
ctctctgtctttactcattgtcgttatggtcgcgccgcctatagccgccgcgtcgttagagctccctcctccgttccccgccgtcttcgaacaaccggatggggaatctcaccttcccgaacgggttcccttcacgagtttgcctcctcaaccttttcaacttctccggaagactcaacggagacagaagatgaaacaaccgacgacgaagtatgacttcttagccgggttaactcgcagactcgctctctcgactcaccgcctctcttctccttccttcgtcaccgacaagtctcacatgaaacccaaagtcacagagtcaactcatagttgactc

SEQ ID NO: 95745 - DNA, 432 bp, Arabidopsis thaliana columbia
aaacctctcaccgaagctacaatgagtatcatcgcaggctcctacgagagattcatttggggtttcaagcttaaacccacgaagcacgacgccgaatctcaaaccctaactctctcccctctcttctcctacccttcccacatctccccaatcaccaccgtcgcttgttccggtcccgccgcagcttccggcggctccgacgatacaatccacctctacgaccttccctccgcttcttccctcggctctctccttgaccacaatcacgcagcttcaatcaccgctctctccttctacacaccttcttcactctccttccctcgtaatctaatctccgccgccgcagatggctccggtgctatattcgatactgatccttttgttttgcttaaggtcgtttcgtcctcataagaaagcggttaatgatttagc

SEQ ID NO: 95746 - DNA, 507 bp, Arabidopsis thaliana columbia
ctctactacgactcactttagggaaggcttggaccgcttgcaggtcccggcccggatttccgggttcgaccaaggcgtccgcccacgcgtccgcaggccttttcttctgcagtaagtgacatcggatctgttgtaagcatggttgatcggatagctggttcagcaccaggaaacggttcaagagcttccgttggtgaagacttggttgcaatgactaagtgccgtctccaagcaagaaacttcatgacccaagagggaatgatggcgactaagaaaatgaagcgtcacacaaccgcaatgccactaagcgttgcttcactgggaggaagtgttggtgataactacaagcagtttgctggttcagaaacatccgatctacaatctactgcgacttcggatggcaagaaggcaagaactgagaccgagcatgcccttttggaggaaataaaggaaataaaccagcggctgatacatacagttgttgagataagtgatgatgaagatgct

SEQ ID NO: 95747 - DNA, 806 bp, Arabidopsis thaliana columbia
aaacaaagcaagcaaaaaaaaaaaatggctttctcacgcctctcatttgcagcttctctcatcgtcttctcatctctaatcatatcttcagttgcttattacggcaatgaagctgacccggagaccggaaaattgattcccatcgccgttgaagggatcatcaagtgcaagtccggtggcaaaacttacccaattcaaggtgcaacggcaagaattgcgtgtgtgaaggtcgatgcatatgggaatgagttagttccaatatcgatattgagcagcaaaactgatgctaaaggttacttcatcgccacgatattcccttcgcagcttcgtgcaggaaggacagtgaccaaatgcaaaacttacctttacaaatctccactcgctgattgcgattttccgaccgatgtgaacaaaggtgttagaggacagccattgagcacgtaccgtattcttcaagacaagagcttcaagctttactgggctggtcctttcttctacacgtctgaacctacttactactaattatgatcttctgatgaacatgaaatttaacatgttcttggagaatcatttttcgtttgtttgattattcgtcgtataacgttgtctgcaaaatgatctaagagtttgttttctttatcttatatttcatgttgcatatatgactttgtcatgtatcttatgttttaatattttcttggtaaatgtatgggtttagtggatttgttctaaaaaaaaaaaaaaaaaaagaaagggcggccgctctagaggatccaagcttacgtacgcgtgcatgcgacgtcatg

SEQ ID NO: 95748 - DNA, 696 bp, Arabidopsis thaliana columbia
cgcctgcaggtaccggtccggaattcccgggttgacccacgcgtccgtaccgctgcgagaagacgacagaaggggattgagaggaaaatcaatccaaatgtagtcactttcagcgcattgattgatgcatttgtgaaggaggggaagcttgtagaggctgagaaattgtacgacgagatgatcaaaaggtcccctcctcctgatgttttcacttatagttcactgatcaatgggttttgtatgcacgatcgtttagacgaggccaagcacatgtttgagttgatgattagcaaggactgtttcccaaacgtagtgacttacaatactcttataaagggattttgtaaggctaagagagtagacgaaggtatggaactcttccgcgagatgtctcaaagaggattggttggcaacacagtcacttacaccactcttatccatggatttttttcaagctagagagtgtgataatgcccaaatggttttcaaacagatggtttctgttggtgtgcatcccaatattttgacatacaacattctgttagatggactttgtaaaaatgggaagctagcgaaagcaatggttgtattcgagtatctgcaaaggagtacaatggaacctgatatttacacatataatattatgattgaagggatgtgcaaggcaaggaaggtggaagatgggtgggaattgtt

SEQ ID NO: 95749 - DNA, 479 bp, Arabidopsis thaliana columbia
  unsure (1)..(479): unsure at all n locations
gaacttgatctgctgggtaaggaccacgatcacgaagtgttcgataagcttcgatcacaaacattgcctcgtttgagttcttcccagataaacgaccgtgttggcaatatttcagaaagcttttgctcacccaccggaagaactcaacagtccggcttctcatttctccggcaaaactcctaaacttcccggcgaaactctctccgacttcctctctcatcaccaaaacaatgctttctctatgaacttcggcgactccgccgtcttagcttacgctcgccaagaaacctctcttcgtcaaaggttgttctgtggactagatgggatctactgtatgtttctagggngnttgaataatctcttgtacattgnatcggcaatacgggntatcttnggnaggactcaaacgnggcnatnttttaatcgaggtttttggaccacttcggngttgggggnctntncccgnagntcaagttttt

SEQ ID NO: 95750 - DNA, 488 bp, Arabidopsis thaliana columbia
acgactcactatagggaaagctgctacgcctgcaggtaccggtccggaattcccgggtcgacccacgcgtccgcaaagacaaagaaaacgaaaatgttggcaatatttcagaaagcttttgctcacccaccggaagaactcaacagtccggcttctcatttctccggcaaaactcctaaacttcccggcgaaactctctccgacttcctctctcatcaccaaaacaatgctttctctatgaacttcggcgactccgccgtcttagcttacgctcgccaagaaacctctcttcgtcaaaggtatatactaatatacataaaacacatatatacaagtcaaatctctaaatccaattcatagattcataatggttttgttgttttgctcaggttgttctgtggactagatgggatctactgtatgtttctagggagattgaataatctctgtacattgaatcgacaatacggtttatctgggaagaactc

SEQ ID NO: 95751 - DNA, 553 bp, Arabidopsis thaliana columbia
  unsure (1)..(553): unsure at all n locations
gcattggattaatcaaagacaaagaaaacgaaaatgttggcaatatttcagaaagcttttgctcacccaccggaagaactcaacagtccggcttctcatttctccggcaaaactcctaaacttcccggcgaaactctctccgacttcctctctcatcaccaaaacaatgctttctctatgaacttcggcgactccgccgtcttagcttacgctcgccaagaaacctctcttcgtcaaaggttgttctgtggactagatgggatctactgtatgtttctagggagattgaataatctctgtacattgaatcgtcaatacggtttatctgggaaggactcaaacgaggcaatgtttgtgatccaagcttatcgaacacttcgtgatccgtggtccttacccagcaggtcaagttcttagaggtcttgagggaggttcgctttcgttggctcggtntcaaacttcccctgtttctagccctaggtntnatgggggggggcttcctggggattttgggcgggctttgaatactatgatcagccaaagaaggtgnnaa

SEQ ID NO: 95752 - DNA, 612 bp, Arabidopsis thaliana columbia
  unsure (1)..(612): unsure at all n locations
gcatttgattaatcaaagacaaagaaaacgaaaatgttggcaatatttcagaaagcttttgctcacccaccggaagaactcaacagtccggcttctcatttctccggcaaaactcctaaacttcccggcgaaactctctccgacttcctctctcatcaccaaaacaatgctttctctatgaacttcggcgactccgccgtcttagcttacgctcgccaagaaacctctcttcgtcaaaggttgttctgtggactagatgggatctactgtatgtttctagggagattgaataatctctgtacattgaatcgacaatacgggtttatctggggaagaactcaaaacgggggcaatgtttggtgatcgaggcttatcgaacactttcggtgatcggtgggtcctttacccagcaaggtcaaagttcttagggggcctttgaggggaaggtttcgttttcggttggctacggttctcaaacttccccctggtttttaagccctgaggttcttattgggggggggggctttactgggggatttttggggcgggccttttaaaagcctgggggatcaagccaaaagaaagggtgccaaacggttnccnncccaatgg

SEQ ID NO: 95753 - DNA, 766 bp, Arabidopsis thaliana columbia
  unsure (1)..(766): unsure at all n locations
tgattctccaagctactcatacgactcactatagggaaagctgcgccgcctgcaggtaccggtccggaattcccgggtcgacccacgcgtccgcccacgcgtccggttttctcagctctgagttctgatggaggagagagtctttactggggaatttctggagacggatctgttgtaatgtctgatgatattcagatcataaagcaaggctgtgctaaatcgtttgctcctttccctaatggtaaaccaaaacttaagtttttcattagccctataaagaaagaaacatacttttgagtttagatcttgatgtgtgttttgtgtttttgttattgcaggatgtatgtttcatagtgagacagggcttaagagctttgaccatccgactaatatgatgaaggcaatgccgaggattgatagtgaaggtgttctttgtggagctagtttcaaagttgatgcttgttctaagatcaatagtatccctagaagaggaagtgaagctaactgggcgctggctaattctcgttgattttgcttctagtttcgttaactctggcttctttgtggcgttttctttttaggtactctggtttatgtaaatatacccttatgaagccgataaagaaataaaattgatttgcttcttcgtgacatagcagtctttacttaaaaaaaaaaaaaaaggccggccgctctagaggatccaagcttacgtacgcgtgcatgcgacgtctagctcttctatagnnnnnnnnngatcattcgc

SEQ ID NO: 95754 - DNA, 589 bp, Arabidopsis thaliana columbia
  unsure (1)..(589): unsure at all n locations
ccccctttcgagtcgaccgtatcgatattcttgatatcgaattcgcggccgcttttgctcaggttgttctgtggactagatgggatctactgtatgtttctagggagattgaataatctctgtacattgaatcgacaatacggtttatctgggaagaactcaaacgaggcaatgtttgtgatcgaagcttatcgaacacttcgtgatcgtggtccttacccagcagatcaagttcttagaggtcttgagggaagcttcgctttcgttgtctacgatactcaaacttcctctgttttctcagctctgagttctgatggaggagagagtctttactgggggatttctggagacggatctgttgtaatgtctgatgatattcagatcataaagcaaggctggtgctaaatcggttgctcccttcccctaatggggaaaccaaaacttaaagtttttcatttaagccccctttaaaagaaaggaacatactttggaggttagaatcctgaaagggggggntttggggntttgggaattccaggnnggatggtnccaaaggnaananggngtaaaacntttnncanccggcaaa

SEQ ID NO: 95755 - DNA, 612 bp, Arabidopsis thaliana columbia
  unsure (1)..(612): unsure at all n locations
gcattggattaatcaaagacaaagaaaacgaaaatgttggcaatatttcagaaagcttttgctcacccaccggaagaactcaacagtccggcttctcatttctccggcaaaactcctaaacttcccggcgaaactctctccgacttcctctctcatcaccaaaacaatgctttctctatgaacttcggcgactccgccgtcttagcttacgctcgccaagaaacctctcttcgtcaaaggttgttctgtggactagatgggatctactgtatgtttctagggagattgaataatctctgtacattgaatcgacaatacggtttatctggggaagaactcaaacgaggcaatggtttgtgatcgaagcctttccggacacttcgtgatcggggggccttacccagcaggtcaaggtccttaagagggcttgacggggaagctccgctttccgttggcaacggtacccaaattcccccggttttcccagnnctgagtcctgatggaggaanagagcccttgctgggggaattctggaaacgggcctggtggaaagcccggtggaatccggcctaagaagggcgggcaaacggtgcccctcccaaaggggaggta

SEQ ID NO: 95756 - DNA, 1074 bp, Arabidopsis thaliana columbia
ctggtcgcctgcggtaccggtccgttttcccgggtccgcccacgcgtccgcgcacgcgtcggattggattaatcaaagacaaagaaaacgaaaatgttggcaatatttcagaaagcttttgctcacccaccggaagaactcaacagtccggcttctcatttctccggcaaaactcctaaacttcccggcgaaactctctccgacttcctctctcatcaccaaaacaatgctttctctatgaacttcggcgactccgccgtcttagcttacgctcgccaagaaacctctcttcgtcaaaggttgttctgtggactagatgggatctactgtatgtttctagggagattgaataatctctgtacattgaatcgacaatacggtttatctgggaagaactcaaacgaggcaatgtttgtgatcgaagcttatcgaacacttcgtgatcgtggtccttacccagcagatcaagttcttagaggtcttgagggaagcttcgctttcgttgtctacgatactcaaacttcctctgttttctcagctctgagttctgatggaggagagagtctttactggggaatttctggagacggatctgttgtaatgtctgatgatattcagatcataaagcaaggctgtgctaaatcgtttgctcctttccctaatggatgtatgtttcatagtgagacagggcttaagagctttgaccatccgactaatatgatgaaggcaatgccgaggattgatagtgaaggtgttctttgtggagctagtttcaaagttgatgcttgttctaagatcaatagtatccctagaagaggaagtgaagctaactgggcgctggctaattctcgttgattttgcttctagtttcgttaactcttgcttctttgttgcgttttctttttatgtactcttgtttatgtaaatatagccttatgaagacgataaagaaataaaattgatttgcttcttcgtgaaaaaaaaaaaaaaaaaaaagggcggccgctctagaggatccaagcttacgtacgcgtgcatgcgacgtcatagctcgtagatagtgttacaacgaaa

SEQ ID NO: 95757 - DNA, 574 bp, Arabidopsis thaliana columbia
  unsure (1)..(574): unsure at all n locations
ttttcgataggcattagctgatccttacttcaagggtctttctaagattgaaagagaaccttcaagtcagcaaatctcgaaaatggagtttgaatttgagaggcgaaggttgacaaaggacgacattagagaactaatatacagagaaatactggagtaccatcctcagttgctcaaggactatatgagcggatctgaggggtctaattttgtatatcctagcgccattggacatcttagacagcagttcacttacttagaggaaaatagcagtagaaatgggccggtcatacctctcgagaggaaacacgcatcactaccgcggtctacggttcactcaactgtagtccattccacctcgcaacccaacttgggtgcaacagatagtagacgtgtttctttcgagccttcaaaaaatggagcttcttctgcaggacatccatcaacttccgcgtatcctactaaatccatcggacctccaccaagagttccaccaatcaggtagaccagggtcgtgttgtgggatcatctgtatcttatggagaatggcaggacctnaaaggaaggcttattt

SEQ ID NO: 95758 - DNA, 542 bp, Arabidopsis thaliana columbia
  unsure (1)..(542): unsure at all n locations
aaagttggaactatgatttctatagagttggtgaaaatcttcttcaatggtgtgattaagagtcccattgctaacaacattacaagcttgtagatttctatatttaatggactattttactgaaattctcactttatggatataattaaggttccaagagcattttcctgagttcttgaggccttttcttcaagcatccggagttcacaagagagtttaaccaaacttcatcagaccttgttggttcgtcatcatcgttcctatgccaggtccatagcgcatgtgttgaattcaccatctgaagctccccatgtccaaagcttgcttccctgaagactgaccactctggtgacggatctttgtacttgcgagccaatccttctctgtttcctccatcacctatgggaatgtgtacgggaccacatggatctgattaccatgttgaacggtccgtgcgtcaaagctggcatgacnggaancattcaacgggggggnaagnagggcatnagcacatcacccncagtgagggntgaacggaacag

SEQ ID NO: 95759 - DNA, 554 bp, Arabidopsis thaliana columbia
agaatctgtttagagacagctatgcttgtctctgtttctgcgttttctctttccgatcttgtctctcggatccggtgaagaagctgccgccgatcacatcttccagcttccagagattctaaagcttttgtcttttgatccttcatcgaattcattgagtctatcggggagttttgtggtatgctgaaaagagatgtctttgaaaagcatccttcgtgatctgaaggaagtgagggatggacttggaggcatctccaagagaagctggtcaaagtcgtctcacattgctcctgatcaaacaactccaccactggataacataccacagagcccatgggcttctttgccgcctgagttgcttcatgacattatctggagggttgaagagagtgagacagcttggcccgctcgagctgctgttgtctcttgtgcttctgtctgtaaatcatggagaggaatcactatggagattgtgaggatccctgagcagtgtgggaagctcacttttccaatctcattgaaacagccggggcctcgagactctccaattcaat

SEQ ID NO: 95760 - DNA, 898 bp, Arabidopsis thaliana columbia
  unsure (1)..(898): unsure at all n locations
ggttcaggttcgttttggtggtgaccactcctttattcacctacggtgagatcggcggcggagtctagacgacggcgataacgccggtgaccgacggaatcatgttaagatagtcactggcgaattcgttcttcttccccggagacgacaagcatcgaagaatctgtttagagacagctatgcttgtctctgtttctgcgttttctctttccgatcttgtctctcggatccggtgaagaagctgccgccgatcacatcttccagtttccagagattctaaagcttttgtcttttgatccttcatcgaattcattgaggagattataagaagatgaactttgagtgattgcagctatcggggagttttgtggtatgctgaaaagagatgtctttgaaaagcatccttcgtgatctgaaggaagtgagggatggacttggaggcatctccaaaagaagctggtcaaagtcgtctcacattgctcctgatcaaacaactccaccactggataacataccacagagcccatgggcttctttgccgcctgagttgcttcatgacattatctggagggttgaagagagtgagacagcttggcccgctcgagctgctgttgtctcttgtgcttctgtctgtaaatcatggagaggaatcactatggagattgtgaggatccctgagcagtgtgggaagctcacttttccaatctcattgaaacagccggggcctcggagactctccaattcaatgctttattaagagggacaggagcacaggttcatatcattccctattatngggtttaatgccttnaagaggcttngancggcaaaactntttntttgcagcaaagaanggtttagnagggnggccattnnncagggctttntaaaanccccc

SEQ ID NO: 95761 - DNA, 374 bp, Arabidopsis thaliana columbia
ggcaagttacatgtatcagttttctgcccgtttgtgaagcgagggagcatgcagggattacggacacatgtccctagttttgcaagagaggcttaatggactttctgctgctatgaatgcattaccccttgttcatcctgggtatgcttggattgatccagtaccagaagaaaccacacgttatccggttaaaaaggctagaagagcagaagaagaacaattaaggagttattgaccagcccaaaggggagaagagttgcattgatatcgagaaactccaaaacgagttttgtttttactactgctgaatatatgctttctctggaaaatttcgggtggacatattcaagacttgaaaagccaccatcagattt

SEQ ID NO: 95762 - DNA, 358 bp, Arabidopsis thaliana columbia
atccgcggacgcgtgggaatcgatttcattgattttttccatattcacagcgaaagaatcgatccttaatacaaaattccttcaagatctcacatctcttataagctttctcgataccatcattttcctttctttttttcttttcttcgattctaatttggttctgccggatcttcaaccttgtctgaagaagacattttctagggtttctagagattggtcgggtttttcggttcaagtaaatggttggatcagcctatcgtacgctccacttcattagggttatcaacgacaatattcatcatctaataatcatcatcaagggtcttgcttcgattctgaatctctgctgctgctg

SEQ ID NO: 95763 - DNA, 516 bp, Arabidopsis thaliana columbia
  unsure (1)..(516): unsure at all n locations
tgattctnnnnnnnaacaaaacacagtttctttntctntctctctctctctctctctctctctctctctaaaagctctcttctcttacaatggagaattcaccgagatacagagaagcgacgaatctgattccgtcgccgagatgtcacaacagcaacaacagttgcggtatgagcagtagcagtgaaagtaacaaaccaccaacaactccgacccgacacgtaaccacaagatccgaatccggtaacccgtacccgacaacattcgtccaagcagatacttcttccttcaaacaagtcgtccagatgctaaccggatccgccgagagacccaaacacggttcatctctcaaaccaaacccgacccatcatcaacccgacccaagatccactccttcttctttctcaatcccaccaatcaaagccgtacctaacaagaaacagtcttcttcttcagcatcagggtttcgtctctacgagcgtcgtaattcaatgaagaatctcaaaatcaatcctt

SEQ ID NO: 95764 - DNA, 521 bp, Arabidopsis thaliana columbia
atattccaggaggcggcttacaccaaaactctctatctcagccatggcgaattattacgaaccgccagcttctggaaaccgtcgagacgcagtgaaaggtttcaacagcgggagcttcgacgattcagccggcgatcagagtcaaacgaacgattaccagttaaagataaagaaaagcaaaagcgttccaaacgcggatcgtgcggcgtcaagaagctggagtttcagcgatccagaatcgcggaggaagagaagagtcgctggctacaaagtttattccgttgaacagaagatgaagggatccattcgaaagagcttcaaatggttcaaagacattatcggtatttcttgatataccttctctcaactttcttaaaatctcttctttgtgctgtgagagttaaatatatctgtaacgaacaaaaaattgatagtattttctttctcttgcaactatatgtagaagaagagtctttgaacttgaatgagacagataatgaatgaaatcagttttcatatct

SEQ ID NO: 95765 - DNA, 721 bp, Arabidopsis thaliana columbia
  unsure (1)..(721): unsure at all n locations
agtgaacctctcccaggcaccgaactgaaagaggtatggaaactcgctgatgtgccaaaggatgccaatttccaatcccccccctttgcccccaaggtttattgcttcgacactgccccgaaaaagctgttgccctctgattccccgttacggcctgattgatccgcccttgggatggccgccatgtccaaatcaggctatgggaagagcagcatggaagagagacagagacctgaaaagagaacccgcgaagagaaaggccaagcctttactccaaaatggttcgatgtaacggaagaagtcactgctacaccatggggtgatctggaagtttaccaattcaatggaaagtactcggaacatcgtgcagctgcggataactctgaagataaccccggccctaagtcgatccaattcaacccatggcaattccaagatctgtctacttaaatgtatcgctcccaaagacagaaaagatcaaatctttttgggaacaaatgtattcttattctctcgtagttacaaaaaactttgttttacatctgctagctttcccattgctttctctagtattagtgtacaacttctactgttttgtcttaaattcattcaaatctttctttgaaaaaaaaaaaaaaaagnnnnnnnnnnnnnnnnnnnnnnnnnnnnnnnnnnnnnnnnnnnnnnnnnnnnnnnnnnnnnnnnnnnnnnnnnnnnnnnn

SEQ ID NO: 95766 - DNA, 1241 bp, Arabidopsis thaliana columbia
  unsure (1)..(1241): unsure at all n locations
tccnnatgaaggacccaaaccccgaaaccncntgaccnccagcaatgacatnaatgggctgnaacttaatactttaggactgcatgcacnctgctcagctttaaatgggtccctncccctcagccacgaattctgatggcaatggctagggatggtctgctcccttctattttttcagacattaataaacgcacacaggttccggttaaagcaacagtggcaactgggttgtgtgctgcaaccttagcgttctttatggatgtttcacagcttgcagggatggtgagtgttgggacacttctggcatttacaatggtggcaatatcagtgttgatactaagatatgttcctccagatgagcaacctcttccgtcatctcttcaagagagaattgattctgtttcctttatatgtggtgaaacaacgtcatccggtcatgttggtacttccgatagcagtcaccagcctttaatagttaataatgatgctttggtcgatgtcccacttatcaagaatcaagaagctctagggtgtttggttctcagcgaggaaaccagaaggattgtcgctggatggagcattatgttccacatgtgttggggccttccttttaagttatgcggcatcaagcctgagcttcccagggcttattagatatccgttgtgtggtgttggtggatgtctcctccttgctggtttgattgctctgagttccatagatcaggatgatgcgagacacacttttggacattctggaggttacatgtgcccgtttgttcccctcctacctatcatctgcattctcatcaacatgtaccttttggttaaccttggatctgcgacatgggctcgtgtatcggtgtggctgcttataggagtgattgtgtatgttttctatggtcggaaaaacagttcgcttgccaatgcagtttacgtaactacagctcatgcggaggagatatatcgcgaacatgaaggttctttggcatagtctgagaaagcagcatctcttttgttatatatgtaacacaaatctgtattatctttatctggatgtaacagcaagagtggcactatctatttgtttgcaaaaagatctgtccacggcctttgtaaataatatatatcatcatcaattcataatcaggaaagactcacttttccggtttcaaaaaaaaaaaaaaagggcgaacgcttttaagggttccagctttcgttcggggcgttccccctnacattcg

SEQ ID NO: 95767 - DNA, 926 bp, Arabidopsis thaliana columbia
  unsure (1)..(926): unsure at all n locations
aagaaagacatacccttttgaattttcgagcgttgtgatgccatatgagacatacaatggcgtgagcgtgcgcctaaggtatgtcctcaaagtaacagtcacacgtggttatgctggaagcatcgtggaataccaggactttgtggtccgtaactatgttccgcttcctccaatcaataatagcattaagatggaagttggaatcgaggactgtctgcatatcgagtttgagtacaataaaagcaagtatcacctaaaagatgttatccttgggaaaatatactttcttctggtgagaatcaagataaagaatatggatcttgagataagacggcgagaatcaactggagcaggagctaatactcacgtcgaaacagaaacactagccaaatttgagttaatggatggtgctccagttagaggcgaatcgatacctgtaagagtgttcttgacaccatacgatctgacaccaacgcataagaacataaacaacaaattcagcgtaaagtattatctaaatcttgtgctggtggatgaagaggatcgccgttacttcaagcagcaagaaatcacgttgtacaggctcaaggaagagacatcttgatgtgtacaaaacaaaagagaagagaaaaattatttttcagaactttgtaaagccttttcaagactttctgtatgcaaattggttgggacttgtagtgatattcgtagtttgttcaacgacccaaaatgttgtttggctttgtttggattcttgtgacttccattgtcttcttctccttctataaatgtactttttgttgtcttatgttactgaataagcagctttatttatagaaaaaaaaaaaaaaaagnnnnnnnnnnnnnnnnnnnnnnnnnnnnnnnnnnnnnnnnnnnnnnnnnnnnnnnnnnnnnnnnnnnnnnnn

SEQ ID NO: 95768 - DNA, 725 bp, Arabidopsis thaliana columbia
  unsure (1)..(725): unsure at all n locations
cagtaccggtctcggattcccggctcgacccacgcgtccgagcatacatatatatagatggtggaagaaggcggcgtagttgtgaatcaaggaggagatcaggaggtggtggatttgcctccggggtttcggtttcaccctactgatgaagagataataactcactacctcaaagagaaggtcttcaacatccgatttaccgcggcagcgtttggtcaagccgacctcaacaagaacgagccatgggatctaccaaagattgcaaagatgggggagaaggagttttactttttctgccagagggatcggaagtatccgaccgggatgaggacgaaccgtgcgaccgtgtctggttattggaaggcgaccgggaaggacaaggagatctttagaggcaaaggttgtcttgttgggatgaagaaaacacttgttttctatacaggaagagctcctaaaggtgaaaagaccaattgggttatgcatgaatatcgtcttgatggaaaatattcttatcataacctccccaaaaccgcaaggatgaatggntggtttntngggtttttcacaagaacgntcctagtactaaatcanttnttcaaaacactntcaagggttnnttccctnntaacattgtcaccttttaggcttttaattttcctccnntaatgancggggtttttgggacccggccaattttcgnncgaaaaaggttaaacttttcctgc

SEQ ID NO: 95769 - DNA, 634 bp, Arabidopsis thaliana columbia
  unsure (1)..(634): unsure at all n locations
atacgactcactttagggaaagctgctacgcctgcaggtaccggtccggaattcccgggtcgacccacggctnncggcgtgatcattggaggagagttatgcaagggcatgctggagctaacgtggtacctctagtagcctcaaatcgcatagggaaggaaataattgaaactgagcatggacctagtcagatcactttctacggaacttccttcattgccggaccaacaggtgaaattgtggccgaggcagatgataaatcggaagctgttcttgtagcacagtttgatcttgatatgatcaagtcgaaaaggcaaagctggggagtgttccgtgaccgtcgtccagatttgtacaaggtgcttcttactatggatggtaatctctaaatcttttgctgttggaagctttgatcttttgtttaagatcacactggggaaatccattaacaacaattattactggcttaaccttaaagggtaagtaagcccaaaaataaaagaccagaaaaggtttaatacatctcaaaatttgttctgggaaaaaaaaaaaaaaaaaaaaaaaaaaaaaagcggccgctctagaggatccaagcttacgtacgcgtgcatgcgacgtcatcatcttctatagt

SEQ ID NO: 95770 - DNA, 550 bp, Arabidopsis thaliana columbia
gcttcttcacaggatcagcaatgaatatagcttcgaggattcgacgaagttttttaagagagaagaaggaatcttcagatgggaatagcttgaataatggatcgagtgttaaggaagaaggtaaagatgagattttgggagtttctgatgagttaatcgatcatgtcagatccggcaccattgatacgtttaagaacttctctctggaagatgaagaagaagaagtatctgtgaatcctttgggagatgaagataatggaatgagttcatctgcaaatgggaagaaggatttgtctgattggcaggagaaacacgcggttctcgtgttatcgaaatcgaaggaactctcacagttgagattcaagttatgcccgcgagttttaaaggaacatcagttttggaggatatatttccagcttgtgaggaagattgtggcaaaatatgaggtgctagcaatccaacaggctcaaatcaggaggatggccatggaagacagtaaaacttctgaaaggaagggtgtttatgaagttggaatggtagaaacaaaaca

SEQ ID NO: 95771 - DNA, 807 bp, Arabidopsis thaliana columbia
  unsure (1)..(807): unsure at all n locations
nnnnnnnnnnnnnnnnnnnnnnnnnnnnnnnnnnnnnnnnnnnnnnnnnnnnnnnnnnnnnnnnnnnnnnnnnnnnnnnnnnccacgcgtccgcgagctttctcctctacaacaaaataaaataaaattaatggcttcttcacttatcacctccgcagtcattgtcgtggttttaagcctagtgcttggatctgtagagcaagtgagtggactacgtcacgttcccaagtcccctaagaccactgatgtcaaacaccctgactttcttgtaaccattgagcccaaaccaactattctcattcccggtgttggaaggttcttgcttcctcccaaatgcaagaagccgttctacccttacaatcctgtcaccggagctccacttactggtgggggaatcccatcatataatggtggacaaggggccggacctcacacccaactccctggtggcgatgatacgcttgtcccaaaccccggatttgaagcgccaaccccgaccattggagctggcacaggaagcaacggccaagttccaccagtgccactaccctgagtattattaatctgtcaacaaataagcatatcttagatgcaaacatgtctgttttggtgtcttgagtcttggttagataagtaacccgctactttactagccgtttcgtttgccatctctttttctctctgtgtctctctctatttgctacaaaaagagagaatcttgtttcatgtttttcagtttgtctttagatgaattcattttcacataccattatattaaaataaaggaaatgttccgcagtaaaaaaa

SEQ ID NO: 95772 - DNA, 817 bp, Arabidopsis thaliana columbia
  unsure (1)..(817): unsure at all n locations
tagcaagatgggcagtatcactcttcgagaccgactggcatgaatgtgatcggaaagcattgcccgatcatcgccgtcaatcgcgaggtgttgatcccaatagcgaaaccaattggctacacaggaactgatccttataagataaaattccaagttggaagtgagaaatttctgattcactggcttttggtaattaatcgtaagagctcagaagttccgatgatcgatgtaaatttgagatattctggaggagatctgcttggagtcacagctcaagttatcgacatgcctcatagctatctgaatacacacccggagatccgcaaacagttttgggatcctcaacactggccaaaacatgttcttgttagatacacatggaaggagcagtcagagattgatgtatcctcaggattctatgtcctgtttggctcagctctcacattttcttttgtactctccatttacgtcttacaatcgtcacgagagaagctggcaaggtttgtaagagagacggtggtggagagcagcagcatgaatgttggagaatttggcaagggggattgagtcacatagtcaagtatatgtatgtttctacaattttagatacttggaatatggaattggccgttcaactctcagaaaagatttttcatcaaacatgaatagtcgaaagcaaaaactttgtccttgtaacattatggtttaatagatttacgtttcttaaaaaaaaaaaaaaaagggcggccgctctagaggatccaagcttacgtacgcgtgcatgcgacgtcatagatattnctatagtggtacctaa

SEQ ID NO: 95773 - DNA, 929 bp, Arabidopsis thaliana columbia
  unsure (1)..(929): unsure at all n locations
nnnnnnnnnnnnnnnnnnnnnnnnnnnnnnnnnnnnnnnnnnnnnnnnnnnnnnnnnnntcaattctaaatctccacgcgtccggaagaaaattaccggcaaatttcacggagaaacctcgccaacgaagcggagttatggcgggcatggctgcggtggcaggattacgaccgtggaacgcttttattcaagctctagttctgatatctctatcatttccctttctctccagcgcttaccgacctggagatatcgtccggatgagcaagatggggcagtatcactcttcgagaacgacttggcatgatgtgatcggaaagcattgcccgatcttcgccgtcaatcgcgaggtgttgatcccaatagcgaaaccaattggctacacaggaactgatccttataagataaaattccaagttggaagtgagaaatttctgattcactggcttttggtaattaaccgtaagagctcagaagttccgatgatcgatgtaaatttgagatattctggaggagatctgcttggagtcacagctcaagttatcgacatgcctcatagctatctgaatacacacccggagatccgcaaacagttttgggatcctcaacactggccaaaacatgttcttgttagatacacatggaatgagcagtcagagattgatgtatcctcaggattctatgtcctgtttggctcagctctcacattttctttgtactctccattacgtctacaatcgcacgagagaactggcaggtttgtagagaacgtggtgagagcacacatgatgttggaaattgcaggggattggcactagcaagattgatgttcacatttaatactgaattgattggctcacttagaatattttataacagatagcgagcaaactgcctgacatatgttataatacgtctaaaaaaaaagg

SEQ ID NO: 95774 - DNA, 794 bp, Arabidopsis thaliana columbia
  unsure (1)..(794): unsure at all n locations
gtccgcagaagcttttgcatgttctatggatcccacttttgcaagttatatgcaaactgagttgctggccgtctcatcaggaaagaaagaggagggacatgacattgtattacaaaggaacctcaccccgggttgtatgatctctgtaaagctatggaaggtgtcgaagtagtaaatggcttggaatgctagatgtcttgctcttcttacaagatctgcgttcgtattggacacagaggattacttccacaggtagaagaagaaaatgtagactgaacagttatggctacgtaacatggtgagaagtagtaaggttccataggtcttctctcagcttaatagatgaccacaactaaagtttcctcttgggttgtcttctttccttcaaaccaacaacacacaagaaaaaggtaaaactgacaaagtcgcacaagtaaagttctttgcaaccattcccaactttggttttcaagtttcttactatgctgattattagattagatatagagagatgccccaaggaaccaaaccattagaagaaccatggtggtttaaaggtaccgtgtggaatcttagggttccagggcccagtttggtaatggtaccaggaggggggggctgggcctcttaagaagaaggtggtggtaaaaatggaagcgccctggaaaagccctgggttaataaatagataggcccaaaagaaaaattatattaaaaaaaaacaaaaannnnnnnnnnnnnnnnnnnnnnnnnnnnnnnnnnnnnnnnnnnnnnnnnnnnnnnnnnnnnnnnnn

SEQ ID NO: 95775 - DNA, 422 bp, Arabidopsis thaliana columbia
ccaagaagccaaaacgtcaagatgctaacaacccttgtagtctaaccactcccaagatttaagaattttcttacttttgttctagttttgttgagaaaaagatgcatccgatcttcgatgccatccttcaaaatgaccttccagcttttcttggtttggtggaagcgagagaatcttccctggaggagagaagcgaggaacagaacaccaacaacacggttttgcacgtagctgcaaagctcggtcaccgagaactggtcgccaagattattgagctccgaccttcccttctctcttcccgtaacgcgtacggagacacacctttgcatcttgctgctcttcttggagacgtaaacatagttatgcagatgttagacactggattggaactatattccgcacgcaataacaagaaccaaaca

SEQ ID NO: 95776 - DNA, 607 bp, Arabidopsis thaliana columbia
ccatctgtcttctaactcctttttattaagtttcttaaagaaggttaaagaaaaaccctataaaataaatatcccaacgaaggcgataaaacccagattttccagatcttaaattctctcctcccccaattccatcttcgcaaattctccagattcttccgtcaatctttgagtttggtagagaaatggatcaacaaggacaatcatcagctatgaactatggttcaaacccatatcaaaccaacgccatgaccactacaccaaccggttcagaccatccagcttaccatcagatccaccagcaacaacaacaacagctcactcaacagcttcaatctttctgggagactcaattcaaagagattgagaaaaccactgatttcaagaaccatagccttccattggcaagaatcaagaaaatcatgaaagctgatgaagatgtgcgtatgatctcggccgaggcgcctgttgtgttcgccagggcctgcgagatgtttattctggagcttacgttaaggtcttggaaccatactgaggagaacaagagaaggacgtttcaaaagaatgatatcgcggctgcggtgactagaactgatatttttgattt

SEQ ID NO: 95777 - DNA, 642 bp, Arabidopsis thaliana columbia
  unsure (1)..(642): unsure at all n locations
cggctactaatacgactcactttagggaaagcacgtacgcctgcaggtaccggtccggaattcccgggtcgacccacgcgtccgcccacgcgtccgggtgaattctggggagaagctgaaattctttcaaagcttcatcatccaaatgtggttgcattttatggtgttgtaaaagatggacctggtgcaacattggctactgtaacagagtacatggttgatggttctctgagacatgttctagtcaggaaagatagacacctggatcgtcgtaagagactaatcattgccatggatgctgcctttggaatggaatacttgcacgccaaaaacattgttcacttcgatttgaaatgtgacaatttacttgtgaacctcaaagatccttctcgcccaatctgcaaggttggtgatttcggtttgtcgaaaatcaaaaggaatacattggtatctggggggtgtacgcggaaccttaccatggatggcaccagagctttctcaatggtagcagcagcaaagttttcanggaagggccgtggcttccctttttgggataggcctttggggggttctanccgggggggnccntttgctaanntgncctcggggcttataanngggnggggttngtgccacanactt

SEQ ID NO: 95778 - DNA, 813 bp, Arabidopsis thaliana columbia
  unsure (1)..(813): unsure at all n locations
taggtgcactatagaagagtcttgacgtcgcatgcacgcgtacgtaagctcggaattcggctcgagctcagagaagcaggagagacattcacagtaaccatgtccgtctctctgttcactgccttcaccgttctctcactctgtttacacacttcaacatctgagtttcagctgtccaccatatcagctgcaccttcgttcttgcctgaagctccatcgagtttctcagcttctaccccggccatgtctccagatacctctcccctgttccctactccaggttcaagcgaaatgtctccttccccgtcggaatcgtctatcatgccgacaatcccctcaagccttagtccaccaaacccagatgctgtcactcctgatcctctgctcgaagtttctccagttggatctcctcttccagcttcttcctctgtttggttggtctcatcacaactctcatctttgcttcttgtcctactcatgttgctactagctttctgcagtttcttctagtaatcatatagaaacagcgagtaagcagcactctacacaatatcatcagcagaaaccaaatattcacaaatgtattctttcttactctctgcttcttctgaatttttttcatgtaatattaatatagcttcttctagtgttcgttcgtgtgagatttgctcataaagcactctgcagtttgggctaaaaaaaaaaaaaaaaaggnnnnnnnnnnnnnnnnnnnnnnnnnnnnnnnnnnnnnnnnnnnnnnnnnnnnnnnnnnnnnnnnnnnnnnnnnnnnnnnnnnnnnnnnnnnnnnnnngg

SEQ ID NO: 95779 - DNA, 541 bp, Arabidopsis thaliana columbia
  unsure (1)..(541): unsure at all n locations
acggaagccangggttccaggtttcccgggcaantccaaacntccctgccctatccngttaagggaatgcncttcccgncggancggctatcaggccggaaatccccntcaagcnttgtccaccaaaccccagatgctgtcactcctgatcctctggctcgaagtttctccagttggatctcctcttccagcttcttcctctgtctgtttggtctcatcacaactctcatctctgcttcttgtcctactcatgttgctactagctttctgcagtttcttctagtaatcatatagaaacagcgagtaagcagcactctacacaatatcatcagcagaaaccaaatattcacaaatgtattctttcttactctctgcttcttctgaatttttttcatgtaatattaatatagcttcttctagtgttcgttcgtgtgagatttgctcataaagcactctgcagtttgggctngtgcgcagttgttgtacttggtagcngtgatagtgtgtgttttttgtgcctcaaagtcaaaattgattgatc

SEQ ID NO: 95780 - DNA, 867 bp, Arabidopsis thaliana columbia
cttcttcttctctcctttccgaaatgtcaaaatcctccgatccaggcatgtcttattcttttttgttttgtcttaacgacaaaaaaaaacttgaaaaatctcactttcgttatccattcccaatttcgaccaagagtgttctcaatgacagtctagcatgcaaataagattcatttaacaaacaattgtatgcatttagtataattttatccaaaaaatttattttcaaaattgtgtctttgagctctgtttgtgtagcagagttcaaaaatggtgggtagtattgttggcagtaacatggctgcgactgatgcgaggtttctaagctcgaattttggcaacagtttcagcatcaacaccagaattcacagattccatgatcgctcccaaatcgtaatccctagggctcaatcttcttcttctccgtctccatctccaccctccgacaagaagaagaccaaaacccgacccggaaccataaccactaaggagagcgaagagacggttgcgaagaagctcgacgttgctccgccttcgcctcaatcaccaccgtctccgcctacactgaagttggacgatgtgaatcctgtgggattaggacgacgatcgcggcagatcttcgacgaggtgtggcggaaattctctggattaggtcagatgtcgaggacaacccgacccgatgagcaagagactcttgatagtctactcattagagaaggacctatgtgtgagtttgctgttcccggcgctcaaaacgttaccgttttagtcgtcggagctactaatataatcggtcgtattgttgtccgtaaactcatgctccggggctacaccggcaaggcactggtgaggaaacaagattaggaa

SEQ ID NO: 95781 - DNA, 567 bp, Arabidopsis thaliana columbia
agcactaatacgactcacttagggaaagccggtacgcctgcaggtaccggtccggaattcccgggtcgacccacgcgtccgattcataactcacactcgtctcaaattcgaaaaatgtcgtctctctcctgccctacctaccgctcccgcacttcgtcttcgtctcctttcttgtcgaatcatcatcattcttcgctgatcaatgttgttgacccacgccgctcactctccttccactacgcttctcctcaggggcttaatctagctgagctctgtgttgttagatcgcagaggaggtccgttcagagttctgttgtcgtgcaagatggatcagtagccaccgagtcaagctcgtccgaggaggcgaaagatgtaggggtgttaacgattccttcacttgaagctgacaaggttgtagcagagtctgatggcggtgaacaacttttcaacagttagtatcacggtggtgggagcttcttggggatcttgcccagaagaaaatattcccagctcttttcgcactttactattaaggcttgtcttcctgagcattttaccatttttggc

SEQ ID NO: 95782 - DNA, 606 bp, Arabidopsis thaliana columbia
  unsure (1)..(606): unsure at all n locations
ggcgctttcgcattgtcaccgatacggcgtcgttcacagggatattaaaccggagaacattctggtagatctacgaaacgatacggttaagatctgcgatttcggttcagggatttggttaggtgagggagagaccaccgaaggggtcgtcggaacgccgtattacgtggcgccggaggttttaatgggatattcttacggagagaaggtcgatctatggagcgccggcgtcgttttgtacacgatgctcgctggaactccaccgttttacggcgagacagctgaagagatattcgaagcggtactcagaggaaatctccgttttccgacggagatattccggggggtttcatctatggctaaagatttcctaaggaaattgatatgcaaaagatgcttctagaaagattctcagccgaacaagcatttaaggcacccatggntccaaagagcaggggaacaanagggggnttcatctngaaggttcnttcgggaaataaaaaggttcaagtgtnnnttataaccntcccggtggttttttntacaagtttgggggttcggcattaaatttggtatgnattnagtcccnccncccctttgggnttc

SEQ ID NO: 95783 - DNA, 524 bp, Arabidopsis thaliana columbia
cagctacaatacgactcactttagggaaagctcgtacgcctgcaggtaccggtccggaattcccgggtcgacccacgcgtccgcccacgcgtccgggttacagcagctagactcccgtacttcgatggtgactactggccaggtgcagcagaggatatcatatcccaaatgagtcaagaagatgatggtagaaagggaaataaaaaaggaatactcaagaaacccatttcatagagggcgcttaaagcatctggccagtcggatttctctgggaatgcttccaaagacctgctactaatgcataaacttggggagaccattcatccaatgacggaggattttatcatggttcacttgcagcatagttgcacacattgctgtacgctgatgggaactggaaatcggtggggttgcacccaatgcaaagatttccagttatgggatggatggtatgaggctgggcacaaccgagagaacagagaaaggactccttgttaataaaaaagataaacataatatttttc

SEQ ID NO: 95784 - DNA, 1505 bp, Arabidopsis thaliana columbia
  unsure (1)..(1505): unsure at all n locations
nnnnnnnnnnnnnnnnnnnnnnnnnnnnnnnnnnnnnnnnnnnnnnnnnnnnnnnnnnnnnnnnnnnnnnnnnnnnnnnnnccacgcgtccgcccacgcgtccgcccacgcgtccgcccacgcgtccgacttgacataacttcgtttgtatcgcttttttgaaattctatatattattattgtttgagcagaaactaagacaaaattaagacttttctctcttcttcttctccactgggtcgatctttacgaggttcacttgtacggattcactttaacaacagattcgccatggccgccgccgtcgcagcaccgagactcatctccttgaaagccgtcgcgaagctaggtttccgtgagatctctcaaatccgacaattggctccgcttcactctgcgatacctcatttcggaatgctgcgatgtagatcgcggcagccgttttctacctctgttgtgaaagctcaagctactgctactgagcaatcaccaggggaagttgttcaaaaagtggaatctccagtggtcgttatcactggtgcctcgagagggattggtaaagcaattgctctagccttgggtaaagctggctgcaaggtcttggtgaattatgctaggtcagcaaaggaggctgaagaagttgctaaacagattgaagaatatggtggccaggctatcacttttgggggtgatgtctcgaaagcgactgatgtggatgcgatgatgaaaaccgctcttgacaaatggggaaccattgatgttgtggttaacaatgcaggaattactcgggataccttgttaatacgaatgaagcaatcacaatgggacgaagtgattgctttgaatctcactggtgtatttctctgtactcaggcagcagtaaagatcatgatgaagaaaaaaaggggaagaatcatcaatatctcgtcagttgttggtctcattggtaatattggtcaagcaaactacgcagcggctaaaggtggagttatttcgttttccaagactgctgccagagaaggtgcgagcaggaatataaatgtcaatgtggtttgccccggattcattgcatctgacatgactgcagagcttggagaagacatggaaaagaaaatcctgggaacaatcccattaggacggtatggaaaagctgaagaagtggctggcttggtagaattcttggctctcagtcctgcagccagttacataaccggacaggcattcaccattgatggaggtattgctatctagacatttggtatgagtcggcttttgtttagttaaaacaatttggtaaaagagacaaagttgagttctttttagcacttggtcggattgctattttgcggtttctgttaagaaatatgtaacacttactgcttaaactacgtatttggtcactttcagaaactagaaatcgattaatcccnaaaaaaaaaaaaaaataaaanaaagggcggccgctctagaggatccaagcttacgtacgcgtgcatgcgacgtca

SEQ ID NO: 95785 - DNA, 586 bp, Arabidopsis thaliana columbia
  unsure (1)..(586): unsure at all n locations
atgagagcctcatagaagcggcactagttcgtttggtggatcccttaacgcgcttcttcttcttctttcgcgagataacctagaaacccttttcctttcgttcgcttcttcaatccgccatggatcttgaggctgagatccgcgcattacagcttgaatcggcagatgaaaacaatggtgttgtcattccagaagttcataactcacatgaagttgagaatttggataaagcaccggaagacttgaaagatgaagtgcaagaatcaattccagttcctgatgagcaagaagcttctgaggatcatgatgaagtaatgcttcatccagtccataatccagcgaaagctaaagagaaagctgctcaagagaaggctgccaaagaggaagctgaagatgttgcagaagcaaataaaaagagacacttgaatgttgtgtccattggggcatggttgatgctgggaagnccncaattgggggggcagatcctttttccctaagggggcccggggggttgtccgncaaanccnaaagttttgngagggggcccaaaggccaaagntngnaaanccgggntttnggggtntnt

SEQ ID NO: 95786 - DNA, 639 bp, Arabidopsis thaliana columbia
atccataattacgacaaacgaaacgacgcatattaaggttactcgcgtctcaaactcgcgtctcctaaatgggtcttaccccaactgcaaccctactcgtcgctgttttcgcgttttgcctcgtcgctgtaacggcgcagttcgcctacgttttgtggtggaaacgtcggttccgtcgtcggagtatcgccggatcagaacgcgacgctttttcctctcgcggtggtgacctaacggctacaccaccgccatcgaaagagcttctttacttcttcttgttctgtctcgaaaacaaacagttcagaataggatctgccaccgctccgccgctccctgcagccgcaccgccggttaatgacgtggcatcaaagtggtcaataaacggggaaaatttactttgcggaccttcggagactttgtttaccatcgctgaaggctatacttagcgagtccgatcatcggacggggtgagatttatcccacggtgggagcaatctttacaagaggttcactgtaaaaggattgatgaagtggaagaggaggtagtcccgacggatataagcgacggcgggggtgactttagccactataatcaaactacgccgttttctactccatgtgccttccccaccggtttta

SEQ ID NO: 95787 - DNA, 489 bp, Arabidopsis thaliana columbia
  unsure (1)..(489): unsure at all n locations
cagctacnnnnnnnnnnnnnnnnnnnnnnnnnnnnnnnnnnnnnnnnnnnnnnnnnnnnnnnnnnnnnnngtccacgggtgcgtgtctctttctctctctctcagaaactctttctccaataatggcagaggcaagtttctatatcggagtcataggaaatgtaatctccgtactagttttcctctcaccagtggagacgttttggaaaatagtgaagcggagatcaacggaggagtacaaaagcttgccgtacatttgcacgttgttaggatcatcgctatggacatattacggcatcgtcactcccggagaatatcttgtctccaccgttaatggctttggtgctcttgttgaaaccatctacgtttcactttttctcttttatgcccctcgacatctcaagctgaaaacagtggtagtggtagcgatgttgaacgtgttttttccaatcgcggcgattgtggcaacgagaagtgcgtttgaagatg

SEQ ID NO: 95788 - DNA, 357 bp, Arabidopsis thaliana columbia
caacaacatcaatcgagagaaagcgaataaataaaacaaataatttaaattaaaaatccactcgccggagacgccgtcgtttcgacgccggtgctccaaaaaaaatatgaaacggaaaggagtcggattctctctccccgtcacggtggtgatgttggtgatcggtttcatctactttgcctcggttttcactttcatcgatcggtggttcagcctcacttcgtctcccggaatcgctaacgccgccgctttcaccgctttggctctgatgtgtatatacaattactccatcgcggttttcagggatccgggtcgggttccactcaattacatgccggatgttgaatatccggtgag

SEQ ID NO: 95789 - DNA, 513 bp, Arabidopsis thaliana columbia
  unsure (1)..(513): unsure at all n locations
cgactactatggngaagctggcacgcctgcaggtaccggtccggaattcccgggtcgacccacgcgtgcggttcagtctcaagttattctcttcgtgtcctgaatctgtgcaccaaaggttatcgaaaatgtcagtgcgagttctgaatcctaatgccgaggttctcaacaaatctgcggcgcttcatatgaccatcaacgccgccaagggtttgcaagatgtactcaagtcgaatctcggtcctaaaggaacaatcaaaatgcttgttggtggttctggggatattaagcttaccaaagatgggaacacgctattgaaggaaatgcaaattcagaatccaacagccattatgattgcgaggacagctgttgcacaggatgatataagtggtgatggtactacttccactgttatcttcattggtgagcttatgaaacagtctgaacgctgcatcgatgaaggtatgcatccacgagtcctagttgatggttacgagattgctaaaagagctt

SEQ ID NO: 95790 - DNA, 644 bp, Arabidopsis thaliana columbia
taggtgcactatagaagagctatgacgtcgcatgcacgcgtacgtaagctcggaattcggctcgagctcttccacaacgaagtttggttcatcaccggcgaatcctttctccgacgtcataatgccgtttaagacggtgatagaagtggagcctccgagtctgttacggtacttgatcggatcggcggtgatgatgatcggtgttgtattaccggttggttacatgatgtttcgcaacaaacgcgtccccttctcatcttcgtactctaaacagacgaacaaagttttgatatagggggccagaggctgtggttgatttcaacactaaattgagaaggatgatgacatattgatgatttggacgactgtaaaattatgggggaattcttgtttttacatggcttgtaagagatctttcgatatcaaattcataaaccataaaatgtgagttatttttctcttatcttcttatttaggttaattcaaaggtcttttatgtacacaacctcttctctttggtggaaagatatcattcgatggccagagttttcattatctacagatctgtataatactgagctttgctctttcatcttcttcttgcttttctttggtaattgaaatgctaatgacgtgtttatatt

SEQ ID NO: 95791 - DNA, 389 bp, Arabidopsis thaliana columbia
gcgtccggtactatcttcagagcttcgagaatgtcgatgttaatggcggccaaatccacttcactctttagctcaaaccctacaatttcagctaaaatagggcaaaaccctcgcggcgtcagatcggtttatccgacggtgagaatgcagtcacgtgttcaccgtctgattgaagagcaaggtgctgtgcttattcccggagtctacgacgcattatctgcggctattgtgcagcagaccggattctccgccgcattaatctccggttacgccctctccgccgtaactttgggaaaaccagatttcggtttgataacacctccggagatggcagcaacggcgagatcagtgtgtgctgcggctccaaagattccaatcattgcagatgc

SEQ ID NO: 95792 - DNA, 543 bp, Arabidopsis thaliana columbia
  unsure (1)..(543): unsure at all n locations
gaattatcgaaagcacaccaacaggttcatatatctgaagcaagggtttcgactgctttagacaagttagcccacatggaagaattggttaatgataggttgttacctggcagagttgtaacggaattagataaaccctcctcttcaaccactgcttctgctgtcgagttagatagggaaaagacaaacacgggtgcgaaaagcttgaatgtttctggtccggttccgccttatagtccacacttgaagaatttttggtatcccgttgctttcactgcagatctcaagcatgatacaatggtaccaattgaatgctttgaacaaccatgggttatctttaggggtgaagacgggaaaccaggatgtgtacggagtacatgtgcgcatagagcatgtcctcttgatcttggcacagtgaacgagggacgtattcaatgtccgtaccatggatgggaatactcaanccgatggngaatttaaagaagantgcccgtnttcaaagtttcttgnanggtgnaggnccaaancantnccnttntnttt

SEQ ID NO: 95793 - DNA, 799 bp, Arabidopsis thaliana columbia
gagacaaagttaaaagtagagaagaaaatgagtgaggaggagaggaagcaacacgtcgttctagtacatggtgcttgccatggcgcctggtgctggtacaaggttaagccgcagctcgaggcttctggccaccgcgtaaccgccgtagatctagctgcctccggtatagacatgaccaggtcaatcacagatatatccacatgcgaacaatactcagagccattgatgcagctaatgacctcactaccagatgatgagaaggttgtgcttgttggtcatagcttaggaggtttgagtttagctatggccatgggtatgtttccgaccaaaatctctgtttctgtctttgtgactgctatgatgccagacaccaaacactcaccatccttcgtatgggataagctaagaaaagaaacttcacgagaggaatggttagacaccgtgtttacgagcgagaaacctgattttcctagcgagttttggatttttggaccagaattcatggccaagaacttgtatcagttgtctccagtccaagatcttgaattggcgaaaatgttggtgagggcaaacccattgattaagaaagatatggcagagagaagaagcttcagtgaggaaggatacggatccgttacacgtatatttattgtatgcggaaaggatcttgtgtcacccgaagattaccagcgatcgatgatcagcaactttcccccaaaagaagtaatggagatcaaagacgcagatcatatgccaatgttctccaagcctcaacaactatgtgctcttctcttggaga

SEQ ID NO: 95794 - DNA, 630 bp, Arabidopsis thaliana columbia
  unsure (1)..(630): unsure at all n locations
gcacngttcagggaccnggcctgaattccctgggcngcccactgccgccagactctgaacttcgccgtcagagagcatccatgggtcgtgtcatcagagctcaacgtaagggtgcgggttccgtcttcaaatcccacactcaccaccgcaaaggtccggctaagttccgtagcctcgatttcggcgagagaaatggttacctcaagggcgtcgtgacggagatcatccacgatcctggtcgtggtgctcctctttgctcgtgtcacttttccgtcatccttttccgttttcaaggaaaccaaaaagggagcttctttcggtcggccgcccgaaggtattgtacaaccggtcagttctttgtaccttttcgggtaagaaagctactcttcgtcgttgggaatgttcttccctcttagatcntatttcctgaaggagcttgttgtntnnaacggtcgnggcatcaacgtcggtgatccgtgggtgtcccccgtanagcttcttgggaattacgccatttttnatnggtnanaaacccttnaagggcacnctnggttaaagttccaccgggttcgnagaangtttccccagtggtcaagggtnttanttggcaantttttgnggngnaaactt

SEQ ID NO: 95795 - DNA, 828 bp, Arabidopsis thaliana columbia
  unsure (1)..(828): unsure at all n locations
cgccagctctattctactcacttatggaaagctggcacgcctgcaggtaccggtccgcaattcccgggtcgacccacgcgtccgggctgcgagaagacgacagaagggggccgtactctgaagaagacgaagcaaatcctcccacaaagaatcatccatgggtcgtgttatcagagcacaacgtaagggagctggttccgtcttcaaatcccacactcaccaccgtaaaggtccggccaaattcaggagtctcgatttcggggagagaaatggttatctgaaaggtgttgtgacggagatcattcacgatccaggacgtggtgctccattggctcgtgtagctttccgtcatcctttccgattcaagaagcagaaggagcttttcgttgctgctgaaggtatgtataccggtcagtttctttactgtgggaagaaagctactctcgtcgtcggaaatgttcttcctctcagatctattcctgaaggagctgttatttgtaacgttgaacatcatgttggtgatcgtggtgttttcgctagagcttctggtgattacgccattgttatcgctcacaatccctgataacgacactagcaggattaagttgccatcgggttcgaagaagatttntgccaaagtgggatgcaagggccatgaattggtcaaagttgcaaggttggtngaaggaccagagaaagccnattgntcaaaggcttggtnaccggataccncaaagtanccnttnttaaaggggaaacttcttggccntaaggnttccgtggnnntggctnttantccaatttgggatccccncggggggggnaacc

SEQ ID NO: 95796 - DNA, 1078 bp, Arabidopsis thaliana columbia
  unsure (1)..(1078): unsure at all n locations
gggtcgacccaagcctctagattgaactagtggatcccccgggctgcaggaattccgcaatatctgaacttcgccgtcgagagcatccatgggtcgtgtcatcagagctcaacgtaagggtgcgggttccgtcttcaaatcccacactcaccaccgcaaaggtccggctaagttccgtagcctcgatttcggcgagagaaatggttacctcaagggcgtcgtgacggagatcatccacgatcctggtcgtggtgctcctcttgctcgtgtcactttccgtcatcctttccgtttcaagaaacaaaaggagctcttcgtcgccgccgaaggtatgtacaccggtcagttcttgtactgcggtaagaaagctactctcgtcgttggaaatgttctccctcttagatctattcctgaaggagctgttgtctgcaacgtcgagcatcacgtcggtgatcgtggtgtcctcgctagagcttctggtgattacgccattgttatcgctcacaaccctgacagcgacactactaggattaagttgccatcgggttcgaagaagattgtcccaagtggatgcagggctatgattggacaagttgctggaggtggaagaactgagaagccgatgctcaaggcaggaaacgcgtaccacaagtaccgtgtgaagaggaactcatggcctaaggttcgtggtgtggctatgaatccagtggagcatcctcatggaggaggtaaccatcagcacattggtcacgccagtactgttaggcgtgatgcacctcctggacagaaggttggtcttattgctgcaaggaggactggtcgtctcagaggtcaagctgctgcttcagctgccaaggcagactagagttaaaagagataaactttgtttctcttgttttctatgtttcaagttttgttgtctgtgtttccttttgaacctcattctgaaatcctaaaagatttttatgataaacctttctctcttctcgaaaagcttatgttattcacaaaaaaaaaaaaaaaaaaaaaaaaaaaaaaaaaaaaaaaaagggcggccnnnnnnnnnnnnnnnnnnnnn

SEQ ID NO: 95797 - DNA, 420 bp, Arabidopsis thaliana columbia
agagaagatccaaaagcgtgggaaaatcgaattagggttttctgaaaatggttgatactgttgacaaattaggttacttccaagcgattacaggtctcgaagatgctgatttgtgtactgagatccttcaagctcatggttgggacctagaactagcaatctcttcattcacatcttctgatcaagacgcttcgtcttccgccgtcgatggtggtggtaacaatcgcgatcacgatcacaataacgccaccgtgactcctgattatccacctcgcgggatcgttgacgatacagagcttgttatgcgtgatgatggaggaggaaatcgaggtccaggagttgcgtggaggattattactttaccgatttcgattgtttctggtagcttagggttagtttctggagcgatccgggtaggta

SEQ ID NO: 95798 - DNA, 273 bp, Arabidopsis thaliana columbia
cccacgcgtccgcccacgcgtccgaaaaaactttcattttattcgtcgtcagtttcatcttgttgcttcggagcgagcgagaattatcgtcggagaatttatcgtctctctctctgaaaattctgatcggtgaagaatcgtcggatcgaaagttcgtttatcttctcgtttacgtttccgtgatttaaatcctttggggtttttttttcttggtaatgtctgtgtttctgaatgtgtggttgatttttgttcgtacactttactttgatcgat

SEQ ID NO: 95799 - DNA, 552 bp, Arabidopsis thaliana columbia
  unsure (1)..(552): unsure at all n locations
nnnnnnnnaccccctnatttagggaaagcacggacgcctgcaggtaccgggccggaattccctggtcnacccacgcgtccgcccacgcgtccgatcaaaaaaaacttgcacatcttctcagatcttcaagtttctcctctggtttctcatcatgaccgttgatattatgcgtttacctaagatggaagatcaaacggctatacaagaagctgcatcacaaggcttaaaaagcatggaacacttgattcgtgtcctctctaaccgtcccgaagaacgtaacgttgattgctctgagatcactgatttcacagtttctaagttcaagaaagttatctctcttcttaaccgttccggtcacgcccggtttagacgtggtccggttcattcccctccttccttcctcccgttcctccaccggtgaaagtgacaactccggctcccactcagatctctgctccagcaccggttagcttcgttcaaggcaaatcaacaaaagcggtcacggtaggttttnaactngtccangngntttttgggnggtnaaaccaaana

SEQ ID NO: 95800 - DNA, 838 bp, Arabidopsis thaliana columbia
  unsure (1)..(838): unsure at all n locations
attggctataattatgacaaaaactaccaaaaccatgaatcctaagttttacttggttcttgccttaaccgcggttctggcctcaaacgcatatggtgcggttgtagacatcgatggaaacgccatgttccacgaaagttactacgttctccctgtcatccgtggccgaggcggaggcctgactctagcaggccgcggtgggcagccatgtccttacgatatcgtgcaggaatcttcagaagttgatgagggcattcccgtaaaattctcaaactggaggcttaaggttgcgttcgttcccgaatcacagaacctcaacatcgaaacagacgtcggagccacgatctgcatccagtcaacctactggcgggtcggtgagtttgaccacgagaggaagcagtacttcgtggttgctggtccaaagccagaagggttcggacaagattcgttgaagagtttcttcaagatcgagaaatctggagaggatgcttacaagtttgtgttctgtcctcggacttgcgactctggcaatccaaaatgcagcgatgtcgggatattcatagatgaacttggcgttcgtcgtttggctttaagcgataagccgtttttggttatgttcaaaaaagctaatgtgaccgaagtttcgtccaagactatgtgagaggaccactctcgatcttttactttgacgactcataataaaacccctaggttttttttttgataaaacacccgctctctggcggccgcgaattaaannnnnnnnnnnnnnnnnnnnnnnnnnnnnnnnnnnnnnnnnnnnnnnnnnnnnnnnnnnnnnnnnnnnnnnnnnnnnnnn

SEQ ID NO: 95801 - DNA, 391 bp, Arabidopsis thaliana columbia
cccacgcgtccgctgatttttttcttctctctctctctctctcttccttctgggcttctagggtttgtcctctccagtccccgatttccgctttatccgatcggccgccgccgagattctagataaacctatggcaatggaggttacgcagttgctcattaatgctcagtcgattgatggaactgtacgtaagcacgcggaagaaagtcttaagcagtttcaggagcaaaaccttgcgggtttcttgttgtcgcttgctggagagcttgcgaatgatgagaagccagtagatagcaggaaattagctggtttagtccttaaaaatgctcttgatgctaaggaacaacacaggaagtatgagcttgttcagagatggttggctctagacatg

SEQ ID NO: 95802 - DNA, 525 bp, Arabidopsis thaliana columbia
  unsure (1)..(525): unsure at all n locations
gaatnccggggcggcccacacccgtccacacatagaagacgaagaagaagaagaagacgatacagatccacaacgccatgggtttaggcatcttagcttctcgaacaattcgaccagcttcacgtcttcttcaatctcaaacctccaatttcttcctccgcacaatcgtctcaaaaccagagctccaatctcctgaatccgctgctgtctctgagcctgagccgccgacacagattctccctcctagaaaccctgtaggtggagcacgcgtccacttctcgaatcctgaagatgcgatcgaggtctttgtcgatggttacgcggtcaaagtccctaaaggattcactgttcttcaggcttgtgaggtcgctggagttgatatcccgaggttttgttatcattctcgtttatctattgctggaaattgcaggatgtgtcttgttgaggttgagaaatctcctaagcctgtagcttcatgtgccatgcctgcgcttcctgggatgaagattaagactgatacaccga

SEQ ID NO: 95803 - DNA, 511 bp, Arabidopsis thaliana columbia
  unsure (1)..(511): unsure at all n locations
acaacttcaaagctttctaagcaagagattgagagaaatcggattttctttctaagactcaaaatatctaaaaacaataatggctttttggtctgctgagaatgctactaaagcctatcttagtacattgaaaacggatcaaaggacaaaagaaccaaacgtcgccgaattcatatcagccctagccgccggaaatagcgctagaaagatagccgtggcttgcgccggagcagcaaacgccgacatactcgttgcactaatcgcagcggctaaccaaacgcgtggtcaagttgtatgcgttttacgtggtatcgaagaactaatcatatcccaaaaaatgttggaccatcagaggttcatcaggtacaattcgttagtcggggnatctaacggcggcactctaatcaataatcattttcgggngcagcagattttcgtccccgggggtttttaacctcgnaaaccncccagnggtcgttngnnaatccntttttnttncgggggnaaccga

SEQ ID NO: 95804 - DNA, 590 bp, Arabidopsis thaliana columbia
ctacaacttgcgctctaattcatggagggttctcgaggtcactcccaacggggaactggaccctaatcatcccctctacggcgtttctgtgaagggaaatacctacttttttgcgcatgaggatagcggcagcggtgaaattgatgacgatggcgacataatcgatcttgaagatttcttactctgttatgattttacagcagagacatttggtctgcgactgcctcttccgtatcactctactatcgatgcgactgggaccctctgttgcgttagagaccagcagctcgcggagctatatgataatgagggtcttcacagtgatgatcggtttaccacagttgagttttgggttactactagtattgagcccaactctgtgtcctggagcaagtttttgacagtggatatgagaccattggcactcactggtgttcggtttgacaatgatatgggtgccaccttcttcattgacgaggatgagaaagtcgctgtgggttttcgatctagacggatacctaagcaccgagagcgctcgttaccacaccgcttttatcagtggaaaggatggattctttaaacctgtgact

SEQ ID NO: 95805 - DNA, 501 bp, Arabidopsis thaliana columbia
  unsure (1)..(501): unsure at all n locations
ctcacgacttgcgctctaattcatggagggttctcgaggtcactcccaacggggaaatggaccctaatcatcccctctacggcgtttctgtgaagggaaatacctacttttttgcgcatgaggatagcagcagtggtgaaattgatgaagatggcgacataatcgatcttgaagatttcttactctgttttgattttacaacagagacatttggtctgcgtctgcctcttccgtttcactctactatcgatgcgactgtgaccctctcttgtgttagagaccagcagctcgcggtgctatatcataatgagggtcttcacagtgatgatcggtttaccacagttggggttttggggttaacaactcaggatttgaggcccaactctggttggccccgggggcaaaggttttttgacaagtggggtnttggggcccaattgggcactcaactgggttttccgggtttncaaatnatntngggggccnncccttttttaaatt

SEQ ID NO: 95806 - DNA, 669 bp, Arabidopsis thaliana columbia
  unsure (1)..(669): unsure at all n locations
cagtttgcaggnttngccntggnccactggntccggtnacatganngggcccccttttcatggcggggatgagaaagccgctgtggttttcgatctagacggataccttagcaccgagagcgctcgttaccacaccgcttttatcagtggaaaggatggattctttaaacctgtgactctaggagtagctcccaatgtcggggaaccttgtcccagaaccgggcatattccgactacatatcgtcccccgcttgtctgctcgtctacttaccttccgagtttagtgcaagtcaaccaacagcgcaaaaggaaagaaagacatgtttagttttctgttccttgcagttctcaagactgctagtcaattctcagttacatttccatgttatctttctcctcttttagtttctcttctcaaacttactcttgtcatggtttaagtttcttacttttcgtcagtgagatggttaggtaccttatttgtttcttgcattgtcgtctgctagtaaatttatcaaagcattgttctagtcacttgttcacttgcaccatccttaagcaaagcatgacatggtttcatgtactgttagcccaattatggagtacatatctcatataagaaataaaaaaaagggcggacgctctagaggatccnagcttacgtagggg

SEQ ID NO: 95807 - DNA, 549 bp, Arabidopsis thaliana columbia
  unsure (1)..(549): unsure at all n locations
ccaacttaggtcgccaagcagtgagagcttatcgagctccaatgccgtcaactacagagccatcagaggaagccatagctactttggtatctatgggatttgaccagaatgcagcgagacaggcgcttgtacacgccagaaatgatgtcaacgctgccaccaacatccttcttgaagcacactctcactaaaccttctttactaggaagtttcagaaacattgttgattcgagatgaagacattgtacaacagaggtattcttctgctgcgttctaacaacggaaatggccttgcattgacgataatatgtccagtaaatgatctgatttacatcctctttatctttcttttagggtttcttttggcctcttttgtttgccgttgtagttttagaacaaagtgcctaggttatgttatgtaagtacagatttgaaaaaaatatgaagaggcttatctgattaaatcaacacaaaaaaagtacctttnnnnnnnnnnnnnnnnnnnnnnnnnnnnnnnnnnnnnnnnnnnnnnnnnnnnnnnnnntcccc

SEQ ID NO: 95808 - DNA, 750 bp, Arabidopsis thaliana columbia
gcgtccgctccctcaattcttcatgatctaactactaagagatctgattcactttcttcacactctccgaggctcatcttcgcttcttccctagctcttatctggacacaatgatggacctaacgaaactgaagcctccacagatcactttttattgctcggcgttttccgtcttgctcacacttcatttcacgatacagcttgtatcgcagcatctcttccactggaagaaccctaaggaacaaaaggctatactcatcattgtgcttatggctcctatctacgccgttgtttcctttattggtttgttagaagtcaaaggaagtgaaaccttcttcctctttcttgaatccatcaaagaatgctacgaagctcttgtcattgccaaattcttggcattgatgtatagttatctaaacatatctatgagcaaaaacattttgcctgatggaatcaaaggaagagagattcaccattctttcccaatgactctttttcagcctcatgtagtccgtttggatcgtcacactcttaaacttttgaaatactggacatggcaatttgtggtcattcgacccgtgtgctccactttgatgatagctttacagctcatcgggttttatccttcatggttgagctggacattcactatcattgtcaatttctcggtttctctggccttgtattctcttgtgatattctaccatgtgtttgctaaggagcttgctcctcataatccactcgcaaagt

SEQ ID NO: 95809 - DNA, 649 bp, Arabidopsis thaliana columbia
  unsure (1)..(649): unsure at all n locations
tttgacactgttaaaattaagtgttcggatgcacatgcaattgctgatgcggctgccaagaagtgagatcaatctgcgtcttgtggactccaccactattactgcttcctttcgacgaaacaaccaccttggatgatgtcgataaactttttgaagtttttgcttcgggcaagcccgttcaattcacggctgagtctcttgcaccggagtttaacaatgctattccctctagcctaacaagagagagcccttatctgacccatccaatcttcaacatgtaccacacggagcatgagttgcttaggtacatccacaagttacaaaataaagatctatcattgtgccacagcatgattccacttggatcttgtacgatgaaattgaatgcaacaactgaaatgatgccagtcacatggccaagtttcaccaacatgcacccttttgctcctgttgaacaagcccaaggttatcaggaaatgttcgcgaatttgggtgacctcttgtgtacggtcactgggttcgactcttttcttcgttgcaacctaaatgcctggtgctgctggtgagtatnccgggttttggttatccgnggattcanatntcaagggggggtcntcnccgtaaagngngttcaaacctgtttttgnaa

SEQ ID NO: 95810 - DNA, 554 bp, Arabidopsis thaliana columbia
  unsure (1)..(554): unsure at all n locations
gcgatttcttgtggaacaattcagattgtgtgtttagcccacgaggattggaaaaacatgtcgtgttcgcctgacacagagcgggccctgatctgacccacccaatcttcagcatgttccacacgcagcatgagttgcttagggacatccacatgttacagtcaaaggatctatcactgtgccacagcatgattccgcttggatcttgtacgatgaaactaaatgcaacaactgaaatgatgccagtcacatggccaagtttcactgacattcacccttttgctcctgttgaacaagcacaaggttatcaggaaatgttcgaaaatttgggtgacctcttgtgtacgatcactgggtttgactctttctcgttgcaacctaatgctggtgctgctggtgagtatgccgggcttatggttatccgcgcatatcacatgtcaagaggagatcatcaccgtaatgtgtgtatcatacctgtctcttgcacaacggtacaaacccctgcaaagtgcctggtatnttgcggggntggaaaattaatttcaaagttggga

SEQ ID NO: 95811 - DNA, 333 bp, Arabidopsis thaliana columbia
cgaagctctctcttttttttttgggggggctaaatctctcacgcacgacgttgagagagctctttcctttgcgatcttgttgtcttcctctgctcccgaccgaattcacaacccgctttaatatgcattggagttcaacttgaatttattggccgttgttgaagctgtgtaactattaacaattggggctatgcattcaacgattttctgctcgtgaagaaggaatataacttatttataaggtttcagtcttagacatgtcgtgttttgaatgcagtggttatgatgtctcaagttggcttattcatttttgctgaattgcattctttggaa

SEQ ID NO: 95812 - DNA, 2273 bp, Arabidopsis thaliana columbia
acgatgactaatacgatgagcaacaacaacaacaacacactagtaacacggcacgagtcagcttgaaagagagaactaaaacctagaaatcgagagagattggtggaagatttttcaccagatttcatgggagaagaagagagtcgaattggagacgagctttcgattttggttctcacggcggagcgactccgtgtagctgtggatgaagctgaatcattcaaaacagagtgtggcgaggttggtaaacaagtagatcggcttgctcaaatgcttagaacacttgttcgattcgtctctagttcttctcaacaagtttatgatcggccgattcgtagagttatcgtcgatgttaagaagaatctcgagcgtggttttgctcttgttcgtaagtgtaggagacacaatataatccgacgagtttgtactatcatcaacgctgctgattttcgtaaggtgattaatcttctggaatcttctaatggtgatgtgaaatggattctgagtgtgtttgattccgacggagatggaagttttggtggtggaatcgtgatttcgcttcctccgattgctacgaatgatccgattttgccttgggtttggtctttggttgcgtcgatacagatggggaaattggttgataagattgatgcggcgaatcagcttggttctcttgccggagataatgatcggaataagaagattattgttgatgaaggtggtgtttctccgttgttaaggcttttaaaggagagttcatcggcggaggggcaaatcgcggcggctactgcgttagggttgttggcttgtgatgaagataaggttaggtctattgttaatgaacttggtgttccgattattgttcaggttcttggtgattcttctgttagagttcagattaaggtagctacattggttgctagaatggctgaacatgatcctgttgctcaagatgagtttgctaggcagagtgtgattaagccattagttacgttgctttcgcttgatgtgtttgttgatgatattcatttgagtaagcataatagtattcactctcttgttcagatgaacaaagaggttgagaaagatccgtcttcgaagctttataggccgcttaagagttctaagtcgaatgtgtatcgtgacattggtggtagtggaagtagaactgggaatttcaagaaggagagggataatgagaatcctgaggtgaaacatgagcttaaggtcaattgtgcggaagctttgtggatgcttgctcgaggaaatgtagcgaatagtaggaggattacggaaacgaaagggttgctttctttggcgaagattgtggaaaaggaagttggtgaattgcaatataattgtttgatgactctgatggagataaccgctgctgcggagtcgagtgctgaccttagacgggcagcattcaagactaattctcctgctgctaaagctgttattgatcagatgttatggataatcaaagatgtcgatagcccgattttaaaaatcccagcgattcaatctatcgggtcattggcacggacattcccggcaagagaaacgagaatgatcaagccattggttgagaaactcggtagtagcaaccaagaagtggctataacagctgtaatttcattgcagaaattcgtatgtcccgagaacttcctctgcgcagagcactcgaagaacataatcgaatacggagcaatcccgttattgatgaaactaataaggaacgtcgagcagcaaatgcagttacagtgtctagctttactctgctacctttccgtgaatgccagtaaccaccaacagttggaacaggccaaggttttgacggtgctcgaaggtgcagaacgtttggcgggtctgcagaatatggagttgagagaactcgtgtcgaaagctatatatcagctaagtctatacaatgcaggaagtcacagtcaaatgctatcgtatgttggtccttaaagcaagatacagtttatagtgtgttggattcatatcgtacagacaggaatcttcattgttagatttacagagaaagagcaaaaagcagaatctctcattttgtgatcgctgattgatcaaatccttcattgtatatggaacgacacaaagataattaggtggaagggtaataaaactagctttgctctctgtgattcgctaggctatgaagtatgaatgatgattccaaaattcctggttcatgatataaattttgtaacatggtttttgatgcaaatgtgggccttattatatcttaa

SEQ ID NO: 95813 - DNA, 525 bp, Arabidopsis thaliana columbia
  unsure (1)..(525): unsure at all n locations
atgatactgccnnnnnnnnnnnnnnnnnnnnnnnnnnnnnnnnnnnnnnnnnnnnnnnnnnnnnnnnnnnnnnnnnnnnnnnccacgcgtccgagaacaacttcttcaggttctataaagagattccgaagaagaatcttttccagaaacagtgtaagtcttatcttcttctttaggctttaagatgactgctgaagttaaggttgaggagaaacaggtggagtcagaggttgttattgctcctgctgttgttcctgaggagactactgttaaggctgttgtggaagagactaaggttgaagaagatgagagcaagcctgagggtgtggagaagagtgcttccttcaaagaagagagtgatttctttgctgatttgaaagaatctgagaaaaaggcactgagtgatctcaagtctaagcttgaggaagctattgttgacaacactctcttaaagacgaagaagaaggagagctctcctatgaaggagaagaaggaagaggttgtgaaacctgaagctgaggttga

SEQ ID NO: 95814 - DNA, 809 bp, Arabidopsis thaliana columbia
cttcctgattccgtcgatagggtgagagaggaagagatccaaggaggattcgataaaatggctccaagatccgattcgcaaaccggctccagtgtatcagacggttcagatcaatcctcaatggatccaatattccaccttctccgaatcgtcccattctcatttctccgaccaccgcgcctccgtctgaagattccatcgttcacgcttccttctccgatgactgtatacgctctaattctccttacctactttttagtagtctccggtttcgtctacgacgtaattgtcgagcctccgggtatcggatcaactcaggatccgactactggaactattcgacccgttgtgtttatgtcgggtcgggttaacgggcaatatatcattgaaggtctctcttctggattcatgttcgttctcggtggaattgggattgttatgcttgatttagcgcttgataagaacaaagccaagagtgttaaagcttcttatgctgttccgggggccccctccattgtgatcgcttatgtcatgagtatgctctttatccgtattaagattcctggttatctttattagcttttagattatgtgtaatgggaacttgacttataagagtagtgatcacttgaaaagttgtgtcttttttagtgttcgaactcagttccgtagtcaccaatttgaagcatgtctctttggatttgaattaaagtcctagtaattattgttccaaaaaaaaaaaaaaaaaaaaaaaagggcggccgctctagaggatccaagcttacgtacgcgtgcatgcgacgtcatgt

SEQ ID NO: 95815 - DNA, 1699 bp, Arabidopsis thaliana columbia
  unsure (1)..(1699): unsure at all n locations
cggacgcgtgggttttttttctctcatagtcgctctccctctcctctccctttgagaaatccctaactctttgctcttctcttcccggcgatctatctctccgatttgggtattgaaatggcaactcctatggttgaagatacgtcaagcttcgaagaggatcagcttgcttccatgtccaccgaagatatcactagagctactcgtcttctcgacaacgagattcgaattctcaaggaagacgcgcaaagaacaaatctagaatgtgattcttacaaggagaagattaaggagaatcaggagaagattaaactcaacaagcagctgccttacttggttggcaacattgtcgagattttggagatgaatccagaagatgatgctgaggaagatggtgcaaatattgatcttgactcgcaacggaaaggaaaatgtgttgtgttgaaaacgtctacacggcagaccatctttctaccagttgttggactcgtggatcctgatagtttgaaacctggtgacttggttggagttaacaaagatagctacttgattttggataccttgccatccgagtatgactctagggttaaagccatggaggtcgatgaaaaaccaactgaagattacaatgacattggaggactagagaagcagatccaagagcttgtagaggcaattgtgcttcccatgacgcacaaggaacgttttgagaagctgggtgttcgtccaccaaagggagtgctcttgtatggtcccccagggactggtaaaactttaatggctcgtgcctgcgcagcacagaccaatgccaccttccttaaattggcaggccctcaattggtccagatgttcattggagacggagcaaagcttgtccgtgatgcctttcaacttgccaaagagaaagctccgtgcattatcttcatagatgaaatcgatgccattggtacaaagcgtttcgacagtgaagtcagcggagacaaggaagtgcagaggactatgttggagttgctcaatcaacttgacggattcagtagcgatgaacgtattaaggtgattgcagctactaaccgtgcagatattctggacccagcactcatgcgttctggtcgattagacagaaagattgagttcccacacccaaccgaagaagcgagagcaagaatcttgcagattcactcaaggaagatgaatgtccacccagacgtcaactttgaggagcttgcacgatcaacagatgatttcaatggagctcagctgaaagcagtgtgtgtagaggcaggcatgttagctcttcgccgtgatgccacagaggtgaaccatgaagacttcaatgaaggtatcatccaagtccaggccaagaagaaagcaagcttgaactactacgcctgatctctctctctcatcatttatttttatcaatgccgtttatctttcaactagttttacttgtaccctcattccgatttggatctttttaagttttcgaatcaggatcatctattatatcaaaatacatttaattgtgttcatcttcttctgaaaacaagtttggaaatttagaaatcttagtatctctatnnnnnnnnnnnnnnnnnnnnnnnnnnnnnnnnnnnnnnnnnnnnnnnnnnnnnnnnnnnnnnnnnnnnnnnnnnnnnnnnnnnnnnnnnnnnnnnnnnnnnnnnnnnnnnnnnnnnnn

SEQ ID NO: 95816 - DNA, 546 bp, Arabidopsis thaliana columbia
  unsure (1)..(546): unsure at all n locations
agatcatttgtcggttgattccatacgatctccaagtcttgtcgttgcagaatctctaagaagctaacgaaaatggtccttcaaaacgatattgatctgcttaaccctcctgctgagctcgagaagaggaagcacaagctcaagcgtcttgttcaatcacccaattcgtttttcatggatgtcaagtgtcaaggctgctttaacattacgactgtgttcagccactctcagaccgttgtgatgtgtggaaactgccagactttgctctgcacacccacaggagggaaggcaaagctcactgaaggatgctctttcagggaaaagtgagactggagaagaagatatgactccattccattcacttcacccacaaatttttcttttcgggttattatggaattttttgttggtaatttgagctagtaggtacccctcctttggcggattatccctttgttttaatcagcgaagcggttccccttttattnaatggaatggaatttcnttgnaaattcatgcaaaccctangcggcttncgggggttcc

SEQ ID NO: 95817 - DNA, 1228 bp, Arabidopsis thaliana columbia
  unsure (1)..(1228): unsure at all n locations
gagctattacagagatgaatggaaaaatgatcgttaccaaacctctatatgttgctcttgcgcagcggaaagaagaccgcaaagctaggttacaggctcaattttcacagatgaggccggtcaatatgccacctgcggttggtcctaggatgcaaatgtatccaccaggtggtccaccaatgggtcagcaactcttctatggtcaagggcctcctgctatgattcctcagcctggattcggatatcaacaacagcttgtaccgggtatgagacctggtgggtctccaatgccaaacttcttcatgcctatgatgcaacaaggccagcaacagcaacagcagcaacagcagcagcagcgacctggtggtggtagaagaggagctcttccacaaccacaacaaccttctcctatgatgcagcagcagatgcatccaagaggtcgaatgtatcggtatcctcagcgagatgtaaacacaatgcctggtcctactcaaaacatgctttctgttccatatgacgtctcaagtggtggtggtgtgcatcatcgtgactcgcctacttctcaacctgttcctattgtagctttggctacacggcttgcgaatgcagctccagagcaacagagaacgatgcttggtgagaatctatacccgcttgtggagcagctggagccagaatccgcagctaaagtcacgggaatgcttcttgaaatggaccaaaccgaagtacttcacttgctggaatcaccagaggcacttaaagctaaagttacagaagcaatggatgttttgaggagtgtagcacagcagcaagcgggtggtgcagctgatcagttagcttctctgtctcttggagacaacatcgtaccttgagagttttaagttatatctgaaagagctcagtttatatacactgtaaaagtgtttattttgttcttttggagaatcagaaacagagttgttcttgaaagttttggatttttgagtttttgttttgggcgagagttttaacattttccttctgtgtttttgattttcttaatactttgggaagttttgtatcgttactctcacctttttttacctacactgctcatttgatagggtattgtttggcttnnnnnnnnnnnnnnnnnnnnnnnnnnnnnnnnnnnnnnnnnnnnnnnnnnnnnnnnnnnnnnnnnnnnnnnnnnnnnnnnnnnnnnnnnnnnnnnnnnnnnnnnnnnnnn

SEQ ID NO: 95818 - DNA, 648 bp, Arabidopsis thaliana columbia
tacgcgagctctatacgacttacttagggaacgctggtacgcctgcaggtaccggtccggaattcccgggtcgacccacgcgtccgtgcgaatgcagctccagagcaacagagaacgatgcttggtgagaatctatacccgcttgtggagcagctggagccagaatccgcagctaaagtcacgggaatgcttcttgaaatggaccaaaccgaagtacttcacttgctggaatcaccagaggcacttaaagctaaagttacagaagcaatggatgttctgaggagtgtagcacagcagcaagcgggtggtgcagctgatcagttagcttctctgtctcttggagacaacatcgtaccttgagagttctaagttatatctgaaagagctcagtttatatacactgtaaaagtgtttattttgttcttttggagaatcagaaacagagttgttcttgaaagttttggatttttgagtttttgttttgggcgagagttttaacattttccttctgtgtttttgattttcttaatactttgggaagttttgtatcgttactctcacctttttttacctacactgctcatttgatagggtattgtttggcttttgtctagagtttcgacttttgggtataaaatttggtttaat

SEQ ID NO: 95819 - DNA, 409 bp, Arabidopsis thaliana columbia
aggaaacgaagaagaagaagaacaacaacaacaaaagccttttgagatatggacagcttctggcaattaggtgatgagctacgaggtcagacgagagcatcagaggatcacaaatggtaaactgttgcaaagaagcttttcgaattggaatctaatcatgctggctattacatgttaatgtcgaatgtgtatggggttaagggagaatgggagaatgtggaggaagttgagaaattcggtgaagcagagaggaattaagaaaggactggcagagagtttgattgagattagaagaaaagtacatagatttgtggcggatgatgaattgcatcctgagaaagagccggtttatggattgctgaaagagctggacttgcatatgaaagaagatttgaaaactgtgtgtact

SEQ ID NO: 95820 - DNA, 1429 bp, Arabidopsis thaliana columbia
  unsure (1)..(1429): unsure at all n locations
cggaantnccggggcggcccgagccgtccgcccacgcgtccgcccacgcgttctctcttctgacgtgtttcccttcttcggtttctcatcctcacgtccgccggatttcgaggaaacgaagaagaagaagaacaacaacaacaaaagccttttgagatatggacagcttctggcaattaggtgatgagctacgaggtcagacgagagcatcagaggatcacaaatggtctactgttgcaacgaagctagctgagcaaactagaatgaaaggggagaggatgaacaatcttgatctctccaaaggttacactgagtttagaccaagtgagaaattcagtttccaggagaacaatcttaacttcaacatgttgaatttggatggtaaatttggtgaaagcatcatggggaagacttcgatgcagagcaatgtttataatatgaatactgttttccagaagaatgactttaagagtggaggcaacatgaaagttaacaagtataatggtaatgttgttgctaacaaggagatgagcaacaacaaacataacaacaactgcaatgataatgggaatatgaatttggctgttgacaagaggtttaaaaccttgcctgcttcggagactcttccgaggaatgaagttcttggtggttacatctttgtttgcaacaatgatactatgcaggaggatatgaaacgtcacctctttggtttacctccaagatacagagactctgttcgagctataacacctggattgcctctgtttctttacaactacaccactcaccagcttcatggtatcttttgaggcaacaacttttggaggtactaatattgatgctactgcttgggaagacaaaaagtgcaaaggagagtcaaggtttccggctcaggtaaggatcagagtgaggaaaatctgcaaagccttggaagaggactccttcaggccagtacttcaccactatgatggtccaaaattccgccttgagctctctgttcctgagacattggatctgctagatctttgcgaacaagctggttctgcataagccgaaacgatcaaccttgcaatgccacgttgcaaagagggggatgttttgtatgaaatctatctatatatgtaagacctaccgtaagagcgtaagcttttgggatttagttaagagtcggattcaaatgtatgtttactaagaagggatgagagtatgtgtggtcttaaggcaagcaaaagagcgaagaggctctgccgaataagcgactactcttgttctgtgtcgtgtctgatgtgtgagtgtgtgtctgtgtttgtgagagattcgatactctttgaaacaaagatttatgtagaagaatatagagaaagaaagactactataaacagagaaaaaaaatgatgtgagctaaaaaaaaaaaaaaaagggcggccgc

SEQ ID NO: 95821 - DNA, 469 bp, Arabidopsis thaliana columbia
tcgctttaacattttatatctaaaaccatttcatcttatgaatatcaacaacaatggcagaacaagaaactacgtcaaacataaacaccattaatgatcaagcagaagaagaaacaagaacaaaatctcagccattgatttcaggtctaccaaatgatatagctgagctttgtcttcttcgtcttccttacccataccatgctctatatcgctctgtgtcatcttcatggaacaaaaccatcacaaaccctagattcctcttctccaagcaatctctttctatctcttctccttacctatttgtcttcgctttcaacaaatcaacggctaggattcaatggcaatcccttgaccttgcatctggccccgtggtttgttttacctcccatgccaaactctttcaccaaaatctcgtctcctcacgcactctcatgcgcgtcgatgccacgtcaggggaagctttttgtac

SEQ ID NO: 95822 - DNA, 527 bp, Arabidopsis thaliana columbia
ttcttaatcagaaattgaagccgaatcattttataaaacacgaagtgaagcacaaatggttggtggcacatcttcacgtatgggagggtccaccaccacttccatcttattctgcatcccctaaggttgtgtacaagtctcctccaccaccatatgtctacaattccccaccaccaccatactactcaccttcttccaaaagtttactactactcgtctcctccaccaccatcttattattctccctctccaaaggttgaatacaaatctccacctccaccatcgtattcaccttctccaaaaactgagtactaaatttctcggctgcctctatatgagtgaaacttaaaaatgtaattctttaaataagttaatcgaatattatttcgatttttatctttcctttttgttctcggtttttaaatttctctttatctaatcccaatttttaattttctcgggatttggctacaaaattttcttttatttgtgtaacgattgcttgcgatctatataaactcctttgc

SEQ ID NO: 95823 - DNA, 438 bp, Arabidopsis thaliana columbia
ttctccaccacctccatattactcaccttctcctgtggtagactacaagtctcctccaccaccatatgtctacagttccccaccaccaccttattattctccttctccaaaggttgaatacaaatctcccccaccaccatatgtttacaaatccccacctccaccttcgtattcaccttctccaaaaactgagtactaaacttcagctccaccatcatatttctattcttgaaaagagtaaaagggatttttaattaaataaattaccaaattttatttgatttcttctttccttttgttcttgtatcttttaattttcatttggtttgcatcaataatttgggtaaaaaacttttgtatgggttcatgttttcttcttctatatgtgtaaagggtgcttgcaatcaatctatatgaagtcctttggaaatttgaatt

SEQ ID NO: 95824 - DNA, 469 bp, Arabidopsis thaliana columbia
atacaaatctcctccaccaccatactacgcacctactcctaaggtacattacaagtctcctccacgaccatatttctacagggctccaccacctccatattactcaccttctcctgtggttcactacaagtctcctccaccaccatacgtctacagctccccaccaccaccttactattctccctctcctaaggttgaatacaagtctcccccaccaccgtatgtttacagttcccctcctccaccttcctactcaccttcccctaaagttgactacaaatctcctccaccaccatatgtctacagttcaccaccaccaccatattattcaccttcccctaaagtagactacaagtctcctccaccaccgtatgtctacagttctccaccacctccatattactcaccttctcctgtggtagactacaagtctcctccaccaccatatgtctacagttccccaccacca

SEQ ID NO: 95825 - DNA, 494 bp, Arabidopsis thaliana columbia
cccacgcgtacgtattttctctctctcagttaaccagagagagcatcaattgcttctacttcttctctagcgctctcgcaagctctccttacacgagccatctctcacaatggctctgaaaactgcgtctctataccagctttctctgctctcaaatccacttctccacgcaccagtggcaccatctcttcccgtcgacgaaacgcctccacgatcagtcactctctccgccctctggttcgtgcagccgccgtagaggcaatcgtgacaagttctgattcgtccctggttgataagtcggtgaacacgatcaggtttctggcaatagatgcggttgagaaggcgaaatcaggtcatccaggtcttcctatgggctgtgctccgatgtctcacattttgtacgatgaagtcatgaagtataaccccaagaatccttactggtttaaccgtgatcgtttcgttctctctgctggacatggatgcatgttgcaata

SEQ ID NO: 95826 - DNA, 800 bp, Arabidopsis thaliana columbia
caggggggaaccatccccattaaaaaaaggaaggggggaaaaaagggggggaaaaaataccaattttctggaggggcttttttcaggggcaaccaaatccgggaatgtggttctttgattgggaaactggtttttaagctaaagaattcctgcacaggctgcgaaggtgttcaggaaaaacgggcaaacccgttagagttgtttctttcgtgggttgggaactatttgacgagcaatcagatgaatacaaggagagtgtgttgccatcggatgtatcagctagagttagcattgaagcagcttcgactttcggatgggcaaagattgttggaggcaaaggaaagcccattggtattaattcattcggagccagcgcaccagcacccttactctacaaggagtttggtatcaccgttgaagctgttgttgatgcggccaagtcattcttctaagagatttaagatcggaccattctctctgagggggttttgtctgaaacttgatttggaaacaaggctattcacaacattgtctcatatctcgaaataaagtgcaacaagacacaaagactttcactttcttttttgtttttgttttttgtacttcaggtcaagataggttttcggtttgagaagagaaacaaattagaaagacaatgtaaaactcccatgatcattcgtgtaacgctaaatgcttgaatttcagcaaaactttccagcaaaaaaaaaaaaaaaaaataaagggcggccgctctagaggatccgagctcacgtacgcgtgcgtgcgcagtcatagtatag

SEQ ID NO: 95827 - DNA, 862 bp, Arabidopsis thaliana columbia
agctctccagcttacaattagtttcgggtcgtacgcgtgaggattgtgagagaaagcgtttcaagcagataaatctatgcccatgatgtcgcaggttctaattcgtttctgtataggaaaagatggaacgcgtgcaggttcgggtccggtattaccgtggtaaacccatgtgtccgtaaaaagttaagggattcaaggcaaaacgtgtgagagttgtttccctttgtattgttgggaagcttttcgacgaagcgcatcagattgcatacaaggaaagtgttttgccatctgatgtatcagctagagttagtatcgaagctggatcgacttttggatggggaaagatcgtcggaggaaaagggaaatcgattggaattgatacgtttggagcaagtgcaccagcaggaaagctttataaagagtttggtatcaccattgaagctatggttgaagcagccaagtcacttatttaaaaaagtatcttacaggtactaccgaggtttgcatttgaagtaagagacattccataagcattatcttctttgtccaaataaaaatatactccttccaatctttttataaatgatgtttaaagctttcattttggtttttaaataaatgatgttttaaattttcaatgcaaaattatttttattggttgattaaataaatgatgttttaggcttttatttatatttttattgttttcttgtaattaacatagttttgatctttgtaaacaacaactctattgtacttttattcttgattagttgattttaaaaaaaaaaaaaaagggcggccgctctagaggatccaagcttacgtacgcgtgcaggcgacgtcatagatcttctatagt

SEQ ID NO: 95828 - DNA, 1683 bp, Arabidopsis thaliana columbia
  unsure (1)..(1683): unsure at all n locations
cacagaaattgccttcactgagaacgtggaccagcgatttgaagcccttggatggcatgttatctgggtgaagaatggaaacactgggtatgacgagatccgtgctgccattaaggaagctaaaactgttactgacaagcctactttgatcaaggtcactactaccattggttatgggtctcccaacaaggcgaactcatacagtgtccatggagctgcacttggcgagaaggaagttgaggctaccagaaataaccttggatggccgtatgagccgttccaggtacctgacgatgtaaaaagccactggagtcgtcatacacctgaaggagctactcttgaatctgactggagtgcaaagtttgcagcatatgaaaagaagtacccagaggaagcttctgagttgaaatctattatcactggtgaattacctgctggctgggagaaggctctacctacatacacaccagagtctccaggtgatgccaccagaaacctgtcacagcaatgtcttaacgcccttgctaaagttgttcccggtttccttggtggaagtgctgaccttgcatcatccaacatgacattgctgaaagcctttggcgacttccaaaaggccacacctgaagaaagaaatcttaggtttggtgttagggagcacggaatgggagccatctgcaatggcattgcccttcacagccccggtcttatcccttactgtgcgacgttctttgtcttcaccgactacatgagaggtgccatgagaatctcagctttgtctgaagctggtgttatctatgttatgacccatgattccattggtcttggagaagatggaccaacccatcagcccattgagcacattgcaagtttccgtgctatgcccaacactcttatgttccgtcctgctgatggaaatgaaacagccggtgcatacaagatcgctgtcaccaagcgcaagacaccatctatcttagctctgtctaggcaaaagctgcctcatcttccaggtacatccatcgaaggagtggaaaagggtggatatacaatttctgacgactcttcaggcaacaaacccgatgtgatcttgattggaactggttctgagctagagattgctgcacaggctgcggaggtgctcaggaaagacggcaaaaccgttagagttgtttctttcgtgtgctgggaactatttgacgagcaatcagatgaatacaaggagagtgtgttgccatcggatgtatcagctagagttagcattgaagcagcttcgactttcggatggggaaagattgttggaggcaaaggaaagtccattggtattaattcattcggagccagcgcaccagcacccttactctacaaggagtttggtatcaccgttgaagctgttgttgatgcggccaagtcattcttctaagagatttaagatcggaccattctctctgagggggttttgtctgaaacttgatttggaaacaaggctattcacaacattgtctcatatctcgaaataaagtgcaacaagacacaaagactttcactttcaaaaaaaaaaaaaaaaaaaaaaaaaagggcggcagctctagaggatccaagcttacgtacgcgtgcatgcgacgtcatagatctctantagtgnnnnnnnnnnnnnnnnnnnnnnnnnnnnnnnnnnnnnnnnnnnnn

SEQ ID NO: 95829 - DNA, 1373 bp, Arabidopsis thaliana columbia
  unsure (1)..(1373): unsure at all n locations
atgtctnnnnnnnnnnnnnnnnnnnnnnnnnnnnnnnnnnnnnnnnnnnnnnnnnnnnnnnnnnnnnnnnnnnnnnnnnnnnccacgcgtccgaaaatcaacacactgataaaataagagttgcagagagagtctctcatcttcttcatttcttcaccaccatcatcacacaccttcttcttcttcttcttctctctctatcacaagagagtcaaatccatggcttctacttcttccctcgctctctctcaagctctcctagctcgtgcaatctctcaccatggttctgaccaacgtggatctttaccagctttctctggactcaaatccaccggttcacgcgcctcagcttcgtctcgtcgacgtatcgctcaatccatgaccaaaaaccgatctctccgtcctcttgttcgcgctgcagctgttgagactgttgagccaaccactgattcgtcgattgtggacaaatcggtcaactcgattaggtttttggctatcgatgcggtggagaaggccaaatcaggtcatcctggtcttcctatgggttgtgctccgatggctcacattttgtatgatgaggtcatgaggtataaccccaagaacccttattggttcaaccgtgaccgattcgttctatctgctggacatggatgtatgttgctctacgcgttgcttcatcttgccggctacgacagcgtccaggaggaagatttgaagcagttccgtcaatggggaagcaagacaccaggacatcctgagaatttcgagactcctggaattgaagtcactactggtcctcttggacaaggaatcgctaatgctgttggtttagctcttgctgagaagcatttggctgctagattcaacaaacctgatgctgaagtagtcgaccactacacatatgcgatccttggagatggttgtcagatggagggtatttctaatgaagcttgctctctagctggccattggggacttggaaagctcattgctttctacgatgacaatcacatttctatagatggagacacagtagttgccttcactgagaacgtgggccagcgacttgaagcccttggacggcatgttatctgggtgacgaatggtaacactgggtatgacgagatccgtgctgccattaacgaacctaaaactgttactgacaagcctactttgatcaacgtcactactaccattggcttatgggtctcccagcaaggcgaactcatacaagtgtccatggagcttgcactttggcgagaaggaaagtttgaggcttaccagaaattaacctttggttgggccnatttnanccgttncagggtcccttacggttnttnaaaaggcccttggggnngggnaatanaccnnaa

SEQ ID NO: 95830 - DNA, 397 bp, Arabidopsis thaliana columbia
  unsure (1)..(397): unsure at all n locations
aaagagaaacgtatcattaccatattattgttggaagattgacgggaatataaacaaccagtctacacatagacaactcaaagccaacaaatgaaacaagatataaaacatatgcaaagataaaatatttaaaaaaaggcaaacacgttgattatacatgagtatacgtatatctatatatatacgtatttaatgtttctcaagggtgtggaggcaacggaggccatttcccgaacttggggtggtgaatgtatttaagaggaagaggtggaaactttggaagtggtggaagctgtggaantggcggacatggcntcttggaatcaccactaccggtggtttgtataccggtancggcgggggcaggcttcttggggatcanaaccggnggtttgta

SEQ ID NO: 95831 - DNA, 616 bp, Arabidopsis thaliana columbia
  unsure (1)..(616): unsure at all n locations
gcacgcacgcgtacgtaagcttggatcctctagagcggttcgcctttttttttttttttttttaaacaaacagtctacacatagacaactcaaagccaacaaatgaaacaaaatataaaacatatgcaaagataaaatatttaaaaaaaggtaacacgttgattatacatgagtatacgtatatctatatatatacgtatttaatgtttctcaagggtgtggaggcaacggaggccatttcccgaacttggggtggtgaatgtatttaggaggaagaggtggaaactttggaagtggtggaagctgtggaagtggcggacatggcttctttggaatcaccactaccggtggtttgtatacctggtaccggcggagggcatggcttcttggggatcacaaccggtgggtttgtatattggtaccggcggaagacacggcttcttccacaattggtggtatgtaaattggtggatgcnccatccttcggcggcggcttgnaaccggtacctggaagtgggngccctatcttccgnggnggaatgactanctttgggggggcttttgactgacccgcggnggacacttcttagngggnaagntctccgtgggggtttgg

SEQ ID NO: 95832 - DNA, 820 bp, Arabidopsis thaliana columbia
cccacgcgtccgctttttaatagaaataaaagctaaatcccaggaatcccattttagtaccagtcgtggtataaatattaacacttactgattgccgagagacgaaagaggaaaatcccaacaataaagagcaaacgatcttacagctcataatatttcgttaattatcaaattgctaataggagaaaaaaatgggtcaagctttgggttgtattcaagttgatcagtcgaatgtagcaatcaaagagacttttgggaaattcgacgaagttcttgagccgggttgtcactgtttgccatggtgtttgggaagtcaagtcgctggtcacctttctttacgtgttcaacagctcgatgttcgctgcgagacaaagactaaggataatgtgtttgtcacggttgttgcttccattcaataccgtgccttagcggagagtgctcaagatgctttttacaagctcagcaacacgaggaatcagattcaagcttatgtctttgatgtgatccgagcaagtgtacctaagctggatctagactctacctttgagcaaaagaatgacattgcaaaaaccgttgagactgagctcgaaaaggctatgtcgcattacgggtatgagattgttcagacactgattgtggatatcgagcctgatgtgcacgtcaagagggcaatgaatgagatcaatgctgcttctagaatgagagaggcagcgagtgagaaagctgaggcagagaaggattctgcagatcaagcgcgctgagggagaagctgaatcgaaatacctttcaggtatgggtatagtccgtcagagacaagcca

SEQ ID NO: 95833 - DNA, 444 bp, Arabidopsis thaliana columbia
gccgtcgcttcgtttttcccggtgggtaaaccccggccgaccgaatcaccgatcaatagactcgtgaatccttctcctattcctccactaccacagttgatctgcctaatccagtcgtgttcatgttctttgaccagactcacatcggaggaggttgacgaagatacggccaattcaatcatccccgaggactcattgttgctattgtttctatttctgctgctatccgtagggattcctaaaggcatcagaagattctcagagaatgtcaccgtcgatgtcggagattcaagctgttggtctccgtttcctgtcacaattttccattgatacgttaccaaaaccaatcaaagttgagagttttttttaagacgatgtgtcccttaccttggtttggttaggtccaagttggtgatgttttttgagtgaagcaatgttgttgag

SEQ ID NO: 95834 - DNA, 561 bp, Arabidopsis thaliana columbia
  unsure (1)..(561): unsure at all n locations
cgcaactgcagccaagaagaaagagatgaatttgagagatatgataaggttcaaaacatccgaccaaagatggtagctgaacttcgtgagcggtttgcacatcttaaccttactttctcaattgggggacagataagcttcgatgtcttccctaaagggtgggataagacttactgcttgcaatacctcgaggacttcagtgaaatccatttcttcggtgacaagacctatgagggtggaaatgactttgaaatctttggatcaccccaaaccattggcccttcagttacgggtccccggtgcccccgtggccaaaatgcaagggctctggtcatgtcttgaaacactactcatctcaagaacacagtgtcaagagtttgattcttctttggcgaaatctcacaactcctgattacaagaaatggagagaagtgtgtttgaatgctatctataccgtatgttttgaatttcnattcatcaaataaaatatcttgttataaccttttgtntcagaacatggtcctcaaagttttaaaactaaaggttaaaaatatcctcttc

SEQ ID NO: 95835 - DNA, 448 bp, Arabidopsis thaliana columbia
caaagaacacaacaaacgaactagcttaaggcaatattcttgcctagcgctcagcaatggcgatcacacgctcctccttggccatttgcctcatcctctctttggttaccataaccaccgccgattactactctccctcatctcctccggtttacaaatcaccggaacacaaacccacgctcccgtctccggtttacactccacccgtttacaagcctaccctctcccctccagtctacactaagccaactatcccacctccggtttacaccccaccggtttacaagcatacaccctcacctccggtttacactaagccaactatcccacccccagtgtacaccccacccgtttacaagccaactctctcacctccggtttacactaaacccactattccaccttccggttacaccccaaccggttacaagcccacttcggtttacac

SEQ ID NO: 95836 - DNA, 447 bp, Arabidopsis thaliana columbia
accaaacaaaaagaaaacacctaaatcgatctgtgaagtcaaaacactttccagtttcagattctgattatggcaacaccggagacgcgtggcgttgattccgatttagagacagcggagaagataatactccggtgggattcaacaacatctgaagaagctaaagacaagctgattttccaaagcggtggtgatcgagaagaagtagatcggtacttgaaagctgtagatgaagttcaaagacacatctcttcaatctcaatctccgatgaagtcatagcaacgagtcaaatcgccatggctagactcgaggacgagctaagaaatatcttaatctctcagacttctactttcgaacctgattctcttcttctcgattcatcgttatcttcttcctctttcgcttcttcttctcgtacggagcttgaagatgacacttgcgatgac

SEQ ID NO: 95837 - DNA, 611 bp, Arabidopsis thaliana columbia
gatatgagtagccaaatcgctttgtcaccggccatcgccgccgccattcgccgtccgtcctctcacgactgtctatccgcttccgccactactgctaccgccacccccatggctctcaaatcttgcatcgtcgcacctctctcgctattcacctctcaatctcaaatcaaacactcaagctcaagaaaaacttctcgaaccacgattcgatgcgatgtagcgataaaatccgcagattcgataaacgcagacgccaatccttcgtcctcaccgtcatcagaggaagaaatcgaagcggaagcgaaggcgaagataggatctagggttagagtaactgcaccgttgaaggtttatcatgtaaatcgagttccagaggttgatttagaaggtatggaaggtaaactcaaagattacgttgctgtttggaaaaggggaaccgaattctcaggctaatcttccttataaggtttgacgttcttcaaaggaaattgtaaaggccgggggcttgttaaatttgtttcaccatcttaagggaggtgggttcgagttcattgatcagtgatgaaacaagaaagacaatttttgttttctttctcagtgtttgttttggt

SEQ ID NO: 95838 - DNA, 403 bp, Arabidopsis thaliana columbia
  unsure (1)..(403): unsure at all n locations
caaatnttgagcagcagtcatcatctttaagcttctcaaacgatcacttgctcaccgcaaattcaaggtcgttatctgggatacccggatgtgaagctgaaatatccgagcagggtgcgcctgctacttctgctcctacaaacctccttgatgattatcctgcagcatctgggcgcaagtcttcttcaggaggctccccactatcctcctcaccccgttttagcgaccagcctgtgatgttagatgtttactcacctgatagattggccggagaactcttcttcttagacggttcactaaaactcacagcagaagagttatcccgngctnctgcagnaagttctagggtagaagcagccatgggnacanttnttccaaaaggaaccactnggntaantggggc

SEQ ID NO: 95839 - DNA, 1089 bp, Arabidopsis thaliana columbia
ggcacgagcgaagagtgtgtgcacttgaggatcgaattaaggtgagaacaaagaagagagaagaatcgaaatagcaaatctcttgatggtcttgatgatcattaaaggtatatttcggagatatgaaaaatggaatcctgtgcatcctacttatggagcattttggggaatggggattgggattggttgtggcgtcggatggggacctggttttggccctgaggtcattggttatgtcggtgctggctgcggtgttggttttagtgttggtataacacttgctggtctcggcattggtcttcccacaaattttcttcttgcagctccttataacactgtggaagcaactagaaagggtgcttttaatttctttggtaaaaacctctcaaccaatggttggagtgatttgatgcctcaaatcgcggggttgcagagacaagtcagtgagatatgctctggttttaacaagaagcctcatttaaataatgccattgacctaaaaagttttcctttgttcatttcacatgattgtggcaaatttggaagtcatcttctccatgtgcgcaaaggttcggaggacaataaatcatcagctatgtaatgctacccaccacgaggatcttaagcatctgagacgcatttcgagatagttactttgatggaatttgtgaatgtgactgaaatattcagcacaaatcagaacatggttcctgtcttgtttggagaagcactatgaaccaaacctgaagcccttgtgatttagagttacagagatacattaaaagggttcgcggatttcacagtagcattcatagacagttcaggttagttaaacgtgcttcacaaaaagaaaaaaaacagaagtgtagttgaggtcacaccacaggtttatgctttgctcttaatcaaatatttatctttctcttttttgttatttgtcctttttaattccatttgctttattccttacttgtggggattaaatgtttgcagagaaagataattcgactgaataaatacacttttacctgtatacttgttatatatttgtgtcaccccaaagtgaaagctgcagactttgaaacacag

SEQ ID NO: 95840 - DNA, 786 bp, Arabidopsis thaliana columbia
  unsure (1)..(786): unsure at all n locations
tgagctgcctctcatgaatcctgaacttttccttagagttgggattaaacctcctaagggtgtccttctgtatggacctccgggtactggaaaaactctactagctagggctattgccagcaatatcgacgccaacttcttgaaggttgtatctagtgcaatcatagacaaatacattggagaaagtgctaggttgattcgagaaatgtttaactatgctcgtgaacatcagccttgtatcattttcatggatgaaatcgatgctattggtggacgccgttttagtgaaggaactagtgctgatcgtgaaattcaaagaacacttatggagttacttaaccagcttgatgggtttgaccaacttggaaaggtgaaaatgataatggccaccaacaggccggatgttcttgatccagcacttctccgtccgggtaggttagatagaaagatcgagatcccgttgccaaatgaacaatcaagaatggaaatcctcaagatccacgcatctggcattgccaagcatggagaaatagactatgaggctatcgtgaaacttggagagggtttcaatggtgccgatctgcgtaacatatgcactgaagctggaatgttcgcaatcagacagacgnggcctatgnatacatgagctnatgaaggtgtgaaacctgccaggccaaaacctnagcggncccacaaaaccgggtttngnaaggntgaaagtacccgnaaaaaaggcnaagggtaaacctgttccctaaaaaactgtgctgcagnccaagntgtttt

SEQ ID NO: 95841 - DNA, 581 bp, Arabidopsis thaliana columbia
  unsure (1)..(581): unsure at all n locations
gggtanggttagatagaaagatcgagatcccggttgccaaatgaacaatcaagaatggaaatcctcaagatccacgcatctggcattgccaagcatggagaaatagactatgaggctatcgtgaaacttggagagggtttcaatggtgccgatctgcgtaacatatgcactgaagctggaatgttcgcaatcagagcagagcgtgactatgtaatacatgaagacttcatgaaggctgtgagaaagctgagcgaggccaagaagcttgagtcgagctctcactataacgcgggatttttggggaaagagtaagaaaagaataagctcacgagaagaagagagggcctaaagggcagtgaaaaactctgttattcactttgaaaaaacaagctgatgattctgtttcagtttctcaatgttttgttttgaggttctagtaaacacaaaaatttcttgttttagtaatgacaactattttctgtttgtcctaaaaaaaaaaaaaaaaaaaagnnnnnnnnnnnnnnnnnnnnnnnnnnnnnnnnnnnnnnnnnnnnnnnnnnnnnnnnnnnnnnnnnnnnnnn

SEQ ID NO: 95842 - DNA, 1001 bp, Arabidopsis thaliana columbia
  unsure (1)..(1001): unsure at all n locations
cgactcactatttggaagctggactgcctgcaggtaccggtccggaattcccgggtcttcccacgcgtgcgctatctcgatggaaacttgttgtcggagatgtgttcagagaaccagaaatgtcaaagcttctatgcattatggtgggagatggggttcgaattacaggaatggctgttgtcactattgttttcgctgcacttggattcatgtcgcctgcctcaagaggaatgctactaaccgggatgattattctctatcttttcttgggtattgttgctgggtacgctggtgttcggctctggagaactgtcaaggggacttcagaaggatggagatcactttcctggtccattgcatgcttcttcccgggtattgcttttgttatactcaacagtgttgaacttccttctctggagcagcaacagcactggagccatcccaatctctttgtattttgagctcttggctctctggttctgcatctcggttcctctcaccctatttggaggattcctaggaacacgagcagaagcaatccagttcccagtgagaaccaaccagattccaagggaaatcccagaacggaaatacccgtcatggcttctagtccttggagcaggaacccttccttttggaacgctcttcatagaactgttcttcatcttctccagcatatggttagggagattctactatgtatttgggttcttactcatagttctgcttcttttggtagtcgtgtgtgcagaagtatcagtggtcttgacctacatgcacctctgcgttgaagactggagggtggggggggaaagccttctatgcatctggttcagtcgcattgtaccgtttcgcttactccatcaactattttggtctttgatctacaaaggtctgagcgggccccgtctaacgtatgctttacattgggctactctctgcttatggccatttgcaatcatggctcgcacgggaacacttggcttcctcacctnctttta

SEQ ID NO: 95843 - DNA, 448 bp, Arabidopsis thaliana columbia
ctctcactctcacttcccatcggcgaaaatggcgtcggtggcggcatcatcgtcgatatcattcgctgcatcattcctcaaaatcaaagcattccctctctcccctcgcttcttccccatccgtacactccgttgctctgtctcctcctcctcctctgagcccattgaattcgacatctccttcgctcctcccaaacccaaaccctcctccactcacggcggcgtcacccctcaacaactcttcatcccttggatcgtccgtagtgatgacggcactctcaaactccaatctcaacctcctgctcgtttaatccacaacctcgccatcgatgccactactcaaaaccctaagaagggaaggtaaatcttaaggagggaccaaccctcaaagctaccttcctctttcttccggcaccaccaccgtcttatattcagctttacactcaga

SEQ ID NO: 95844 - DNA, 1089 bp, Arabidopsis thaliana columbia
  unsure (1)..(1089): unsure at all n locations
ttcagttcttcttcttctcgtcacaggaagaattttgttctgttcctcgcagctctcacagccaatgaatggcctcaaagacatagttgagacgagaaattttaaggcttggctcttagatcagtatggagttcttcatgatggcaaaaaaccttaccccggtgctatctcaacattgaaaaatcttgcaacagcgggtgccaaaattgtgatcattagtaattcttctagacgtgcttcaactacaatggaaaagttgaaaggccttggctttgatccttctttcttcaccggagctataactagtggtgaactaactcatcaatctttgcagaggagagatgattccttggtttgcttgcactgggaaggaggggcattcacattacttggaatgaccgaggagcaatctctttggagggtctagatctaaatgttgtggagaatgtggaagaagctgactttgttttagcgcacggcactgaagccctaggacttccttcaggcagtgtatctccaaggactattgatgagctagagaagattttggagaaatctgccgctcgaggacttcccatgatcgtagctaatccagattacgtgactgttgaagcaaatgtttttcatatcatgccaggtacactagcttccaagtatgaagaactgggaggagaagtgaagtcgatgggaaaacctcataagatgatctatgagtctgctatagcaattgcgggagtcaatccgtctgagtctatcgcagtaggagattcgctacatcatgatataaggggagcaaatgtttcaggaattgaatcaatattcatcactggagggattcatggtaatgagcttggtctcacttcttttgatgaaactgcaagtctagattcagtcaagacccttactgctaaacacaatgcattcccaacttatgtattatcagcctttaaatggtagttttcgttttgttgtacaaatcatattattgcttcttgaactacattttgccttcatttaacactcagagagagtaatttaaaaagctcatttgctgagnnnnnnnnnnnnnnnnnnnnnnnnnnnnnnnnn

SEQ ID NO: 95845 - DNA, 1679 bp, Arabidopsis thaliana columbia
  unsure (1)..(1679): unsure at all n locations
nnnnnnnnnnnnnnnnnnnnnnnnnnnnnnnnnnnnnnnnnnnnnnnnnnnnnnnnnnnnnnnnnnnnnnnnncttttttttttttttttgagcaaccaaaagagaatttcaactgaaactgaataaaaagtagtgagtgggtgtatgcccactctctctatcttggagtgtgtccctctcatcttttaagattacatcacacaaagaaaaaaaggacaagaaacaataggaagagagtatgtaaagagagagagagcactatcctgaattcaggaacacaaatttcaaaaaaaacaaaaatgataaagttcaaatcaggaagaaattgagcttactcactcttcctcatcaccgtatggtttctcttatttttccaaacaaaaatcctaccccatcgaactcctaataacctttttcgtcattgtttaggctttggcttcagtagctgcgatggcaggagctggagcaacaccaccagtggttggcaggccaacaaacactttgaaggcatcgtataatccccactgtgctccagtcaacgtcccgatcatcacaattctaagaggaagccctcttgtgaacagtcccaccataccaatcttcttcaccgcatctccaacggttgctcccttagcgttgttgaggaatgacactagattgtctgctggatgagaaacgatggcacagaacactccggcaacgtaacctccggcaaaactcactccgagttgcagacctttgctgcactcactctttgggttggggattgcgtacttgtaaatcatctcaacaatggtctcaaaggaagcaaacttcatcatagtgtaaggaatctgacgtccccagagtggagcaagacccttatacaagcctccgtatccttcggacttgataaacttgggaaatccatcagacatccccctagcaaatccaggctgtgtctgaacacgaaccttcacagcttcaaatgggcaaagtgcaatatcggcaatgatctcagcagaagcagaaccagcaaggtagatgagagtcttgtatttggcagtgtactcaggtccagcaaggtcagagtaagtcttcttaaagtactcgtagaatccaaacttgcaggcaccctgagcactgtaacccaaaagagtaggaacccatccacggaaaaagcctttgactccttgctctttcagcaaaattccaaaaccagacgagatgctcttgtacttcgctggatcaatctgcatattgcacttgacgagatcgagaggagtcacggtcatgtgagtaagaccacagctgagaattccaccaaaggtacaagcagcgtagaaggcaggtgaatacatctcgatccccttccctggctcggtgggagatgcaataaggaaattcttccgagaaatcatcgacgtaggagaggaacgcggggccggagaaggagatttctcgaatgcagcgttggagttggaattgagcacctggtcgaggaggaaagatctcggagatgaagatgatgaatagaggaagctcgggatcagagaattcttcggagattccatggcggcggcggaggaaggagatggagatagcgtttgaaatgagagacggaggcgatgtttgattcccgatctcactcacgctttgcgcccacgcgtccgcccacgcgtccgttgacgcgttggtc

SEQ ID NO: 95846 - DNA, 838 bp, Arabidopsis thaliana columbia
aagatttatgaagagaaattagaaaccataagggttttatccaaaactcgataagccatccaccgctagtgtttatcactttatctggttcttgttttgtattttttctatttatttatttagtggagacatcgatgctgacactttcattttcttaatcattctttaaggctctggtagctttggcttttgatctaaaagctgagagtcaatagagagctttgtgctgagcatagcagagaagagttatggggaaaggagggatgtctcaaggagaaggctcaaaggttgaagaagaaaacatggctgcttggttggttggtatcaataccctcaagatccaaccttttcttcttccttccgttggtcctcatgatgtgagagttaggatgaaagctgttggtatttgtggaagtgatgttcattaccttaagaccatgagatgtgcggattttgtggtgaaagagccgatggtgattggacatgaatgtgctgggatcattgaagaagtaggtgaagaagtgaaacatttagtggttggtgaccgtgtagctcttgaacctgggattagttgttggagatgcaatctctgcagggaaggacgatacaacctttgtccagaaatgaagttctttgcaactccaccggttcatggctctttagctaaccaagtggtacaccctgcggacctatgcttcaaattgcctgagaatgtgagtttggaggaaggagcaatgtgtgaaccacttagtgttggtgtccatgcttgtcgccgaactgaggttggtcctgaaacaaacgttttggtaatgggagctggacctattggccttgttac

SEQ ID NO: 95847 - DNA, 451 bp, Arabidopsis thaliana columbia
tcctgtgatccaccaaggcaagatcgtcgagaaaggttctcacacggatctactaaaggacccggaaggagcttattctcagctgattcgtctacaagaagagaagaaatctgatgagaatgcagcggaggagcaaaagatgtcatcaattgaatcattcaaacaatctagtctgagaaaatcgtctctaggccggtctctaagcaaaggaggatcatccagaggaaacagcagccgccattctttcaatatgtttggttttccagcaggaattgacggaaacgtcgttcaagatcaagaagaggatgatactacacaaccaaaaaccgaaccaaaaaaagtctccattttcagaattgctgctctaaacaaaccaaagattccggtgctaatacttggatcaatatccgcagcagcaaatggcgttatcctttcaatctttggcatacta

SEQ ID NO: 95848 - DNA, 417 bp, Arabidopsis thaliana columbia
gagaagaatggagagtacaggcaaatgcttattcaagccatccatgcttgtgcagttaagttccccgaagttgcaagcacagtggtccaccttctgatggacttcctgggagatagcaacgtggcttcagctcttgacgtggttgttttcgttagagagataatagaaacaaatcccaagttgagagtttcaatcatcaccaggttgttggacacgttctatcagatccgtgcaggaaaggtctgcccttgtgccctttggatcattggggagtattgcctatcactttcggaagttgagagtggcatttcaactatcacgcaatgccttggcgaattaccattttactctgtttctgaggagtctgagccaactgagacatcaaagaagattcagcctacctcttctgccatggtg

SEQ ID NO: 95849 - DNA, 470 bp, Arabidopsis thaliana columbia
  unsure (1)..(470): unsure at all n locations
ccnnnnnnnnnnnnnnnnnnnnnnnnnnnnnnnnnnnnnnnnnnnnnnnnnnnnnnnnnnnnnnnnnnnnnnnnnnncgcgcgtgcgggataactcacctacccctaaaccaactccaatttctctcctcctctattaaatctttctcaatcatctttctttgagtcttttgccttggaatcctgatcatggcgtcttctctcacttccaaatccattctcggatgcaccgggccgcgcttcttcttcttttcttccggcggagctccgtcgtctctcttctcccgccggtcagatatctctccattcacaaaccaggaagaacttccggcagtcgtggggattgaagaagagtgatctgatgctaaatggttctgagattcgtcctgtgaaggttacggcttctgtttccacggcggagaaagcttcggagattgtgcttcaacgcattagagaaatctcgggtctcat

SEQ ID NO: 95850 - DNA, 644 bp, Arabidopsis thaliana columbia
  unsure (1)..(644): unsure at all n locations
ggagaattttgcatttgcatttgcacaacgttataagaagaccacaagagccatttgcaatggggcataatatatgtcctaactcaccaaccccctcaaaattgccaccaacttcaaatttctctcctttaaacctttctcaatcatctttcttctgccttggaatcctgatcatggcgtcgtcttctctcacttcgaaatccattctcggatccaccaaactcggttcttcttctcttccctcggagctccgtcgtctctcttctcccgccgttcagatctctctccgtacccaaaccaggaagaacttccagatacaagctactggaagttcatatgggactcattttcgagtttcaacttttggagaatcacatggaggaggagttggttgtatcattgatggttgtcctcctcgtattccacttactgaatctgatttgcaattcgatctcgatagaaggaggcctggtcagagcaggatcacaacttctagggaaagagacttgttactttnccgggatatncgtctggaggntcttnaaggnattnccggcaggancacctttnccatgtgtttgacccaacacaggttanggggggcttattnnagnggaaanncngggtgnctntagccncngnat

SEQ ID NO: 95851 - DNA, 611 bp, Arabidopsis thaliana columbia
  unsure (1)..(611): unsure at all n locations
nnnnnnnnnnnnnnnnnnnnnnnnnnnnnnnnnnnnnnnnnnnnnnnnnnnnnnnnnnnnnnnnnnnnnnctgaagcggatgcgtcaatacaccaacaacaatggagttaccaaaactattaatctcactctttctcttctcattctcatctttcttcttaggtgctgaatcggattatcctcagcatagtaacttgaagagactgagaccgaatagactgttcgtgtttggagattcctatgcagacaccggaaacataaggaaatctctctccgattcttggaaaattccttacggcatcactttcccccaaaaaccttccggtcgtttctccgatggccgcgtcgccaccgattttctagcaagatacttggggataaagtcaccaattccgtacacgtggaaggattatgccggaaaggaacggctattgtacggaatgaattatgcgtatggaggaacaggagtgtttaagactaaagataatccattgccaaacatgacaactcagattgattatttccaacgtgtcctcgccgccggcaatatctactcgccttncgatctcccctcctccctcgctctggtcagcgtcgccggcaacgactac

SEQ ID NO: 95852 - DNA, 797 bp, Arabidopsis thaliana columbia
  unsure (1)..(797): unsure at all n locations
ccccccctcgaggtcgacggtatcgataagcttgatatcgaattcgcggccgcagcaaagccgccaaagtgtaaacgaaagtttataaatttcatttctgtgatcttacgtaattggaggaagatcaaaattttcaatccccattcttcgattgcttcaattgaagtttctccgatggcgcaagttagcagaatctgcaatggtgtgcagaacccatctcttatctccaatctctcgaaatccagtcaacgcaaatctcccttatcggtttctctgaagacgcagcagcatccacgagcttatccgatttcgtcgtcgtggggattgaagaagagtgggatgacgttaattggctctgagcttcgtcctcttaaggtcatgtcttctgtttccacggcggagaaagcgtcggagattgtacttcaacccattagagaaatctccggtcttattaagcttcctggctccaagtctctatcaaatcggatcctgcttctcgctgctctgtctgagggaacaactgtagtggacaacttgttgaatagcgatgacatcaattacatgcttgatgcgttgaagatattgggacttaatgtggaaactcacagtgaaaacaatcgtgctgtagttgaaggatgtggcggggtattcccagcttccattgattccaagagtgatatcgaactttacctcggcaatgcaggaaccagcaatgcgtccacttcaccgccgccgtcactgctgcaagtgggaaccgaagtaagtgccccttgaatggggnnccncngatnnngggg

SEQ ID NO: 95853 - DNA, 1108 bp, Arabidopsis thaliana columbia
  unsure (1)..(1108): unsure at all n locations
gaaaatatgaaaatattagtcaccggctctactggttacttaggcgcacgactctgccacgttctcctccgtcgtggccactccgtacgtgcattggtccgccgcaccagcgatctctctgacttacctccagaagttgagctcgcctatggagacgtaacggattaccgttctctaacggatgcttgctccggttgcgatatcgttttccacgccgcagctttagttgagccttggcttcctgacccatctcgattcatctcagtcaacgttggtggactgaagaatgtcttggaagctgtaaaggagacgaagaccgtgcagaaggttatctacacttcttccttcttcgctcttggatcttaccggatgggatcctgtttgctaatgaggattcaaagttcataattgagagggtcttcctgcaactgagtatgtagaggtccaaggctgttgctgataagatggctttgaatgctgcttctgaaggggtgccgataattttcctgtatcctggtgttatttttggtccaggcaagctcacttcagccaatatggttgctagaatgttgatcgagcgctttaacgggaggttgcctggatatattggctctgggacggatagatactccttcagccatgttgatgatgttgtggagggtcatgttgctgcaatggaaaaaggtaggcttggtgaaagatacttactcactggggaaaatgcttctttnaagcttgtctttgacatggctgcactgattactggaaccaaaaagccaaactttagcattccattatgggccatcaacgcatacggatgggttatctgttttaatcctctcggggttacagggaaaggcttccactttatcagtcctccgtatttggtaatgaacagacagtgacagtnctgagacatcagtgggtcatactcttgtaataaggctaagctggancttgggtataaaccctcggagncttaaaggaaagggtttggnggngatntncccttgggttaaaagnnttggggggcattcccttcttaaatttnaaattcccccttttaagggtttcccagnaaaaaatncccngaatttaggcccccttg

SEQ ID NO: 95854 - DNA, 712 bp, Arabidopsis thaliana columbia
atatcgtttgtggggaagggggtcaatgtctgcgctcccaaaaggaaaaaaaggtagggccttggtgaaaaaaaaaccttaccctcctggggaaaaatgtttttttcaagcttgttttttgacatgggggcacttattactgggaccaaaaaagcccaacgttagcattccatttggggccatcaacgcatacggatgggttatctgttttaatctctcggggttacaggaaagacttccccttatcagtcccccgacagtgacagggctgagacaatccagtggtcatactcttgtgataaggctaagctggaacttggttataaccctcggagcctaaaggaaggattggaggagatgctcccttggttgaaagagtctgggcgtccttcactactgaaattcaaatttcccatctttcaggtatttccaagaataatattccctggaattcagtccctatgatgagtgatggctacttttttacttctcccggtacacttttaaccccatcggtttttatcttgttacaaaactgcttcgttttggtcgggtatgtcaaataaatgtgaaacattgggggcaaatgcctatgatcatatttttaggtgaagaataataaaaaaaaaaaaaaaaaaaaaaaaagggcggccgctctagaggatccaagcttacgtacgcgtgcatgcgacgtcaagctgttgtaagtgta

SEQ ID NO: 95855 - DNA, 422 bp, Arabidopsis thaliana columbia
ttctgcgtttcctctttggcttctcgaagaggaagaaaactttggcagagagcgaagcatcacacatattttggcctctccttcacgatattcgaagaagtctcctcctccttctccaacgaatcccagatcaggcggcaagtaggcgaatccttacgaagaattctaacttcatcatcaacgatagatactctagtttgattttcaaagtagtagtgtaaaggaatcagaaatggcggtgggagagaaggagcacgaaggaactgtggttgaaagcggcggcgagaagaatgattccgccgttgtactctctgcttccggcgagaagaagacgacgaagcgtaaaggtttgttctcgcgtctttggaatgcgatatttagggttagaggtgatgatttcgagaagagacttaaaaatatct

SEQ ID NO: 95856 - DNA, 782 bp, Arabidopsis thaliana columbia
  unsure (1)..(782): unsure at all n locations
caaaaacacagagagagaaagagagagaaatggcgacgacaacaacagatgcaacgaagacatcatcgaccaatggagaagatcagaagcagtctcagaatcttcgacatcaagaagttgctcacaagatcgacttcagggaaggccctgctcttcccgttcttgatgaaatcgttgctgacgagaagaaccatggaacatatgactttatattcgttgatgctgacaaagacaactacatcaactaccacaagcgtttgatcgatcttgtgaaaattggaggagtgattggctacgacaacactctgtggaatggttctgtcgtggctcctcctgatgcaccaatgaggaagtacgttcgttactacagagaccttgttcttgagcttaacaaggctcttgctgctgaccctcggatcgagatctgtatgctccctgttggtgatggaatcactatctgccgtcggatcagttgatttgactcctccctactctgagtttgtccacagtggattactttccatcttcttatacctttcaatcgcattttcaccaaccactaaaatggacctttttatgtatttgtgttaagtaatatctccattgtccttgttttgctttcttctgaacaaagaaataatatgtaccttacttttcttcttggtctcgttcttttgtttttctccatgatacaaaaaaaaaaaaaaagnnnnnnnnnnnnnnnnnnnnnnnnnnnnnnnnnnnnnnnnnnnnnnnnnnnnnnnnnnnnnnnnnnnnnnnnn

SEQ ID NO: 95857 - DNA, 700 bp, Arabidopsis thaliana columbia
  unsure (1)..(700): unsure at all n locations
cagctcnnnnnnnnnnnnnnnnnnnnnnnnnnnnnnnnnnnnnnnnnnnnnnnncggacgcgtgggcggacgcccacggtttaatctcacccaagaagacaaaaacacagagagagaaagagagagaaatggcgacgacaacaacagaagcaacgaagacatcatcgaccaatggagaagatcagaagcagtctcagaatcttcgacatcaagaagttggtcacaagagtctcttacagagcgatgatctctaccagtatatactggagacaagtgtgtatcctagagaaccagaatcaatgaaggaactcagggaagtgacagcaaaacatccatggaacataatgaccacatcagctgatgaaggacagttcttaaacatgcttatcaagctcgttaacgccaagaacacaatggagatcggagtttacactggctactctcttctcgccaccgctcttgctctccctgaagacggcaaaattctggctatggatgtcaacagagagaattacgaattgggtttaccgatcattgagaaagccggcgttgctcacaagatcgacttcagggaaggccctgctcttcccgttcttgatgaaatcgttgctgacgagaagaaccatgggacatatgactttatattcgttgatgctgacaaagacaactacatcaactaccacaagcgtttgatcgatct

SEQ ID NO: 95858 - DNA, 709 bp, Arabidopsis thaliana columbia
  unsure (1)..(709): unsure at all n locations
cggggttcngganntttcncccgtttgccccanaccgaaatntgnatgnttcacnggggattcgaatgggttccggaattagaagccggtgctcccaagatcgacttcagggaaggccctgctcttcccgttcttgatgaaatcgttgctgacgagaagaaccatggaacatatgactttatattcgttgatgctgacaaagacaactacatcaactaccacaagcgtttgatcgatcttgtgaaaattggaggagtgattggctacgacaacactctgtggaatggttctgtcgtggctcctcctgatgcaccaatgaggaagtacgttcgttactacagagactttgttcttgagcttaacaaggctcttgctgctgaccctcggatcgagatctgtatgctccctgttggtgatggaatcactatctgccgtcggatcagttgatttgactcctccctactctgagtttgtccacagtggattactttccatcttcttatacctttcaatcgcattttcaccaaccactaaaatggacctttttatgtatttgtgttaagtaatatctccattgtccttgttttgctttcttctgaacaaagaaataatatgtaccttacttttaaaaaaaaaaaaaaaaagataatttaaagggcggccgctctagaggatccaagcttacgtacgcgtgcatgcgacgtcagag

SEQ ID NO: 95859 - DNA, 677 bp, Arabidopsis thaliana columbia
  unsure (1)..(677): unsure at all n locations
agctannnnnnnnnnnnnnnnnnnnnnnnnnnnnnnnnnnnnnnnnnnnnnnncccacgcgtccgagaaaaacctcgccaaacgaggaaagccaaagagagagagagagaaacaaaaatggcgtcacagagttgctacaatggaatccatcgtataaaaagggttcatcctctgattcactctctcacatttcatcgattctcctcatcttctcttccattcaaatctcacattccctcttcacaacaacagcttcgtattcgctcatcttcttcgctttctgatcttggaaatcgcaggcattgttcgtctactcgaggatttcaattttggtcatacaagagaagcgaagcagcgtcgccgttcaagacgaggtacagagaaaacgaagaagaagaagatatgacgattaaaccggcggttcgtatttccgacgggaatctaatcatcaaaaaccggacgattctaaccggtgtaccagataatgtcatcacgacgtcagcatcggaagctggaccggtagaaggagtcttcgtcggagctgtatttaacaaggaagagagtaaacacatcgtaccgatcggtacgcttcgcaattcccggtttatgtcttgtttccggtttaagctctggtggatggcccagagaatgggagaaatgggccgagatattcccta

SEQ ID NO: 95860 - DNA, 2745 bp, Arabidopsis thaliana columbia
gctctacacgactcactattgggaaagctggtcacgcctgcaggtaccggtccggaattcccgggtcgacccacgcgtgcgcccacgcgtacgctcctcatcttctcttccattcaaatctcacattccctcttcacaacaacagcttcgtattcgctcatcttcttcgctttctggcattgttcgtctactcgaggatttcaattttggtcatacaagagaagcgaagcagcgtcgccgttcaagacgaggtacagagaaaacgaagaagaagaagatatgacgattaaaccggcggttcgtatttccgacgggaatctaatcatcaaaaaccggacgattctaaccggtgtaccagataatgtcatcacgacgtcagcatcggaagctggaccggtagaaggagtcttcgtcggagctgtatttaacaaggaagagagtaaacacatcgtaccgatcggtacgcttcgcaattcccggtttatgtcttgtttccggtttaagctctggtggatggcccagagaatgggagaaatgggccgagatattccctacgagacgcagttcttattggtcgagagcaacgatgggtcccaccttgagtctgacggagctaacggcgtcgagtgtaaccagaaagtttacaccgttttcttgccgttaatcgaaggatctttccgttcgtgtctccaaggaaacgttaacgatgaggttgagctctgtttggagagtggtgacgtggacactaaacggtcgtcgtttactcactctctgtatattcacgccggtacagatccgtttcagacaataacggacgctattcgcaccgttaagttgcatctgaatagtttccgtcaacgtcacgaaaagaagcttccagggatcgttgactacttcggatggtgcacttgggacgcgttttatcaagaagtgactcaggaaggcgtcgaagctggtcttaagtctctcgccgccggtggtacgccgccgaagtttgttatcatagacgacggttggcaatcagttgagagagatgccacggtggaggccggagatgagaagaaagagtcaccgatttttcgactgacggggatcaaggagaacgaaaagtttaagaagaaggatgatccaaacgttgggattaagaacattgtcaagattgctaaggagaaacacggtttgaaatatgtttacgtgtggcacgcgataacgggttattggggcggagttagacccggggaagaatacggatctgttatgaaatatcctaatatgtcaaagggtgtggtggagaatgatccgacgtggaagactgatgtaatgacgctgcaagggttgggtttggttagccccaagaaagtgtataagttttacaatgagcttcatagttacttggctgatgctggcgtggacggtgtgaaagtggatgtgcagtgtgtattggagactttgggtggtggtttaggcggtcgggttgagctgactcgtcagtttcatcaagctcttgactcctctgttgctaagaacttcccggataatggctgcattgcttgtatgagccataatacggatgctctttactgctcgaagcaagcagctgtgattagagcatcagatgatttctatccacgggatccggtgtctcataccatccatatagcctcggttgcttataacagtgtgttcttgggagagtttatgcaagcctgactggggatatgttccattccgtgcaccctgctgcagagtatcatgcctctgctagggccatcagtggtgggcctctctatgtcagtgattctcctggaaagcacaactttgagcttctaagaaagcttgtattgcctgatggatcgattcttcgtgctcgactccctggtagaccaactcgcgattgtttgttcgctgatcctgcccgtgatggtgtcagcttgctaaagatatggaacatgaacaagtacactggagttcttggcgtgtataactgccaaggagcagcttggagcagcacagagagaaaaaacattttccaccagactaaaactgatagcctcactggctccattcgtggtcgtgatgtgcattcaatatcggaggcctccactgatccaacaacctggaatggagactgtgctgtttactcccagagcagaggcgaacttattgttatgccatacaatgtgtctcttccagtctcactcaaaatccgtgagcacgagatcttcacggtgagccccattagtcatcttgttgatggtgtatcttttgccccaattggtctagtaaacatgtacaattcgggaggagctatcgaaggacttagatatgaagccgagaagatgaaagtggtaatggaagttaaaggatgtggcaaattcggatcttactcttctgtgaagcctaagagatgcgttgttgagtcaaatgagattgcattcgagtacgattcctcctctggattggtcacctttgagttagacaaaatgcctatagagaacaaacgatttcatctgatccaagttgagttatgaagagtgattcatacaattcattaaacaaaaacagtctcaaaacagttttaaatagtctttattatttgtaaacctttggttaccattgtagctactttcaatgttatactacagttcacgttaaaaaaaaaaaaaaaaagggcggccgctctagaggatccaagcttacgtacgcgtgcaggcgacgtcatagtattctataggtcgcctcaat

SEQ ID NO: 95861 - DNA, 411 bp, Arabidopsis thaliana columbia
  unsure (1)..(411): unsure at all n locations
agaacaatctaacgctttctcgaacatcttcttcttcttctttctcgaaattatttttccagtaatcaatttcttctctnctagattttnacaggaactaattttctgctctgaggtatcagatgagtagccgatggaatcgtacgatctacgttgggaatttgcctggagatattcgcaagtgtgaggttgaagatctcttctacaagtatggaccaattgtggacattgatttgaagattccaccgagacctcctggttatgcctttgtcgagtttgaagatcctcgtgatgcacacgatgcaatttatggacgttatggttattattttaaagggtgtcgacttcggggttnagattgcacatggtggtcgtaggattttaaccatcagttgataggtcagcagnagc

SEQ ID NO: 95862 - DNA, 443 bp, Arabidopsis thaliana columbia
  unsure (1)..(443): unsure at all n locations
ctttgaggactttgaatcaatcgaagaagataagcgaagagctatttgcgagagaagtgcactcgagtttgcgaagatgcttctcaaggaaaggagaaagtttaagagtatcggtgaagttgtttcagcaattcaacaacatagctaagacaatttataatgttcttctgctgaagttcttgaaagtcttgttttgatcttgggagttaattggcaagaaaagtatcacaatgctgcttatcacatggatttgtaatttagtgggtttgtggtggtgatgatggtattcaaatgcattttgttaccaataataataataaaagtttaggaattaaaaaaaacctaaaaaaaaaaggggcggcccgcccttagggggttccaagccttnccgaaacgcgtgcattcggacggcaatagctcttcctatnggggcccccnnaatt

SEQ ID NO: 95863 - DNA, 765 bp, Arabidopsis thaliana columbia
  unsure (1)..(765): unsure at all n locations
cagctcnnnnnnnnnnnnnnnnnnnnnnnnnnnnnnnnnnnnnnnnnnnnnnnnnnnnnnnnnnnnnnnnnnnccacgcgtccgatcgaaaagaatacaagcagtggatcttgagaaccattgagcaaacttggaatttgtttaacaaaaggttcattgcgctatgggatcaaaacaaagatggaccaggcgaagcataccttgcagatatctataacaataccgaggttttgaagtttgttcaagaaaactacatgaggaatttgttgcatgactcactcggattcggcgctgcaaagatgattaggagaattgtgggagtggcacatgttgaggactttgaatcaatcgaagaagataagcgaagagctatttgcgagagaagtgcactcgagtttgcgaagatgcttctcaaggaaaggagaaagtttaagagtatcggtgaagttgtttcagcaattcaacaacaaagctaagccaatttataatggttcttctgctgaagttcttgaaagtcttgttttgatcttgggagttaattggcaagaaaagtatcccaatgctgcttatcacatggatttgtaatttagtggtttgtggtggtgatgatggtattcaaatgcattttgttccaataataataataaaagttttgggtttttttcactaaaaaaaaaaaaaacccaacccacanannnnnnnnnnnnnnnnnnnnnnnnnnnnnnnnnnnnnnnnnnnnnnnnnnnnnnnnnnnnnnnnnnnnnt

SEQ ID NO: 95864 - DNA, 551 bp, Arabidopsis thaliana columbia
  unsure (1)..(551): unsure at all n locations
aacgggggggccattggtgaaaaaaaaaaaggtcctttgtcaacggcaggcccgctccggggtaccaaccgncaaccccccgtccgtttggaggactttgaatcaatcgaagaagataagcgaagagctatttgcgagagaagtgcactcgagtttgcgaagatgcttctcaaggaaaggagaaagtttaagagtatcggtgaagttgtttcagcaattcaacaacaaagctaagacaatttataatgttcttctgctgaagttcttgaaagtcttgttttgatcttgggagttaattggcaagaaaagtatcacaatgctgcttatcacatggatttgtaatttagtggtttgtggtggtgatgatggtattcaaatgcattttgttacaataataataataaaagtttcgacatgaaacacaggaaacaatcacgggccgccgctctagaggatcccccctccctgcccctgccatcgccacacatgtgtcacttgtataaggtgcaccaaattacacttactggaacctgcgtcacccacagatgaag

SEQ ID NO: 95865 - DNA, 497 bp, Arabidopsis thaliana columbia
  unsure (1)..(497): unsure at all n locations
cggtttgctgttctggagaaaagcaccagccaggtgttagtgaagaatgtaaagaatgaggtggttaaaaagagttctttacctattcccacagatgctatcttttatgctgggactggaaatttgctttgtagatctgaggataaagtggttatatttgaccttcaacaaangcttgttcttggtgagcttcaaacaccgtttgttaggtacgttgtttggtctaacgatatggagagtgttgctttgctcagcaaacatactatcattattgcgagcaaaaaacttgtcctacagtgcacgcttcatgagacaatgcgtgtgaaaagtggagcatgggacgacaatggtgtcttcatttacactactctgaaccacatcaagtactgtctgcctaatggagatagtggaatcatcagaaccctggatgtcccaatctacatcaccaaggtgtttggaaatacaattcttttgtttggaccgtgattgggaaaaac

SEQ ID NO: 95866 - DNA, 630 bp, Arabidopsis thaliana columbia
  unsure (1)..(630): unsure at all n locations
atttttaagaaaataggtgacaaacaaacttccatatanggtctttacgacctctaccacatcacaaagtcatatccaaaggttgatatattttcccaacttcaaaatgctagtgaagcgtttcgtacttacatcagagatggtctggcacaggttgagaagaatgcagctgcgggaagaacaccttcaagcctaccgttgtcaactcctcccccttcgtccttagctcttccatctcctgatattccttccttgtcctctttagatgtgaagcctttgatgaaccctagatctgatttatacacagacgacatccgagccagtaacatgaatcctggagtgatgacagggacgctagatgcaatcagagaaaggatgaagaacatgcaactggcttcatcagagccagtaagcaaaccgctgatgccaacaaacgataacttatcaatgaaccaacagagcgttcccccgagccaaatgggacaagagacagtccacacacacccagtggttcttccaatggatgagaaagcattgtccggtcttcaagcccgtatggagaggctcaaaggtggatcactggaacatatgtagaactagagaccccaagctttggagtctgaagttaca

SEQ ID NO: 95867 - DNA, 691 bp, Arabidopsis thaliana columbia
ctatgacgcaccctgcacgcgtacgtaagcttggatcctctagagcggccgccctttttttttttttttttgaatcaaaagaactgtttctttctttctttcttctccatgagaagaattatcatatcatagatctattccaacaaatgggaaacaatttaaaactactcaaataatcaaaagaaaattataaccagaaaaaaagagaagcttattgtcgccaccatcattcatcttcttcaacataattcaactcttgtttttttcaaaagtcatagtccttgaacaacttcttaacttgttcaagcgtaacaaacaaaaccaccgtgaacggtgcttgtctcgaaaccgtcgggataaaacctttatacaaagacataatcccttccgctttcaccgttttcaaagcacaatcaaccgctcctttatacggcggagcaactccagccaccaccttcatattcatcactctcgtcttaatcacatcaacaggattactcgcaacgctcgcaacagaccccgccgcgaaactcgccgactcatgagtcccaagcccatctttcaacaaccctttctccaaaatcgtctctttaacagaatcatacgaagccaactgcgatgacgtcacaagcattgctctgtttatcgtcaaagacgatcctctccacaacgacgtaacgccttcaccgga

SEQ ID NO: 95868 - DNA, 1861 bp, Arabidopsis thaliana columbia
aaaaatacttcaatgcgttcttaatgggcacggagatttccccacttgaccaaccccagtgaggataaactgttgccgaacgcttctcgccgataaacaccggttttgttgtgacggaaagggaaaaatggggtttgattttctgggattctgtttcgggattatctttcggcgtagctctaatggctggctggagtcgtatgatgactcaccgatcgtccaagcgagtcgccaaggcagttgatatgaaactactaggctctcttagcagagacgatttgaagaaaatttgtggtgataatttccctcaatggatatcgtttccagcatttgaacaggtcaaatggctgaataaactactgagcaagatgtggccatatattgcagaggcagcaacaatggtaataagagattctgttgaacctctgcttgaagattacagaccaccaggaattacttccctgaagttcagcaaattgacgtcgggtaacgtagcaccaaagattgaaggtattcgtgttcaaagtttcaaggaaggtcaagtcacaatggacgttgatcttcgatggggtggtgatccaaatattgttttaggtgtgacagcacttgttgcctccatacccattcagttgaaggatcttcaagttttcacagttgcacgtgttatctttcaacttgcggatgagattccttgcatatctgctgttgttgttgctctacttgctgagccaaaaccaagaattgattacactctgaaggctgttggtggaagcttaacagcaattcctggactatctgatatgattgatgatactgttgatactatcgtcaaagacatgcttcagtggcctcatagaattgtttttcccattggtggtattcctgttgatttaagtgatttggagcttaagccacagggaaagcttatagtaacagttgtgaaagcaactaacttgaagaataaggaattgattggaaaatctgacccttatgctaccatctacattcgtcctgtattcaagtataaaacaaaggcaatcgagaacaatctgaatcctgtctgggatcaaacattcgaattgattgcagaggacaaagaaacccagtcgctcactgtagaggtatttgataaagacgtaggtcaagatgagcgccttggacttgtgaaacttcccttaagcagtttggaagccggagttacaaaagaactggagctaaatctgttgtcttcacttgatactttgaaagtaaaagataagaaagatagaggaagcataactcttaaggtacattatcatgagttcaacaaagaggagcaaatggctgcgttggaagacgagaagaagatcatggaagaaaggaagagactgaaggaagcaggagtgataggtagcacaatggatgcagtcgggatggtgggaagtgggctcggtgctggtgtaggaatggttgggaccggtattggcacaggagtcggattggttggaagcggtgtgagctcgggtgttgggatggttggtagcggttttggagcggtcggtagtggattgagcaaagcagggagatttatgggaagaacaatcacaggtcagtctagcaaacgtagtggctcctcaacacctgtgaataccgttccagaaaacgatggtgcaaaacagcagtgagtaaactttgggttttaagcaagatttgtgatcatgacttcgtttttactctttattgttctgtttttttcccctttaactctctcgaacttgatttctggattcactgcagtaatttgttttccgttgtgagccttccaaattaaatcttgttacaaaattccatttgcttaatcgtccccataaacaaaaatccc

SEQ ID NO: 95869 - DNA, 522 bp, Arabidopsis thaliana columbia
ggtgccacggccccccctcgagttcgacggtatcgcataagcttgatatcgaattcgcggccgctttagtctctgttgtaaactgtcgtgttttaagttctgtgtctgaagataacaactcctccatcttggtctccgatggagtccaagacagatccagcaacgactttctcagtcttaatccgccaaatctttccgagagtgcttgtgttcatgtctacgggtttcttccatgtgcagacaatattgaaggatatgtcttccaagttttctcctttggttgtctattgataatcggtgaatactttttgtctaaaggaaggtctaagctctttgtcatcttcgaggtcggtttctttggcggaattatcttccctctacttacaatgttcccaagaattgcccttattctatccactggactgataggaagcccgtgaaatagcaaactcgatgacgggtaataatgttgcagttactgttggatactctgtctttgctttgacaatgcaatggggagct

SEQ ID NO: 95870 - DNA, 525 bp, Arabidopsis thaliana columbia
cccacgcgtccggtcatcggatctatggctgtggctcaagtattttcatcggtttatttcagcgcatggtccaacaaatcttacttcaaacctcttgtgtttagcagcatcgcactctttatcggaaatttgatgtatgcgttggcatatgatgccaattccatagcgcttcttttactcggccgtgtctgttgtgggttgggatcagcaagagctgttaaccggagatatatcagcgattgtgtgcctttgagaatccgaatgcaggcatcggcggggttttgtgagtgcaagtgctcttggaatggcttgtggccctgcgctttgccggtttactccaaatcaaattcaagcttttacaagtttacattttaaccaatctactttgccggggttgggttatggctgtggcttggctggtccatttggtatggctatgcatttcattcagagagccgttgcgtgacacagaggatggagaaaaaaacaatcgaaatgaaacaacatcagcgacagatagagtag

SEQ ID NO: 95871 - DNA, 746 bp, Arabidopsis thaliana columbia
atagggacgtattggggagctgtgagtacagctttttgtgctgaaatcgttgaatctgcggatgcttatctgtttgcaggtccgattttcaacgattacagttctgttgggtattctctgcttctcaagaaggagaaggcaatcatcgttcagcctgatcgggttactatcggtaacggacctgcgtttggatgtgttcttatgaaggattttctaagcgagttggctaaacgaattaagcacaacaacacttcttatgagaattatcacaggatctatgtcccagaaggaaagcctttgagagataacccgaatgagcctttgagggttaatgtactgttccaacacattcagaatatgctctcttctgagtctgctgtgcttgctgagacaggagattcctggttcaactgtcagaagctgaagctccctgaaggatgcggttacgaattccaaatgcagtacggatcaattggctggtcagtgggtgctactctaggctatgctcaagccatgccaaacaggcgtgtcattgcttgtattggagatggtagtttccaggtaaccgcacaggatgtatctacggttgatacggtgtgggcaaaagaccataatcttcctcatcaacaacggaggctacaccattgaggtgggaattcacgatggtccttacaatgtcataaagaactgggactacacagcttttgttgacgccatacacaatggagaggaatgctggctccagg

SEQ ID NO: 95872 - DNA, 782 bp, Arabidopsis thaliana columbia
  unsure (1)..(782): unsure at all n locations
cacggttacgcaaactctctctgagaaaatccccaaatctcatgaaattagggtttcaatcattctttgaacgcaaaattagaaacctcctctccatccgccacgaatctctagggttcttctgaaggattagatttctgggttttagaaatctgtctctcgtcatcaacaattcacgtgatgccgtcgttaacactgagcattcgtttccttttcttagttctctgcttgatcggtttacaagctgcggatgatttcccagataaatcccgcggtgacgtatgccctcgggttaaggatcggggtggatgcacaatcaactgtttccgggcggatccggtttgtggaaccgatggagtcacgtactggtgcggttgtcccgacgcagtttgccatggcgctcgcgtagtcaaaaaaggagctttgtgacacaggtaatgcaggaagtgcttctgttcctggacaagctttgttgttgattcatattgttggggctcttcttgctcggactctctcttctcgttggtggtttctgatctctagagagttagtggtggaattagacaaggaattagatagatcacacgtcctgagtttgttgtatgtgtatagttgagtattgttttgctttgtgtgctatatatatgtaatagattctgttgcagttcattctaataatgaagatttgatcgaaaaaaaaaaaaaaaaagnnnnnnnnnnnnnnnnnnnnnnnnnnnnnnnnnnnnnnnnnnnnnnnnnnnnnnnnnnnnnnnnnnnnnnnn

SEQ ID NO: 95873 - DNA, 574 bp, Arabidopsis thaliana columbia
  unsure (1)..(574): unsure at all n locations
atcttcaagacttatggaagtactctcgctggtcttagggcgttaggtcatgatgttcatcctgatgaatatcacagtttcgtgcacggaaggttaccgtatgggtcgatcgaaccaaacaacaagctacgtaaccttctcaacaaaatcaaacagagaaaaattatatttacgaattcggacaagaatcatgcggtgaaggtcctcaagaaacttggtttacaagattgtttcgaagagatgatttgttttgagacaatgaacccaaatttattcgggtcaacaacccgacccgatgaatacccggttgttctcaagccttcgttgaccgcaatggatatttgcattcgtgtagccaacgttgatcctcgccgaacagtatttttggatgataatatccacaatattaccgcgggtaaatctgtcgggcttcgcacaatcctggtgggaagagcagaaaagacggaagatgcggattatgcggtggagacggttactgagatagctacggcgggtgccanagatttnggnttncgncgaccgncgacaagncggnttttnccgttggntggtt

SEQ ID NO: 95874 - DNA, 703 bp, Arabidopsis thaliana columbia
  unsure (1)..(703): unsure at all n locations
atacgactcaccttagggaaagctactacgcctgcaggtaccggtccggaattcccggtgtcgacccacgcgtccgcccacgcgtccggtttgctatataaatcctccaatttctcaatattctaaacaaattatatattttcttacttacttgttctcttgtaatggatttctctccgatcaactgcctcattttcgatttggatgacacattataccctctaaaaactggaatagcgccagctgtcaagaagaatattgacgattttctagtggagaaatttggattctcagaaagtaaagcttcaagcttaagagttgaactcttcaagacttatggaagtactctcgctggtcttagggcgttaggtcatgatgttcatcctgatgaatatcacagtttcgtgcacggaaggttaccgtatgggtcgatcgaaccaaacaacaagctacgtaaccttctcaacaaaatcaaacagagaaaattaatatttacgaattcggacaagaatcatgcggtgaaggtcctcaaggaacttgggttagaagattgtttcgaagagatgatttgttttggggcaatgaccccaatttttgtcggggcaacaaccggcccgatgatncccggttgttctnaagcttcgttgccnaatggtatttcattgngagcacgtntcccncgacgattttggngaannccanc

SEQ ID NO: 95875 - DNA, 505 bp, Arabidopsis thaliana columbia
  unsure (1)..(505): unsure at all n locations
nnnnnnnnnnnnnnnnnnnnnnnnnnnnnnnnnnnnnnnnnnnnnnnnnnnnnnnnnnnnnnnnnnnnnccacgcgtccgatcaatatatatctctctttctctctcttcatttgatagatttgaagatttgagaggagagagaggaagaaaaaatgggagagatgaagagtatgcaaatgggtgtgattggagcattgtttctatcagttgcatcttctgtctccattgtcatttgcaacaaagctttgatgaccaatcttggtttcccttttgcaacaacacttactagttggcatttgatggtaacatattgcacacttcatgtggcatataaactaaacttctttgagaataaaccaatagacatgagaactgttgttctctttggcctcctcaatggcatttccattggtctcctcaatctcagcctcggctttaattccatcggcttctatcaaatgaccaaacttgctatcataccattcactgttcttttagaaacc

SEQ ID NO: 95876 - DNA, 832 bp, Arabidopsis thaliana columbia
cggacgcgtggtcggacgcgtgggaaaataaaaaacaatggcgaataagttcactagacaacagatttcagagtttagggaacagttcagcgtatacgacaagaatggtgatggtcacattaccacagaggagttcggtgccgtgatgcgttccctcggtttaaacctgacccaagctgagcttcaggaggagatcaacgattcggatttagatggtgacggaaccatcaatttcactgagttcttgtgcgcaatggctaaggacacttactctgagaaagacctcaagaaagatttcagactctttgacatagacaagaatggtttcatctcagctgctgaaatgagatatgtgaggactatcctccggtggaagcaaactgatgaagaaatcgatgagattatcaaggcagctgatgttgatggtgatggtcagatcaactacagagagtttgccaggcttatgatggccaagaatcaaggtcatgatactaaatatgacacaactggtggcactttggagagggacttggcggccggggttgccaaaaatatcatcgcagcgccaatgaccgacttcatcaaaaatttgttcgaagcgttgttttcttgaaatggtacatcagtaactttatgccattagggtctggctggtatgttagatctctctaaaaaggcgtttgatctttgaaaataatttctatgtaataaatttattgtgttaccatcttttcttgcatgcaatttattaaaatgagtttgtaatatggtttcagtatcgaatataattggggtatcaatgtatcttttgagaaaaaaaaaaaaaaaaacc

SEQ ID NO: 95877 - DNA, 513 bp, Arabidopsis thaliana columbia
  unsure (1)..(513): unsure at all n locations
nnnnnnnnnnnnnnnnnnnnnnnnnnnnnnnnnnnnnnnnnnnnnnnnnnnnnnnnnnnnnnnnnnnnnnnccacgcgtccgcggacgcgtggggtttttctatcgagcacggtgaagggtctgagagaacgtcctccatcgtcttactctctcaagatggagtctttcaacacactcatgaagtctgtttacactgagagatacgaatctcgtccttttagggtcggtagatacaactggacgcttgttgtgtatccgaagggaaacaagaacgataacggtacagggcacatttcgctatacgtcgtcttagacaactcaactctcacctctcaaagtgaagaggttcatgtagatctcagattttacgtattcaacaagaaagagacgaagtactttacgatccaagatactgatgtatggcgattcagtgcaatcaaaagaatgtgggggattttctaaaggttcttcctctgtttacgtttaacaacctaaaaaatggatacctttat

SEQ ID NO: 95878 - DNA, 769 bp, Arabidopsis thaliana columbia
tgctctgaagactttgtttgtgtagcaaaaaaaaaacgcgattttttttctgggtttcttccgatgttagatttgcagccgtcagatcggcgtcatggagctccgagtagtagcggcggtgttagtggtggtgatgagctgatcagaacttataaaggctggaaaggcaataacgtgttcttccttggaggaaggctcgtgtttggacctgatgctcgatctattctcatcaccgtcttcttaattacagctcctgtcattgtattctgtatttttgttggcagaaaatttatcgatgattttcctcaccatagaggagtatcagttttagctgttgctgttggtctgattttattagatctagtatttcttcttctaacctccgcgagagacccagggataataccacgtaatctgtatcctcctgaaccagagagtaatgaaggcaatggagaaccacgtcttgctcatactcctcagagtcggttgcctcggacaaaggatatgattgtaaatggaattactgtcaagatcaaatactgtgacacatgcatgctttacagaccgccccgtgcttctcattgttcgatttgcaacaactgcgtcgagaagtttgatcaccactgtccttggcttggtcagtgcattggattgagaaactataggttctacttcatgtttgtgttgtgctcaactcttctctgcatttatgtccatgtgttctgctggatctacgtcaagcggataatggatagtgagaacataaaca

SEQ ID NO: 95879 - DNA, 585 bp, Arabidopsis thaliana columbia
  unsure (1)..(585): unsure at all n locations
atgncgccccnggccgtgtcacgttgtatcccgtccctcnncctttgtgctgaccgcncttctctggncacncctgcccagaagccctcgatagggaaggacagaggcaagcattggtgggacaagtttagtctttcaaaggtgacacaagaagtgaagaattctactctctacctttcaatctcaacaagtacttcccatctgtctaaaagggaagagaagagcaaaaaagataactggaaaacaaagaaaatggtgaaaactcgagtttcgccattgttgacttggcctctgtgtcgtggttcgtttgttcagttcctttcacaactttggaaactttaaatatctcatcacattctatagtcttatttacaagaatgatgaatcttcttaaagagcattgttgtttactctctctctaatgcttttgtctttgtaaatccgagggaacagaaacactactttgtgattttgattagtttctaaacaaatctttagcttaattaaaaaaaaaaacaagggcggcacgctctagaggatccaagcttacgtacgcgtgcaggcgacgtcataactctctantag

SEQ ID NO: 95880 - DNA, 954 bp, Arabidopsis thaliana columbia
ttgccaccttctattctcagccgcggtattggctggcagggagttgcgattctgatatcaggattgtttggtactggtcatggttcctctgtctctgtagaaaatgccactattggccttgacacgagttggtagtcgaagggttgtccagatagctgcaggcttcatgagattcttctctattctcggaaaatttggagctgtgtttgcttcaattcctgcgcccatcattgctgctttatactgtctcttcttcgcatacgtgggagctggaggtttgagtttccttcaattctgcaacttaaacagcttcaggaccaagttcatcttaggtttctctgtcttcctgggcttgtccatccctcaatacttcaatgagtacaccgcaatcaaaggatatggtccggtccacactggggctcgttggttcaacgatatggtaaatgtcccgttctcctcagagccttttgttgctggaagcgtcgccttcttcttggacaacacactgcacaagaaagactcttcggtaaggaaagacagagggaagcattggtgggacaagtttagatctttcaaaggtgacacaagaagtgaagaattctactctctacctttcaatctcaacaagtacttcccatctgtctaaaagggaagagaagagcaaaaaagataactggaaaacaaagaaaatggtgaaaactcgagtttcgccattgttgacttggcctctgtgtcgtggttcgtttgttcagttcctttcacaactttggaaactttaaatatctcatcacattctatagtcttatttacaagaatgatgaatcttcttaaagagcattgttgtttgcgcccccgaattcgaaaaaaaaaaaaaaaaaaaaaaccaaagggcggccgctctagaggatccaagcttacgtacgcgtgcaggcgacgtcatagactcttctatag

SEQ ID NO: 95881 - DNA, 432 bp, Arabidopsis thaliana columbia
caattcagatccaatttcaatccttctccgtcagattatctcctcggccacgatgtctctccgccgcactatcctcgatctccaccgtcaaacccagagagccactctctcaaagtctctacctttctcgatgagtcacatctcctccgcatccgccaccgccgccgtgagaaacccactgggaagagacctctcttcaatccccttcgcacaagcccagaaactgaaaccagattcaaccaatctcgtcaccgatcgctcgatttcgtcttcaattgggcaatctgaactcaacaaggcagccaaattctcgcgtcaatcgtcttctcgaggttacactaatggctctttcttacgcaaaacccctgtagtctttcacatacattaaggaatggaagatattttggcggattttgtttcacctagaaatga

SEQ ID NO: 95882 - DNA, 924 bp, Arabidopsis thaliana columbia
tctacgactcatatggggtacgctggtacgcctgcaggtaccggtccgagcctacccgggtcgatccaaccgtccgcccacgcgttcgtacggctgcgagaagacgacagaagggtacggctgcgagaagacgacagaagggtgcggctgcgagaagacgacagaaggggaccaatcatttgctcgaaaaggaatcatgggtcttaaagctggaacctttgtgcttctcttgttgggtttagatcttggtctctgacgctagatctttcgttgactccaccatctcagaggaagtttccaacaaggaagacgtttgcactctgtgtgaggaatatgttactgatgctctcagctaccttgagaaaaaatgtcacacaagccggagatcattcgaagatcttcatgaatcggtgctcccaattgcgccgtatattcgcaccagtgtataagtttgggggattactatggttcctcttttcttcttacaactagagtcggttgcaacctcattatttctgcaagaggatgaatcttttgtggcaaagttggagcctcttgtcgaagaagcccgtcaggacagttgcggtgtatgccacaggactgtttcagagattctcatcaaactacaagatcctgacacacagctggatatcgttgaactgcttatcaagggatgcaaatcgctcaagaactacgagaagaagtgcaagacgttggtgtttgaatatggacctctgatactcgtaaatgcagaggaattcctagtgaaaaacgacgtctgcacactcttgcgcgcatgcccccctgagaaatcggttctaaggcagccggagttggctgattcttgaatgttcaaaacgttgctataacaggattttaattccttatgggttatacaagtaggaacacgagctgctccatgag

SEQ ID NO: 95883 - DNA, 806 bp, Arabidopsis thaliana columbia
  unsure (1)..(806): unsure at all n locations
attatgttcaacgattacgcctactgataaaagtgtttaactatcagggattctttgtcaacaatcctcgtgaagactttctttctatcttatattgatgatgagtgttatatactgactttgctttctcttgattatctagctggatatcgttgaactgcttatcaagggatgcaaattgctcaagaactacgagaagaaggttaaaatgatcaactcaaatccataacattgccttcacgtgtttacaaattaaccatttcattctgctttctctgttggtgttcttctcgaacttttgcaacgcatctgcatgatcacatagcagttagcgtacgctttttctgatattatgttgggtcttggggtaatacagtgcaaaacgttggtgtttgaatatgggcctttgatacttgtaaatgcaaaggaattcctagtgaaaaacgacgtttgcacacttttgggggcatgccccccttaaaaatcggttttaaggcaaccggagttggcttatttttgaatgttcaaaacgttgctataacaggattttaattccttatgggttatccaagtaggaacccgagctgctccctgagaatggttgcaaactttgtgtagggtttaaatgtatggattcaaacccatcccccaaaaagtccctttgcctttgtgtaaaaaatgatcgctccccccnnnnnnnnnnnnnnnnnnnnnnnnnnnnnnnnnnnnnnnnnnnnnnnnnnnnnnnnnnnnnnnnnnnnnnnnnnnnnnnnnnnnnnnnnnnnnnnnnnnnnnnnnnnnnnnnn

SEQ ID NO: 95884 - DNA, 628 bp, Arabidopsis thaliana columbia
tatcgttgaactgcttatcgagggatgcaaatcgctcaagaactacgagaagaagctcgtcaggacagttgcggtgtatgccacaggactgtttcagagattctcatcaaactacaagatcctgacacacagctggatatcgttgaactgcttatcaagggatgcaaatcgctcaagaactacgagaagaagtgcaagacgttggtgtttgaatatggacctctgatactcgtaaatgcagaggaattcctagtgaaaaacgacgtctgcacactcttgcgcgcatgcccccctgagaaatcggttctaaggcagccggagttggctgattcttgaatgttcaaaacgttgctataacaggattttaattccttatgggttatacaagtaggaacacgagctgctccatgagaatggttgcagactttgtgtagtgtctatatgtatggattcaaacacatcctccaaaatgtccctttgcctttgtgtaaataatgatcgctacaacaattgtacctctactatgatatcactgtattctatttgaggtttgttacattttatatgaatgatattagtgtagtttgcccccctgcgatgcgacgtcaaagtcttctatagtgcacct

SEQ ID NO: 95885 - DNA, 1079 bp, Arabidopsis thaliana columbia
  unsure (1)..(1079): unsure at all n locations
nnnnnnnnnnnnnnnnnnnnnnnnnnnnnnnnnnnnnnnnnnnnnnnnnnnnnnnnnnnnnnnnnnnnnnnnngtgatttgttatatctttatgcttattccaaagtccaaactaattgcatattcgaagataatagccacatgtatgagatgacgtggttggataatagctagtagtgttaaaatacctcatttgacctttcgacattcatacgcaatcgactcattccacggatctgcttactcattgattctcgataaattgttcttctcccacagacaccagattctaccaatcatttgctcgaaaaggaatcatgggtcttaaagctggaacctttgtgcttctcttgttgggtttgatcttggtctctgacgctagatctttcgttgactccaccatctcagagaaagtttccaacaaggaagacgtttgcactctgtgtgaggaatatgttactgatgctctcagctaccttgagaaaaatgtcacacaagcggagatcatcgaagatcttcatgatcggtgttcccaattgcgcggatattcgcagcagtgcataagtttggtggattactatgttcctcttttcttcttacaactagagtcgtttcaacctcattatttctgcaagaggatgaatctttgtggcaaagttgtagctcttgtcgaagaagctcgtcaggacagttgcggtgtatgccacaggactgtttcagagattctcatcaaactacaagatcctgacacacagctggatatcgttgaactgcttatcaagggatgcaaatcgctcaagaactacgagaagaagtgcaagacgttggtgtttgaatatggacctctgatactcgtaaatgcagaggaattcctagtgaaaaacgacgtctgcacactcttgcgcgcatgcccccctgagaaatcggttctaaggcagccggagttggctgattcttgaatgttcaaaacgttgctatcacggtttattcctatgggnncaagagggcncgggtntcctngntngttcagcttttgagggcctntttggtaanancccaatccctccttgaaannccta

SEQ ID NO: 95886 - DNA, 537 bp, Arabidopsis thaliana columbia
cggacgcgtgggatctccaccaccaccatacgtttacagctccccacccccaccatactactcttcttcgcctaaggttaactacaagtctcccccaccaccatacgtttacagttctccgcccccaccatactactctccttctcctatggttgactacaagtctacccccccaccatacgtctatagcttcccacccctaccatattattctccttctccaaaggttgactacaagtctccaccactaccatacgtttacagctccccacccccactatattactctccttctccaaaggttcattacaaatctccaccaccaccatacgtgtataactctccaccttcaccatactattctccttctccaaaggtcacttacaagtctccaccacccccatatgtctacaaggcgccttactattgattttgaattgtttcattaaaaggaaacgttgattgcaataatttggttttatgatttttttctcttgaatcttctgattttgttcctttaattagttccttatcttg

SEQ ID NO: 95887 - DNA, 158 bp, Arabidopsis thaliana columbia
tgaaattgggtgaaagatgggtaacgctcttacgttcctctacggaaaatgctgcaaacccacaacaaccgatgactctcttggtcctcacgggcgtcttcgcccccaccgtctgtgttttatttcttgctcacgatctcttttatctatttagatta

SEQ ID NO: 95888 - DNA, 658 bp, Arabidopsis thaliana columbia
  unsure (1)..(658): unsure at all n locations
agaatatcatctctcctgacttctcgacacctattacacaggcgggtcaggctgccggcaagaaagtaccgtcctggcgagaatggtccaaaggttccatttttcactgatgacgaagagagctcaagtacaccaaaggcggatgctcttttcattccaagggagaaccctagagctctagttatacgcccagttcaacagtggtcttcaagggataaatcaatacttccaaaggaacaacgcccgactgctccattacatgacaatgggaagagtcccgacatggccactgatgcagcaaaccatgacagaaatggtaacggagaacttggtgctactggggaaagaattcatacatcagtcaatgcaaatcagaaaccgaatggcacaacaccgctcagatcaggctagcgagaaagagcgtccctacaaaactctaagtggacacagagcaggagaagccgcaattgtttatgagcacggtgcagatatcgaggctcttatgccgaagctacgacaatctgattatttcacagagccacgtatccaagaactagcagctaaggaaagagcggatccgggttacttgcaggcgggtaagagactttttagtgggacgacacggttatngtagcataaagttcatgggagatacaga

SEQ ID NO: 95889 - DNA, 709 bp, Arabidopsis thaliana columbia
  unsure (1)..(709): unsure at all n locations
gttttcctttttttttctccttcctctcctctctctctctctggtttttttttgccctatccatagggttttcttcgctctctatctcctcgatcttcatgtgcatctctctctttggtataatcggagctaattcgttcgttttcttcttcatcttcgtcggatctctcttttttgctctttcccacgggttttcgcttgagaaatcaagcgttttcgtttttcctgggagttttgagctcaaatcatgtctcagatctttagttttgccggtgaaaatgatttttaccgtcgtggcgcaatatacccaaacccaaaggatgctagtcttttgttatcgcttggtagtttcgctgatgtttatttccctccaagcaagagatcacgtgttgttgcacctacgatcttcagtgctttcgagaaaaagccagtttccattgatgtgctaccagatgagtgtctttttgagatctttaggcgtttgtctggaccacaagagaggagtgcttgcccttttgtctccaaacagtggcttacgcttgtaagtagcatccgtcaaaagggggttgatgttccttccaagataactgaagatgggtgatgattgtgaaagggtgtttgtctacggagctttagatggggagnaaggcaacanatttttngntttggcagcaaattcctntttgggacctncttgnccgtgggggcc

SEQ ID NO: 95890 - DNA, 766 bp, Arabidopsis thaliana columbia
  unsure (1)..(766): unsure at all n locations
ctgcccgtgcttggaagatgtcaaaccagatacgcccatccaactatacactgatgcttgtgaaattcttgaagaggatgggagggaccaaatggcctttgatctgtaccgtgcttgtgctaatgtctacattaagcttgagaagttcacagatgctgcaacctttttcttaagattgggtgtagctgctgataagtgtgatgcgacaaatagccagtgtaaggcctatctcagtgcaatcatcttatatctgtatgctcacgacctgcagcaggcagaaaaatgctacaatgactgttctcagattgatgcctttctgaagagtgatcagagccgaagtgctagtagacttctctccgcctataatgaaggtgacattgaagaaatcaagaaggtggcgagtgcaagcactgtctcgaatttggatcatatgattatcaagttggctaggaagctacccactggagatgttactgcaattcagatgaacactaatgacgatctagacgaggatgatctcacttaaagtttctcctctttgtacatattcatatttacacttggcttcttttcagtccaaagattcaaaaaaaacatattatcgtttgtcccaagtactgtgggaaagattgattatataggctctaaattcgaatttatgcatgtatttttcttaaaaaaaaaaaaaaagnnnnnnnnnnnnnnnnnnnnnnnnnnnnnnnnnnnnnnnnnnnnnnnnnnnnnnnnnnnnnnnnnnnnnnnnnnn

SEQ ID NO: 95891 - DNA, 1063 bp, Arabidopsis thaliana columbia
  unsure (1)..(1063): unsure at all n locations
nnnnnnnnnnnnnnnnnnnnnnnnnnnnnnnnnnnnnnnnnnnnnnnnnnnnnnnnnnnnnnnnnnnnccacgcgtgaagaagaatcaatactcaaatctcaatcatctctctttcttatcttcttctccgatatgaagctcgccgctagcctcaaccgcctcagccccaaacgtctcttccgtaccaaatcaaaagcttccgtctccagatctgagccttcttccttcagctccaatgcttcttcctcttcctctgatggatcttacggtaacctcaaacaaggtccaaccgcgactccgatcagtgttctccctcaaaactccggcgatttttacactgagcttgttcaagcttttaaactgatcgatcgtgatgacgacggtgttgtttccagaggagatctcgcggcgttgattagcaggttaagtcatgaaccaccgagtcaagaagaggtgagtttgatgctaagagaagtagacggcggagacggtggttgtatcagccttgaagatcttgctagccgtgtcgctggtacttccggtgaaggctctgttgagacggaggagctgagagaggtgttcgagatttttgacgtggatcgtaacggaaaaatatcggcggaggagttacacagagtttttggagtgatcggagatgaacggtgcacgttagaagagtgtatgcgtatgatagcgacggttgatggaaacggtgacggttttgtttgcttcgatgacttttgccgcatgatggttccagcgatgaatgatcatcatcattagaatcatgtttgattgatgatggtgacatcaccatactctttgtcttttttttttgttaccgaaaaattatttattttactgtttttgcggtggttattgtgacggcaagcatttaaattgttcaccgtcggtttaaattcagacgtctttctcaaaatggttatatactaatgtgaacatgtttctagtttcaaaaaaaaaaaaaaaaaannnnnnnnnnnnnnnnnnnnnnnnnnnnnnnnnnnnnnnnnnnnnnnnnnnnnnnnnnnnnnnnnnnnn

SEQ ID NO: 95892 - DNA, 514 bp, Arabidopsis thaliana columbia
  unsure (1)..(514): unsure at all n locations
cnnnnnnnnnnnnnnnnnnnnnnnnnnnnnnnnnnnnnnnnnnnnnnnnnnnnnnnnnnnnnnnnnnnnnnnccacgcgtccgatcgaatcaacaatgtcgaatcctgcagccgtcaccgccggcagaggatcaatcactcacgtcatattcgacatggacggtcttcttctcgatactgagaagttttacactgaggtccaagagattatacttgctaggttcaataaaaagtttgattggtctctcaaggctaaaatgatgggtagaaaagcaatagaagctgccaggatctttgttgaagaaagcgggattagcgactctctttcagctgaggactttcttgtcgagagagagtcaatgttgcaagaccttttccctactagtgagctcatgccaggggctagtagactcattaagcatctccatgtaaagaatattcccaatatgtattgctaccggctactcacacacggcattatgatctgaaaacccaaagacacagagagcttttt

SEQ ID NO: 95893 - DNA, 429 bp, Arabidopsis thaliana columbia
  unsure (1)..(429): unsure at all n locations
atctctatggatgccaaaaagttggatactggcccgagagatgcaatcaactggctccctgacgagattctgggcaaaatcttgtcattacttgcgacaaaacaggctgtttcaacatcggttctttctaaaaagtggaggactctctttaaattagtggataccctcgagtttgacgattctntctctggaatgggtgaacaagaagcgagctatgtgtttccggagagctttaaggatttggtggatccgaacagtagctttgcagtgtgaattatcccgatcaggaagtttgtcactaaaaatgtcattgtttggcagggncgattgaacaaccggaaaggctttattntggggccccctgggntaatcgaaatttcngtagggccncgntgtntnaaaaagtnggnactaaagggtncaantatc

SEQ ID NO: 95894 - DNA, 684 bp, Arabidopsis thaliana columbia
  unsure (1)..(684): unsure at all n locations
ggaaagctggtacncctgcaggtaccggtccggaattcccgggtgcggccaggcgtgcgtcttcatgaaaaccctaacggggaagaccataacccttgggggtggaatcatcccacaccatcgacaatgtgaaggcgaagatccaagacaaggaaggaatcccaccggaccagcagcgattgattttcgccgggaaacagcttgaagacggccgtaccctcgccgactacaacatccagaaggaatcgacgcttcatctcgtcctcccgtctccgtggtggtgctaagaagaggaagaagaagacttacaccaagccgaagaagatcaagcacaagcataaggaaggttaagctcgctgttcttcagttttacaaaatcgatggatctggaaaggttcagcgtttgaggaaggagtgccctaacgcaacctgtggagctgggactttcatggcgagtcattttgatcgccattactgtggtaagtgtggactcacctacgtttaccagaaagaaggagttgaagcttgatctgttgtagcggtagatcgatccttctctttctctcttatcttttaaaaactgcatttctatttgggaattttgtaagctctttaatttgagttatcatggattctatgttgaacatctttcgttctggattataaattatggaaggttttagg

SEQ ID NO: 95895 - DNA, 629 bp, Arabidopsis thaliana columbia
  unsure (1)..(629): unsure at all n locations
aagagtttcgccagaaattttcttccgccgtaaaagcaaaaaaagatgcagatcttcgtgaaaaccctaacggggaagacgatcactctcgaggtcgagtcctctgacaccatcgacaatgtcaaggccaagatccaagacaaggaaggaatcccaccggaccagcagcgattgattttcgccggaaagcagctcgaagacggacgtaccttagccgattacaacatccagaaggaatcaacgcttcaccttgtccttcgtctccgtggaggtgctaagaagaggaagaagaagacctacaccaagcctaagaagatcaagcacaagcacaagaaggtcaagctcgctgttcttcagttctacaaagttgatggttcaggaaaggttcagcgtttgaggaaggagtgccctaacgcaacctgtggagctgggactttcatggcgagtcattttgatcgtcatttacttttggtaagtttgggctcaccctacgttttccagaaagaaggggctcaggggtttttttttatccgtcttccatttttaattgatncgctttttttttgnatttgnaggtnttttggttttnggcctatgtaccttnttaatcaattggnttttaaaaaaaa

SEQ ID NO: 95896 - DNA, 663 bp, Arabidopsis thaliana columbia
  unsure (1)..(663): unsure at all n locations
accgggccccccctcgaggtcgacggtatcgataagcttgatatcgaattcgcggccgcgcggccgcggtcctctgacaccatcgacaatgtcaaggccaagatccaagacaaggaaggaatcccaccggaccagcagcgattgattttcgccgggaagcagctcgaagacggccgtaccctcgccgactacaacatccagaaggaatcgacgcttcacctcgtccttccgtctccgtggtggtgctaagaagaggaagaagaagacctacaccaagccgaagaagatcaagcacaagcacaagaaggtcaagctcgctgttcttcagttctacaaggtcgatggttctggtaaggttcagcgtttgaggaaggagtgccctaacgcaacctgtggtgctgggactttcaatggcgagtcatttcgatcgccatttacctgtggtaagtgtgggctcaccctacgtttaccagaaagaaggggctccgggatgattttccatcccgatctccatcattttgaattgaatacggctttttttttggaatttggaagttgttttgggatgtttccggccggtgtgcggccgaannnnnnnnnnnnnnnnnnnnnnnnnnnnnnnnnnnnnnnnnnnnnnnnnnnnnnnnnnnnnnnnnnnnnnnn

SEQ ID NO: 95897 - DNA, 541 bp, Arabidopsis thaliana columbia
  unsure (1)..(541): unsure at all n locations
cagctctctacgactcactattgggaaagctggtcacgcctgcaggtaccggtccggaattcccgggtcgacccacgcctccggaacaaacaatggtacactctcgttttttaaacgttgttttagtcctagtgaccattgcttccatattctccacatttgccgaggccaatacgggctttgggtggggttggggtggacactccaacaattcaagtggttcaggttcaaactcgaggtccggatggggttggcgttggggtcaaggctccaactattcaagtggttcagcttcaaccccagggtcaggatggggtttcggctctagcaaaaacggctcatgctggggttggggttggngcagacgctaccatcttggccttatcttgcgtgacactttggataatttggtggctttggggatcacatagaacgattgttaagaaagggggctgncggatttatttcaaaaaaaatggggagagtaaaaaataatctatggatacgtagaagcagacgccgtcgaggtgggggcgaagtg

SEQ ID NO: 95898 - DNA, 524 bp, Arabidopsis thaliana columbia
  unsure (1)..(524): unsure at all n locations
nnnnnnnnnnnnnnnnnnnnnnnnnnnnnnnnnnnnnnnnnnnnnnnnnnnnnnnnnnnnnnnnnnnnnnnnnnnnnnnnnnccacnngcgtccgctcttatcaaataactaacaattcacaagaagaaacaatggtacactctcgttttttaaacgttgttttagtcctagtgaccattgcttccatattctccacatttgccgaggccaataggggctttgggtggggttggggtggacactccaacaattcaagtggttcaggttcaaactcgaggtccggatggggttggggttggggtcaaggctccaactattcaagtggttcagcttcaaccccagggtcaggatggggtttcggctctagtcgaaacggctcaggctggggttggggttggggcggggttcccaacaatacacacagctcagggtctggcggctcgggttggggcatggggcctaacaacaattacaggttggggatctgggcggcctggggttcggggctggggaatatgggagg

SEQ ID NO: 95899 - DNA, 753 bp, Arabidopsis thaliana columbia
  unsure (1)..(753): unsure at all n locations
nnnnnnnnnnnnnnnnnnnnnnnnnnnnnnnnnnnnnnnnnnnnnnnnnnnnnnnnnnnnnnnnnnnnnnnnnnnnnnattcccatatcgtgatcctccaaacggacgggttgtgggaatcagtggagtctctttttgagtttacgctgaatcatctgggagattgacaaagaagagtttaagacagtgatgagtctgatgcgatctcagcatagacaaggagttggccacagagatggccttcgaacagggttacatatgaccggttctgtcgaggatggaggattggtagaatacttctttgggaaagatggcagtcaaaaactgaaacacgacaaattcactaagtttatgaaagatctaactgaagagatgctgaggctggagtttgcacattatgactataaacgaagaggaagtatatcggccaaagattttgcattgtcgatggttgcagcggctgatgcaagccatttgagcaagctgcttgatagagttgagagtctgagcgaacacccgcatctcccgggccatgcgtttttccctcactgaaggaattcaaacagtttgatgagctacgtagtaaacttggaccattctctctagcgctttttgcttatggcaaagctaatggtttacttacaatgaaagatttcaaacgagccgcctctcaggtatgtggaataacattgtcagacaatgtgatagaaattgcgtttcatgtgtttgactcgaatcaagatgggaatttga

SEQ ID NO: 95900 - DNA, 991 bp, Arabidopsis thaliana columbia
  unsure (1)..(991): unsure at all n locations
tgtttcgagggagataaatagtcaaaaagaagattttgttcagtttatcagcttcacgttgttgtattatatatacttgagattataattcatggtttctctatttatgatgcttccccaccaagaaatgagatacgatatatagatatttatgcaagtctaaaatttgacgtgttatatagaggcgaatctaaaagataaggttccgattatgaaggattcgtatctttaatcgacgccgtgtttccatatagcagtaaacagacacaaacgcgttattcgttggttggataaatcctccttataaataaacgatcctttaagtaaggttagttgtcaaaagaatctgcgaaaaataagagagagagagagagaaacaggatcattcattatgcccgccttatctcactacagatcagtatcatctctaccgtccgttgaccgatcattccttctcatccaacgactcaggatccacggcagctcttcttccttccctgaatcttctccttctgcgtctattctctccggcgcagatccgttgaagtgtacggtctctggtggatctcttgctaaatggatcaccgggatttcagctggatccgccttagggtttctctattggtcctctggttcttctgattccatctctggtttgtttggtgggagtaatttattgtccttcgctgatagttcaacgccttctgtttgtggtgtaaaagtcggcgatctgaaaccgagatcgtttattccgaaattgtcgttgcctggttacagctctggattcatcttcggagatgcgtatagaaggaagatcttcttcaattaacgagaaacggtttgaagattacaaaagtcctcctgaaaaagggttttcgagtacttttgcaacctgttncgacagnttaaaggggaaatncttattgaanccggcagntttnnttgagggcaatttncccngggttccnccatcagaattnaacttggaaac

SEQ ID NO: 95901 - DNA, 664 bp, Arabidopsis thaliana columbia
  unsure (1)..(664): unsure at all n locations
gaaagnctngcgaaccccnctcncgggcatcgacnccccnnaggatccaancagttnaaggaccncgtgnnaacttggccccntctctctgcccttntgcttatggcaaagctatggtttncttacnatgaaaggatttcaaacgngcccgcctctcaggtatgtggaataaccntgtcagccaatgtgatagaaattgcgtttcatgtgtttgactcgaatccaagatgggaatttgagtgtggatgagtttttgcgggttctgcatcgaagagagagggacgtggcacagccaattgcaaaaggattgtctcggtacttctcagatggatggaagggttctaagaactgttcctcatcgtgaagactcttcttcctctttggggcttaccgatgaaactcgaagactattttttgaggctcttgggttcatacgagtgagcccacagattttatgattactccacgctggcattgtaagaaagaaatctgaataaatctgtgtatagtttgatcgacctatgaacttttttgttttgttttgttaatgataaatggtaattgcataaaaaaaaaaaaaaaaaaaaaaaaaaaaaaaaaaaaaaaaaaaaagggcggccgctctagaggatccaagcttacgtacgcgtgcatgcgacgtcat

SEQ ID NO: 95902 - DNA, 1296 bp, Arabidopsis thaliana columbia
  unsure (1)..(1296): unsure at all n locations
gggaagcttgtccccttgaggtcccggtccggatttccgggttcgccccacccttccgggggaagtatttattggtccttcgctgttagttcaccgccttctgttggtggggtaaaagtcggcgatctggaaccgagatcgtttattccgaatttgtcgttgcctggttacagctctggattcatcttcggagatgcgtatagaaggaagatcttcttcaattacgagaaacgtttgagattacaaagtcctcctgaaaagggttttcgagtactttgcatctgttcgaacagataaaggggaaatactaatgaaaccggcagatttgatgagggcaattgtccccgtgtttcctccatcagaatctcatctagtaagagaaggatatttgactggggagagaaatcctggtgaacttagatgctctccttccgagttcttcatgctctttgatgttgataatgatggtcttatatccttcaaagagtatatattctttgtgacattactcagcattcctgaatcaagcttcgcagtggctttcaaaatgtttgatactgacaacaacgggtgagtagtcggtcacatatgtaaaattaggttaatcctgcttttggtaactttttttctggtccgtattcccatattgtgatcctccaaacggacgggttgtgggaatcagtggagtctctttttgagtttacgctgaatcatctggtcagtgcttctatcctttgtaacttctatttcctcgagatggtactgacgaatgattgttttagggagattgacaaagaagagtttaagacagtgatgagtctgatgcgatctcagcatagacaaggagttggccacagagatggccttcgaacagggttacatatgaccggttctgtcgaggatggaggattggtacaatacttctttgggaaagatggcagtcaaaaactgaaacacgacaaattcactaagtttatgaaagatctaactgaagagatgctgaggctggagtttgcacattatgactatcaacgaagaggaagtatttcggccaaagattttgcattgtcgatggttgcagcgggctgatgcaagccatttgagcaagctgctttgatagagttgagagtctgagcgaacacccgcatctcccggggaacattgcgttttctcccctgaaagggaattcccaacccctttagattgaagcttccntttttttaactttggacccattctcctcntancgccttttttggctttattggcanancctacattgggttttncttnncc

SEQ ID NO: 95903 - DNA, 813 bp, Arabidopsis thaliana columbia
  unsure (1)..(813): unsure at all n locations
cccagccttcccttatcttccggtcgtatgtgtgggattgtacggatacatttcacccaggaccagctatgacctgatcgcccagctctaatcgctctcataggaaagctggtcgcctgcaggtccggtccggaatcccgggtcgacccacgcgtccgcccacgcgtccgcccacgcgtccgaaggaattcaaacagtttgatgagctacgtagtaaacttggaccattctctctagcgctttttgcttatggcaaagctaatggtttacttacaatgaaagatttcaaacgagccgcctctcaggtatgtggaataacattgtcagacaatgtgatagaaattgcgtttcatgtgtttgactcgaatcaagatgggaatttgagtgtggatgagtttttcgcgggttctgcatcgaagagagagggacgtggcacagccaattgcaaaaggattgtctcggtacttctcagatggatggaagggttctaagaactgttcctcatcgtgaagactcttcttcctctttggggcttaccgatgaaactcgaagactattttttgaggctcttgggttcatacgagtgagcccagagattttatgattactccacgctggcattgtaagaaagaaatctgaataaatctgtgtatagtttgatcgacctatgaacttttttgttttgttttgttaatgataaatggtaattgcataaaaaaaaaaaaaaaagtaaagattacacgcctnagngattgatacatatcggtgtatataatttaaggcaagaaaaaanggggcggggggggnnnnncg

SEQ ID NO: 95904 - DNA, 579 bp, Arabidopsis thaliana columbia
  unsure (1)..(579): unsure at all n locations
ttaggacacactatagaagagttatgacgtcgcatgcacgcgtacgtaagctcggaattcggctcgagaaaaaggaggtgttgtgtggggactgcaatggagctggtttcattggtgggttcttgagcaccttcgatgagtagtagaaataagcttcttccaagaagactggatttgattacatggactcaaaaaacactcttttataaaccttagaagaagtaaatctttctctctatcaatgctcttctttaccaaaaacatgtattactatttgttattgcacaccaaacttttgttgtatttttgtttttcagattcttctctctctctctctcgttttttgtcttctacaaattgctaaaagtctatagcacctctatggtagtcttgttgatggcttgaaatgttgaatggtttagagaagaattaatcaaagttttgttctattctaaaaaaaaaaaaaaaaaaaaaaaaagggcggccgccgactagtgagctcgtcgacccgggaattnnnnnnnnnnnnnnnnnnnnnnnnnnnnnnnnnnnnnnnnnnnnnnnnnnnnnnnnnnnngg

SEQ ID NO: 95905 - DNA, 651 bp, Arabidopsis thaliana columbia
  unsure (1)..(651): unsure at all n locations
tctctacgactcactatatggaaagctggcacgcctgcaggtaccggtccggaattcccgggtcgacccacgcgtgcggaagactcagaaaacagaaaatggcgaattcactatgcttcttctcttctcctcctaccttttgcttccaatctccaagcaaaaaccctaaaccttctcacttcttctcaactaatgataacacctcttccttggtacagaagagagaactgcttcagacttcaagatcccaaagttttgaagttaaggccgcaaacaataatcctcagggcactaaaccaaacagtttagtttgtgcaaattgtgaaggggaaggttgtgtggcatgttctcaatgcaaaggaggtggtgtgaatttgattgatcatttcaatggtcagtttaaagctggtgcactctgttggctttgcagaggtaaaaaggaggtgttgtgtggggcctgcaatggggctggtttcattgggggggttctttagcaccttcggtgagtaggtaggaataagcttttttccaggaacgccttgggttttgattccattgggctctaaaaaacaccnctttttaaacccctggggggggggtcattttttcnnccatgnncttnttnccaaaacatgattnctatttgnattg

SEQ ID NO: 95906 - DNA, 827 bp, Arabidopsis thaliana columbia
  unsure (1)..(827): unsure at all n locations
ctcgcaaaggcaagcaattttgtagaaaaacttaaaaacttaggattggctgatcaacaagaaaggaaataaggatttcccgggaaaggcacaagaagtgaattgccaccacctggaagtgttgaagtagtgtgtgcaaaggtgtgcacactacttcacgctatatccattttaatgtgcagtcttaggattattagatctaggaccatgttgttacacattgtcttgtagtagaacgctagaacataaacttcctttgaggataaaggaattgctaacacatgtatattctcggtggctaagctttggagtaatagccacacttgagctaacttagattaagatcatttttaagattcaaaatttagattgctcatcatatcttgaaccaaccccactaatggattgtggggttcttgcatttgcatgtatttttgcctcttgggagatattttggttccctttaggttcttctcataacaatcaaccaaaccagttgaccaaccatggttaggaatttcaggtgagaggtattcatcacctctttatctctcttttgtactcttctttcctctgtttcttcaagactaaaaactctctttttatgtaatttgttgttatatcttgtaagctgtgtgtttctgattctatgtaagaaaactaaaacctttcagtttccatcctcggtggttggagaatgaaactgtgattgcaatattttactttgatctgatatataatcaaaaaaaaggaggttatgacnnnnnnnnnnnnnnnnnnnnnnnnnnnnnnnnnnnnnnnnnnnnnnnnnnnnnnnnaacggaaat

SEQ ID NO: 95907 - DNA, 569 bp, Arabidopsis thaliana columbia
  unsure (1)..(569): unsure at all n locations
atgatcttgccagnnnnnnnnnnnnnnnnnnnnnnnnnnnnnnaataaatcaacccatttcacacttttattgaatttaaaaactaaagtcaaaagcaatagacgctctgtgatagctctctggtccaataatcgagaaacctatcttgaccaccttctccgacgccggtgtagcccacgcttgccagcgtcgggatttttccttccctgcttctctctatttcacattgctatctgtttcccctcttgtgcggccgtttcctcaatcatctagtgtaatcaagcgtcttaaagtggagaacggcatttcatcctccatcatactcagatctatcgacgctggttcttcctcgatctccctttaaaccttcttccaccgtatctcgccgccggtagttacttcttcacctccccttgcgattcaaccaaatccctcttgcctcgtcttcgagctctcgggattcttattgttggggagtttccggccaaggcttactccggtgaaggaagagaaggtgagcggcggcgcagacctaattgcttttgatgtctcccgatttgacctaatc

SEQ ID NO: 95908 - DNA, 693 bp, Arabidopsis thaliana columbia
  unsure (1)..(693): unsure at all n locations
gannnnnnnnnnnnnnnnnnnnnnnnnnnnnnnnnnnnnnnnnnnnnnnnnnnnnnnnnnnnnnnnnnnnnnnnnnnnnnccacgcgtgcgcgcacgcgtgcgctccggtttttttcgccaacaaatgtggaccgctcctctctccgggttctttctcacttcactttctccttctcaatcttctctccagaaactctctcttcggacttcttccaccggcgcttgcctcccacccggctcttgttgggcgcatcttcctcctgctcggcttcccggtccggtccaacgcttatccgtaacgagccagtttttgccgctcctgctcctatcattgccccttattggagtgaagagatgggaaccgaatgcattacgacgaggctattgaagctctcaagaggcttctcatcgagaaggaagagctaaagacggttgcagcggcaaaggtggagcagatcacagcggctcttcanacaggtacttcatccgacaagaaagctttcgaccccgtcgaaaccattaagcagggcttcatcaaattcaagaaggagaaatacggaaccaaccctgctttgtacggtgagctcgcaaagggtcaaagtcctaaggtacatnggtgttttnctttgttcaagcctcacggnntntttcccattaaaanggttttnggncnttttaagccccgggggntt

SEQ ID NO: 95909 - DNA, 646 bp, Arabidopsis thaliana columbia
  unsure (1)..(646): unsure at all n locations
gccccncgggccgaanccccaaagggcccctttgcaggccaattccnggttggcccccattnaaccgtncctcccccttagggnggaaccattgtggtgntgggccncagtccatgtggtgcatccaaggggctttatggccattccctcttgccggaaccactctactggnctncatnngnggattgggtcaaaatctggtttcccagcaaagtcaaaagttttggcagaaagtgaaagttcagcatttgaagaccaatgtggccgatgcgaaagggaggcagtgaatgtgtcactagcaaacctattgacatatccatttgtgagagaaggagttgtgaaaggaacacttgctttgaagggaggctactatgactttgttaatggctcctttgagctttgggagctccagtttggaatttcccccgttcattctatatgaactaacacatcaccatcaccatcgctaccaccaccatcacaaacatcatcatcgtcgtcatcatcatgatcagcatcttcatatataaatgttttactcttatttaattgctacttgtaatggtatacatttacttgcgatgagcttctttgcggccgcgaattcgatatcaagcttatcgatacagtcgacctcgaagggggg

SEQ ID NO: 95910 - DNA, 649 bp, Arabidopsis thaliana columbia
  unsure (1)..(649): unsure at all n locations
cattttcttctaattttattcggtcaaccaacttgcatagtgaatagatgggaaccgaagcatacgacgaggctattgaagctctcaagaagctgctcatccagaaggaagagctaaagacggttgcagcggcaaaggtggagcagatcacagcggctcttcagacaggtacttcatccgacatgaaagctttcgaccccgtcgaaaccattaagcagggcttcatcaaattcaagaaggagaaatacgaaaccaaccctgctttcgtacggtgagctcgcaaagggtcaaagtcctaagtacatggtgtttgcttgttcagactcacgtgtgtttccatcacacgttctggactttcagccaggagatgccttcgtgggtccgtaacatagncaaacatggttcctcctttcgacaaggtcaaatacggtnggcgtttggagcagccattgnattacggggggnttncaacctttaaggtggngancattntggtgaatagggcacagtgcatntgggtggggtcaaaagggcttntttnttttccccttagnntggaacaacttcccctgccttnatagnggncttgggnaaaanttttttcncnccaggnaaagggttttttananctttgggtttaaccctttaa

SEQ ID NO: 95911 - DNA, 952 bp, Arabidopsis thaliana columbia
gctggtacgcctgcaggtaccggtccggaattcccgggtcgacccacgcgtccggaagaagatcacggcggagcttcaggcagcctcgtcatcggacagcaaatcttttgatcccgtcgaacgaattaaggaaggcttcgtcaccttcaagaaggagaaatacgagaccaatcctgctttgtatggtgagctcgccaaaggtcaaagcccaaagtacatggtgtttgcttgttcggactcacgagtgtgcccatcacacgtactagacttccatcctggagatgccttcgtggttcgtaatatcgccaatatggttcctccttttgacaaggtcaaatatgcaggagttggagccgccattgaatacgctgtcttgcaccttaaggtggaaaacattgtggtgatagggcacagtgcatgtggtgggcatcaagggggcttatgtcatttcccccttgacggaaacaactcttctgacttcatagaggattgggtcaaaatctgtttaccagcaaaggcgaaagttttggcagaaagtgaaagttcagcatttgaagaccaatgtggccgatgcgaaagggaggcagtgaatgtgtcactagcaaacctattgacatatccatttgttagagaaggagttgtgaaaggaacacttgctttgaagggaggctactatgactttggtaatggctcccttgagcattgggagctccagtttggaatttcccccgttcattctatatgaactaacacatcaccatcaccatcgccaccaccaccatcacaaacatcatcatcgtcgtcatcatcatgatcagcatcttcatatataaatggtttacttctaattaagtgctacctggaatggtaaacaattacctgcaattaaccttctttgcggccccgaaatcgaaaaccaggttaaccaagccatcccaccccagggggggcc

SEQ ID NO: 95912 - DNA, 598 bp, Arabidopsis thaliana columbia
  unsure (1)..(598): unsure at all n locations
gagncccccaatcaacctgcttcccttaggtggaacattgggtaaaggcacagtcatgggggcatcaagggcctatgcattccccttggcggaacaaccctactgcctcaaagaggatgggtcaaaatctgttaccagcaaagtcaaaaggttttggcagaaagtgaaagttcagcatttgaagaccaatgtggccgatgcgaaagggaggcagtgaatgtgtcactagcaaacctattgacatatccatttgtgagagaaggagttgtgaaaggaacacttgctttgaagggaggctactatgactttgttaatggctcctttgagctttgggagctccagtttggaatttcccccgttcattctatatgaactaacacatcaccatcaccatcgctaccaccaccatcacaaacatcatcatcgtcgtcatcatcatgatcagcatcttcatatataaatgttttactcttatttaattgctacttgtaatggtatacatttacctgccattagcctcatttgcggccgcgaattccgtatccagcttaaggatcccgcttaccttcaggggggggccgggcccacaacccccaaa

SEQ ID NO: 95913 - DNA, 998 bp, Arabidopsis thaliana columbia
  unsure (1)..(998): unsure at all n locations
cctcctcgggtcgacggtatcgataagcttgatatcgaattcgcggccgccgccaatatggttcctccttttgacaaggtcaaatatgcatgagttggagccgccattgaatacgctgtcttgcaccttaaggtggaaaacattgtggtgatagggcacagtgcatgtggtggcatcaaggggcttatgtcatttcctcttgacggaaacaactctactgacttcatagaggattgggtcaaaatctgtttaccagcaaagtcaaaagttttggcagaaagtgaaagttcagcatttgaagaccaatgtggccgatgcgaaagggaggcagtgaatgtgtcactagcaaacctattgacatatccatttgtgagagaaggagttgtgaaaggaacacttgctttgaagggaggctactatgactttgttaatggctcctttgagctttgggagctccagtttggaatttcccccgttcattctatatgaactaacacatcaccatcaccatcgctaccaccaccatcacaaacatcatcatcgtcgtcatcatcatgatcagcatcttcatatataaatgttttactcttatttaattgctacttgtaatggtatacatttacttgcgatgagcttctttttcttcattatcccgggccgatcaatgtggccgatgtgaaagggaggcgcgtgaatgtttcactagcaaacctattgacatatcccatttgtgagagaaggacttntgaagggaacacttgctttgaagcgtaaatccattgtccttaggcttgttttccttggggtgaaaaagacttgaatttggcctcttcgnaactagctctgtatgnaccaatccatcatcatcancatcatcatgaccatccatcatcatcatcattattatcatcgnatataatatatatctacccccataatggtaatttgtnaatgtgncctttttaactgnanatggaggtaatctnntnccctcttct

SEQ ID NO: 95914 - DNA, 1162 bp, Arabidopsis thaliana columbia
aggacgcgtggtcttcccgttccatttatccgcaaacggagcttgttttcggtgcacctgcttcagccacttcaaacttgaactgagaaggatgggaaacgaatcatatgaagacgccatcgaagctctcaagaagcttctcattgagaaggatgatctgaaggatgtagctgcggccaaggtgaagaagatcacggcggagcttcaggcagcctcgtcatcggacagcaaatcttttgatcccgtcgaacgaattaaggaaggcttcgtcaccttcaagaaggagaaatacgagaccaatcctgctttgtatggtgagctcgccaaaggtcaaagcccaaagtacatggtgtttgcttgttcggactcacgagtgtgcccatcacacgtactagacttccatcctgggggatgccttcgtggttcgtaatatcgccaatatggttcctccttttgacaaggtcaaatatgcaggagttggagccgccattgaatacgctgtcttgcaccttaaggtggaaaacattgtggtgatagggcacagtgcatgtggtggcatcaaggggcttatgtcatttcctcttgacggaaacaactctactgacttcatagaggattgggtcaaaatctgtttaccagcaaagtcaaaagttttggcagaaagtgaaagttcagcatttgaagaccaatgtggccgatgcgaaagggaggcagtgaatgtgtcactagcaaacctattgacatatccatttgtgagagaaggagttgtgaaaggaacacttgctttgaagggaggctactatgactttgttaatggctcctttgagctttgggagctccagtttggaatttcccccgttcattctatatgaactaacacatcaccatcaccatcgctaccaccaccatcacaaacatcatcatcgtcgtcatcatcatgatcagcatcttcatatataaatgttttactcttatttaattgctacttgtaatggtatacatttacttgcgatgagcttcttttccttcattatccagttataaaataaataaataaatcatgtttactttcacagaaaaaaaaaaaaaaaaaaaaaaagggcggccgctctagaggatccaagcttacgtacgcgtgcatgcgacgtcaaagtcttgctat

SEQ ID NO: 95915 - DNA, 1461 bp, Arabidopsis thaliana columbia
  unsure (1)..(1461): unsure at all n locations
nnnnnnnnnnnnnnnnnnnnnnnnnnnnnnnnnnnnnnnnnnnnnnnnnnnnnnnnnnnnnnnnnnnnnnnnnnnnnnnnnnnnnnnnnnnnnnnnnnnnnnnnnnnnnncccacgcgtccgcggcggccgcagcttccataagagtcttagttctaactataaatacacatatctcactctctctgatctccgcttctcttcgccaacaaatgtcgaccgctcctctctccggcttctttctcacttcactttctccttctcaatcttctctccagaaactctctcttcgtacttcttccaccgtcgcttgcctcccacccgcctcttcttcttcctcatcttcctcctcctcgtcttcccgttccgttccaacgcttatccgtaacgagccagtttttgccgctcctgctcctatcattgccccttattggagtgaagagatgggaaccgaagcatacgacgaggctattgaagctctcaagaagcttctcatcgagaaggaagagctaaagacggttgcagcggcaaaggtggagcagatcacagcggctcttcagacaggtacttcatccgacaagaaagctttcgaccccgtcgaaaccattaagcagggcttcatcaaattcaagaaggagaaatacgaaaccaaccctgctttgtacggtgagctcgcaaagggtcaaagtcctaagtacatggtgtttgcttgttcagactcacgtgtgtgtccatcacacgttctggactttcagccaggagatgccttcgtggtccgtaatatcgccaatatggttcctccttttgacaaggtcaaatatgcaggagttggagccgccattgaatacgctgtcttgcaccttaaggtggagaacattgtggtgatagggcacagtgcatgtggtgggatcaaagggcttatgtctttccccttagatggaaacaactccactgacttcatagaggactgggtcaaaatctgtttaccagccaagtcaaaggttatatcagaacttggagattcagcctttgaagatcaatgtggccgatgtgaaagggaggcagtgaatgtttcactagcaaacctattgacatatccatttgtgagagaaggacttgtgaagggaacacttgctttgaagggaggctactatgacttcgtcaagggtgcttttgagctttggggacttgaatttggcctctccgaaactagctctgtatgaaccaatccatcatcatcatcatcatcatgaccatccatcatcatcatcattattatcatcgtatataatatatatctaccccatatgtaatttgtaatgtgcctttgactgtgatgagttatctctccctctctaccaactttcttcatatatataaaacaaaaaggaaaagcagatgatatagatctttcgtggtttaattatgaacaattgtctttattatttgtgtatcaaaaaaa

SEQ ID NO: 95916 - DNA, 525 bp, Arabidopsis thaliana columbia
  unsure (1)..(525): unsure at all n locations
atgatactgccnnnnnnnnnnnnnnnnnnnnnnnnnnnnnnnnnnnnnnnnnnnnnnnnnnnnnnnnnnnnnnnnnnnnnnnccacgcgtccgcccacgcgtccgcccacgcgtccgcccacgcgtccgagcaaaatctcactgctcaggaagagaagtctggactacttcagctctctgactcatcagaggactcttccaacatttatgtttttcagatttccacgacgaaccaatcaactatagacattgcctttgtctctggaataaaagaagaaacgtccaacatggaaaatcgtataatgagtcttacaggtttgccactctctagtctacttgaagagaaacatatagcatttaatgctaagttcaatgaatgcttcaacctttctgacaagcttgatcctgaaactttggtggttggtaaagcagcaatcgggaacatgcttggaggcattggttacttctatggtcaatcaaagattcattttcctaaaagtcctctggctaaaagtgaggatgatt

SEQ ID NO: 95917 - DNA, 630 bp, Arabidopsis thaliana columbia
  unsure (1)..(630): unsure at all n locations
cnnnnnnnnnnnnnnnnnnnnnnnnnnnnnnnnnnnnnnnnnnnnnnnnnnnnnnnnnnnnnnnnnnnnnnnccacgcgtccgcccacgcgtccggaaaaaagctttttcgaatctcgcttgctttttgtcgccatgagtctctttgggttaggaagaaatcagaagactttccgacctaagaagagtgcaccttctggaagcaagggtgcacagcttcgaaagcatatagatgccaccctaggaagtgggaacttgagagaagctgtaagacttcctccgggagaggatgcaaatgaatggcttgctgtaaacactgtggatttctttaatcaggtgaatttgctatatggcacccttaccgagttctgcacacctgataactgtcctacaatgactgctggcccaaagtacgagtatagatgggcagatggtgtacagatcaagaagcccatcgaggtttctgctccaaagtatgtcgagtacttgatggattggatcgagacccaactcgatgatgagactttatttcctcaaaggcttggagcaccatttcctcagaacttcaaagatgtggtgaaaacgatctttaaacggctattccgagtttatgctcacatataccactctc

SEQ ID NO: 95918 - DNA, 699 bp, Arabidopsis thaliana columbia
  unsure (1)..(699): unsure at all n locations
aacccacgcgtccgggattttgcttacattacatactattgccctcactgtaatgctctgaacaaaccgaagcattcagaggagaatgtacttcttcctgctatttccgcttcaccaatcacagactctctgccactgattgagaccagcgaagtggttaatagcagcagctcgagtagtgaacgtggaagtagccccactccagaaataaaagaggaagctgcaattactgagaccgggacaccgagctgaggaagatccagtgagctaagaagaaggcttagtcgtgttggtgctacagagaagagattttgtgtgtgcatgtgtgtttgtggatgcgagtactcattcaggtaatcttatgctatggattgctaatatatgaaggtgcttacagttttgattctggtttgtttctatacaacaagacaatagggttttggtgggtaaatatgcgattctactgtcgtaaacgacgattgttatacgttttgggggtttgaattctaattatcttttaccattacagattgtctctgtttctgttaaatgtattcactcttggatgatggatcattcccttttcgattttagcactacgagcctacacctttcttattaaaaaaaaaaaaaaaaaagnnnnnnnnnnnnnnnnnnnnnnnnnnnnnnnnnnnnnnnnnnnnnnnnnnnnnnnnnnnn

SEQ ID NO: 95919 - DNA, 806 bp, Arabidopsis thaliana columbia
  unsure (1)..(806): unsure at all n locations
ctcaggagtatttgggaaagaatctcaatgttaaagagcttgtcgagacgaaagaatcactctttatgggctcgattcgagtcaaccttaactactaccccatctgccctaatccggacctaacagttggtgttggtcgccactcagacgtctcttctctcaccattctcttacaagaccagatcggtggtctacacgtgcgttctctggcttcagggaactgggttcacgtgcctccggttgctggatcttttgtgatcaacatcggagatgcgatgcagatcatgagcaatggtctgtacaagagcgtggagcatcgtgtcttagccaatggttacaataatagaatctctgttcctatctttgtgaacccaaaaccagagtcagttattggtcctctacctgaggtgattgcaaacggagaggaaccgatttacagagacgtcctgtactctgattacgtcaagtatttcttcaggaaggcacacgatggaaagaaacccgtcgattacgccaagatctgatcataaataacctcaaggagttcgatgtctttttttttcgctggttttgtttcccgtttgtgttgtgttagtgaataaaagaacagagaagagagacataggtcatgtcttctggaaccagtttctctggtcaggattgcgttgtataaattgctgtcatccatcaatacagtttctcttttatcaaaaaaaaaaaaaaaaaaaagnnnnnnnnnnnnnnnnnnnnnnnnnnnnnnnnnnnnnnnnnnnnnnnnnnnnnnnnnnnnnnnnnnnngtacctaa

SEQ ID NO: 95920 - DNA, 875 bp, Arabidopsis thaliana columbia
  unsure (1)..(875): unsure at all n locations
nnnnnnnnnnnnnnnnnnnnnnnnnnnnnnnnnnnnnnnnnnnnnnnnnnnnnnnnnnnnnnnnnnnnnnnnnnnnnnngacccacgcgtccgcctacgggtcctcttttactttgtgaacgatggaccaacaaccggagaggcgagaaggccggagttttccggagcgtaaaggacagaagcggaagctagaggaaggagccgccgccgtagaagatcgagagatctctgccgtcagcaccgacggaggccaagcgcttcttagcgaggttgctgctcaagtctcggtactaaactctgccttctcttggcaagagtccgatcgcgctgctgccaagcgagccactcaagttctggctgagctagccaaaaacgaggatttagtgaacgtgattgtcgacggaggtgctgttccagctcttatgacgcatctacaggcgccaccatacaacgacggggacttggctgagaagccgtacgaacacgaagttgagaagggaagcgcttttgcgcttggtcttcttgctattaagccagagtatcagaaactgatagtagacagaggtgccttacctcatttagtgaatttgttgaacagaagcagagatggttctagctctcgagctgtgaagactgttatcacaagagcggctgatgccatcaccaatcttgctcatgagaacagcagtatcaagacccgtgttacggtagaacgcggtattccacctctcgtggagttgcttgaattttctgattcaaaggccagagagcagcagcagggnattgaganccttgcatttaaaatggtgntaccagatcngtagttgatgcatnccttcccactatcaagcaggtcangtncgcaaatatagggt

SEQ ID NO: 95921 - DNA, 412 bp, Arabidopsis thaliana columbia
  unsure (1)..(412): unsure at all n locations
gcgcaattacacttattttgctatcgtttgagcatctcaaaaatttctccggggagatttgttgggatatggactcttccacagagaagatgctcaaggtccctgaacaccaagttgctggtcacattgctagtgatgggaagctcggtccactcgtagatgaccaaggccggttcttcaagccacttcagggagattctcgtggcgaacacgaggctaagttctatgagtctttcacatcgaacatgaaggttccagatcacatccatagatacttcccggtgtatcacggcactcagctagttgaagcatctgatggatctggcaagcttcctcatctngttcttgatgatgttgtttcagggtacgcaaacccgtcggtaatggatgttaagattggatctaggacatg

SEQ ID NO: 95922 - DNA, 632 bp, Arabidopsis thaliana columbia
  unsure (1)..(632): unsure at all n locations
cactcatggtttctaggacagcacgtaacattgcccggttgaccatcgtgcttccgntccccaacttgaagncgttaggactgatctccaaagnggttntggaaagctgacccnccagngntagcncttactgacaactccattgtggatcaggctctcggaaagcatgggatcatctgcgttgaggatctcatccacgagatcatgactgttggacctcacttcaaggaagccaacaacttcctgtggccattccaattgaaggcaccactcggtggccttaagaagaagagaaaccactacgtcgaaggtggtgatgctggaaacagggagaatttcatcaacgagcttgtcaggagaatgaattgatgaaagcttccttctttatctttgcaaatttcaaagattttgggaccgagttttttttttttttttgttcaagttatcagagacttgtgatcttttatccgagataggctttttatgactaatcatgttattttccaatggcgggcttttaaattgatcttgaatttttattggctgttnnnnnnnnnnnnnnnnnnnnnnnnnnnnnnnnnnnnnnnnnnnnnnnnnnnnnnnnnnnnnnnnnnnnnnnnnnnnnnnnnnnn

SEQ ID NO: 95923 - DNA, 1075 bp, Arabidopsis thaliana columbia
  unsure (1)..(1075): unsure at all n locations
cggcannnnnnnnnnnnnnnnnnnnnnnnnnnnnnnnnnnnnnnnnnnnnnnnnnnnnnnnnnnnnnnnnnnnccacgcgtccgcttcctctctctcagacgagatttcctcttcatctcaagagaaatggctgaatccaaggtagtggttccagagtctgtgctaaagaagatcaagaggcaagaggaatgggcattggccaagaaagatgaagctgtagctgctaagaagaagagtgttgaggcccgcaagcttatcttcaagagagctgagcagtatgccaaagaatacgctgagaaggataacgagttgatccgattgaagcgggaggctaagttgaaaggaggtttctacgttgaccctgaggctaagttgctctttatcattcgtatccgtggtatcaatgccattgacccaaaaaccaagaagattctgcagctcctgcgtttgagacagatcttcaatggtgtgtttcttaaggtgaacaaggcaacagtaaacatgctgcgccgagttgaaccatacgtgacttacggatacccaaacttgaagagcgttaaggaactgatctacaaaagaggttatggaaagctgaaccaccagaggatagcacttactgacaactccattgtggatcaggctctcggaaagcatgggatcatctgcgttgaggatctcatccacgagatcatgactgttggacctcacttcaaggaagccaacaacttcctgtggccattccaattgaaggcaccactcggtggccttaagaagaagagaaaccactacgtcgaaggtggtgatgctggaaacagggagaatttcatcaacgagcttgtcaggagaatgaattgatgaaagcttccttctttatctttgcaaatttcaaagattttgggaccgagtttttttttttttgttcaagttatcagagacttgtgatcttttatccgagataggctttttatgactaatcatgttattttcccaaaaagaaaaaaaaaaaaagggcggccgctctagaggatccaagcttacgtacgcgtgcaggccaacgtcgtagctcttctatag

SEQ ID NO: 95924 - DNA, 376 bp, Arabidopsis thaliana columbia
  unsure (1)..(376): unsure at all n locations
gccgcttgcagnaccggtccgttttcccgggtcgcccatgcgttcgacaagctagtagctgaagtttgagagaaaaacaacttaccccggtgccatttttacggccatgtgtggtggtgctgaaattggtgaagcaatagccaaagacacacgcattcccttagtatcctttactggaagctctattgtggggggggtgggtacaacaacacgggggantgcgaagatataaggaaaactttggttgggggggggtggagacaatgcaatcatagtcatggacgatgctaatattcaggtagcgggttcatcttttctatttcgtggggggtgaactgctgggcaacgttcccaacttggccgaggctggttttct

SEQ ID NO: 95925 - DNA, 736 bp, Arabidopsis thaliana columbia
  unsure (1)..(736): unsure at all n locations
gacccacgcgtacggtttttttctctgatcttcgagttctgataattgctcttttttctctggctttgttatcgataatttctctggattttctttctggggtgaatttttgcgcagagatgggttcggcgaacaacgagtacgagtttctgagtgagattgggctgacttctcacaacttgggatcttacgttgctggcaaatggcaagccaacggacctcttgtttcaactctcaatcctgctaacaatcagccaattgctcaagttgtggaagcttctctagaggattacgagcaaggtttgaaagcttgcgaggaagcagctaaaatatggatgcaggttacggctcctaagagaggtgatatcgtcagacagattggggatgcactaagatccaaacttgactatcttggtcgtcttctttctcttgaaatggggaagatcccttgctgaaggtattngagaaggtcaggaagtaattgacatgtgtgattttgctgttgggttgagccggcaactcaatggatcggttataccttcagaacggccntaccacaatgatgtttgggntgttgnatncncttttggcattntttgnggttatcacaagcggtttaattttcccctgtgcaagttcttgggtttggaatgcccttgtanttgcccnttgcnttttnggaacctttttnaggcttggnaaggggntnccaccttaacccggtaatnacttttgg

SEQ ID NO: 95926 - DNA, 795 bp, Arabidopsis thaliana columbia
  unsure (1)..(795): unsure at all n locations
acgactcactattgggaaagctgacacgcctgcaggtaccggtccggaattcccgggtctacccacgcgtgcgagcagctcagctttcgtcttctccgtcaatccaataaaaaaatcagcaaccgttgtttgtttttaagctttttttacaaaagacgtacacgtctctctctctcactccctctttaagatcagaagctcatttcttcgatacgatcaaccattagagatgggttcggcgaacaacgagtacgagtttctgagtgagattgggctgacttctcacaacttgggatcttacgttgctggcaaatggcaagccaacggacctcttgtttcaactctcaatcctgctaacaatcagccaattgctcaagttgtggaagcttctctagaggattacgagcaaggtttgaaagcttgcgaggaagcagctaaaatatggatgcaggttacggctcctaagagaggtgatatcgtcagacagattggggatgcactaagatccaaacttgactatcttggtcgtcttctttctcttgaaatgggaaagatccttgctgaaggtatttggagaagttcaggaagtaattgacatgtgtgattttcctgttggtttgagccgacaactcaaactgggttcggtaatacccttcagaacggcctaaccccatgttgttgggatttggatccncttggcattnttngggtatcncagcgttaatttncccgtgcagttctttggttgnatcctnatttcccttntttngaacttttagctgnaagncccactgc

SEQ ID NO: 95927 - DNA, 670 bp, Arabidopsis thaliana columbia
  unsure (1)..(670): unsure at all n locations
ggtaaagcagtcgaaggtgaaggaaactttgtggagcctacgataatcgagatatcagcagatgctgctgtcgtcaaagaagagctatttgctccggttctatatgttctaaagtttaagtcatttggagaggctgttgcgataaacaactcggttcctcaaggtctaagcagctcgatattcactcggaaccctgaaaacatcttcaggtggatcggaccactgggaagtgactgtggcattgtgaatgtgaacataccgacgaatggagctgagattggtggagcttttggaggcgagaaagcgactggtggtggtcgtgaagctggaagcgactcatggaaacagtacatgcgtcgatcgacttgtaccatcaactatggaaacgagttacctctagcgcaaggaattaacttcggttagatttttcagagatttactcgttaattaataatgttatgttggttcgatttcgatacttgtattgtatgccttgttctctccaagcctttgacttaagatgattacgcttttaatatatataaaaaaatattgaattaataaaaaaaaaaaacccaaccaaaaaaaaaagcggccgctctagaggatccaagcttacgtacgcgtgcatgcgacgtcaaagtcttctataagtcacctaatcaattnn

SEQ ID NO: 95928 - DNA, 816 bp, Arabidopsis thaliana columbia
  unsure (1)..(816): unsure at all n locations
atgatatgccnnnnnnnnnnnnnnnnnnnnnnnnnnnnnnnnnnnnnnnnnnnnnnnnnnnnnnnnnnnnnngcttacctccacgcgtccggtcaaaatcggcaatcctcttgagaaagggacattgttaggaccattacatactcctgaatcaaaaaagaactttgagaaaggaattgaagtcatcaaatcccagggtggtaaaatactaacgggaggtaaagcagtcgaaggtgaaggaaactttgtggagcctacgataatcgagatatcagcagatgctgctgtcgtcaaagaagagctatttgctccggttctatatgttctaaagtttaagtcatttggagaggctgttgcgataaacaactcggttcctcaaggtctaagcagctcgatattcactcggaaccctgaaaacatcttcaggtggatcggaccactgggaagtgactgtggcattgtgaatgtgaacataccgacgaatggagctgagattggtggagcttttggaggcgagaaagcgactggtggtggtcgtgaagctggaagcgactcatggaaacagtacatgcgtcgatcgacttgtaccatcaactatggaaacgagttacctctagcgcaaggaattaacttcggttagatttttcagagatttactcgttaattaataatgttatgttggttcgatttcgatacttgtattgtatgccttgttctctccaagcccttggctttaggcggccgaaaattcaaacagccgggtggatccactagttaatagagcggccgccaccgcggtggagctcccttaccgta

SEQ ID NO: 95929 - DNA, 1067 bp, Arabidopsis thaliana columbia
  unsure (1)..(1067): unsure at all n locations
gggccggttcggaattcccgggtcgacccacgcgtccgcggattatgagctcgctaggaagcacctgaaatatgtttgcatgttacggctcctaagagaggtgatatcgtcagacagattggggatgcactaacatccaaactggactatcttgggcgccttcttcctcttgaaatgggaaagatccttgctgaaggtattggagaagttcaggaagtaattgacatgtgtgattttcctgttggtttgagccgacaactcaatggatcggttataccttcagaacgccctaaccacatgatgttggagatgtggaatcctcttggcattgttggtgttatcacagcgtttaattttccctgtgcagttcttggttggaatgcttgtattgctcttgtctgtggaaactgtgtagtctggaaaggtgctccaactacaccgttaataactatcgcaatgaccaagctagtagctgaagttttagagaaaaacaacttacccggtgccatttttacggccatgtgtggtggtgctgaaattggtgaagcaatagccaaagacacacgcattcccttagtatcctttactggaagctccagggtgggctcaatggtacaacaaacagtgaatgcgagatctgggaaaactttgcttgagttgagtggaaacaatgcaatcatagtcatggacgatgctgatatacagttagcggctcgatctgttctattcgctgcggttggaactgctggtcaacgttgcacaacttgccgtaggctgcttttgcatgagagtgtctatgacaaagtactcgagcaactgcttacctcatacaaacaagtcaaaatcggcaatcctcttgagaaagggacattgttaggaccattacatactcctgaatcaaaaaagaacttttgaggaaaggatttgaagtcatcaaatcccagggtggtaaatncttancggggggtaaagcatcggaggttaaggaaactttttgggnccccggntatcggggnttccncanattntttttttngcaaaaanggggttttttccccgnttttttt

SEQ ID NO: 95930 - DNA, 348 bp, Arabidopsis thaliana columbia
  unsure (1)..(348): unsure at all n locations
tttnggnggncctngtaaggaattcntgggtcgacccactcntccgatttgtaataatcttcgtagaaaaaatggattctgattcttggagtgatcgtctcgcatcggcttcaagaagatatcagctcgatttcttgtctcgatctgacaatttcttggggtttgaggagatagaaggagaagatgacttcagggaggagtatgcttgcccgttctgttcagactattttgatatcgtctctctatgctgtcacctaaattcaattcacccatggtacccggatcctcgaattcagcttggacttaaccaggctgaacttgctcaaaaggtggggactacccaccaaa

SEQ ID NO: 95931 - DNA, 888 bp, Arabidopsis thaliana columbia
  unsure (1)..(888): unsure at all n locations
gatgtctttcactctctctctctctctatatccaaagaattaaaaaccataataaaaaaagaagataaaaggacgaattccagaaaaaaaagacgcaaaatcgtcgtcgtcgtcttcgtctttgcatttcgtcggaatcttttgattcttgaatcggaatatctctgtttttgttttatccggactcaagatcaattcggattcttggaatttatttgattttttgttgttgttgttgaaaaagtggattctttggtttcgatttgtaataatcttcgtagaaaaaatggattctgattcttggagtgatcgtctcgcatcggcttcaagaagatatcagctcgatttcttgtctcgatctgacaatttcttggggtttgaggagatagaaggagaagatgacttcagggaggagtatgcttgcccgttctgttcagactattttgatatcggctctctatgctgtcacattggtgaagatcatcctatggatgcaaaaaatggggtatgtcccgtttgtgcggtgaaagtgagctctgatatgattgctcatataaccctacaacatgcaaatatgttcaaggtgacgcggaaaaggaaatcaagaagatgcggggctcaatccatgctatcgatcttgaagagagagtttcctgatggaaattttcagagcctatttgaaggaacatcacgtgctgtatcctcttcttctgccagtatagctgctgatcctttactgtcttcattcatttcaccaatggctgatgactttttcatttctgaatcaagtctatgttgcanaacaccaatttctgccccagaaaaacattggaatcccaaattttgccctgaaaagggaaatgtttgaaaaaaaccatttctcctttt

SEQ ID NO: 95932 - DNA, 552 bp, Arabidopsis thaliana columbia
  unsure (1)..(552): unsure at all n locations
cattttcagacgaaagcaatcagaaactcaggtgaatcagaagcatgattcgagttacgaaaccaaaagcgatcatcgaatcactgagttaccatcttatccaaagatgctccgcaagtggaactcctaaaggaaaagcaaagctgaagacaggtcagccattgaagcgtaacaaactctccatcaagaaaggtggtggcggcggcggagcacctgttgaaggagaggaagcagttaaaggaaaaggtagaatttccgatgagaagcagaaactctacgagcaatgcttaaacgctccttgtcctgttcgctacttgaccccccaagagatcgagcgtgaggcgcaacgtgagaagctaggtttgattagtaaagagaacaacgagatatggagatccagaagaaaggaggagtatgcttgcccgttctgttcagactattttgatatcgtctctctatgctgtccctaaattccattcacccatggtacccggacctcnaattcacttggacttaaccaggctgacttgctccaaaggtggggatccccac

SEQ ID NO: 95933 - DNA, 638 bp, Arabidopsis thaliana columbia
  unsure (1)..(638): unsure at all n locations
nnnnnnnnnnnnnnnnnnnnnnnnnnnnnnnnnnnnnnnnnnnnnnnnnnnnnnnnnnnnnnnnnnnnnnnntactacgggtggggggtgtccctccgccgtagtttcgcgagctctatacgactcacttatagggaagctggtacgcctgcaggtacccggtccggaattcccgggtcgacccagcgcgtacgatcaggcaccatgaaacagagtaccttgcatctttagaggtagcttattcaaaattaccggataacactttcaaggatttgaggaggaaacttccggtgacacgaactctgttcccatggcagaacactttacagttcagcctaacaagagaggtcgagaaagaacttggacttggcaagtgactaatcatcaactcgcaaccttttgagtgctatatttcgttgtcaaagtttctgtgatttccattatgtaagtgaaggataagtattatttcctgttgtgtcttgtctttcctttggagtaatgtatacaaatcgcattagtaagtatgatacgatattggtccgcaaaaaaaaaaaaaaaaaaaaagcgcggccgctctagaggatccaagcttacgttcgcgtgcatgggacgtcatagtattctatagttcgcctaaa

SEQ ID NO: 95934 - DNA, 1145 bp, Arabidopsis thaliana columbia
gaatatcgacggcgacaatttctctctccggctaacttttttctagagaaagctatggcggacgaagaagatgagttactggagacagaactaagttacgaccagaaaaaggaaatcgccaagtggtttttcctcaacgctcccgctggagaaatcaattacgtcgctaaagatttaaaggcggttttgagcgatgaggaagtgtacaatgaagcagccatggaagcatttccagtgtacaacaaaactcacatgatttgccttgaaatgcccagtggagctggtgatgtgattgtctcatcttacagtgaaattaatgaaaatgagtaccttgatccaagaactgcccaggttgccatagttgatcatgttaaacagatttgtacaaaggtacggcctgcaaatgatgaagaacttccttctttgtatattgaggagtacagatatgctcttgatgctgaaatccagagatatgttagtgaatcttatccgaaaggtatgtctgcagttaattgtgtgaaagggaaagatactgagggtccagggtccgactttgagcttgttgttataattactgctatgagacttagtccccagaacttctgtaatggaagttggagatctgtatggaacatagatttccaggatgaatcccaggtgcttgacataaaagggaaattgcaggtaggagctcattattttgaagagggaaatgtggaattagatgcaaaaaaagatttccaagattcaacaatatttcagtctgcggatgactgcgcgattgccatagccaatattatcaggcaccatgaaacagagtaccttgcatctctagaggtagcttattcaaaattaccggataacactttcaaggatttgaggaggaaacttccggtgacacgaactctgttcccatggcagaacactttacagttcagcctaacaagagaggtcgagaaagaacttggacttggcaagtgactaatcatcaactcgcaaccttttgagtgctatatttcgttgtcaaagtttctgtgatttccattatgtaagtgaaggataagtattatttctgttgtgtcttgtctttcctttggagtaatgtatacaaatcgcattagtaagtatgacagatattgttccgc

SEQ ID NO: 95935 - DNA, 277 bp, Arabidopsis thaliana columbia
agaaggtttgctatattatctggacctactatacctataattggtgaaggtgatgaagaggctaatgataggtatgtagagcaacgtggcggcaagtgccgaagctgctgtagaggaagtcgtcaggcgtggagtggctgatcgaagcaaaattgcagttgggggacactcctatggagcttttatgactgctaatcttcttgctcatgctcgctatctttttgcctgctggtttgccagatctggtgcttacaacagaacacttacgccctttgtt

SEQ ID NO: 95936 - DNA, 712 bp, Arabidopsis thaliana columbia
cttcttcgacgacgttggttcttcttcctttgtcctgcgccgcgatctctccttctccaacttccctcgtcctgtccaaagaaaatgccaaaggttaaaactaaccgagtcaagtacccagaaggatgggagttgatcgagcctactcttcgagagcttgatgccaagatgagagaagctgagactgattcacacgatggtaagagaaagtgtgaaactttatggccaatcttcaaagtttctcatcagaggagtcggtatgtatatgacctttattaaccgaagggatgaaatatctaaagagctctatgagttctgcttggaccagggctatgcagatcgcagtctgattgccaaatggaaaaagtcgggatatgaacgtttatgctgcttgcgctgcatacagccaagagaccacaactatggaacaacatgtgtatgccgtgttcccaaacacttgcgtgaagagaaagtggtcgaatgcgttcactgcggctgtcaaggatgcgcgagtggcgattaaattcaacatagctttattcgctatctctgactgtttgttacaatcttgtcacttgttaaatctggattctgtagtattccataaaggctttaaaaccctgactaaaaatccccttgctcgtacttatcaactctgggtggtattgcaaataaaaagaacgttccggtttggtatataattgaaagtaaa

SEQ ID NO: 95937 - DNA, 525 bp, Arabidopsis thaliana columbia
  unsure (1)..(525): unsure at all n locations
atgatactgccnnnnnnnnnnnnnnnnnnnnnnnnnnnnnnnnnnnnnnnnnnnnnnnnnnnnnnnnnnnnnnnnnnnnnnnccacgcgtccgatttcgtagtccccagtttcagcattcaaatgcccctccaagtgaaaacttatttccaggcaggcaacatcagagaactacatcttctgggagtgtcagatcagttgacagtaatttcatgtctatcaagtcatatacttcgggtggtttaggggaggccgtatctgaaagtcgtcaaaatacaggaagccagcaaggtaaaacatctaatcatgttcctttagtagcagagtcgacaaaggctcctatagatttgtttcagttgccaggagcgccagtggctcaatctgtcgatacatttcaaccttcaatagcaccccgatctccacctgggaatcttcaacaagctccacagacctactcttttcccccggcaaattcggttgcgggaaattgggggccgccccccccttaaaaccataaaattgggcg

SEQ ID NO: 95938 - DNA, 523 bp, Arabidopsis thaliana columbia
aatagagagagagcgatacaatggcgatgacacttatgaacagagcaatctctagaaccgaaactgttggtgctttcagtctctcgcttagtctcttaagaaatttctctgcggcgccgtcggcggcatctactccggcgagtgaaaaccctagctccgattcgaataaacctaaacgaagaaagaagaaaaacttaatcgaagtcgctcagttcttacctaattggggaatcggataccatatggctaaagctcactggaatggaatctcttatgaaatcactaagatcaatctctataaggatggtagacatggaaaagcttggggaattgttcacaaagatggattgcgagctgcgggagctccaaagaagataagcggagttcacaaacgttgttggaagtatatcccaaacctgtcaaaggctactcctgcaacaaccactgctgatgttcaagctgcctgacctgtttacttccattgctgtgggtacttcttgatctatctgtttgcggcttcttt

SEQ ID NO: 95939 - DNA, 597 bp, Arabidopsis thaliana columbia
  unsure (1)..(597): unsure at all n locations
caanggggcggtcnatgngtcccttttacgggcaacntgaccgacnttgggttcagcccccgctngccnttaaaattctctgcgcccntcggcggcattncnccgngngngaaaccccttncnccgatcggattaancctaaccggagaaaggaggaaaaaccttaatcgaagtccgctcagtcttncctaattggggnatcggattcccatatgggctaaagctcnactggaatggaatctcttatgaaatccactaagatcaatctctataaggatggtagacatggaaaagcttggggaattgttccacaaagatggattgcgagctgcggaagctccaaagaagataagcggagttcacaaacgttgttggaagtatatcccaaacctgtcaaagactactcctgcaacaaccactgctgatgttcaagctgcctgatctgtttacttccattgttgtgggtacttcttgatctatctgtttgcggtttctttttattgggaagaagatacagttgttgtgacttgatagtttctttgaattcgtcgatagctttgtaggaaatgatccataatctacggatgatgaccgagt

SEQ ID NO: 95940 - DNA, 383 bp, Arabidopsis thaliana columbia
atactctctgcgtctctaactcctcgtgcactctgacatcacagatatggcttgtgttcggtcgattgactctttaacttctggcaaccattctcaacgaaatgttcctcgctcacgcattgtcttatcttcatgctctgttcttcccatcaaaagctcatctttcactggatcccctgtttctctcccgcgggctcaaccatcatcccgaacagctctaagaccgatgaaacccgtctctatcacgatgatggtaaagccggcgctccaattcatccaagggacggatgagatgacaatcctctgatgttaaggttgactcgatcaagagacgggaagcaacgggaatggcactgttctcttttggaccaaccatacgtttt

SEQ ID NO: 95941 - DNA, 604 bp, Arabidopsis thaliana columbia
  unsure (1)..(604): unsure at all n locations
accgaacgattgaagttaaccaagccagcaagcaacccaattcttctatttcttcttcacctttagatttttcctcgcttaatttctcaataacgctctcagagagaccatttgatgaagcttctcgcttctggaatttgaaaaggatttgataagacgagttcatagaagattaccgcaagttcatcaactttttgaacttgttatggagataatctcactgaacgttgtgccccagtgctctgtggttacttggagtagtaaattagcaacgaaaagattggtcccaaatcggtcaagtttgttattctcaggggtcaaaaaatccagacttgtgattcgaagtggaaattccgatggttatgttgttggtgagaatgatgactttgggtcggatagccagaagaggggatcaacggcaaaggtttttgattcctgggtttcccnatggatcaaatgggggaaattctngctcggatnagtcattcttcactcggggtggaagcccaannttgggnccattttgggaanccgttttgcaatncggncnccncgggggttttttncccggtttgggtggccattnnctttggngganttccct

SEQ ID NO: 95942 - DNA, 750 bp, Arabidopsis thaliana columbia
  unsure (1)..(750): unsure at all n locations
cggacgcgtgggtttttcctcgcttaatttctcaataacgctctcagagagaccatttgatgaagcttctcgcttctggaatttgaaaaggaacttgttatggagataatctcactgaacgttgtgccccagtgctctgtggttacttggagtagtaaattagcaacgaaaagattggtcccaaatcggtcaagtttgttattctcaggggtcaaaaaatccagacttgtgattcgaagtggaaattccgatggttatgttgttggtgagaatgatgacttgggtcgtatagccagaagaggagaatcaacgtcaaaggttttcgattcctggtttgcctgatgaatcaaatggtgaaattgctgctcgaatcagtcattctcactgcgagtggaagcccaagcttagagtacattatgagaaagccggttgtgacaatctcgatgctcctgcggtgttgtttcttcctggctttggcgttgggtcatttcactatgagaagcagcttaccgatttgggaggggattatcgagtatgggctattgattttnttggacagggtttatctctccctacttaagatccnactaccatgactnaagnaacccagttcctcggaaggtaaggnaccntttttgggggtttggtgacaaaaaattgacccggggnttancaaacttnanttcncncnngttctnttggggggcccaagnccngaattttttagaaggggttttcgggggccctttt

SEQ ID NO: 95943 - DNA, 864 bp, Arabidopsis thaliana columbia
ccgtttgcagtaccggtccggaattcccgggtcgacccacgcgtccgctaatggcaaacttgggatgggagctatgaagctaggtcggttagccaaaagtttagcaggtgacgtaaatgggaaacggcgagaaaaaggacttctccctagatcagttagagctggaataattggataccctaatgttgggaaatcatctctgatcaatcgtctattgaaacgaaaaatttgcgcagcagctccaagaccaggtgtaactagagaaatgaaatgggtcaagcttgggaaagatcttgatctcttagattcacctggaatgcttcctatgcgtatcgatgatcaagcagctgctataaagctggcaatttgtgatgacattggagagaaagcttatgacttcactgatgttgctggaatccttgtgcagatgttagcacggattccagaagtaggcgcaaaggctctttacaaccgatacaagatccagctagaaggcaactgcgggaaaaaatttgtgaagacgcttggtcttaatttgtttggtggagatagtcatcaagctgcatttagaatactaacggattttcgcaaaggcaaattcgggtatgtctcgttggagagacctccactgtgatccaagttagtaagagatatgctcaaacttatgtgttaatttatgtatgcaatatatgtcttgatgtatgcatacttgtgtattccggttgtcttagaggacatgataaatactagatatagacccaatccatgacgacatcagtcagaagctgctaaatgctaaccctttttctcttaagcccaaatgtatgaataatttgttcatgtaaaatatggttaatttttttt

SEQ ID NO: 95944 - DNA, 409 bp, Arabidopsis thaliana columbia
  unsure (1)..(409): unsure at all n locations
aacgattcanccagagatggattgatnccctatccgacccacgcatcacgcatgaaatcngcagtatctggttcttttactggtctcaggtctgaaatcttgatctctggttactgtcattgtctcgttcttcaagtctcagccgttgaaaagttgtcaagttttaaacatttttgactgattggttaaaaatgtgtgaaacaggctgataagtctttgggacagaagctggcaagccgtctgaacgtgagaccaagcatctaaaacgggtgaaagaattctggattggcctttctgtggttgttaattagcagagaaaagnaaatgggaagagatcaaagttgcgataatacaatcttcatcatgtggatcttctgtgctatgttataatagtatctgtttaaagacc

SEQ ID NO: 95945 - DNA, 1874 bp, Arabidopsis thaliana columbia
acgactcacatagggaaagctgctacgcctgcaggtaccggtccggaattcccgggtcgacccacgcgtccggcggatttgataaaaatctctgaatctctccaagctctcttctcatcaaaccatggatccttacaagtatcgtccagctagttcttacaactctcccttcttcaccaccaactctggtgctcctgtatggaacaacaactcctccatgaccgttggacccagaggtcctatccttcttgaggattaccatctcgttgagaagcttgccaatttcgacagggaacggattccagagcgtgtggttcatgccagaggagccagtgctaaaggtttctttgaggtcactcatgatatctctaacctcacttgtgctgactttctccgagctcccggtgttcagactcctgtcattgtccggttctccaccgttatccatgagcgtggaagtcccgagaccttgagagaccctcgtggttttgcagtcaagttctacaccagagaggggaactttgatcttgttggaaacaactttcctgttttcttcatccgcgatgggatgaagttccctgacatggtccacgctcttaagccgaacccaaaatctcacatccaagagaactggagaatccttgacttcttctcccaccaccctgaaagtttgaacatgttcactttcctcttcgatgatatcggtatcccacaagattacaggcacatggatggttcaggtgtcaatacatacatgttgatcaacaaagctggcaaagctcactacgtgaagttccattggaaaccaacttgtggagtcaagtctcttttggaagaagatgcaattcgtcttggaggaaccaaccacagtcatgcgactcaagacttgtatgactctatagctgctggaaactaccctgaatggaagctctttatccaaatcattgatcctgctgatgaagacaagttcgactttgacccgctcgatgtgaccaagacctggcctgaggatatcttgcctcttcaacctgttggacgtatggtgttgaacaagaacattgacaacttctttgcagagaatgagcaacttgctttctgtcctgcaattattgtcccagggatacattactcagatgataagctgcttcaaacccgtgtcttctcctatgccgatactcagagacaccgtcttgggaccaaactaccttcagctgccagtcaatgctccaaaatgtgctcaccacaacaaccaccatgagggattcatgaatttcatgcacagggacgaggaggttaactacttcccgtcgaggtatgaccaggttcgtcatgctgagaagtatccaactccgcctgctgtctgttctggaaaacgtgagaggtgcattattgagaaagagaacaacttcaaggagcctggagagagataccgtacctttacaccagagaggcaagaacgattcatccagagatggattgatgccctatccgacccacgcatcacgcatgaaatccgcagtatctggatctcttactggtctcaggctgataagtctttgggacagaagctggcaagccgtctgaacgtgagaccaagcatctaaaacgagtgaaagaattcttgattggcctttctgtggttgttaattagcagagaaaagaaaatgggaagagatcaaagttgcgataatacaatcttcatcatgtggatcttctgtgctatgttataatagtatctgtttaaagaccaaaagaaccttgtgtgttgttgtgtctctcgtttatcagaataatacattatacattgaagatttataatccgtggtgttacttgatgaaagctccttcttccttgaaaaaaaaaaaaaaaaaaa

SEQ ID NO: 95946 - DNA, 1989 bp, Arabidopsis thaliana columbia
cccacgcgtccgcacgcctctaatctccgcgcacacacacacaccctcacgaagaagaagaagacgaagaagaatcaatggcttctgttatctcttcctctccttttctatgcaaatcatcctccaagagtgatttggggatttcttcgtttcctaaatcttctcagatttcgattcatcgatgtcagaagaaatcgatctcacggaagattgtttccgttatggctcctcaaaaggatcggtctcctggaactacaggatcggtgaaaactgggatgacaatgacggagaagattctagctagagcttcggagaagtcattagtggttcctggtgataacatttgggttaatgttgatgttcttatgactcatgatgtttgtggtcctggtgcttttggtatcttcaagagagagtttggtgaaaaagccaaggtttgggatccggagaagattgttgtgattccggatcattatattttcactgctgataagcgtgcaaaccggaatgttgacatcatgagggagcattgcagggaacagaatattaagtatttctatgatatcactgaccttggaaattttaaggctaatcctgactacaaaggtgtttgccatgttgcacttgcacaagaaggtcattgcaggccaggagaggttttgttaggaacagactcacacacttgtactgctggagcatttggtcaatttgctacagggattggaaacactgatgcaggttttgtgttaggcactggaaaaatcctccttaaggttccaccaacgatgaggtttatcttggatggtgagatgcctagttatttgcaagcaaaggatctgattttacaaattattggtgaaatatctgttgctggtgcaacttacaagacgatggagttcagtggtacaactatcgaaagtctgagtatggaagaaagaatgacattgtgcaacatggttgtggaagctgggggaaagaatggtgtcatccctcctgatgcgacgacattaaattatgttgagaataggacatctgtaccatttgagccagtatatagtgatggaaatgcaagctttgtcgcagattatagatttgacgtgtcaaagctggagcctgtggtggctaagcctcattctcctgacaaccgagctctagctagagaatgcaaagacgtgaaaattgacagagtatacatcggttcttgtactggtgggaagacagaggattttatggctgcagctaaacttttccacgcagcaggaagaaaggtcaaagttccaactttccttgtcccggctactcagaaggtgtggatggatgtgtatgctctcccggtacctggagcaggtggaaagacatgtgcgcagatctttgaagaagctggctgtgacacaccagccagccctagctgtggtgcttgccttggtggcccagcagacacctacgctcgcttgaatgaacctcaagtgtgtgtctcaacgacaaacaggaacttccccggtcggatgggacacaaagaagggcaaatttacttagcgtctccttacactgctgcagcctcggctttaaccggccgtgtcgctgacccaagggagttcttgcagtaggctaatgtaatggcttcgtgtgaaaaatcatatgctatgcatcgacgaaatattgctaaatgatggggcattgtgaactatatgtatgtattttccttatttcgctgttggacttgatagtttcaagcactatgtcaaactttgatgttttgagtttgaaataataaaagagagaaaaagagtgagttagataagtcaaaagcttaaaagctaatatctccatgaccccattagtgatttgatcgcaaaagttaattattgaaaacttggtgaaattttgctatcgaagataaatcatgcggtatcttcctttctggtttcgcaaaagctagctatgcgtcatataacattgttattcacttattctgaaaatttctaaaat

SEQ ID NO: 95947 - DNA, 889 bp, Arabidopsis thaliana columbia
  unsure (1)..(889): unsure at all n locations
gnnnnnnnnnnnnnnnnnnnnnnnnnnnnnnnnnnnnnnnnnnnnnnnnnnnnnnnnnnnnnnnnnnnnnnnnnnnncttttttttttttttttagactaaagtagctcatgtatgcttcaaactgaatccaacaatgccacaaacaaagcagatacaacaaatgcagagtttcgatatattcacattcacatcttcttgttccatgatttaaaccctatcaaacaagagcttatggatccaattaagctctgtttctctgcaccacaatacaaatctttaagcttgagctgcaatcaattaagcttctgctcaatgtaacactctctctctgattgtactaagctatcttcatcatcatcatcgtatctcacatttccttcatagaattgtctcaattcatcacccattctcaatcctctcataaccatctctttcacaacaatcatcgcttcttcatacctcttcctcttcacaagcttaccagccaaaaaaccaaaactctcactatccaacctcaaatcttttccggcgtaagccatcacaaactccaaacccagcgcataatagcctccctccactaaccccgttataacgtgcgcatgcgtcgagtacaacacagtcacaccatcctcctccatcctcctcaatatcgccatcgccgcttccactttacccgccctacacgcgccgagcacaagcgcgtcgtagctacgcgaatccggcgaattcccgtcttcttcaatcttacgcatcacctcgctagccgattccaattcgccgtcgtaacaatgcgaagtaaggaagtaattgtacgccgtcacatccatcgaaaccggtttggatctcattgattcaacaaactttgaagctgttttcgattttgtact

SEQ ID NO: 95948 - DNA, 707 bp, Arabidopsis thaliana columbia
agagccatgtgatgtgatcgaaacaaaaagctctttgcttcttcttcgtccatttctcgtagcacacttttcacaaagaagatgggttcttcacaatctacgcaaatggaagacgaagaagaagaagaagaggaaactgacaatgaagaagaagaagaagaagataatggcagatcaaacacaagacaattagacaatctcctagtaaagaaagttctagaacaagagcctgagatgttaccatgtcacgcttcagcttcaccactctcaccacaactatcatctctcggtactccaaggcttggaccatcgattaaagtctgggatccttacaacgtcctctctccgccgccgcaaccgccgtctatcttctctcgaatcgtgtctggtgatgaagatcgagctgtgacagaggtttatctgattagccatggtgagtctgatcttaatcttaaacctgatttgattggtgggagatgtcatgtagctgctcttactgctaatggtaaacgtcaagctagggctcttgctgttttcttcaaatctcaaggcgttcggtttaattcggtttattcggcacctctagatcgagctagatccatggctgtttctgtttgtcaggaaatgagttttccggaggagcatgtacaatcttcggatgctgttattgagatgagtttaggggattgtgaaggctgtaatcaagc

SEQ ID NO: 95949 - DNA, 384 bp, Arabidopsis thaliana columbia
  unsure (1)..(384): unsure at all n locations
ancncacagaaacnanaaannanaaattnnanttttttttttaatttataagatctcaataattgaacattgataaccaactagtggcagagttacatatattataacaattcttatgtcaaaaacacatatataacaacagcaatgcaaaagcttaatcatataatttacttgcctcggccaaaaagcttccaattttggcaatttcttggatcttaccttcatgtgttgatgtcgtttgtgtctctagcgcatcttgtaatggtgtcacagcctctgctgtaagaattagcttgtccagagcgacaatcgtagtaagaagctcctggtttctgacaaggaaccatgtctctccttaacggttcgtaaccgatgtaccgtttt

SEQ ID NO: 95950 - DNA, 510 bp, Arabidopsis thaliana columbia
  unsure (1)..(510): unsure at all n locations
tttttctttatggaagaagacgggtctgattggggcggattggctccagagatactcatcaacatcatttcaaggcttacgattcaggagctatggaccggtccgatgttcgtccaaaaatcgtggctaactgtttgcagagatccgtatctctggtctatcttcgatctggagccatggttcgattcctatcccgagtcgactcacttgtggtcccctgagttcgagcagaaggtagacttaatgctacgatcagtcgttgattggagcgaaggtggtctcactgagatccgcgtccgccattgcagcgaccacgctctctcttacgcagccgatagatgcccgaatctacaggttcttgncattagangcagtcctaaacgtgacaanacgnatngatgncgnagatagcgtttcggtncaggagtttaaaaggaacttgatattnagttanttnacgnggtantcttacgncaactcttntnnnttntttggtngnaacttncctat

SEQ ID NO: 95951 - DNA, 557 bp, Arabidopsis thaliana columbia
  unsure (1)..(557): unsure at all n locations
cagctcnnnnnnnnnnnnnnnnnnnnnnnnnnnnnnnnnnnnnnnnnnnnnnnnnnnnnnnnnnnnnnnnnnccacgcgtccgaaagaaacatttgcaaaaaaaaaaaaaaaagagaggcaaagatctcgagagatttcaattttcaatggagaaagtgaatcaaaccttcttcttatctcatggatctccaactttgagcatagatgattccttggaagcgagacaattcttcaaatcatggactcaaaaagttcttcctcaaaaacccaaatcgattttagtcatctctgctcattgggacaccaaattcccatctgtcaacactgttcttcgcaataacacgatccacgatttctctggcttccctgatcctatgtacaagttgaaatatgaagcaccaggagcaattgaattagggaaaagggttaaagagttgttaatgaaagaaggaggaatgaaacgtgttgatgaagatacaaagagaggacttgatcatggagcttgggttcctcttatgttgatgtatccagaagctgatatacccatttgtcaact

SEQ ID NO: 95952 - DNA, 555 bp, Arabidopsis thaliana columbia
aatacgactcactttagggaaagctcgtacgcctgcaggtaccggtccggaattcccgggtcgacccacgcgtccgcagaggtgtaacgaaaacgctagaacaataactttgatcgttcttcttcttctcttgaatcggaaacaatggcggatgaacataagcatgaagaatcttcacctaatttggatccagcagtggaggttgtagagagggaatcgttgatggagaagttatcggagaagatccatcacaaaggtgattcgtcgtcttcatcatcatcagatgacgaaaacgagaagaagtcttcgtcatcgtctccaaagtctttgaaatcgaaggtttatcgtttgttcggaagagagagacctgttcataaggttctcggcggcggaaaaccggcagatatatttatgtggaaggacaagaaaatgtcaggaggtgtatttggcggtgctacagtggcatgggtgctatttgaattgatggagtatcatcttcttactctggtatgtcacgttatgatcggtgctcttgcctgggtggttctatggtct

SEQ ID NO: 95953 - DNA, 354 bp, Arabidopsis thaliana columbia
  unsure (1)..(354): unsure at all n locations
caacaatggcttcgtcatctacaagtatctctctccttctcttcgtctctttcattcttcttctcgtgtaactcgcgtgcagagaatgcgtccagtggatcggatctcgacgaagaattggctttcctcgccgcggaggaatccaaggaacaaagccacggcggcggttcggaccacgaggaggagcgcgatcatcagcaccgagacttcgagaattacgatgatctcgagcaagnaggcggcgagtttcatcacggcgatcacgnttacgnggagnagccgttancaccagtcgacgcgaaagacggtggcggnttctnaaccaaggacaatttcaccggagttcgtcgggca

SEQ ID NO: 95954 - DNA, 458 bp, Arabidopsis thaliana columbia
aagccaacatcaacaattggaaggaagcaaaatacggtaaccagagacaaggtagaaaccgaaatgattgcgcgtggtcgtcatgatccttgtgttgttccacgagctgtgccaatggtggaagcaatggtggctctagttcttgtggatcaattgatggcgcaatacgcacaatgccatttgtttccaataaatccagagttgcaggaacctctccagatagagcagccgcaaaatgctactgctttgtaagcaaatctcgagaagataaagagtcatagagagtgagagttcgcttttgttgtgtgattattatgctgaataaaaaaatgttaattttgtgcccaccagaaaaacaaagaccatgattttttataagaggatttgcttctatatcaatcatctaaatgtgattttaccacgaacataaactttttttattttgtatattttatttt

SEQ ID NO: 95955 - DNA, 340 bp, Arabidopsis thaliana columbia
gccgcatcctgatacctttgactttttatagctagccatgggggtccaaaaccaccacgatctgagcctatcttgtttcgccaacctacagctggcttgcaatttcaacagggattcgtgaaggatactgatgagagagcatgtgcatacattgcgggaccagcgccaaatcgatggggctttacagttgacggggatgacctttttcagtctgttagcaaacttcctgtagctcatgatggacttttgaaatctgaggaacaattgctagagggaggagacagggagttgcaaaagaagcttcttgcccacccttttttctttggagttacaatgggtt

SEQ ID NO: 95956 - DNA, 1951 bp, Arabidopsis thaliana columbia
caaaattcaaaaacctcacatttcacttctctcttctcgcttcttctagatctcaccggtttatctagctccggtttgattcatctccggttatggggagagaatgaggagttaccgttttagtgattatctacacatgtctgtttcattctctaacgatatggatttgttttgtggagaagactccggtgtgttttccggtgagtcaacggttgatttctcgtcttccgaggttgattcatggcctggtgattctatcgcttgttttatcgaagacgagcgtcacttcgttcctggacatgattatctctctagatttcaaactcgatctctcgatgcttccgctagagaagattccgtcgcatggattctcaaggtacaagcgtattataactttcagcctttaacggcgtacctcgccgttaactatatggatcggtttctttacgctcgtcgattaccggaaacgagtggttggccaatgcaacttttagcagtggcatgcttgtctttagctgcaaagatggaggaaattctcgttccttctctttttgattttcaggttgcaggagtgaagtatttatttgaagcaaaaactataaaaagaatggaacttcttgttctaagtgtgttagattggagactaagatcggttacaccgtttgatttcattagcttctttgcttacaagatcgatccttcgggtacctttctcgggttctttatctcccatgctacagagattatactctccaacataaaagaagcgagctttcttgagtactggccatcgagtatagctgcagccgcgattctctgtgtagcgaacgagttaccttctctatcctctgttgtcaatccccacgagagccctgagacttggtgtgacggattgagcaaagagaagatagtgagatgctatagactgatgaaagcgatggccatcgagaataaccggttaaatacaccaaaagtgatagcaaagcttcgagtgagtgtaagggcatcatcgacgttaacaaggccaagtgatgaatcctcttctccttgtaaaaggagaaaattaagtggctattcatgggtaggtgatgaaacatctacctctaattaaaatttggggagtgaaagtagaggaccaaggaaacaaaacctagaagaaaaaaaaccctcttctgtttaagtagagtatattttttaacaagtacatagtaataagggagtgatgaagaaaagtaaaagtgtttattggctgagttaaagtaattaagagttttccaaccaaggggaaggaataagagttttggttacaattacttttatggaaagggtaaaaattgggttttggggttggttggttggttgggagagacgaagctcacattaatggctttgcagattcccaagaaagcaaaatgagtaagtgagtgtaacacacacgtgttagagaaaagatatgatcatgtgagtgtgtgtgtgtgagagagagagagaagagtatttgcattagagtcctcatcacacaggtactgatggataagacaggggagcgtctgcaaaagatttgtgagtggagatttttctgagctctttgtcttaatggatcgcagcagttcatgggacccttcctcagcttcatcatcaaacaaaaaaaaaatcaagttgcgaagtatatataatttgttttttgtttggatttttaagatttttgattccttgtgtgtgacttcacgtgacggaggcgtgtgtctcacgtgtttgttttctcttcaaatcttttattttggcgggaaatttttgtgtttttgatttctatacgtattcgtggactccaaatgagttttgtcacggtgcgttttagtaacgtatgcatgcgtgtaaggtgtcacgtatgtgtatatatatgattttttttttggattcttgaaaggttaaattttatatataaaacgtt

SEQ ID NO: 95957 - DNA, 1017 bp, Arabidopsis thaliana columbia
  unsure (1)..(1017): unsure at all n locations
caccacgctccgggaatgatttaatttcccattcttcaaccgcaaacccgttaaggaagttgaagagctggttccatttgtaatcgcttctatttcttctacaataacggagttgattggcatgggaggaaaaacctttctagtgcccggagagttccctatcggatgctcagtagtctatttgacattatataaaacatcaaacaaggacgaatacgatcctacaacaggatgtttgaaatggttgaacaagtttggcgaataccatagcgagaaacttaaggcggaactcaaccgacttaggaagctctaccctcatgtcaacatcatatacggtgactactacaactctcttcttgcgcatttttaaggaaccagccaaattcgggttcatggacagacccttccctgcttgttgcgggatagggggaccgtacaacttcaacttcactaggaaatgtgggagtgtaggagtgaaatcttgtaaggatccttcaaagtatgtgggctgggatggcgttcatatgactgaggctgcatacaaatggatagctgatggaatactcaatggaccatatgcgaatcctccttttgatcggtcctgcctcagatctgagattaagaaggagtcattgtacaatcaaagtactctgacacaagcttgtgtgaaactttgacagacaaaagtgatgataagaatattccctctattccttattaatccaaattcaagcaaacaaatttgttgcaaaaaagatatgtttctaggtttctatgtatttttttattacttattgatgatgaattgtagaccttaattttctttttcttttttacttttattggtttaaatttgttaatcataaattgatgtataaataatcaataaagaatatattttcggnnnnnnnnnnnnnnnnnnnnnnnnnnnnnnnnnnnnnnnnnnnnnnnnnnnnnnnnnnnnnnnnnnnnnnnnnnnnnnnnnnnnnnnnnnnnnnnnnnnnnnnnnnnnnnnnn

SEQ ID NO: 95958 - DNA, 293 bp, Arabidopsis thaliana columbia
agacattgcagaaattggaagaagaagaagaattgtgatgttgagaactcgccttctctggttgacgcttggtttttccgtgaccggaggttccattgctcatatcgtgtggcgtgatctctatgccgaacgtttcgctatttcttctgatatgaaggagaaattcagtgctctggaaggtagagtatcaggcttggagtctggcggctatgtgatcccgtattcagctcatgttgagagttgacgactcctgcaagtggtacctgcgcatattaatcaaagtcttgtctttt

SEQ ID NO: 95959 - DNA, 898 bp, Arabidopsis thaliana columbia
  unsure (1)..(898): unsure at all n locations
nnnnnnnnnnnnnnnnnnnnnnnnnnnnnnnnnnnnnnnnnnnnnnnnnnnnnnnnnnnnnnnnnnnnnnnnnnnnnnnnnnnnccacgcgtccggaggcgcttctctgctgcaaattgcctttactgtgtttctctcttcccctttataaaaccgcttccgtcgtcaatggcgtgagcctaaacaagaaagaaaaaccattcttctctcttttcgtttttttcattctctctctctctactccatcgttttcacacttttctcgccgccctttatccttatccgataaacccacaaataaagacagactcttttgttctttaaacagagattgtaaatccagagccgccggaaaatacaaccgccggtttactctcaggattagttgatattattcgattttaaaaatcagtaggaagaagatgaagtacgtgcttgtaacaggaggtgttgtgagtggattagggaaaggagtaacagcaagtagtattggtgttctccttaaagcttgtggtcttcgagttacttctatcaaaatcgatccttatctgaacactgatgctggaactatgtctccatttgaacacggtgaagtttttgtcttggacgatggtggtgaggtggatcttgatcttggaaactacgaaaggtttctagatatcaaattaacaagagacaataacatcactactgggaaaatttatcagcatgttattgctaaagagaggaaaggagattatttgggaaagactgttcaggttgttcctcatgtcactgatgcaattcaagattggatcgagagagttgcggttattcctgttgatggagaagaggatcctgctgatgtttgcgttattgaattaggtggaacaataggtgatattgaatccgcgccttt

SEQ ID NO: 95960 - DNA, 893 bp, Arabidopsis thaliana columbia
aaaaccgcttccgtcgtcaatggcgtgagcctaaacaagaaagaaaatttatcagcatgttattgctaaagagaggaaaggagattatttgggaaagactgttcaggttgttcctcatgtcactgatgcaattcaagattggatcgagagagttgcggttattcctgttgatggagaagaggatcctgctgatgtttgcgttattgaattaggtggaacaataggtgatattgaatccgcgccttttatcgaggcgcttggtcaattctcttaccgtgtaggcccagggaatttctgtctggtccatgtcagcctcgtgcctgtgcttaatgttgttggtgaacagaaaactaagccgacacagcatagtgtcaaggggctacgaggattgggcttgacgccggatatcttagcttgtaggagcacaaagccacttgaagataatgtgaaagaaaaactagctcagttttgccatgtcccgcttgagtatatcttcactctctatgatgttcccaacatttggcgtattcctttgttgctaaaggatcagaaagctcatctggcaatctcaaaagtgctcaatcttgctagtattcttaatgagccttctctaggggaatggacttccagagctgaattatgtgacaatttacatgtgccggtgagaatcgctgttgtggggaaatatacaggcctctctgatgcttatctctctgtcttaaaggctctcttacatgcttctgtggcttgtcgcaaaaagctcgtagttgattgggttccagcttgtgatctcgaaaaagaaactgagaaagagaatccagatgcgtataaagctgcttggaagttgctaaagggtgtagatggaattcttgtacctggaggttttggtgata

SEQ ID NO: 95961 - DNA, 490 bp, Arabidopsis thaliana columbia
  unsure (1)..(490): unsure at all n locations
cgagacttttcgtctctatccctatgcaacccacacaaataagcttccctgcgtcttcttctcagccactattatctccgccggcgaacaatttcaccgatggtggagctgggggattatgtcttacacggagaatcagagacagttccgtggtgacgcgagcagggcctagctcgagcagctacttgctcgcgttcgccattcctgctactcttatcgccgccactgtcttcacttcaatcaaaatcgctgacaaactcgacgaagatttccttgaggatattgcgttgaaccaagngataaaagcagcagaaaagggagagaatggagaaggtgatatctcactggacgatgtgattcaagaacctgtgctttaaacggacacgtaaccggcctaaacggtgaagtttaaaacggccnncanaagtttttttaannatnggnatagcccntttnaactngaatnaaangtgggttttttttnaaanaa

SEQ ID NO: 95962 - DNA, 688 bp, Arabidopsis thaliana columbia
  unsure (1)..(688): unsure at all n locations
cagaaagcactagaagaggcggaagctcttaagaagcttactgctagacaagaacctgtagtggattcaaccaagtacactgctgctgacgtgcgcattacagaccagaagctgcgtctatgtgacatatgcggaaaaatctgttgtactgcctttagtgatcgtcggttagctgatcattttggagggaagcttcacttgggttacatgctgatccgcgacaaattggcagagcttcaggaggagaagaacaaagttcacaaggaacgggtcgaagaaaggagatcaaaggagaggagtagagagcgagaatcaagtaaagacagagacggaggagataaccgtgaccgaggaagagatgttgaccgcaggagtagagatcgtgacaggcaccatgaccaccgagaacatgacagaaactataatcagtcacgtggctatgactcaagaagccggcgcagttcacggtcccggtctagggaaagaccgagggatcatgatcgccgcagacgccatgaccgctactaaanccctgccaaagatggttgcacctggtttaagaggttcttacagatgcgtttaggatctatttggagttacaaacactttcttttttctttgctcaagtgttttaaggatttttgagattgtaacttactttaagtttgtaagaggagcttcttcagat

SEQ ID NO: 95963 - DNA, 442 bp, Arabidopsis thaliana columbia
ctgctttgctacattatcctcttcatcatgcatacagacaagaagaacaagatgaagatgcttggtttgctttttgtggtgtttgctgtggttggagtgattgtagctggaagtttgcagatacctgaccagctcacacggtggtactttgtcgggttcttgagctgcggttctcttgtttcaatgtttgcctcgccgttgtttgttattaacctagtgattcggactaagagcgttgagtttatgccgttttatctctcgctatcgactttcttgatgagtgcttccttccttctttacgggttattcaacagcgatgcctttgtttatacaccaaatggaataggaacgattcttggcattgtgcagctggctttgtactgttactaccacaggaattctatagaagaagaatcaaaagagcctttgattgtttttacgt

SEQ ID NO: 95964 - DNA, 264 bp, Arabidopsis thaliana columbia
ctggaaagctgttcccaaagcatatccaagggctcgcagttgggaaagatccacttcttactctgcctgaaggtttggcattcatgaagccatctcttccttccgagcttgcatgaacactgttgattcatcgcatttttcgatttatcttctattcattgttttcctaggatttatctttagaccatttgctgcggaatttggatttgttttgtttaagtttcacgactttcaagcctaataactctgaatttctgggtactt

SEQ ID NO: 95965 - DNA, 623 bp, Arabidopsis thaliana columbia
  unsure (1)..(623): unsure at all n locations
cccacgcgtccgcggacgcttgggatagctttaaacttccaaaagaatacaacaaacaatcaaagcttaatctatccaacaatgtcgaagattatttcccttgtggtggcgatgatcgcagtgctagctttgccgattcgtggtcaacaacaacctctaagccaatgtactccatcaatgatgaccaccgtgagtccttgtatgggcttcataaccaacagtagcagcaatggaacttcgccgtcgtctgattgttgtaactcgctgaggtctttgaccaccggaggaatgggatgtctttgtctaattgtcactggaactgttcctttcaatattcctattaaccgcacaaccgctgtctcacttccccgtgcttgtaacatggcctagagtccctcttcaatgccaagccaatatttgctccagctgctggctcctgggcctgctggtaaatttggggccatcggtgtttccagggccagaggcgggttccaattgttccagaggcaacttccgggagttcaggaaccaaggtttgttcaaccggccctttttaccattccgtggcggtgggggtnaanattaggnggggggggngncnattggccttttgggttntttnt

SEQ ID NO: 95966 - DNA, 850 bp, Arabidopsis thaliana columbia
  unsure (1)..(850): unsure at all n locations
gcctgcangtaccggttcggaattcccgggtcgacccacgcgtccggcttaatctatccaacaatgtcgaagattatttcccttgtggtggcgatgatcgcagtgctagctttgccgattcgtggtcaacaacaacctctaagccaatgtactccatcaatgatgaccaccgtgagtccttgtatgggcttcataaccaacagtagcagcaatggaacttcgccgtcgtctgattgttgtaactcgctgaggtctttgaccaccggaggaatgggatgtctttgtctaattgtcactggaactgttcctttcaatattcctattaaccgcacaaccgctgtctcacttccccgtgcttgtaacatgcctagagtccctcttcaatgccaagccaatattgctccagctgctgctcctggacctgctgctacatttggaccatcgatgtctccaggaccagagacggatccaattgttccagagccaactccggcagctcagacaccacagtctgatacaacccgaccatttacaccatccgtcgacggtggagctccaacatcagacgacggaggaagcaccagtcgaccttctgagactccttcatccgcctacgcactctcaccatctcttctcttcttcagcatcgccctcgtagctctcaaattctactgatgattccttttgtttctttgcattccttatgtgatttgatttatgcatcgttgattatagaaagaaaccatttatttggtcattgctttgtggaataagcttttgtgtatactgttctctgtttcgagtgagatttattttgtgttgttgaagtaatacatcatcatttttatgg

SEQ ID NO: 95967 - DNA, 409 bp, Arabidopsis thaliana columbia
acttcggtttcagaggatgtcgtgtgtatttggtgaaatcaaaggactacaaatgcagcaaagtctcaaagctcttcggtggagatgtcggcgctgaacttaagcctgagaaaaagctgggaaaatctacggtggtcgtcaacaagctcgtatacggtctctttaacgttggtccatttgcctttaacccgtcttgccccaaatgaagatgatttgatgctctggttactatcttgattgtttcatgtttaaaaagattgagagagagtgttgttatgcgtctactgtacggttgaattttaatcaatgttagctagtctttaagttaaatgcttgggtattatgttgtatctctttaagtgacgtcgtttgagtttcgtttgaataaaaatagcagctttcaagataa

SEQ ID NO: 95968 - DNA, 1036 bp, Arabidopsis thaliana columbia
gcgtcctccaggttgaagattaatcggacaaaggagattagaagagtagaaaaaacgacaagaagaaagaaacacagttgcaggagagaaagagatatggctgtccggataaacgcgatggcggtgacgtttgtggcgcacgcgctggcggtaatagcggcgattatggtactggtttggagtatcagttacagaggtggattggcctgggaagctactaacaagaatctcatcttcaatctgcatcctgttctgatgctcatcggatttataatcttgggaggagaagccatcataagttacaaatcgcttccgctggagaaaccagtgaagaagttgatccaccttatactccatgccattgctctggctcttgggatatttggcatctgtgcagcctttaagaaccacaatgaaagccatatccctaatctctacagtctccattcctggattggtattggagtcatttctctttatggcttccagtgggtgtacagcttcatagtgttcttcttcccaggaggatcaacaaatttgaaaagcggattgcttccgtggcacgcaatgcttggcctgtttgtttacatacttgctgtcgggaatgcagctttagggtttctggaaaagctgactttcttggagaatggagggcttgacaagtatggatccgaagcatttcttatcaacttcacggccattatcactattctctttggtgcctttgtggtactcactgcttctgctgagtctccttctccttctccttccgtctccaatgatgatagtgttgacttcagttattctgctatataaaacactttctacattccacgttacatctgtatcgccccttgtactctcaaaactccatttatgtatgatgcatttgtagcgaaaagctttgtgtgttacggctttgctacttctggtgtgtaaaatcttcaatgatattgatgaatcttttaaaaaaaaaaaaaaaaaaagggcgaccgctctagaggatccaagcttacgtacgcgtgcatgcgacgtc

SEQ ID NO: 95969 - DNA, 431 bp, Arabidopsis thaliana columbia
ttatcggagactattttatggtggtggagctggcatgattggaaatgataattttggttcgggtaaccctaatgctgacagaagaggcagtcgaggaagggctggtggttcctatcttccttctggcccacctaatggtgctagacctggactacacccggcagggtacccgatacctagggttccactttcaccctttcctggtggtcctccttctcagccatacgctattccaactcgtggacctgttggtgctgttcctcatgctcctcaacctggaaaccatggttttggagctggtcgtggaacttcagttggggggcaccttccgcaccaacaagccacccaacataatgtttgaactattggccctagtttaaacttttcccttgatagtccgaatagccagccttacctggtggtccgctatc

SEQ ID NO: 95970 - DNA, 1006 bp, Arabidopsis thaliana columbia
ttaaataatgtggtggtggattaaccgatactgtgtcaaagaacataaaagatctttcatccctcactctcctcaatttatcacaaaactccaatctcacagacaaaacactggagttgatttttggattgaccggattggtctctctgaacgtctcaaactctcgagtatcaagctcaggactacgtcacctgaagccattgaagaacttgagatctctgaccttggagtcctgcaagctctctgctaatgacatcaggaagcttcaggcgactgatctgccaaacttggtcaacttccgtcctgaataaaataatatgttcaaaggcaaattcacgaactctgtaaatagatcgatctcctctggtctcagactaagacactgctcttagatatatcgtcaaaagctatgctcttcttcggattatttgctgaagaaactgtaaataaagcttctttcaagctatggccggacgaaagagtcctccatggctcttctacgtggtcagctttcaggatctgtttggtttgtttatctactgaagtgaaccaacataaactgtcactcttgtaaatatatgtaaattcgaaatatcgactgtaatatataattgaatatcttgcacaatagaaaatctatgtgaaggtgcgtacctcagaaaaggaaaagagagagaaacaacatcagtcactgtttttatccaaacttcactactgaattactgtgaaaatatgttacatctaaatgttaagaatctctgggtcataaatttttctaccaaaaaaataagaaagaaaagacttttaaatagaagaaagggaatcagagaggtaggtggctctcggatcagatcatctctgaggctgatcagatgcagaggctccaacggaaggtgcagttggtgcaccgctagccgacccgttctcagccggtggagcgactccccatttaccttcagactcgagcggttcgaatatgtgcactcccccgtctgagagaccaact

SEQ ID NO: 95971 - DNA, 805 bp, Arabidopsis thaliana columbia
gcctgcagtaccggtctcggattcccgggtcgaccacgcgtccgctctctggcctgtcaacctagagagcataaacttgtcatttactgttgtgaccgatagcggtttaagaaaattatctggtttgacatctcttcgaacattgaatctggatgctcgtcatgttactgatgctggtctttccgcgctcacaagtttgacagggttgacgcaccttgatctcttcggtgctcgtatcacagattctggaacaaatcacctacgaaacctgaagaaactgcagtcacttgaaatatgtggtggtggattaaccgatactggtgtcaagaacataaaagatctttcatccctcactctcctcaatctatcacaaaactccaatctcacagacaaaacactggagttgatttctggattgaccggattggtctctctgaacgtctcaaactctcgagtatcaagctcaggactacgtcacctgaagccattgaagaacttgagatctctgaccttggagtcctgcaagctctctgctaatgacatcaggaagcttcaggcgactgatctgccaaacttggtcaacttccgtcctgaataaaataatatgttcaaaggcaaattcacgaactctgtaaatagatcgatctcctctggtctcagactaagacactgctcttagatatatcgtcaaaagctatgctcttcttcggataaaaaaaaaaaaaacaaagggcgcacgctctagaggatccaagcttacgtacgcgtgcatgcgacgtcatagatcttctatagtgtcgtccta

SEQ ID NO: 95972 - DNA, 1260 bp, Arabidopsis thaliana columbia
  unsure (1)..(1260): unsure at all n locations
nnnnnnnnnnnnnnnnnnnnnnnnnnnnnnnnnnnnnnnnngcccccccccattgaatggctgtgggcccccttcgaggtcgacggtatcggccacccaaacttcactactgaattactgtgaaaatatgttacatctaaatgttaagaatctctgggtcataaatttttctaccaaaaaaataagaaagaaaagacttttaaatagaagaaagggaatcagagaggtaggtggctctcggatcagatcatctctgaggctgatcagatgcagaggctccaacggaaggtgcagttggtgcaccgctagccgacccgttctcagccggtggagcgactccccatttaccttcagactcgagcggttcgaatatgtgcactcccccgtctgagagaccaactgcaaacatgtttggttcttgcggatgtgcagcaatcactagtggatgtacgtttgaattgctgagactagctggtagatacgcagaagggttgacccggcaacgcagccgtagatttgcagagctaaatacacaaactgttgcatccataaaactcgcgtagaccaattggctatcgcatgagaatgtggcatgagtgattggagctaatgattctcgaacagcccactgtttcatgcattcgagcttggtagtttcgtatatagcaagttgcgtctcgtgcacaacgaggaagtgagcttgatcttgatggaactgaacacgcgtatctgaaggtgcactgtttggtcttccctgtggaagtggcaaaaccttgcttctctgcttttcccatccatctgtgttccaaacacaaagctgtgcatctgctccagacaaaccaacacgtttaatacgttggagaaggcaagaccagttatcccctttgaatgacctttaagcttactcttcacctcatcaacacggacattataaatctgaatcgtgctatcatccatcccaatagcgatgatattgttgtcttgaggatgaaaagcaagaaaagtagcagccggtggtgggggcatgaaagtcgccattgtcttaaacgtcatcatgttaaataaggatatctttcctccggaggctgacattacatatgaatcattcttggataaagcaaaacaaggtacagcttcctcgggattggtttcagcaacatcgttagtcatgaggatcccactagctggttgccactgctgaggcggtaaagaantgtcgcctttccagttgcgttgcgctcattccgctgccatttccat

SEQ ID NO: 95973 - DNA, 1699 bp, Arabidopsis thaliana columbia
taaaacacactcacccactttcctctgtataagcctctctctcctctctcttctcctctgccatgaaaatcgcagttcctcaagacaaaacctcctcagaaatctcccatctttgatgacttttgcttccttagttttcactttcttgtccgaacgctctcaaaaactttgagaccaccccaataaacgaattaaacagactattatcaatcaatacacaacacaacaatcaaaccaaaccccatggctgagaatcttgcttgtggtgaaaccagcgagtcatggatcattgacaacgacgatgatgatatcaactatggcggcggatttacgaacgagattgattacaatcaccaactttttgctaaagacgacaactttggcggcaacggatcaattccgatgatgggttcttcttcatcgtccttgagtgaagacagaatcaaagagatgttggtgagagagattgagttttgccctggaactgattatgttaagagattgctttctggtgatttggatttgtctgttcgaaaccaagctcttgattggattctaaaggtttgtgctcattaccattttggacatctgtgcatatgcctatccatgaactacttggatcggttcttaacatcctatgaattgccgaaagacaaggattgggctgctcagttactagctgtgtcttgcttatcattagcatccaaaatggaagaaactgatgtgcctcacattgttgatttacaggtggaagatcccaagtttgtttttgaggccaaaacaataaaaaggatggagcttttggttgtcaccactttgaattggagattgcaagctctaactccattctccttcattgattatttcgttgacaagatcagtggtcacgtgtcggagaatttgatctatagatcgtcaagattcatcttaaacaccaccaaagcaattgaattcttagacttcaggccttctgagatagctgcagctgctgcagtgtctgtttccatttcaggagaaacagaatgcattgatgaggaaaaggcactgtctagtctcatatatgtaaaacaggagagggtgaagagatgtttgaatctgatgagaagtctcactggggaggagaatgtgcggggaactagtttatcgcaggagcaggcgcgagttgcggtaagagctgtacctgcaagtccagttggagtgttggaagcaacatgtttgagctataggagtgaagagagaacagttgagtcatgtacaaattcctcacagagtagtccagacaacaacaacaacaacaacaacagcaacaagaggaggagaaaacaatgagagagaataaaagagtcatacattgctttttacaacccaaaaccacaagtactcatgacatttgaggttcttatttatttttttggttttttttttctacataaattttctttttctttctttgatttctcattttcaatctgaaaattggattgaatatgagagttttgtgagaaaggaaaaaagaaaataagagagagagagagagctctttggaaggcgggcaaaattaataagtcattattgatgatgatgagagacatccctgttcttgctccaagggacttttttttttctacataatgtcagagatataattaaaaaaaaaagaaatagaaagagaattaattttatgaaaaaaaaaaaaaaa

SEQ ID NO: 95974 - DNA, 952 bp, Arabidopsis thaliana columbia
  unsure (1)..(952): unsure at all n locations
cagctannnnnnnnnnnnnnnnnnnnnnnnnnnnnnnnnnnnnnnnnnnnnnnnnnnnnnnnnnnnnnnnnnnccacgcgtccggtttcttctttatcacactgttacgcttggattctcatttcttcaagttcataacgctcggatcaatcaggaagacgaacttgaactttctttttttcatcattacccaaagctatgaggctcacaccaccaatagctccgccgtcatgaatccttctcttccaggtcaacacaagtcagagctccaaaaatggagtcatgcgattgttttgagacgcatgtgaatcaagatgatctgttagtgaagtaccaatacatctcagatgcgttgattgctcttgcatacttctcaatcccactcgagcttatctatttcgtgcaaaagtctgctttcttcccttacaaatgggtgcttatgcagtttggagcctttatcattctctgtggagctacgcatttcatcaacctatggatgttcttcatgcattccaaagccgttgccattgtcatgactattgctaaagtctcttgcgcggttgtgtcgtgtgctaccgcgttgatgttggttcatattattcctgatcttctcagtgttaagaacagggaattgcttctcaagaagaaagctgatgagttagatagagaaatgggtcttattttaacacaagaggagactggtaggcatgttaggatgcttactcatggaattagaagaactcttgataggcatactattttaagaaccactcttgttgagcttggtaaaactctttgtcttgaggaatgtgcgttgtggatgccttctcaaagtgggttatatttgcagctttctcatactttgagtcataaaatacaaggtgggaagcagtgtgccgataaatctcccgattattaatgaactcttcaatagcgctcaagctatgcacat

SEQ ID NO: 95975 - DNA, 694 bp, Arabidopsis thaliana columbia
agctggtccgcctgcaggtcccggtccggatttcccggtccgacccacgcgtccgtattgctaaagtctcttgcgcggttgtgtcgtgtgctaccgcgttgatgttggttcatattattcctgatcttctcagtgttaagaacagggaattgtttctcaagaagaaagctgatgagttagatagagaaatgggtcttattttaacacaagaggagactggtaggcatgttaggatgcttactcatggaattagaagaactcttgataggcatactattttaagaaccactcttgttgagcttggtaaaactctttgtcttgaggaatgtgcgttgtggatgccttctcaaagtggtttatatttgcagctttctcatactttgagtcataaaatacaagttggaagcagtgtgccgataaatctcccgattattaatgaactcttcaatagcgctcaagctatgcacatacctcattcttgtcctttggctaagattgggcctccggttgggagatattcacctcctgaggttgtttctgtccgtgttcctcttttacatctctctaatttccaaggcagtgactggtcggatctctctggcaaaggttacgctatcatggtcctgattctcccaaccgatggtgcaagaaaatggagagaccatgagttagagcttgtagaaaacgtggcgga

SEQ ID NO: 95976 - DNA, 515 bp, Arabidopsis thaliana columbia
  unsure (1)..(515): unsure at all n locations
ccnnnnnnnnnnnnnnnnnnnnnnnnnnnnnnnnnnnnnnnnnnnnnnnnnnnnnnnnnnnnnnnnnnnnnnnccacgcgtccggaagtaaagaagaagaacttctctgcatcaatggcgatctccaagctccatctactcttccttctctcagtctttctctcccttcatcctcttgttctttccgacaccgccggtaattaactctctcatttcccgtcaatgtcttcttggttattcaatttaggttcttgaactctatcgatcgtaatttgtttacctagatctggtctgaaatcgttgaatcttcttaattcaagcttagttcggttcttgatttgtgtgtcattgtgtgttctgttctgtttcgaatctttttgaatcggatcttgatttttgtgtgtgttctgttttctttttgatatacacagatgaagaagatgttcttcttacaggcatcaacagttacagagcatcactaaacctaacaaccttaatacacaaccacaacgcag

SEQ ID NO: 95977 - DNA, 939 bp, Arabidopsis thaliana columbia
tttcgactttgaagagtcaaggcgaaacaactaaaaaatctcataaataatagagagaaaagattcatcatcaccaaaagatcatcaaagaagtaaagaagaagaacttctctgcatcaatggcgatctccaagctccatctactcttccttctctcagtctttctctcccttcatcctcttgttctttccgacaccgccgatgaagaagatgttcttcttacaggcatcaacagttacagagcatcactaaacctaacaaccttaatacacaaccacaacgcagaatgtctagcagacgaaatcgcagaccaattcaagaaccaaccttgcacaaacaccactggctcagcctctgtccctggaaccacacctggattcccaaacttgcctaacctcctctcaaaatgccgcctcaaccctaccgtaactagagacggtgcgattttgccagcttgtgttcctaaccttgatcctagccttgtcttgaccaatttcacaatgtcacagtactccaaggacttgaatgattctaagttcactggaattggtattggttctgatgataattggattgttgttgtcctcactactagcacaccggagggtagctattctccggcctctaactcaggagctttcgcgttcggagttaatggccttgtttcttcaagtttgatgtttcttctcttttgcttcttcatgttttgagtcccttttttggtgtttatctaaactacctccctgtctttgtttcttatttatgttgttattatggtgatttgtatgaattcgtaaggcattaaagagaataacaatattatcattaagtttctgcttaaaaaaaaaaaaaaaaaaaaaaaagggcggccgctctagaggatccaagcttacgtacgcgtgcgtgcgacgtcataaatcttctatagttgtacctaat

SEQ ID NO: 95978 - DNA, 899 bp, Arabidopsis thaliana columbia
ccggaattacttggtcgacccacgcgtccggtcaagtggtaatcttttgatcccaattccagttcctaatcccccttttgagcactggtcaggtcacgcgtctgttggttccgatatctacttctttggcggatacatggaggagaatgtgcgttcctctagagtcgtgatcctagactgccggtctcacacgttgcgtgaggctccaagcctgcagatggaaaggtcggaccctgctgctagtgttattgatggaaagatttatgtagctggaggtgtcgacggtgatgatgcacgattccttgtacccgatagaagtgttcgacataaagacccaaatttgggatcataggcccatcccttactgggagaaagactggggcgctctatcaagaagcgcgtatgttgatggaaagttctacttgacgattgggatgaaggttagggcttatgatctagaggaaagtagatgggactttgctggataccagatgggtcagagttggttttggtcttgtaattgggttatagagaatgttttgtactgttatggtgatgctttccgatggtttgccactaagctgagattgtggaaagttatgaaggtgaaaggactacctaagttgtcccgtaatgtcgatgttaagatagcagattatgggggaaagatggcgattttttgggacaatccttccccttctgcttccgatacgaacaaaataattcggtgcgcggtgattgcccttgaaaggcccaacagtgaagagatttgggggacggtcgagtggcatgaggcagtgcttacagttcctgtgtcatatgagtttgaacatgctctagctgttaccgtttgatgaatgacagccttgaatgtggtgaatctttaatggtttgtgggt

SEQ ID NO: 95979 - DNA, 816 bp, Arabidopsis thaliana columbia
  unsure (1)..(816): unsure at all n locations
nncagctcctcatacgactcactttagggaaagctcgtacgcctgcaggtaccggtccggaattcccgggtcgacccacgcgtccgcccacgcgtccggataagtagaaaaaaaaagacatccttttttggttcttcttcttcttcttcttcggacaaaaaggaagaaggcgttgactgattcttaagatgggtttgtgttaagtttgtgagtatagttgaaagtttcagttcaatttcaatggagcctccaataggatttcgagcttctttattccaattcttactcttccttccttatttcattggattgctatttctgggtttcatcaaaggtattgttttgtgcccactcgtatgcctcgttgtgactataggcaactccgcggtcatactgagtcttctaccagtccacatcgtttggactttctattcaatcgtgagtgccaaacaagtaggaccaatcttgaagatctttctatgcttatgtcttcctgctgccatcattctctggcctattgttggtattttaggaagtgttttgggaggagctttatatggtttcttctccccaattttcgccacctttgatgctgttggtgaaggcaagccttaccagtttttccattgcttttatgatggaacttggagcaccatgcaacgcagctttaccgttgttcgggattttaaagatgtttgctttcattcatacttctcacttatggatgagctgaaacanagctgtccggatcgaaaatattatgaaataaggctacttctactttcaggggctttagtagtttcagttctcgggata

SEQ ID NO: 95980 - DNA, 351 bp, Arabidopsis thaliana columbia
cggacgcgtgggaaaagaagtagcgagcaagtgtcccttaagctcctttaggttcttaaagaccaaggaagtccctaccgggttcttcgaaatcaagactggctcgcaaaatatccgtacaccttggtgggattcgagcgtcatctatggaagcaactcgaaaacattggatagagtaagaacttacaaagacgggaaactaaagatatcggaggagacgggtctccttctccatgacgaagacggtttagctatctccggcgacattcgtaacagttgggctggtgtctccgctttgcaagctctttttatcaaagagcacaacgccgtatgcgtcgccctctaggatga

SEQ ID NO: 95981 - DNA, 471 bp, Arabidopsis thaliana columbia
gttggcattcttaaaagagccacaaaccccattgtcgaacgaacacaaaaccaaaccgcgggcaaagaaacaaattcgcagacaatagtcgaaaatggctgaaatctcggcgacttcgtttccttcttcttcttcctctgctctcgtcatccgtagctcccacaatggtagcttaaaatgtcagaatgtagctgttccaaaaactacttcccagttccaagagttatctctgaaacgaagccagcttgttggcaatgccgttgttaccggtcatgttaccggatcccgcagctgcaagaatcaagctattcgagctgttctatccggtgatggaaccgccttgactactgattcaaaggaggctggacttcgtggaaaactgaaaaaggtcgttctagcttacagtggaggcttagacacctctgtcattgtgccatggcttaaggagaactatggttgtgaagttgtgtg

SEQ ID NO: 95982 - DNA, 501 bp, Arabidopsis thaliana columbia
  unsure (1)..(501): unsure at all n locations
ccnccntttaaaacntttgggggnaannggntccccccccnattntnttgggggntttttgggacccccccattcccggtncgaaccccctatgcaatgggcccgttgnaaaccccaattggagtccncaaaaactctgaagcccaactgncgaagagattgctaagtttccatggcccagtatgtggaagcgcttagggatctgtttgagaggcacaagtcccgagtcggctatgatcttgagctgaaaattctttgaacaaaatctccaatggaaataattacttgtgtgtatccttctttaattgttaccttggagctggatttggacttaatataaatgactacatcatgtagtctacatgtattgcatgtctttagcatcgactgttgaagtaatggaatacgtttataaagcctgtaaattacatgtcgtcttgcacaagagtatgtggtaataataacatttgaccccaaaataatactagttaaatttttcct

SEQ ID NO: 95983 - DNA, 1275 bp, Arabidopsis thaliana columbia
  unsure (1)..(1275): unsure at all n locations
cnnnnnnnnnnnnnnnnnnnnnnnnnnnnnnnnnnnnnnnnnnnnnnnnnnnnnnnnnnnnnnnnnnnnnnccacgcgtccggaagcggacaaaccaaagaatccaccggagctagtgatatgggtggttccagagagttccgagctgaggaacattcaaatcaattccactctatcatcgccatggccatctggcttggcgccattcacttcaacgtcgctcttgttctctgttctctcattttccttcctccttctctatctctcatggtcttgggcttgctctctctgtttatctttatcccaatcgatcatcgtagcaaatatggtcgtaagctcgctaggtacatatgcaagcacgcgtgtaattatttccccgtctctctgtacgtcgaggattacgaagctttccagcctaatcgtgcctatgtctttggttatgaaccacattcggtgctaccgattggagttgttgctctttgtgatctcacagggtttatgcctattcctaacattaaagttcttgcaagtagtgctatattctacactccctttctaaggcatatatggacatggttagggctcaccgctgcttctaggaagaatttcacttcccttttggattctggctacagttgtgttcttgtacctggtggtgtgcaggagacttttcatatgcaacatgatgctgagaatgttttccttacaagaagaagaggttttgtgcgcatacccatggaacaggggagccctctggttccagtattctgctttggtcaggcacgcgtgtacaaatggtggaagccggattgtgatctctatcttaaactatctagagcaatcagattcaccccgatctgcttttggggagtttttggatcaccattaccgtgtcgacagcctatgcatgtggtcgttggtaaaccaatagaagtcacaaaaactctgaagccaactgacgaagagattgctaagtttcatggccagtatgtggaagcgcttagggatctgtttgagaggcacaagtcccgagtcggctatgatcttgagctgaaaattctttgaacaaaatctccaatggaaataattacttgtgtgtatccttctttaattgttaccttggagctggatttggacttaatataaatgactacatcatgtagtctacatgtattgcatgtctttagcataaaaaaaaaaaaaaattaaagggcggccgctctagaggatccaagcttacgtacgcgtgcatgcgacgtcataaatggtctatag

SEQ ID NO: 95984 - DNA, 388 bp, Arabidopsis thaliana columbia
gtaactgcaccatttggacatgcctcccaggaaattgtaaacctgctgctgtgtggagaagcggttcctaatgtatttgatggacggatggatcttggaggcggcatgtttctgaaaggcatatctaagaatgtagatgtgggcttcctcacgttgctcgagtctctcaacttctgcaaagtcggtcagaatctcaaatgtcccaaatggccaatatgggttattggcagtgagtctcattacaccgtcttgtttgcacttgacccatccgtccaagaagaaaacgaacttgagctgagagagtctcagataagaagagctttcgatgcaagagaccaaagcggaggaggaggtttcataactgtggaggcctttcaccaagttgctc

SEQ ID NO: 95985 - DNA, 588 bp, Arabidopsis thaliana columbia
aagttccaatactattggactaactgctcttaacacatggaagtacccattacctcagggggaaatccatcacgtagtaaatccagatccataccgtggagtttttggctctgatggttctctttatgctaaagatgttcaagaccacatcgagtatggtacctctggaaaagtagctggatttatcgcagagacccatccaggggggtcggcaggagctgtaggattggctcctggttacttaaagtcggtttatgaaattgttcgcaacgctggtggtgtatgcattgctgatgaagtccaaactggatttgggcgaacaggaagccactattggggtttccagactcaagatgtggttcctgacatagtcacaatggcaaagggaattggaaatggattgccattaggagctgtggtgactacaccagaaatcgcaagtgttttagctagcaagattctgttcaacacttttggtgggaacccggtttgttcagctggtggacttgcggttctaaacgttattgttaaggtgaaacgcctagaacattgtgctgaagtttgttctatattttttactacgtttgt

SEQ ID NO: 95986 - DNA, 515 bp, Arabidopsis thaliana columbia
  unsure (1)..(515): unsure at all n locations
nnnnaaagagaaaaagattaatcatcatcaatctaaagatttaggaatctacaatttcccagtagacagatttccccgcggccgcttcttcttattccatttgatctaagtttctcgaaataggtacaaagttcgagtctttttcttgtaaccgcgtgaaaccaccaagaaacctatagtaagagtttccgcaaatgtgaattaaagacagctcatcactctgtcaaacttctacagtattaagttaacgaagcaggtacagccaaactaaaataacgcggagttatgggaatcatcgacggttctttgcttcggcggttgatttgtctctgtctctggtgtcttctcggnggaggagtgacggtggttacggcggaggatgagaagaaagtggtacataaacagcttaatcaaactccgacttgggctgttgctgctgtttgtactttcttcatcgntggttctgttcttcttgaaaaacttcttcacaaagttggaaaggttctatgggatcg

SEQ ID NO: 95987 - DNA, 509 bp, Arabidopsis thaliana columbia
  unsure (1)..(509): unsure at all n locations
nnnnnnnnnnnnnnnnnnnnnnnnnnnnnnnnnnnnnnnnnnnnnnnnnnnnnnnnnnnnnnnnnnnnnnccacgcgtccgattcttgtgatcttgtcttgacgaaaaaatggacgatgtgaccgtgatttcttcgagcattgttcaacccggaaacgccaggcattcgggtcgggaaaagatccatctcactccatccgatcttagccttctctatcttaattaccctcaaagaagtctcctcttccccaaaccctacccggaaacccggttcatctctcggttaaagtcctctctctctacgtctctagagatctacttccccttagctggtcgtcttgtcaaagtcaacaaccatgaagacaatacggtgtcgttttacatcgactgtgacgacggccgtggtgtcaaatttggccatgctatagccgaatctgtctcggtaagcgatatccttcaacctcatggctctgttcctgactttttcaggcttttctttcccatgaacg

SEQ ID NO: 95988 - DNA, 1718 bp, Arabidopsis thaliana columbia
  unsure (1)..(1718): unsure at all n locations
nnnnnnnnnnnnnatcactctccgaaacccacttccagctttttcctctctctttctctctctagtctctcttttgtagctctcccctgctaagctaaccactgcacgtttccatagagaggaaagatgagtctctctccgagagattttctctctatcatcttatcttcttccgtgtaatgctctgagccaaaacccaataactaaatcaacaacaatatagaagagaagagaaagatcttatctttcttctcattcttgagtttagtcccccacaatggcgattcggaaggaggaagaaagtagagaagaacagagcaattcgtttcttcttgatgctctctactgcgaagaagagaaatgggacgatgaaggagaagaagttgaagaaaactcttccttgtcttcttcttcttctccattcgttgttttgcaacaagatttgttctgggaagatgaagatctggttacactcttctccaaagaagaagaacaaggactcagctgtctcgatgatgtttatctttccacggatcgaaaagaagctgttggttggattctgagagtcaacgctcattatggcttctctactttagcagctgttttagccataacttatctcgataagttcatctgtagctacagcttacagagagacaaaccatggatgcttcagctcgtttctgtcgcgtgtctctcattagctgctaaagtcgaagaaacccaagtccctcttcttctagactttcaagtggaggagacaaagtatgtgtttgaagcaaaaaccatacagagaatggagctactgattctgtctactctcgagtggaagatgcatctcattactccaatttcgtttgtagaccacattatcaggagattgggacttaagaacaatgctcactgggatttcctcaacaaatgccaccgtctcctcctctctgtaatctccgattcaagatttgtcgggtacctcccatcagtagttgccgcagctaccatgatgcgaattatagagcaagttgatccctttgaccctctttcataccaaactaatctcctcggtgtccttaacttaaccaaggaaaaggtgaaaacttgctacgatctaatcctccaactaccagtggaccgcatctgtttacagatccaaatccaatcttccaagaaacgcaagagtcacgattcatcatcatcgttgaacagtccaagctgcgtgattgatgcaaaccctttcaatagcgacgaaagctcaaacgattcgtggtcagcgagttcgtgcaacccaccaacgtcgtcgtcgtccccgcagcaacaacctccattgaagaagatgagaggagctgaagagaatgagaagaagaagccgattttgcatctgccatgggcaatcgtagccactccataatcgaaagctcgatttcgtttatatgatatttactgtttttttaaactttgagaacaatctttgttgtattaagctttacccgtttgcatatacgaaatgtcgcgaatgcccttacgtgccatggcttgatagagttaatgggtaaagggtattcatgacatttgactgcatgggatgtgacgaaggagagaattagaaataataataataatattgcgtaaaaaaaaaaaaaaaaagggcgaccgctctagaggatccaagcttacgtacgcgtgcgtgcgacgtcaaaattttgtatagtaaacnnnnn

SEQ ID NO: 95989 - DNA, 515 bp, Arabidopsis thaliana columbia
  unsure (1)..(515): unsure at all n locations
cagctcnnnnnnnnnnnnnnnnnnnnnnnnnnnnnnnnnnnnnnnnnnnnnnnnnnnnnnnnnnnnnnnnnnnccacgcgtccggtcatcggtcgcctcatcggaatggtggtggtggtagtggttgtcctagccgttctcatactaggcatgcttcttatgacacgattgacttaccaaatgaggagctgagaaagaggagtgagttgcagccaaccaagattgttgttctgaaacctagcctcggggagccacgttatgctgctagaacttttgcatcgccaagctcttcttccgatgagttcagagcagatcgtaggcttccatgcaccaccactcatggcaggcagaaaagtaatgaagatgtccgcctgtcaagacagaattcaagagattgtggagaaatggccaaaataatgtctaggcaaaggaaggtgagctggggcaatggtccggccatgagttttgagacttcaggatttagaggatatgcagggggatgaaagctcatcagg

SEQ ID NO: 95990 - DNA, 708 bp, Arabidopsis thaliana columbia
cggaatttccgggtcgacccacgcgtccgtctcaaaggaagcgaagccctagcgtcctctctctgttttctcgtttctgcgccgattcgtagtctgttgtgcgcttgcctctcctcttttggattagcatacctctcactcgcatcagatgcacttttggttatcctcataccaaaatgcagattttcagttgctttttctatccaaatggactgcaagaagttcatccagatggtcgaggagaagaaacgaagagttcttgagaacgcaagaagctcctttgaaatggggagcagaagctagaggcggctgcgaatgccaaagcagacacagaaactaaagtgaagagatcaaagggccctaagagaaaacaaagggctgcgtctgaatctagctcagaaagtgatagtagctctgaggtgagaagaaagtctagaagatctcacaataagcaccgaagacatgcacactctgattcagatgacagtgataggaggaaagagaagaaatccaggaggcagaaaagaaggtccttgagtccaagcgatgatagcactggtgattatgaaagtgggtcagaggatgagctgaggatgaagataaagcaccatcggaggcacaagtggcatagctcaagaaagacttgcgatgatgacagtaccgaagatgtgagaagaaaacatttaaagcatcacaggcgcagtgagg

SEQ ID NO: 95991 - DNA, 651 bp, Arabidopsis thaliana columbia
tctaattcgatacactatagggacagctgtgccgcctgcaggtgccggtccgctattcccggggcggccggggcgtcgtcggctgctaagacacgaaggggatataataaagcccaccatcggaggcacaagtggcatagctcaagaaagacttgcgatgatgacagtaccgaagatgtgagaagaaaacatttaaagcatcacaggcgcagtgaggtggtcacttcaagtgatagtgaggaagagagtggaagaagaaggcgaggcaaatatcacaggcacaacagaggttcagcctcctcgagtggctcggaagaagatagtgggaaaagtatgaagagaaggcaacataaaaggcatcgtttggctgagtcttcaagtgaggaagatggggcaatgagaaggactaggcatcataaacatggcagagattcagcatctgagtctgatggaagaaggtaatcagatgagaaaagagagcactacttcgacaaatgaaaatggaaaatgtctttgtttaattcacatcataagaactgaatcttgtggtaaaccatcagcacatgattactacccagatgttgggacccaaatacgatgaatattgtgttgaattactgtggtggcactctgttcttagattttcatttt

SEQ ID NO: 95992 - DNA, 430 bp, Arabidopsis thaliana columbia
gagagaaaaagaagagcagagcaaaatccctaaaattttaaactctgttttgctttccgacaatcaaaccctaggggttgctaaagggaaaggagagagatgggtggtgaagaggaagttgtttctgttgagctaccagcaccttcttcatggaagaaattgttttaccccaacaaagtgggttcagtgaagaaaacagaggttgtgtttgtggctccaacgggtgaggagattagtaacagaaagcagctggagcagtatctcaaatcgcaccctggaaaccccgcgatcgcagagtttgattggacgactagtgggacacctaggagatctgcaagaatcagtgagaagactaaggctacgccgtcaccagataaagagccacccaagaagcgaggtagaaccaaatctccagtgtcaaagaaagatg

SEQ ID NO: 95993 - DNA, 824 bp, Arabidopsis thaliana columbia
  unsure (1)..(824): unsure at all n locations
atatcatcaaaagagttctacgaagatcaatctccagcggtgaatgcagcaatacgcttacaacagcgatgcagtgagaaagttggtaaagatgcaaatgatttagcaatctctacgcgtttacttgtatcgagttcccaaatcgggtgtctcattggaaaaggtggagcagttatatctgagatgaggagtgtaacaagagctaatattcgtattcttcaaaaagaagacgtaccaaaaattgctcgtgaagatgaagagatggttcagattacaggaagtcctgatgccgctatgaaagctctcacgcaagtaatcttgcgattaagagctaactctttcgacatggatcatggacttgtcttgctaccaacatcttttccatatatccctcaagtgactgaagttcgagcaaatccaaatacgcaaaacgcgatgaccacagtaaactgaattcgaattctaagagaagaaaccatgtttcttaaatcaagaaaaccaatcttagagaggaagattgagagtgttcagaacttcaatgttgatgcaatttttatacaatattatgttacttgtaggaaaaaaaagttgaaaaagcaattcacataagaaatgtaaacaagagatggtgtgttttcatctttgttctttttttcttttacgttggtatactctttgaattttcgcaagtattttttaaaatttctatttctagtaaccaacatttcattattcaaaaaaaaaaaaaaagnnnnnnnnnnnnnnnnnnnnnnnnnnnnnnnnnnnnnnnnnnnnnnnnnnnnnnnnnnnnnnnnnnnnnnnnn

SEQ ID NO: 95994 - DNA, 664 bp, Arabidopsis thaliana columbia
  unsure (1)..(664): unsure at all n locations
atgatacgtcnnnnnnnnnnnnnnnnnnnnnnnnnnnnnnnnnnnnnnnnnnnnnnnnnnnnnnnnnnnnnnnnnnnnnnnccacgcgtccggcaaatccaaatacgcaaaacgcgatgaccacagtaaactgagggatatatggaagagatggttcagattacaggaagtcctgatgccgctatgaaagctctcacgcaagtaatcttgcgattaagagctaactctttcgacatggatcatggacttgtcttgctaccaacatcttttccatatatccctcaagtgactgaaagttcgagcaaatccaaatacgcaaaacgcgatgaccacagtaaactgaattcgaattctaagagaagaaaccatgtttcttaaatcaagaaaaccaatcttagagaggaagattgagagtgttcagaacttcaatgttgatgcaatttttatacaatattatgttacttgtaggaaaaaaaagttgtctatgcaattcacataagaaatgtaaacaagagatggtgtgttttcatctttgttctttttttcttttacgttggtatactctttgaattttcgcaagtcttttttaaaatttctatttctagaaaaaaagggcgaccgctctagaggatccaagcttacgtacgcgtgcgtgcgacgtcat

SEQ ID NO: 95995 - DNA, 922 bp, Arabidopsis thaliana columbia
  unsure (1)..(922): unsure at all n locations
atgatactccagctctatacgactcactattagggaagctggtacgcctgcaggtaccggtccggaattcccgggtcgacccacgcgtccgatggtactgatgatgataatgatcttggtgaaaagcaaacggtaaccgtgaggatgcttgtaccgtctgaccaaattggttgcgttattgggaaaggaggtcaagtaatccagaatcttcgtaacgacaccaatgctcagattcgtgttatcaaagatcatcttcctgcttgtgctttgactttgagtcatgatgagcttcttctgataattggagagcctttggttgttagagaagctctttatcaagttgcttcactgcttcatgataatccttcaagatttcaacacttactcctgtcttcttcaagttcttccatgcatcaacctggtgcaatgttaatgtctgcagcactgacgagctctcacagaaactacgctgtgcgtagagatatagcagatgcaagagaattttgtgtttgcttcatctgtccagctgaaaacgttggaggtgtgattggaaaaggcggtggtttcattaatcagatcaggcaagaaactggtgctactattagagtcaatacctcagaaactgatgatgatgattgcatcattttcatatcatcaaaagagttctacggagatcaatctccagcggtgaatgcagcaataccgcttacaacagcgatgcaggtgaggaaagtttggtaaagattgcaaatgattttggcaattctcttacggggttacttgtatcggggtccccaaatcgggggggccccatttggaaaaggtgggcccgtttttttcttgnggttgggggtntncaaggnctantatncggtttttccaaaangnggntncccaaatttccnntnaggntanggntggc

SEQ ID NO: 95996 - DNA, 723 bp, Arabidopsis thaliana columbia
tttttattgagaaatatggtactcatgttgttgttggagtgactatgggaggtaaagatgtcattcatgtgaaacagatgcgtaaatcgaatcatgagcctgaggaaattcagaaaatgttgaagcattggggtgatgaaagattttgtgttgatcctgttgaaagtaaatctcctgcttctgtttattcagggaagccaaaggaggagaatcttctacaatggggacttcaaccgtttggtacctcggttagctctgctgttgtcatgcataccaagaacgaggagattatgagggtttgtatcagaagaggaggtgttgatctggggcaaagtcatgaacgatggctctcaacagtatcacaagcacccaacgttatatcgatgtgttttgttcctataacttcactcttgagcggtctcccagggacaggatttctttagtcatgcagtgaacttatacctcccgatataagccacctatagaagggttgcatcagtttcttgaggttcaacttccacgccaatgggctccagtgtatggagatctccccctttggactacgccgctcgaaacaaagttctccatcccttcagttctctttgatgggtccaaaactatacgtcaacacatcaaaggttgattcaggtgagcgaccagtaaccggactacgcttcttccttgagggaaagaaaggaaatcatctagcaatacatttgcagc

SEQ ID NO: 95997 - DNA, 871 bp, Arabidopsis thaliana columbia
  unsure (1)..(871): unsure at all n locations
gttacttgttagatctcaacaaccaggtcgcacacactaaaatggcgttccgcgttttgctcctcttctcactcaccgcacttctcatcttctccgccgtttctccttctttcgccgcttcttcctccgacgacgttgacgatgaggatctcagcttcctcgaagatctcaaagaagacgacgttcccggcgctgactcactctcttcctcaactggatttgacgaattcgaaggaggagaagaagaagatcccgatatgtacaacgacgatgacgatgaagaaggagatttttccgatctaggtaatccggattccgatccgttaccgacgccggagattgatgagaaagacgttgtggttatcaaggagcgtaacttcactgatgtgattgagaataatcaatacgttttggttgagttttatgctccgtggtgtggtcattgtcagtctcttgctcctgagtatgctgctgctgccacggtgctgaaggaagatggtgttgttttggctaagattgatgcgacggaggagaatgagttagctcaggagtatcgtgttcagggctttccgacgcttcttttcttcgttgatggtgagcacaagccttacactggaggaaggactaaagaaacaattgtnacatgggtgaagaagaagattggtcctggtgtgtataatctaactacattagatgatgctgagaaagtntttgacttctgggnancaaaagtttgtttttgggntactttgnacctccctggtgggtnttntagcacggtccngctttaattctggtttccaaaagncttaagacggntgtgaaccttttttccaaacaagtgaatccctgatttttnnaaanntntttt

SEQ ID NO: 95998 - DNA, 451 bp, Arabidopsis thaliana columbia
gctaagatcaaatcaggaatggtgctcagaaacttaaccatttcttacgaaatcatcaaatctctgaaacatgccaaagaacatagtttagggattcaaatccgatggatctcgagcctgaaagtggtatggaagaaagacacgaggctagacgaagccatcgagcaggacaagcgttacaagctctgtgctcgggttgtgaaagaagtcctgaacgagccaggtcaagtcattcctctcagatacctcgaaaaacggcgcgagaggctacgtctcactttcaaagctaagagctttgttgaaatgaacccttccctgttcgagatctactacgatcggatcaaacccaagttcgatcccgttcaattcctccgccccacgccttgttttaaagtttttctcggcgaatagcatagattttctttgagaatgagcttttacttgttttcat

SEQ ID NO: 95999 - DNA, 1929 bp, Arabidopsis thaliana columbia
  unsure (1)..(1929): unsure at all n locations
tgannnnnnnnnnnnnnnnnnnnnnnnnnnnnnnnnnnnnnnnnnnnnnnnnnnnnnnnnnnnnnnnnnnnnnnnnnnnncccggcacgaggaaaggggaaaaaaaaaaaaaatcagattcctgatattttctgcttcgcttcgctttgctttggcctttgggtttgctttgccttttatctccacaataataatattcgttaacctctcctcgttctcgtcgctgtttcttcccgatctttgctatagttctggattcaaaatctttcttccccaatagatgtttgtctcttaatttttgatttttctgcaaaatcaaatttttaagagctatggaggaagagaatgttactagttcaccttcaacaccggtacataggcttaggcatcgaagacgttctaatgaggttgttacggatggggataaagtgaatgcaagtcctttgttggttaatgatcggaataagtacaaatctttcatggtccggacctactctacgttatggatgattggtggttttgttttggttgtctacatgggtcatctttatatcacagctatggttgttgttattcaaatatttatggctaaagagttgtttaatctgctgaggaaagctcctgaggataaatgtctcccctatattaaacagctcaattggcacttctttttcactgccatgcttttcgtttatggacggatccttagtcaacggttagccaataccatgactgcagatcagttcttctatcggctagtcagcggcttaatcaaataccatatggcaatctgttacttgttgtatattataggtttcatgtggttcattctcacattaaagaagaagatgtacaagtaccagtttggccagtatgcttggacccacatgatcttgatagtcgtgtttactcaatcgtcgttcactgttgccaacatatttgaagggatcttctggtttcttctcccagcatctttaattataatcaacgacatcttcgcctacattttcggtttcttctttggaagaacgcctttaataaagctgtctccaaagaaaacatgggagggattcatcggagcctctgtgacaactatcatctctgcatttgttctggcaaatattttgggtcgtttcccttggttgacatgcccacgacaggatttgtccactggctggctacagtgtgacgctgatccattgttcaaacctgaaccttttgctttacctgcatggattccagaatggtttccttggaaggaaatgacgatcctccctgttcagtggcatgctttatgcctcggtttgttcgcttcaatcatagcaccttttggaggatttttcgctagcggtttcaaaagagcattcaaaattaaggactttggtgatagtattccaggacatggtggaatcacagatagaatggactgccagatggttatggcagtatttgcctacatatatcttcaatcatttattgtctcccaaagcgtttcggttgacaaaatcctagaccagatattgacgaaccttacctttgaggaacaacaagcgctcttcgtgaagttaggacaaatgctgaaggacaagctctcataggctccattgccaaaagtttcttttattcagattccgattctccaagaacaggttcctctggaatatccttttatctttgtccttactagagacaataaatttaaaattggattaagatttgttgtttcctgccattgtaaatcctctcgaaatttgtcgaaaaaattagaagtttttttaaaagtcttctcattggatacaataggtttgaagaaagttgtatctactactatctacttatttagtagctttggtggtttttagctgtattttgtatattggttaaaatgaaacaacatttggtttgtttgtctcatgattcgatttgttc

SEQ ID NO: 96000 - DNA, 1220 bp, Arabidopsis thaliana columbia
  unsure (1)..(1220): unsure at all n locations
agacctccaggtacctaccactcactttaggaaagctgctacgcctgcaggtaccggtccggaattcccgggtcgaccccccggccccttcaccgcctgccgatctctctcaatctccgatcaaccatgagcaaaggtccaggactcttcaccgatatcggcaagaaagccaaagatctgttgacgagagactacaattccgatcagaagttcagtatctccacttacagtgcctccggcgtggcccttacgtctactgctctgaagaaaggaggagttcatgctgctgatgttgccacccaatacaagtacaagaatgctttgtttgatgttaaaatcgacactgattctagtgttttgacaacagtcacacttaccgagatcctcccatcaacaaaagccattgcctccttcaaagtccctgattataattccgccaagctcgaggtgcaatacttccacgaccacgcaacagttaccgctgctgcagctttgaaacaaaacccactaattgacataacagctactcttggttcgccagtcatctcatttggtgctgaagctggatatgacacaacctccaaaactttcaccaagtacaatgccgggatcagtgtgacaaaaccagatgcttgcctctccataatattgggagacaaaggagactcactcaaagcatcataccttcatcactttgatgaatttaagagaaccgcagcagttggtgaggtttacaggaagttctcgacaaatgaaaacacgataacggttggtggattgtatgcgattgttcattcgactgcagtgaaagctaagctcaacaacccatggcacacttggtgctcttctgcagcacgaggtcctgcccagatcactagtgactgtttccagtgagattggacactaaggctttagaaaagcatccaaggtttggtctctctcttgctctcaaaccttgagaacacacactcacatcagacctgcttgagtcttcctacttttctcgtatgctctcattgttgatttcctctacggcaggacgtaagagttagcgtttttttcctccttttttccttacgtttaattggaatcaataaatagttccgcagtgaaattgccggataaaaaaaaaaaaaaaagggcggccgctctagaggatccaagcttacgtacgcgtgcgtgcgacgtcataaatcttgtagtagtgttacctnnacaat

SEQ ID NO: 96001 - DNA, 439 bp, Arabidopsis thaliana columbia
accatggcggctcaacttcaacctcctttgatcttcgagacctgtcacatctctcccccaaagggcgaccgttccatccaccactctgcgctctcaccttcttcgatgccccctggctctctctcccactcgccgattctctcttcttcttctcttaccaaaactcaactgaatctttcctccaagactttgtacccaacctcaaacattccctctccatcactctccaacatttcttcccttacgccggtaaactgattatcccgcctcgtcccgaccctccatatttacactacaacgctggccaagactctcttgttttcaccgtagcagagtctactggaaccgacttcgaccaactgaagtctgattctcctaaagatatcactgtgttgtatggcgtctatcccactggtttcttttttattacgatttttcg

SEQ ID NO: 96002 - DNA, 372 bp, Arabidopsis thaliana columbia
cttcggtacagagcaaatcacagctcccgatggccgccacgtcatcatcaccgccgtgtaacatctccgcgtccgtccctcctcctccgtcaacctggctcgctcaatccttaaagtgttcggtttattaccacctgtaagtaggaataaccgtaaactcggccggttaacggtgacccggtctaatctggcgcaggattttcttggtgacttcggagctcgtgacccttacccggaggagatagcgagtcaattcggagataaagtgttgggatgccaaagcactgagcacaagattttgataccaaacgcatctggtttgtctctcttccagcttcagtgttcccctgttttgtcttcacagccttcttt

SEQ ID NO: 96003 - DNA, 454 bp, Arabidopsis thaliana columbia
  unsure (1)..(454): unsure at all n locations
gcggcgattcctctcaaagctccttctcttcctggaacgagagagtgttctcccttccttaaccggttcgtcactcatcaaccggttaatttcatccggaagtttcatccttccttagatgaagcatcgttctccagacggggacgaaccactgttgttcgcgttttggagacggagaagagtacgaaaatagagaagcctgagcctccggtgaaattgattgctctcgtcggaaaaggagaagtaagccccactccaatccccctctttgggaagaaagtttatgctcccacactggcgagaaagatttgaaatgggtttgatgaaggatatgaaatgctcctcctttgatgaatgaaattgtgagtttccaatgattcagagagcttttaatcttgacaccggaactgaatccnantgaattcttgggtngtccgntgnngtttataccccc

SEQ ID NO: 96004 - DNA, 496 bp, Arabidopsis thaliana columbia
caaaataaaagcatatagccatatatgttgataccgaaacaagatagtatccaaatagaagagacaacattcaacacagtactgtgaagcaagtgtgatccgaaaatgaaaagagaaagttcttagacatacaagtgaaggataaacattatctgaaaacaggtcatatcctagccacataagaattcgcctgtgtcacatatctcacccaacgatatggattataactacttgatttctttgctatctgcaagtatttgacctgaagtttagaaacattgtacataggtatcgtgaacgtcatgctgactggccctgcttcctttgtgatattaccatgaaattcctgtgaaaatgtaagctttgcacgcagtgtatgctcacccccgccaacaatcttttttaaattccattcaagcattttgttggattccttgaaatctgtcctctgtccagcagcaccggggtctatctctcaactcgcccccggggtgta

SEQ ID NO: 96005 - DNA, 804 bp, Arabidopsis thaliana columbia
  unsure (1)..(804): unsure at all n locations
aaatnnnggggatttntcccngngganttnnaaaccntgacntcgttnggaaacccctttcccgtcgtgcccgatcggaacccccgatgataagcgatggttgtcaatggggaaaatttggcccagaagttggccaaagggaatccttgtccgcgggcatattaccgctgcacgatggccacgggctgtcccgttcgcaaacaagttcaacgttgcgcgggaagacagatcaattctgattacaacctacgagggaaaccataaccatccgttgccgccagccgcggtagccatggcttctaccaccacggcggcggctaacatgttgctatccgggtcaatgtctagtcacgacgggatgatgaaccctacaaatttactagctagggctgttcttccttgctccacaagcatggcaacaatctcagcctccgcgccgtttccaaccgtcacattagacctcacccactcacctccacctcctaatggttccaatccttcctcttccgcggctaccaacaacaaccacaactcactgatgcagcggncgcaacaacaacaacagcaaatgacgaacttacctccgggaatgctacctcatgtttatangccaagcattgtatnaccaatcccaaattctccggggggtgcaattctcttggtngntctcccctccaanagggaagcgtttttctncaatcacacgcgggtggggtgaatanaataacgggactccacaactgaaaccnaatttcccggggggtctttgnaaccgtttnttctttcctttnaattnaatggntn

SEQ ID NO: 96006 - DNA, 457 bp, Arabidopsis thaliana columbia
ctctctctttcaaccaaacccctaaacaaaaaaaaaatacattttctgatctctctaaaaatctttctccttcgttaatctcgtgatctctttctttttctatatatggacagaggatggtctggtctcactcttgattcatcttctcttgatcttttaaaccctaatcgtatttctcataagaatcaccgacgtttctcaaatcctttggcgatgtctagaattgacgaagaagatgatcagaagacgagaatatcaaccaacggtagtgaatttaggtttccggtgagtctctcaggtattcgtgatcgtgaagatgaagatttttcatctggcgttgctggagataatgaccgtgaagttcccggcgaagtgggatttcttcttcgacaagaaatcttgggtttgttcgtgaaggctaccgaggatttcgtgtgaagaaggaagaacaagatga

SEQ ID NO: 96007 - DNA, 581 bp, Arabidopsis thaliana columbia
cagcaacaacagaacaataaggtaatagaagctgctgagaagcctgaggagacgatagtaccaaggcagtttattgatttaggccctacgagagcagtaggtgaggccgaggatgtgtcaaattcttcatccgaagatagaactcgttcggggggttcttctgcagccgagagggtaagtaacgggaagagacttgggcgtgaagaaagccccgaaactgagtccaacaaaattcagaaggtgaattctactaccccgacgacatttgatcaaaccgctgaagctacgatgaggaaagcccgtgtctccgttcgtgcccgatcggaagctccgatgataagcgatggatgtcaatggagaaaatatggccagaagatggccaaaggggatcctttgtccgcgggcatattaccgctgcacgatggccacgggctgttcccgttcgcaaacaagttcaaacgtttcgcggaagacagatcaattctggttccaaccttcgggggaaccataccatccgtttccccaacccgggccatggtttttcccacccggggggggttaaatttgtttcgggaatttgc

SEQ ID NO: 96008 - DNA, 624 bp, Arabidopsis thaliana columbia
  unsure (1)..(624): unsure at all n locations
gcgttcgtctaccaaaacaccatcctaaaaatcatcgtcaattctccaaaagatcgacggatcacgcgggattatattttacctacgtgtaccccatctntctggaacccaagtggagacaccagagttgccagcggataccaaaatccattgtctgaagcgttttactcgggcagatggaaaatgttttgaacgtgacacatggagagaaataaaggaagacattgaacgtgataggtctgagaatgccagctcctctgatgcagttgttatatctcaagaaatcacagaaaagaagcctgtagaaataagagaggttgaatcgaatgcacctcgcgccagtgattgtaccgagaaagtagatgtcaacaaggaacgtcttcttaaagtccccatagatagggctctatatcagaaggcactaacatcacttgttgattccaaaattccccaagaagaagtctttggggtccatgaaactaataagcctggtgaggaagcactagctagtgctgagtttgtgtcttttgtggactgtactcctgaaagggtcaaatctatctttgagaaggccaaattggtgaagggttgctggctaagatgtgctttgacataaaagaccct

SEQ ID NO: 96009 - DNA, 485 bp, Arabidopsis thaliana columbia
ggaaggctggcccgcctgcaggtcccggcccggaattccccggtcgacccacggcgtacgcccacgcgtccgacgagtcgctaatcaaataaacctaaaccctagatcgtgatcggcaacggcacctcctcgtcggcgatagcttctcttccactaaaagaaaatcctcttcggtgagaatggcagagcatttagcttcaatctttggtactgaaaaggatagagtgaattgtccgttttactttaagattggtgcttgtcgtcacggtgaccggtgctcacggcttcataaccgtcccaccatctcgccgacgcttctcctctcgaacatgtaccagagacctgacatgataactccaggtgtggatcctcagggacagccgttagacccgagtaagatccaagaccactttgaggatttctacgaagatattttcgaagaactcaacaagtttggtgaagtggagagtctcaatgtttgtgac

SEQ ID NO: 96010 - DNA, 540 bp, Arabidopsis thaliana columbia
  unsure (1)..(540): unsure at all n locations
ctcatatatggggaaacgtgaaattcattttactccggtgggtcgtcaggtgcagagagttctggaatatccattgcgcttggagaatcgttcgccgatgtcttactcaagaaggtcaagatactctccttcactatctccttatgacaagcgtcgtggaaggtctgtgtcaaggtcattgtctagaagcccgacgaggagtgtctcaagcgatgctgagaatcctggtaacagtttatatgtaactggattgtctcaccggggttactgaaagagatctgggagggatcattttcgctaaaagaaagggaaaggtacctgatggtcaccttgtccctggaccccatcggcctagaagaatcctcgccggatttgggttttatcccctatgaaaagtggttggtggatgccaaaccggttgcaatccagatctcctagatcaactccggttctgcaagggccggggcaaccactggtnaaaanggaanacgcccgnaaangncggaacnccaacnncaggaaagaactttggggttnaaa

SEQ ID NO: 96011 - DNA, 1035 bp, Arabidopsis thaliana columbia
  unsure (1)..(1035): unsure at all n locations
tttagtagcttcaatataggaatgttgtttttntcgtgtttcctgtttcattgatgaatgtctgacagatctgtnatatctctggtttnctgttcaggcaagacgtcgtagaggacgtactccaactccaggaaagtacttggggctgagaactgctcgaggacgacataagtntcctagctactctccccgcaggtctgtnagctgctctcgtagtcgtagtcgaagctactcatctnatcggggcagatcttattctccaagctatgggagaagaggaaggtcatcctcgtactcccccttctatcgacggacgcagattctactctccttcgagatctccttcacctgatgatcgttccaacaggagacgcggcagttcatactcaccttactacaggcggagggcccggtccagatcctactcacggaactgtagggcacgggacagatcaccttaatacatgcggaggtacaggtccagatccaggtcatactcgcctcgctacaaagcacgtgaccgatcatgctcaccctactacaggggaaaagaccggttttattcacccccctaccaagggaaagacagatcctactcacctgaaagtcgttactacaaaaggcacaggtcggtatcgggaagcgtaagccctgaagggaaaagcatgtcacgtagcatatccccaaggaagggaaggaaagaaagcagaagcaagttttggaggcacgacaggcaattttcaatgtgtcatttgaggagcgcaagatcaagcacctccaaatccgtcagcccaaaacagtttttacttacttgaagttgacatcaatcactcacgtctgttgttgtattaagcattttgggacttgtctattccttgtatttggaattgatgacagtacgtatgttatgttggtttggtgtttaaaaaaaaaaaaaaaaaaaaaaaaaaaaaaaaaaaaaaaaaagggcggccgctctagaggatccaagcttacgtacgcgtgcatgcgacgtcatagctagtctatagttgt

SEQ ID NO: 96012 - DNA, 1221 bp, Arabidopsis thaliana columbia
gtaccggtccggaattcccgggtcgacccacgcgtccgtttagtagcttcaatataggaatgttgtttttgtcgtgtttcctgtttcattgatgaatgtctgacagatctgtgatatctctggttttctgttcaggcaagacgtcgtagaggacgtactccaactccaggaaagtacttggggctgagaactgctcgaggacgacataagtctcctagctactctccccgcaggtctgttagctgctctcgtagtcgtagtcgaagctactcatctgatcggggcagatcttattctccaagctatgggagaagaggaaggtcatcctcgtactcacccttctatcgacgacgcagattctactctccttcgagatctccttcacctgatgatcgttacaacaggagtaccggttcggaattcccgggtcgacccacgcgtccggaccggtccagatcctactcacgtaactgtagagctttttacagatcaccttactacatgcggaggtacaggtccagatccaggtcatactcgcctcgctacagagcacgtgaccgatcatgctcaccctactacaggggaagagaccggtcttattcaccccactaccaagggagagacagatcctactcacctgaaagtcgttactacagaaggcacaggtcggtatcgggaagcgtaagccctggagggagaagcatgtcacgtatcatatccccaaggaagggaaggaaagagagcagaagcaagtctcggaggcacgacaggcaatcttcaatgtgtcattcgaggagcgcaagatcaagcacctccagatccgtcagcccataacagtctctacttacttgaagttgacatcaatcactcacgtctggtgttgtattaagcattttgggacttgtctattccttgtatttggaattgatgacagtacctatgttatgttggctgggtgttaagatactttattacttctgtggaaaagttgcttttgcgacgagtcgtgagagaaatggaatcttcttttttgctacaaaaaaaaaaaaaaaagggcggcccgttctaaaaggattccaagctttacgtaccgcgtggcatgccaacggtcataagcttttttctattggcggtcaccctaaaattcaaatttaactggggccgtcggtttttaccaccgtccgagaactgggaaaaaaacccttgggcgtttccccaaac

SEQ ID NO: 96013 - DNA, 2093 bp, Arabidopsis thaliana columbia
accacgcgtccgcccacgcgtccgagactcttctccttcgcttattaagccctctcaactcttcttctctctctctctctctctccgcctgtcctccattgatctaatctaactcgctcatcagaatcatctcttcatcgttaatcctcttccttctcactcaccatgtatcgtttcgcttctaacctcgcctccaaggcaaggattgctcaaaacgctcgccaggtttccagcagaatgagctggagcaggaactatgcagcgaaagagattaagtttggtgttgaagctcgagctttgatgcttaagggtgttgaagatcttgctgatgctgttaaagtcaccatgggtcccaagggacgtaatgttgtgattgagcaaagttggggtgctcctaaagtgacaaaagatggtgttactgttgccaaaagtattgagttcaaagacaaaattaagaacgttggtgctagtcttgtgaagcaggttgcaaatgctactaatgatgttgctggtgatggtactacttgtgctactgtcctcacccgggctatatttgccgaaggatgcaaatcagttgccgcaggaatgaatgcaatggacttgcgaagaggtatttccatggcagttgatgctgtggtgacaaaccttaaaagcaaggctaggatgatcagcacatctgaagagattgctcaggttggaaccatttctgctaatggagagagggaaattggagaacttattgccaaggctatggagaaggttggcaaagaaggtgttatcacaatccaagatggaaagacattgtttaacgagttggaagttgtagaggggatgaaattggacagaggttatacttcaccatactttatcactaatcaaaaaacccaaaaatgtgaactagacgatcctctcattcttatccacgagaagaagatctcaagcatcaactctatagtgaaagtgttggagttggctctgaagaggcaaagaccactattgattgtttctgaagatgtggaaagtgatgctcttgcaactcttatccttaacaagctccgtgccggaattaaggtctgtgccatcaaggcccctgggtttggagagaataggaaggccaatttgcaagaccttgctgcccttactggtggagaggtcatcacagacgagcttggcatgaatctggagaaggtggacctaagcatgctaggaacctgcaaaaaggttacagtctccaaggacgacactgttattcttgatggggctggcgacaagaaaggaattgaggaaagatgtgaacagattaggtcagcaattgaactgagcacctcagattatgacaaggaaaaactgcaagaaaggttggctaagctctctggaggtgttgcagtgttgaagattggaggagcaagtgaagctgaagttggtgagaagaaagacagagtgacagatgctttgaatgccactaaagcagcagttgaagagggtattttaccaggaggaggtgtggctcttctatacgcagcaagagagttggaaaaacttccaacagccaactttgaccagaagattggtgtccagattattcagaacgcattgaagactcctgtttacacaatcgcttcaaatgctggagttgaaggtgctgttattgttggcaagctcttggagcaagataacccagacctcggttatgatgctgctaaaggtgaatatgtggatatggtgaaagctggaatcatagaccctctgaaagtgatcaggacagctttggttgatgctgcgagtgtgtcatctttgttgacgacaacggaagctgtagtggttgatcttccgaaagacgaaagcgagtcaggagcagcaggagcaggcatgggtggaatgggaggcatggactactagatccactaaattctgtcttttgttttcaccaatcaccatcttaacttgagaagagagatacgattcttttaaggagttttagtcttcgtctttgccttattgttgctcaataacctcaaaagttttacaataaacagagcacacttgacaatgttacgagacacactattagcatcaacaattaaaaccgaggc

SEQ ID NO: 96014 - DNA, 500 bp, Arabidopsis thaliana columbia
tacgactcactttagggaaagcacgtacgcctgcaggtaccggtccggaattcccgggtcgacccacgcgtccgcccacgcgtccgcccacgcgtccgcccacgcgtccgagcaatctgggcatgacaaagtccatgaatttctttcagaacatcattaaacctttcaaacgcagctccaatcgaggtaagatccgtttgatttgttgattcttagtgtaagattaggtggttgtgaaatttgactaactttttcttcgttgacttaaaggtcttgaagatgatattgagcgaattgctgctatggagcaaaaagttttcccatttcaagttttagtttccgctaccaaagattttcacccgacccataaactcggtgaaggtggtttcggtcccgtcttcaagattacctgacgggagagacatagcagtgaagaagctatctcaggtttcaaggcaaggcaaaaacgagtttgtgaacgaggctaagttgttggctaa

SEQ ID NO: 96015 - DNA, 317 bp, Arabidopsis thaliana columbia
  unsure (1)..(317): unsure at all n locations
agcttctctaccggaagaggtgcttcagccgcttttacattcttcagatttatcatactctctagaagagtgcttgaaatttcttctagagtcttccaagaccgattcaggtcgttccgatctcgcttccaagtctattcttccgtccttcctcccgcttcttcagcttcttccttacccatcttcccgtcattatctgaatctctctctgaaggtccntcgaaacctctncgcaggtgaggtttcgantcaanaactctntcgtcgatcataacgggctctgntatcgtctccgantttccttgattccngncatt

SEQ ID NO: 96016 - DNA, 399 bp, Arabidopsis thaliana columbia
  unsure (1)..(399): unsure at all n locations
tgatgagcttcttacaaatatttcgaccttgtcctctgtgtaccacaaacccccagaggcttttgttacccgcttgaaaacgactgttcagaaaacagaagacgaggactttgcggaaggaagcgaagcgggatactcatctagtaatccggttgatagtgcagcttctcctccaggtaatatcccacagccttccggatgactaccagcaccagcggtcccagctcctgtacctgatctgctaggtgacctgatgggattggataatgccgctattgtcccggttgatgatcccataactcaatctggtcctcctctgcccgttgtcgtccagcttnaagtgggcaaaggtttcagataagngntnaatttntcccgnaaaggtgggcaagtnttttt

SEQ ID NO: 96017 - DNA, 859 bp, Arabidopsis thaliana columbia
agctactatacgactcactttagggaaagctcgtacgcctgcaggtaccggtccggaattcccgggtcgacccacgcgtccgcccacgcgtccgatttacacggcgtctcgggccatcacgagcctaattccgaacctccaattccgacaggttcgtcgagtccgaagctgaagattagtcccaaattgaatcggtggtctaggggccgagctttaagatctggtgttaagcttgacccgccaattccccgttccgataactcacctcgccgtcaagtaacggaagcccaaccgaccgatgaggctgataagaagacgacggcgatcgacgtggaggtaacggcgggaaagtctatatatttggtttccgacggaactgggtggacggcagagcattccgttaacgccgctttgggacaattcgaagatttttcgttgaatcgtggctcttctgtgaatacccatctcttctcctgggttgaggatgaggagaggcttatcgagattattaagcaagcggcaaaggaaggggcaatgtgtttctacactttagcaaatccttctatggcaaaatccgcaaagcaagcttgtgatcagttggggtgtgctttcggttgatattctaggaccaatcatcgaagggattgcgtctcacttaggtgtttctccgtcaggtcttacacgtggagcacctggtagggtcaagactctcaatgatgcatatttcaaaaggattgaagccattgagtttaccattaagcaagatgatgggactttacctgagaacttaagcaaggctgatatagttcttgtcgggtttcccggacagggaagacgcccttgtccacttacattgctc

SEQ ID NO: 96018 - DNA, 515 bp, Arabidopsis thaliana columbia
agctaccatacgactcactttagggaaagctcgtacgcctgcaggtaccggtccggaattcccgggtcgacccacgcgtccgcggacgcgtccgcccacgcgtccgttctcaactaacttagttagggatatctccggtcatggatctcaggcggagacagtggttcttgtcggctattttgctgtcggcggcgttgctgattgacccgcaattctcgacggcggcgacggcttcggagaatttggtatttgaagttcgaagcaagttcgccggaaaaagagtaaaagatcttggagctctcagagctcacgacgtccaccgtcactcaagactcctctccgccatcgatattcctctcggcggcgatagccagcctgagtctattggtttatacttcgctaaaatcggactcggaactccatcaagagacttccatgttcaagttgatacaggaagtgatatcttatgggggaattgtgctggttgcatcagatgtcctaggaaaagtgatctg

SEQ ID NO: 96019 - DNA, 320 bp, Arabidopsis thaliana columbia
gccactggttctggaaaaaccctagctttcgtcgttcccctcgtagaaatcctccgtcgatccacctcattccctccgaagcctcaccaggtcatgggggtgattatatcgccaacgagagagctatcaacgcagatatataatgtcgcacaaccatttgtttcgactttggcaaatgtgaactctgtgttgcttgttggaggccgagaggtgaaagctgacatgaagattattgaagtaagaaggatgcaatgtcttgtttgggacacctggaagactttctgatattatggaactaatggggattctgggtttttgaa

SEQ ID NO: 96020 - DNA, 735 bp, Arabidopsis thaliana columbia
acaggtaccggtcccgaaattcccgggtcgacccacgcgtccgggtcctattaataactctctgctctcttcctgaagcttcttcatctttttgtttgacaagaagaggtagagaagaagatgtctcaatcaatctcctccagcacaaaggcagaagaagttgttagtgtagatgtgagccaagccaagactctcctccagtctgggcatcaatatcttgacgttaggactcaggacgagtttaggagaggccattgtgaggcagctaagatcgtcaacattccctacatgctcaacacacctcaaggtagagtgaagaatcaagagttcttggagcaagtatcttctcttctaaacccagctgatgatatccttgtgggttgtcagagtggagccagatccttaaaagccacaactgaacttgttgctgcaggttacaagaaagtgagaaacgtgggaggtggctacttggctttgggtggatcacagctttcccatcaacacggaggaggaggagccatctcctaattaataatcttaagattctcttcttttcttaatcaaataatataactgcctgtgtgatgtagtaatcattttcaatttaaaattccagtttcttgtaatcaaaactttcgtgtaccaaattcaataaaagctgtgtttctaaaaaaaaaaaaaaaaaaaaagggcggccgctctagaggatccaagcttacgtacgcgtgcatgcga

SEQ ID NO: 96021 - DNA, 464 bp, Arabidopsis thaliana columbia
atcgtctttcgctccactagcgatccacgcgccttctcgttcgcttgatcttgaagttggaaactttgggaaccagacaggctttgtaggagaaatgtatggaacaggggacattttgaggtcagtttcgattccttctgagactgataagcctatagtcgtggagctagcggttgcagctatggaggaactcgtgagaatggctcaaactggagatcctttatggctttcaaccgattatttcagtcgagactcttctacgtaagtagagtatttcagaacgtttccgagaggaattggaccaaagccattaggattaagatcagaggcgtcaagacaatctgcagttgttataatgaatcacatcaatctcgttgagattctcatggatgtgaatcaatggtcttgtgttttctctgggattgtgtcaagagccttgacacttgaagttctttcaactggag

SEQ ID NO: 96022 - DNA, 457 bp, Arabidopsis thaliana columbia
cacgattattctccaaagagaaagagaaaaatcaataacctcatagtgtcgacatgggttgccaagacgaacaattggtgcaaacaatatgcgatctctacgaaaagatctcaaagcttgagagtctaaaaccatccgaagatgtcaacattctcttcaagcagctcgtttccacatgcataccaccaaaccctaacatcgatgtcaccaagatgtgtgacagagtccaagagattcgacttaatctcatcaagatttgtggtctagccgaaggtcactttagaaaaccatttctcttcgatcttgacctctttaccaagaccaacccactttcagcaatttcaaacatttttcccttattacaacaacctatttgaaactcggaaagctcgagttcgacctcctcgaacaaaacctaaatggctttgtcccaaagagtgcggctttcattggatct

SEQ ID NO: 96023 - DNA, 688 bp, Arabidopsis thaliana columbia
  unsure (1)..(688): unsure at all n locations
gggcccccccttgaaatgcatttccatggccggaccgcaattcccgggtcgacccacgcgtccggtaacactggtcgaaagaagacgaacataaactcgtctccatgactactttatcttcttcgtacggaacattctctacagtcttcaacagttctagacctaattcctcagcaacctttctcgtcccttccttgaaattctccaccggaatatcgaatttcgcgaatctgagtaatgggttttctctaaaatctccaattaatcctgggtttctcttcaagtctcgtcctttcactgtccaagctagagctgctgcagaaaaaaccgttcacgatttcaccgttaaggacattgatgggaaggatgttgctttgaacaaattcaaggggaaagttatgttgattgccaatgttgcttcaagatgtggtttgccatcatcaaattacctcagggcttttcacatctgtacggggaattcaaaactcaacgggttttgaggttcttgcgttttcccctgcaaatcaggtttgggttccaaggagcccggggcaaacttccggggtcaaacaattcgcgttgcacccgggttaaagcaggggtccctatatttgataagggtgacgggattggcccaggcacggcgccgttggttttgaattaacgggggggttttnggggctttnaa

SEQ ID NO: 96024 - DNA, 986 bp, Arabidopsis thaliana columbia
caagagcattgacggcgcatgcaccccacgcgtccggtaacactgggcgaaagaagacgaacataaactcgtctccggtaaccaaaaatggtttccatgactacttcatcttcttcgtacggaacattctctacagtcgtcaacagttctagacctaattcctcagcaacctttctcgtcccttccttgaaattctccaccggaatatcgaatttcgcgaatctgagtaatgggttttctctaaaatctccaattaatcctgggtttctcttcaagtctcgtcctttcactgtccaagctagagctgctgcagaaaaaaccgttcacgatttcaccgttaaggacattgatgggaaggatgttgctttgaacaaattcaaggggaaagttatgttgattgtcaatgttgcttcaagatgtggtttgacatcatcaaattactcagagctttcacatctgtacgagaaatacaaaactcaaggatttgagattctagcttttccctgcaatcagtttggtttccaagagcccgggtcaaactccgagatcaaacaattcgcttgcacccggtttaaagcagagttccctatatttgataaggttgacgtgaatggaccaagcacagcgccgatctacgagttcttgaaatcaaacgcaggaggattcttgggtggtctcattaaatggaactttgagaagttcttgattgataaaaagggaaaggtcgttgagaggtaccctcccaccacatcccctttccaaatcgagaaagacatccagaagttgcttgccgcttaaaaacttttgctcatgagtgagcatatagagactgatggttaaagtaaccgtaaattgtgacataaagtttccggttattgcttgtataccttcttacattctaagttgtactaatcgcttaataatttgcgtataatggtaatgttatatacattatattcacactgaaaaaaaaaaagggcggccgc

SEQ ID NO: 96025 - DNA, 909 bp, Arabidopsis thaliana columbia
ggagaaagaaaggtgctgtcactgaaatcaagattcaaggaaaatgtggaagttgttgggcattctctaccgtagcagctgttgagggaatcaacaagatcaagactaacaaactggtctcactgtctgaacaagaactagtggattgtgatactaagcagaatgaaggttgtaacggaggtcttatggagattgcatttgaattcatcaagaagaacggtggtatcaccactgaagatagctatccttatgaaggtatcgatggaaaatgcgacgcttcaaaggataacggcgtgcttgtgacgatagatgggcatgaagatgtacccgaaaacgacgaaaatgctcttcttaaggctgttgcaaaccaacctgtatctgttgcaattgatgctggaagttcagatttccagttttattcagagggagtgtttacgggatcttgtggaacagagctgaaccatggtgtggcagcggtcgggtatggatctgagagggggaaatagtattggatagtgagaaactcatggggagctgaatggggagagggaggctatataaagattgaaagagagattgatgaaccggaagggcgttgcggtattgcgatggaggcatcgtatccgatcaagctatcgtcttctaatcctaccccgaaagacggtgatgtcaaagatgagctctagatatgtgtacacattgtgtaaaaccatatcaaaggtgatcccaattccttgttgattcatgttgttagtttcgtcttcatgatttgattttgttgttggttttgaatttgaataaaaatgtctcgtgttttctcaaaaaaaaaaaaaaagggcggccgctctagaggatccaagcttacgtacgcgtgcaggcgacgtcataaatcttctatagttgcaccta

SEQ ID NO: 96026 - DNA, 821 bp, Arabidopsis thaliana columbia
  unsure (1)..(821): unsure at all n locations
cnnnnnnnnnnnnnnnnnnnnnnnnnnnnnnnnnnnnnnnnnnnnnnnnnnnnnnnnnnnnnnnnnnnnnnnccacgcgtccgaatcaaccaaaaaaaaacaaaaaatgaagaaacttcttttgatatttctcttttctcttgtcattctccaaactgcttgtggattcgattacgacgacaaggaaatagaaagcgaagagggcttatcaacgctttatgatagatggaggagccaccactccgttcctaggagtctaaatgaaagggagaagagattcaacgttttcagacacaatgtcatgcatgtccacaataccaacaagaagaaccgatcctacaaacttaagctcaacaagtttgcagatttaacaattaatgagttcaagaatgcatacaccggttccaacatcaagcatcacagaatgttgcaaggaccaaaacgcggctcaaaacagttcatgtatgatcatgagaatttatccaaattaccgtcctccgttgattggagaaagcaaaggttgctgtcacctgaaatcaaggatcaaggggaatgtgggagttgttgggcattctcgaccgtagcagctggtgagggaatcaacaagatcaagactaacaaactggtctcactgtctgaacaagaactagtggattgtgatactaagcagaatgagggttgtaacggaggtcttatggagattgcattttgaatttcattaaaagaagaaaccggtgggtatccaccccactggaggggaataggctattccctttaatgaaaagggttttccggatgggaaaaaattgccgaacgccttt

SEQ ID NO: 96027 - DNA, 511 bp, Arabidopsis thaliana columbia
gcactatacgactcacttagggaaagctggtacgcctgcaggtaccggtccggaattcccgggtcgacccacgcgtccggtggtcgtgaattacctcaggcagcccctcctggcctaggatcacctcatcagaacaacagagtatcgagtttacctggtactcctcaaaggtttagtattccgcagcgattagcttctttggtcagatttcgagagaaacggaaaggaaggaattttgataagaagattcggtatacagtccgcaaggaggtagctttgaggatgcaacgcaataaaggtcagttcacatctgccaagtcaaacaatgatgaagctgcatctgctggatctagctgggggtcgaatcaaacctgggccatagaaagtagtgaggctcagcatcaagagatctcatgtcggcactgtggaattggcgagaagtcaactccaatgatgcgacgtggacctgccgggccaagaacactttgcaatgcatgtggacttatgtggg

SEQ ID NO: 96028 - DNA, 678 bp, Arabidopsis thaliana columbia
cccacttgggactcaagacggctcagatctttttccgacagattcttaatagtatcttacacgctcccatgtcattctttgacaccacgccatcgggaagaattctcagtcgggcatcgactgatcagaccaatgtcgatatccttattccgtttatgctcggacttgtggtctcaatgtacaccactctgctgagcattttcatagttacctgccagtacgcttggccaactgcattctttgtgattccccttggctggcttaacatctggtaccggaactattacctcgcttcttcccgtgaattaacacgcatggactcaatcactaaggctcccatcatccaccatttctctgaaagttagctggagtgatgacaatccgatcattcaggaagcaggagttgtttagacaagagaatgtaaaacgtgtaaatgataatctcaggatggacttccacaacaatggctccaacgaatggctcgggtttcggctggagctggttgggagctgggtgctctgcatctcggctttgtttatggtattgttacccagcaacgttatcagaccagagaatgtagggttgtccctgtcgtacggactgtccctgaactctgttctgttctttgccatttacattgaccgctttgttgataacaagatggttttagtggaaag

SEQ ID NO: 96029 - DNA, 440 bp, Arabidopsis thaliana columbia
tacggctgcgagaagacgacagaaggggacaacaacaacacaaaaaaactcaaaaccatcgcgaacatcgaagaatcatctctcaacaattctccgataattctttggactgatgaattaaagggaaacgctgagtgtaaatcatacaacagttctaagtcgtgaaaacaaaaaaaagatggcttgtagaggttgtttggagtgtttgttgaagttactcaactttctcctggctgttgctggacttggcatgattggttatggtatcttgctccaaggcaacaaatcaggcagccattcatcaaccgccaagccgcccctgtcacctggtgtcccagttgctcctactttggaccaacgcccaagccgcagtgacccttggagtgcacgtatgagggaaaagtatgggcttgacacatctgagttcacatacaatccct

SEQ ID NO: 96030 - DNA, 818 bp, Arabidopsis thaliana columbia
  unsure (1)..(818): unsure at all n locations
agataacagctggagagatgaacttccttctgacaggactggaaacttcgatacgatatataatttccttagagagaactggaagattgtaagatgggtagctctaggagcagttgttttcgaggctttactcttcttgcttgcccttatggtcagggcagctaatacaccagcagagtatgacagtgatgatgaatatcttgctccaaggcaacaaatcaggcagccattcatcaaccgccaagccgcccctgtcactggtgtcccagttgctcctactttggaccaacgcccaagccgcagtgacccttggagtgcacgtatgagggaaaagtatgggcttgacacatctgagttcacatacaatccctcagagtcacaccggttccagcaaatgccagcgcaaccaaacgaagaaaagggccgatgcaccatcatgtgagtccattttaaaagtcttgaagagttcagttaattctcttttcctgtgtctttattatttctgcgtgtaacaatcaagagtgtcagtaaaagtaggattcttgtttctgggttgatgatgactctagcatttgagatctctaatcaacctagtcacggtctcaaaactcatttgttgtgtctgtgtagtcttttgtaaggattcaccattatgaatattcatcttggttcccagtctgatccagtcctatgtttcttattatatataaaaaattcactttcttcatgttacacgcccagaattctcgcgtgctctacattttagcccataataatgcagattaagtgcccnnnnnnnnnnnnnnnnnnnnnnnnnn

SEQ ID NO: 96031 - DNA, 454 bp, Arabidopsis thaliana columbia
caaatattttcccatccttggatttttcatccccttcctctcggcgacaagaacaacatcaacacaaaaaaactcaaaaccatcgcgaacatcgaagaatcatctctcaacaattctccgataattctttggactgatgaattaaagggaaacgctgagtgtaaatcatacaacagttctaagtcgtgaaaacaaaaaaaagatggcttgtagaggttgtttggagtgtttgttgaagttactcaactttctcctggctgttgctggacttggcatgattggttatggtatctatttattcgttgagtacaagagagttaccgataattctgttacattcgatttgactaatggagatcaaagttacgtttcgtttgggaggcctattcttatggctgtgtcactgtcttctaatatctttgacaatcttcccaaagcgtggttcatatacttg

SEQ ID NO: 96032 - DNA, 477 bp, Arabidopsis thaliana columbia
accacgcgtccgcggacgcgtgggcgcggagcaatacatcgcagtctcccactgattcagcagctctttgaactactcttcgacaatggccgaacgtggtggagaacgtggtgttgagcgtggtggagaacgtggtgatttcggacgaggattcggaggccgtggaggtcgtggagatcgtggagggcgtggacgtggaggccgtggtggtcgtcgtggagggcgtgccagtgaagaagagaaatgggttccagtgaccaagcttggtcgtctcgtggcggctggtcatatcaagcagatagagcagatctatcttcattcactcccggttaaggagtaccagatcattgatatgctcatcggtccaacattgaaggatgaggtaatgaaaatcatgccggttcagaaacaaaccagggctggtcaaaggactagattcaaggcctttgttgtcgttggagatggtaatggtcatgt

SEQ ID NO: 96033 - DNA, 507 bp, Arabidopsis thaliana columbia
  unsure (1)..(507): unsure at all n locations
ggtgttatccatgtggagacagtcggcaagcagtttgatccaatgctacatgaggcaataatgagagaagactctgcggaatacgaagagggtatagtactagaagaatacaggaaaggttccttgctaggtgaaagggcttttacggtccttcaatggtgaaagtatcagctggacctggaccagaaaagccccttgaagctgaaggagaagaagccacagcacaaggaagcgcagaagaagaatcatcttcatcttgaaattgaagatgatcaagactcagcagttttgtgtgcgtgtgtgtgagagagatacagagataaaagagggagaggtctgttttaccattattgttgttattgttattgatacgttatatcatttctacagagtctagaagtaatatagatcgacattttaatgaaaaaaaaaaanaaagnnnnnnnnnnnnnnnnnnnnnnnnnnnnnnnnnnnnnnnnnnnnnnnnnnnnnnnnnnnnnnnnnnnn

SEQ ID NO: 96034 - DNA, 521 bp, Arabidopsis thaliana columbia
  unsure (1)..(521): unsure at all n locations
gnaaggctaaaccttgtttcaaatgctcaaggagaggttgtagagaatcttttggctgttttggataatttcgagagagctaaatcccaaattaaggtggagactgagggagaagagaaagtcactaatagctatcagagcatatacaaacagtttgtagaaattctgggatcacttggtgttatccatgtggagacagtcggcaagcagtttgatccaatgctacatgaggcaataatgagagaagactctgcggaatacgaagagggtatagtactagaagaatacaggataggtttcttgctaggcgataaggcttttacggtctttcaatggtgaaaagtatcaagcttggaccntngacccagtaaaaagcccccttttaancntttngganaangaagcccaccagcaccaaangggangccgcangatggaagattnaatctttncatccttgnnaaatttganggttgntccaaagacctcnnncaggtttttgtagttccgtnntttnttnt

SEQ ID NO: 96035 - DNA, 511 bp, Arabidopsis thaliana columbia
  unsure (1)..(511): unsure at all n locations
nnnnnnnnnnnnnnnnnnnnnnnnnnnnnnnnnnnnnnnnnnnnnnnnnnnnnnnnnnnnnnnnnccacgcgtccggaaaaatgatggcagataaagctttggtgcgtaggctttcagcctgtgaaaccatggggtctgcaacaacaatttgcagtgataagactggaactttgaccttaaacgagatgaccgttgttgagtgttatgctgggttacaaaagatggattctcccgacagcagctcaaaattgccatctgcttttacatccatacttgttgagggtattgctcacaatacaaccggcagtgtgttccgatctgaaagtggtgagattcaggtttctggatctcctacagaaagagcaattctcaattgggcgataaagttgggtatggattttgatgctcttaagtctgagtcttctgctgtacaattttttccattcaactcagagaagaaacgaggaggtgtagcagtgaaatcaccagattcgagtgtccatattcact

SEQ ID NO: 96036 - DNA, 481 bp, Arabidopsis thaliana columbia
gtcagatctctgtgcgtgtaaactcaaaggacaatgctgagacatcaatacctccactgttgttatcattaagtggcgagcatggttacagaaataattccggatctggcgctggtggactctttgtgtttgatagcttattccctggaaatttctacttgcgtccccttcttaaggaatattctttcaaaccttcaacactggctatagaactgaattctggggaatccagtgaagctgtctttgaggctactcgtgttgcctacagtgcaatgggtagagtcgctcttctatcgggccagccacatgaaggtgttgcaattgaagctcgctctgactccaaaggatactatgaggagactacaagcgatattaatggaaattatcgactgagagggttacatccagattcagcatatgttattaaagtgtcgaagaaaatggtttaaccaacaattaaattgaacgtgcattttcagag

SEQ ID NO: 96037 - DNA, 407 bp, Arabidopsis thaliana columbia
  unsure (1)..(407): unsure at all n locations
aaagggngctcccctccacagcaaccaaacttgagccagccaccactnccactatgcttgggatgaagcaatgggggagcctccttaaacgattgatgtcgcagcagcattgttggctctttaatacccctgtggacgtcgccttgctcatacattcctgattatttcaccattatcaaacatcctatggatttaggaactgttaaaagcaagttaacttccggcacgtattcaagcccttcagagttttctgctgatgtccgcctcactttccgcaatgctatgacttataacccgccagataataatgggtatcgcttcgctgatactctcagcaagttttttgaagtgagtaggaaaactatcgagaagaagtcatccgtaaccaaatttgaaccaagtaactt

SEQ ID NO: 96038 - DNA, 669 bp, Arabidopsis thaliana columbia
  unsure (1)..(669): unsure at all n locations
aaaagcccattttagctaagtgtgtcaccgtttactctcgcttcactaagcgtcaccgtttgggcgatggtcgtccctttagtttttttttttttgttttggtgtcttctgggacttatcgattcttccttaaactgggaaactactttgttcgaatctcagagctttttcgtttcccatcggaagaagaaactcatatataccttccaaaaaatccatacgtcaagtatttgttctctatcctctctttgttgtcttataaattcttcaagcaggtttcgagatttcctcgaatctgttttgttcttgttcctcaaaaatgctgggtttttgaacgaacgaggatgacgatgctcagagtccgaagcagagatggattggagagagtgagtgtagatggacctcatatcacagtctcccaactcaaaaccctaatccaagatcagcttcagatccctatccacaaccaaaccttatccaccaatagaaaccttctcctcgctaagagcccttctgatttcccaagcggtcaccgacatggccgatccctaacctcggaactcggctctaatcnagccaggggcaangggcanctnggttaggaggggggggancntcgggggggccnnggaaancntngggccttggggggaaaacccgaggtantgc

SEQ ID NO: 96039 - DNA, 809 bp, Arabidopsis thaliana columbia
  unsure (1)..(809): unsure at all n locations
cgggaaaccgccgctttctggtcttccttacaggaagagatgctttgaacatgaccactctgaaggcttttccggcaagatctctggctccggcaacggcaagtgccattgcaagaaaagccgaaaaaatcggatgaagagaaccgtgagagtaccggcggtaagtgcaaagatcgccgatataccaccagacgaatattcatggagaaagtatggacaaaaaccgatcaaaggctcaccacatccacggggttattacaagtgtagtacatttagaggatgtccagcgaggaaacacgtggaaagagctttggatgattcaacgatgttgattgtgacgtacgaaggagagcaccgtcatcaccagtccacgatgcaggagcatgtaactcctagcgtgagtggtttggtgtttggttcggcttgaaagaattatattagtttggtagttttgtaatattttgagaaattgaggggttggttttgtaattttttttctataacaaaattagttttagattttttttttagtagtcttttgaatggattttaatcttaccaccgagaaagaaaaaattcttactacattttcataatttcttgtttgatatatttagtggtgtcatgtaagaaaatgatgtttagcaaagtaattggtatataaatgtgtaggcatatgtatttaatgatatggttcgtaaagttccccttaaaaaaaaaaaaaccaaacccaaagggcggccgcttctagaggatccaagcttacgtacgcgtgcaggcgacgtcataaatcttnnnnnnnnnnnnnn

SEQ ID NO: 96040 - DNA, 811 bp, Arabidopsis thaliana columbia
ccacgcatccgaaagactaaaaatttggacgataagcagaaaagagagaggagggcctctcgccctcttattaaaaccttgccttctccaaatctgaagatttctcaatcctaaaatcttttttttttcctctttctccgtttctttattttcggaatccaagatcgtgggtcgatcggtttttacacaatccgatcacgacccatctgctctttttcatcctattttgcttcccttgagaaatggaaatggaatcatgtaagctcttcatcggtggtatatcttgggaaaccagtgaagatcgtcttcgtgactattttcacagttttggtgaggttttagaggctgttattatgaaggatcgtgccactggccgtgctcgtggctttggtttcgttgtctttgctgatcctaatgttgctgaaagagtcgtcttgcttaaacatatcattgatggtaaaattgttgaggcaaagaaggctgttccaagagatgatcacgtagtatttaataaaagtaacagcagccttcagggatcacctggcccatcaaactccaagaagatctttgtgggaggtttggcatcatccgtgacagaggctgagttcaaaaagtattttgctcagtttgggatgatcactgatgttgtggtgatgtatgaccacagaacccagcggcctagaggctttgggttcatttcatatgactctgaagaagctgttgacaaagtactgcagaagacattccacgaactcaatggttagatggtggacgtcaaactggctgttcctaaggatattgctctcaacac

SEQ ID NO: 96041 - DNA, 905 bp, Arabidopsis thaliana columbia
  unsure (1)..(905): unsure at all n locations
gattcnnnnnnnnnnnnnnnnnnnnnnnnnnnnnnnnnnnnnnnnnnnnnnnnnnnnnnnnnnnnnnnnnnnnnnnnnnnctttttttgtttttttaggtataactttttcaaatccttaacaatttgcgtcatgaaagtttataacttaaatctttcttttgttgtgtcctcaggttcttaatgatcagacatttgccataatggttctaatggctctcttcacaaccttcatcaccacaccagtcgtaatggcagtctacaaaccagcgagaagagcgaagaaagaaggagaatacaaacacagggcagtagaacgagagaacacaaacacacagcttcgaatcctcacatgtttccacggagcangaagcattccttcaatgataaacctcctagaagcatcaagaggtatcgaaaaaggcgaagggctctgcgtttacgctctccacttacgggaactatcagagagatcatcagctattctaatggttcataaagtccggaaaaacggaatgccgttttggaacagaagaggagtaaacgcatacgctgatcaagtagtagttgctttccaagcttttcaacagctaagcagagtcaatgtccgaccaatgacagcaatctcttcaatgtctgatattcatgaagatatctgcacaacagctgtaagaaaaaaagcagccattgtgattcttccgtttcacaagcatcaacagcttgatggttcgttagagactacacgtggcgattaccgttgggttaaccggagagttttgcttcaagctccttgttcggttggtatattcgttgaccgtggactcggaggttcaagtcaagtctcagctcaagatgtttcttactctgttgttgttctgntcttcggtggntctgatgatcgtgaag

SEQ ID NO: 96042 - DNA, 505 bp, Arabidopsis thaliana columbia
ttcttttaagacgacagaagggggtgtccagagatttaattaaattgttgaatagtggaagatctcaaactgagaacttctttccctattctgtttagtcggacaggacctgcgaggaagatttacaggtgcaattgaggcattcaccagacgaaatgtttcaagccaaggcgctcttggtgatcgctctagacacagatcttctgatgatataccctcttctgccaaggaagtgcacgagtctcgaaatggaagtacctcaaagagaggtgtgatatcaagcaccagacctggctcatcagctgaaccaagcgagaaccactcaagccgactattttcaagtggttcacgtcatgccacaacccaacgggttccacagagctatgaatctgcagctgcagcaaggcctgggcatgaggatgccattagaaacttcgagctccttaccatcggctctggaaagaagaggaaatgaagatagggaaggagaagtttgatgagagtg

SEQ ID NO: 96043 - DNA, 583 bp, Arabidopsis thaliana columbia
  unsure (1)..(583): unsure at all n locations
ttccccttttttttccnncagcccncgggattncgggccttgggcntcccggcgaatttcaacccagcccttgggaccccttgaacccagtnttctgnggttcccctttctcccaggaattcccggtcccgaattggagtcccccaaagggaggtgtgtttcagcccccagcctggctcctcagctgacccaagcgngaccccctcaagccggcttttttccaagtggttccacgtcatgcccacaaccccaacggnttcccacagagctatgaatctgcagctgcagcaaggcctggccatgaggatgcccattagaaacttcgagctccttaccatcggctctggaaagaagaggaaatgaagatagggaaggagaagtttgatgagagtgaaaagacaacattcggtgctgatggctctctcctctgaaaataggaaagacatgtcctcgaattgttttttaaccttgggaacaagatgagaaagtgagagagagaaagagagttaatgtaatctgcctctcccaatctctcagtctctgtttttaaaagaatctgttaataaagctttaaagtgtaact

SEQ ID NO: 96044 - DNA, 1899 bp, Arabidopsis thaliana columbia
tacgcaaaatcttccctcaaactcagatccgattcttctaattctttgtccccccagagattcttcttctttctccaagtaaaagaaaacaactttctttctcttttcttgcgaaagtcctcaactttcaccactaaatcagcttccttcaatcactgtgtttgctttggacccagtttctgatttagcgactagggttttgattggaaccgtattaagtatatgagaatcgggttttactggtgaatcggattatcatcggaattcggaaaaagatggatcggaatcaaaagatggatcacgttatcggcgggaagtttaagttgggtaggaagcttggaagtggatcattcggtgaactttatttagggatcaatattcaaactggagaagaagtcgcagttaagctggaacctgtgaagacgaggcatcctcaactgcagtatgaatcgaaaatatatatgtttcttcaaggaggaacgggtgttccccatctgaaatggtttggagttgagggtgaatacagttgcatggttatcgatcttcttgggccaagcttggaggacttattcaattactgcaagcgaatattttcattaaaatctgttttaatgcttgcagatcaattgatatgtagagttgagtatatgcattcgcggggttttcttcaccgcgatattaaaccagacaactttttgatgggtcttgggcgcagagcaaaccaggtgtatatcattgattatggccttgctaaaaaatacaaggatcttcagacacaaaagcatataccatacagggaaaacaagaatcttacaggaactgctcggtatgcaagtgtgaacacacaccttgggattgagcaaagtagaagagatgatctggagtcacttggttatgtgttgatgtattttctacgaggaagtcttccgtggcaaggtttaaaagctggtacgaagaagcagaaatatgacaagattagtgaaaagaagatgcttacttctgtagagactctttgcaagtcgtatccatcagagttcacatcgtacttccattactgtcgttcattgagatttgaggacaaaccggattattcatatctgagaagactttttagggatcttttcattcgtgaaggttatcagcttgattatgtgtttgattggacaatctcgaagtatcctcagattggctctagttcgagaccaaggccaactccaagaccagcgttggaccctccaggaccacctgcagaaagagctgaaaagcctacagtcggacaggacctgcgaggaagatttacaggtgcaattgaggcattcaccagacgaaatgtttcaagccaaggcgctcttggtgatcgctctagacacagatcttctgatgatataccctcttctgccaaggaagtgcacgagtctcgaaatggaagtacctcaaagagaggtgtgatatcaagcaccagacctggctcatcagctgaaccaagcgagaaccactcaagccgactattttcaagtggttcacgtcatgccacaacccaacgggttccacagagctatgaatctgcagctgcagcaaggcctgggcatgaggatgccattagaaacttcgagctccttaccatcggctttggaaagaagaggaaatgaagatagggaaggagaagtttgatgagagtgaaaagacaacattcggtgctgatggctctctcctctgaaaataggaaagacatgtcctcgaattgttttttaaccttgggaacaagatgagaaagtgagagagagaaagagagttaatgtaatctgcctctcccaatctctcagtctctgtttttaaaagaatctgttaataaagctttaaagtgtgcctaaaaaaaaaaaaaaaaaaaaaaaaagcgga

SEQ ID NO: 96045 - DNA, 322 bp, Arabidopsis thaliana columbia
  unsure (1)..(322): unsure at all n locations
taaatatagagaaagagatttgagagatatatgtgtaggtgttagggttttcattacttgtgaattgtggctgtggcattgaatagaggtgtttggggttttgtccctttggtaaaggatgagtgttctctagtgtgaagctaaattggtcttctaagccatctgtgtgagggatggaagtgtagaaggtgctgaaacaactcatttggattagggattggaattggattcgtcttgtggcctttaccgtggtanggatttagatggtagagaaagctagggtagattaaattttttgtaagaagagctttctctgttgttg

SEQ ID NO: 96046 - DNA, 492 bp, Arabidopsis thaliana columbia
cggggtttagcctattctacaatgtctcaactctgttatatgatgttagctctaggtatggggtcttatcgatctgctttatttcatttgattactcatgcttattcgaaagctttgttgtttttaggatctggatccattattcattcaatggaagctatagttggatattctcccgataaaagtcagaatatgattcttatgggtggtttgacaaaacatgtcccgattacaaaaacggcctttttaataggaacactctctctttgtggtatccccccccttgcttgtttttggtcgaaagatgaaattcttaatgatagtttgttattttcgccaatttttgcaataatagcttgttcaacagcgggattaaccgcattttatatgtttcggatttatttacttacttttgaaggacatttaaacacttattttctaaattacagtggaaaaaaaagtggctccttctattcactctctttatggggt

SEQ ID NO: 96047 - DNA, 1115 bp, Arabidopsis thaliana columbia
  unsure (1)..(1115): unsure at all n locations
tgatctnnnnnnnnatcgccaggtgtcaaattacaggagcttctgagaaggataaatctcggaggttcccggtctgaacgacccacagacgaagcgaaacaaaagtactctaagggagagaagtatcaaaattctcatcggaaaaagacagatctacaaattttgagagacaagccatgactaaggtgaaagatgagccacgcgcttccgttgaaggtggatgtggtgttgccgacggtgacggcggcgcggctgagatcggcggtaccggatctgttgagaaatcgattaacgaagttaggtccacggagattcaaaccgctgagccaacggttcctccaaatcaacttactattttctttggtggaagtgttactgtgtttgatggacttccatcagaaaaggttcaagaaatccttcgtattgctgctaaagcaatggagacaaagaattctacaagcatcagtcctgtctcatcgccagcactgaacagagctccttctttctcaagcacatctaatgtggcatcaccagctgcacagccatttcctatgcagccaatctcgttttgcagatccacggctgatctacctattgcaaggaggcattccgttcaacgattcctcgagaaaagacgggacagattggtcaacaaaaacccttaccctacttcagacttcaaaaagacagatgtcccaacaggcaatgtctctatcaaggaggaatttccaactgcttagcagaagatcaaacctccacattaagcttataagcaaactaagtaaaacgttttgtcaatatagtaattaatatgataatctatcatgtacgctgctgtgtgaatgtgttgtatgatagtgtctgtataggtttgctagacaaaccgaagattgtttccatgtctgggagtggtcagatatgtttgccattttacaattctactgaagaaactattgtagttagtaacactgtcctagagtctatctaactaatgactctttgatgttatgttaaaaaaaaaaaaaaaaaaaaaaaaaaagnnnnnnnnnnnnnnnnnnnnnnnnnnnnnnnnnnnnnnnnnnnnnnnnnnnnnnnnnnnnnnnnnnngtacctaa

SEQ ID NO: 96048 - DNA, 657 bp, Arabidopsis thaliana columbia
caaatgtctatagctatttttctaggtatcattatatattccaagaattactacacaacttttttttgaatcaacaaaaaaaattcttgataaatatattttcaagaatgaagaagatggagaaaaaaaaaaaaaatactctttattttatttcgactataaaaaatttaatatccaataaaaaaaaaatgagttatgacctatgctctttatcacaagcatatgtattttacaaattatcacaaattaaagttagtaacttttgtaaattaaaggctgttcttgaatataacatatgcataacatccttttttgttaagaataaaataaaggttttttttcaagaacacggaatctttcattatgaattgaaaaataaaacctttttgaattccgaagtaaatcaatggaaaaactggttacgaagtcagtatcaatacaatttaccccagatttcatgggctagattagtaacccaaaattggaaacatagaacaaataaagattctctagttctaaacccaagtctaaccaaagaggcactcatttgaataaaaggatctcagatcattataaaaaacacccattttttgaggccgactcattattaaatccaaaacataatgtaaaaaaagattcatatatatatcggacgcg

SEQ ID NO: 96049 - DNA, 739 bp, Arabidopsis thaliana columbia
  unsure (1)..(739): unsure at all n locations
nnnnnnnnnnnnnnnnnnnnnnnnnnnnnnnnnnnnnnnnnnnnnnnnnnnnnnnnnnnnnnnnnnnnnnnccacgcgtccggaaatttgtaaaagatatgagaaattagtaaattccagagacttattagaagcggcggatcgaattcgcgacgagcgttccattagggtttcgaatcaacatcaacaaacgacgagagaaaactttttaaaacatgtacggaggcgattttgacggcgacgctgctttcgccggcggcggcttcatgccttctcaggcgactacgcaagcccatgaatcctcatcttccctcaagaaccgcgatgtacgtaccttgcttcccctgacactgaagcagttgagcagcgcatcaaccactggcgaatcaaatttctctattgatggcggtgatattaaaactgttgtaatcgttggacggatttctagaatggagaacagaatccctcaggtcgattttgttgttgatgacggtacaggctgggttgattgtgtcagatggtgtcacgctcggcaagaaactgaagaaatggaagcagtcaagctgggaatgtatgttcgcttacatggacacctgaaaatttttcaagggaaacgatctgtgaatgttttttcagtcaggcctgtcactgacttcaatgagattgtacaccactttaccgagtgtatgtatgtccacatgtacaacaccaagttacggggtggttctattactcaaga

SEQ ID NO: 96050 - DNA, 503 bp, Arabidopsis thaliana columbia
aaaaaaaacttcagaaaatttgaaatccttagaattgcagagcaaagaacaaccatggcgaatcctattcaagagattctggagaagcaagttctaacggtggctaaagctatggaagataagatagacgacgagatcgcctctttagaaaagcttgacgaggacgatctagaggttttgagagagagaaggttaaagcaaatgaagaaaatggcagagaagaagaaacgttggattagtcttggacatggtgaatactctgagatccattctgagaaagacttcttctccgtcgttaaagccagcgaacgcgtcgtctgccatttctaccgcgagaattggccatgtaaagtgatggataagcacatgagtatattggcaaagcaacacattgagacacgttttgtgaagatccaagctgagaaaagtccgttcttggctgagaggctcaagaatgttgttctacctactcttgcacttattaagaacactaaagtcgatga

SEQ ID NO: 96051 - DNA, 508 bp, Arabidopsis thaliana columbia
  unsure (1)..(508): unsure at all n locations
ccnccaaatttanaanncccccaccccggtggaaaaaattgccaatggcccttttgcgggccctctatttgtggctgggaaagccgcctcctttataatgcaaggtgaggcctttcacacaacctaaagttctccgaaccagcatactcttccttcagctcccatattttccttgctcgactcggtgctgctccatttctgaaatatctgaaatgatcattgaaacgcaaggaattgttgtgtcattaaagatcaaagagaagagaacagtggatttagttacatggaagctcaagtggtgcagcatagagaatgctatcaagtttgcggccttgctcaaagctcttcatcccaattcgccacaatggccgttggctgtaagatacaggagataagtcttcgtttaccttttcttttgttttttgaccgatcacctctgttttgttgttatgtatatacaacacaatgcacattgttcatattcatttgatccagtttgtttttttgg

SEQ ID NO: 96052 - DNA, 681 bp, Arabidopsis thaliana columbia
  unsure (1)..(681): unsure at all n locations
nnnnnnnnnnnnnnnnnnnnnnnnnnnnnnnnnnnnnnnnnnnnnnnnnnnnnnnnnnnnnnnnnnnnnnnccacgcgtccgtaatagtcgacaatttgggatttgtttatggtttacttcacatgaatcacatacgttcatgtcgattcctttgagatactgtctcgatttcgtttttttctcttgtttaatttggaattattgtaaagcacgtggatttgcttgtcttggttttgttttctccttcgacctctttgatgaaatcgaggaacctacaatttcttcgtcgatccaaatggtagcttagtggtggtgataataggtttctcctcttgattggctccagctttaggttttttttttatctttgtttctgcttcgattcccaaaatttaccctttcgattttgagtctaactagtcgagttgactcagtagagtcgaaagcttctgggtttacgaagagacatctcctaattgaaacaaaacctttcctttccattgggctgagaaaaaagcaagagtctttgaatattttttggagcgtggttttatttanatgggaggtcaatgctctagcctgagttgttgcaggaacacttcacacaagacagctgttcttgaagctcctgatgttgataatggagagagtagtgagaacacttgtgttcctaatttccg

SEQ ID NO: 96053 - DNA, 1119 bp, Arabidopsis thaliana columbia
agcgagatcttggtgtcctgtcttggagatgaagaggggaatgctaaggggaatgggtttcttcttcttgactctgattttaacatcaagaataggtgggagaaaccaggacatagtcctttgtatgggtatgatttttggtaccaacctcggcacaagaccatgatcagcacatcttggggagcacctaaagccttctctaaaggtttcaatcttcagcacgttgctgatggcttgtatggaagtcatctacatgtttatagttggccaggaggtgaaataaaacaattaattgaccttggaccgactggtctcttacctttggagattagattcttgcatgatccatctaaagatacagggtttgttgggagtgccttgtcgagtaatatgataagatttttcaagaacagtgatgaaacatggagccatgaggttgttatatcggttaaaccgttgaaagtcgaaaactggatacttccagaaatgccggggctaatcaccgacttcttgatctccctcgatgaccgatttatttactttgtgaactggctccatggagacattcgtcagtacaacatagaggaccctaaaacccctgtattaacagggcaaatttgggttggaggattactacaaaagggcagtcctgttaaggcggttggagaagacggcaacactttccaattcgaggttcctcagatcaaggggaactctctacgaggtggacctcaaatgattcagctgagcctcgatgggaaaagattgtatgcaacaaactcgctgtttagcgcaatgggatccgtcaggtttttatcctgaaaatcaatggagaaaaggctcacacataaattcagatttgatgtttgatccaggaaaagggtgggctcaccataaaccctgatttctttgtggactttggtgatgaaccagacggtccttcactagctcacgagatgagatatcccggcggtgactgcttttccgattcttggattctgggcaagtgttactactcctactcaaacagcatcaacttcacatctcatgacagtgaagatcgtcactggagtggcgctgatctctgttatcatcggtataattcttgggagaaagtat

SEQ ID NO: 96054 - DNA, 422 bp, Arabidopsis thaliana columbia
  unsure (1)..(422): unsure at all n locations
aaaagattatatgcgacaaactcgctatttagcgcatgggaccgtcagttttacccggaaatcatggagaaaggctcacacataattcaaatcgatgttgatacagccaaaggtggtctcactctaaaccctgacttctttgtggactttggtgatgaaccagacggtcctgcactagctcacgagatgagatatcccggcggagactgcacttccgatatctggatctgattttggctccctaagagtgtaagctggatttgtggctagattcgtgatcaagacaattaaagttgttcttactcctttgtggcttattccggtgataataaaactttctattttatgatgtgtgcccnctatcctttcgaggtanccgannttganccggtncntntccggggncgaatttttnggntcat

SEQ ID NO: 96055 - DNA, 850 bp, Arabidopsis thaliana columbia
  unsure (1)..(850): unsure at all n locations
ctatgacgccgcatgcacaccatttgacttcacatagagagagatagagagatggcgacggaaacggaagttgtagctccggtaacggtaagcaacggcggaagcaaaggatgttgcaagtacggtggtcctggttacgcgactcctctcgccgctatgtctggtccatcggagaaacttatctacgtaaccgccgtctacaccggaactggaatagataaaccggattatttggcgacggtggatgtagatccaagctcgccttcgtattcaagtgttattcatagattaccaatgccttttgttggtgatgagcttcatcattctggttggaactcttgtagttcttgccatggtgatgcttctgttgatagacgttatctcgtgttaccgtctcttatatctggtcgcatttatgcgattgatactaaggaaaacccgagggctccgtctttgtataagtatgttgatcctaaagagattgctgataagactggattggcgtttcctcacacggctcattgcctcgccacgggcgagatcttggtgtcctgtcttggagatgaagaggggaatgctaaggggaatgggtttcttcttcttgactctgattttaacatcaagaataggtgggagaaaccaggacatagtccctttgtatgggtatgatttttgggtaccaacctccggcacaagaccatgattcagcacatctttggggaaccaccctaaagcccttctcctaaaggtttccaatccttccancaacgtttgctgaatggcttgttatggaaanttcctcctacatgttttttataatttgggcccacgaaggttnaaaattaaacca

SEQ ID NO: 96056 - DNA, 790 bp, Arabidopsis thaliana columbia
  unsure (1)..(790): unsure at all n locations
cggtgtattgtggaatgtacgatacaattcaccagnnnnnnnnnnnnnnnnnnnnnnnnnnnnnnnnnnnnnnnnnnnnnnnnnnnnnnnnnnnnnnnnnnnnnnnnnnnnnnnnnnnnnnnnnccacgcgtccgaagatcttgaacagaaagtgcagctcgcagatgctaaaactaaggaaacggaggcaatggatgtaggtgtcaaatctcgagacattgacttatcctttttttctccaacgaaacgtaagagcaagaagaagccagaagcatctctttcttcttcttcgtcttcgggcaatgttactactcctactcaaacagcatcaacttcacatctcatgacagtgaagatcgtcactggagtggcgctgatctctgttatcatcggtataattcttgggagaaagtattagtctcgtcttctcagtgtggcttgatgatgttcatatctgaaatgaagatctctccttcttcatttgttttttttgggggtttttgaattttgatagcagaactaagaagctttgcgtgaatatgcttctctctctgctaatatttgcttgtggttgggttttgttttaccgggtctgggagattttgttgtaccagcccttgcttgtaggtcaagcaattgtccagatattgtattaaattaaatcaaaggtgaattaatttgataattatccaactaaaaaaaaaaaaaaaaaaaaaaaaaaagggcggccgctctagaggatccaagcttacgtacgcgtgcatgcgacgtacatagctggtcgatagt

SEQ ID NO: 96057 - DNA, 590 bp, Arabidopsis thaliana columbia
  unsure (1)..(590): unsure at all n locations
gctctctaaagcaaaaatacatatctcaaaataaaaaggtggtccataattaagtccccaaagtatcatcatgattaaaaagttcagcaatatggattacaaccagaaacgagagagatgtgggcaatacatcgaagccctcgaagaggaacgtcgcaagattcatgtatttcaacgtgaacttcctctttgcttagaccttgtaactcaagcgatcgaggcatgtaagagggagttaccggagatgacgacggagaatatgtacggacaaccagagtgctcggagcagacgaccggagaatntgggccggtcttggagcagtttctaactattaaagattcatcggcatccaacggaggaggaagattnaagaattcgncgntgagcatgggaatcacggtccngacaattnatttccngggccaagacncggaatctgatttggcttaagccttttcanctttggattaacccggccacccantttttccaaaangggaaggttcagcaggggncggtttcaagnngttgggttttgnaagnncccttgtancggttgcaaggngaagaaancggaaaccgggngggc

SEQ ID NO: 96058 - DNA, 767 bp, Arabidopsis thaliana columbia
  unsure (1)..(767): unsure at all n locations
attttctttgatttccccccgggatgccccaattttattttacttttgttaaacggtgctcccatggaagacatttggtcacgttcaacataagaggacccctaataacccctgaataaacagggcaaaatttgagtgggaagaataactccaaaaggccagtcgtgttaagcctgttgaaaaaaacggaaacactttccgattcgaggttcctcagatcaaggggaaatcttttcgaggtggacctcaaatgattcagctaagcctccatgggcaaccattgtatgcaacaaactccctgtttagcgcatgggatcgtcagttttatcctgaaatcatggagaaaggctcacacataattcagattgatgttgattacagaaaaaggtggtctcaccataaaccctgatttctttgtggactttggtgatgaaccagacggtccttcactagcccacgagatgagatatccaggtggagactgcacttccgatatctggatttgaatttggctttgtttagagtgtgttttgtgttaagtttaaattgagttttattatttgttgtgtgtttagtagagttgaataaaaaagggagtaagatgactcagacaattaacacttgtttgtacattttgactcctatgtgtcttaagtaataaaactttctacatttcgacttaaaaaaaaaaaaaaagnnnnnnnnnnnnnnnnnnnnnnnnnnnnnnnnnnnnnnnnnnnnnnnnnnnnnnnnnnnnnnnnnnnaac

SEQ ID NO: 96059 - DNA, 578 bp, Arabidopsis thaliana columbia
acgataaggaaatatctaaccagaccggcccaaggagcgggcaaaatcagaaagcatttgatcttcaaactcttgggttcttctctgattgaaaatgagcttatcatcgccaaccagtgcttgtagctcgtccagatgttactcctcgggattatcgtttccgattggatttggatcgaatcccatcaatgtgggattggtttgttacccaaaaagatacagtattgctgctcggaagttcgtagtggcttgctcctcctcctcttccgatccacttttggttaaggctgcaaaagggcaagccataagtcgtcctccagcttggatgatgaggcaagcaggaaggtatatggctgtttaccaaaagctcgccaagaaacatccgtccttcagagagagatcagagaacactgatctaatagtggaaatctctttgcagccttggcaagcattcagaccagacggtgtcatcactttctctgacatcctcacccctttacctgcattcggtgtcccttttgatattgaagaggtaaaaggtcctgtaatctaatctcctatccgaactgaagaagata

SEQ ID NO: 96060 - DNA, 748 bp, Arabidopsis thaliana columbia
  unsure (1)..(748): unsure at all n locations
gctgtacgggcagccattaaggttaaggcatccgtaattatatgcttcacctcttctggaagagcagccagattgattgccaaatacaggccaacgaatcccggcttatttccgttggcattccccccggggttaaggcaaatccaaactgaaatggagctttagggggagcctttgaggcgaggccaggtcacttattgccagaggcctcttccctattgcttgctgaccctcggtcaccctgcggaatctacaagtgcgacaaaccgagtcagtcctgaaggttgctctagaccatgggaagcatgctggagtaatcaagtcgcatgacagagtagtggtgtgtcagaaagttggtgatgcatctgtggttaagatcattgagcttgaggattaacttttgcctcgcaaaaacattatataattggctgcattttgggttgccttgaattgatgataactcccaatgccggagtgaaaatattatctccgggacttctggtttctttttgtatacttaggagatttgatgtctctaaggtttcagctatatttgattaccttcaaatgtacgcatatgataaaagtatacaatgcctagcaattttataataagctgttacattccctaaannnnnnnnnnnnnnnnnnnnnnnnnnnannnaagnnnnnnnnnnnnnnnnnnnnnnnnnnnnnnnnnnnnnnnnnnnnnnnnnnnnnnnnnnnnnnnnnnnnnnnnnnnnnnnnc

SEQ ID NO: 96061 - DNA, 706 bp, Arabidopsis thaliana columbia
ctcaaaacaacttaagaagttgtctgcgatacaatcaagcttgaaaactgtgaagaacattatttacattgaagaagatggagtagatgttgcttctagtgatgtcaatagtatgggtgatataactgtttcgtcgatctctgaagttgagaaacttgggcagaagaacgctgttcaaccgatcttaccttcgaagaatggagttgctgttataatgtttaccagtggtagtactggtctaccaaagggagttatgattacccacggaaatcttgtcgcaactgctgcaggagttatgaaggtggttccaaagttggataaaaatgatacatatattgcgtacttacctttggctcatgtgtttgagctggaagctgagattgtggtctttacctcaggtagtgccatcggttacggctcagcaatgactttaactgacacttcaaataaagttaagaaaggaaccaaaggagatgtttcagctctgaagccaactataatgactgcagttccagctattctggatcgtgtccgagaaggagttcttaaaaaggttgaggaaaagggagggatggcgaagaccctttttgactttgcatacaagcgccggttagcagctgtggaatggaagttggtttggtgctggggtttggagaaaatgttatgggatgctcttgtcttcaagaaaatacgcgctgtgcttgga

SEQ ID NO: 96062 - DNA, 705 bp, Arabidopsis thaliana columbia
ggagagaagagaatggaaggtgtaggatcgagattgagccggacgtcatcgagatacagtggtccggcggcgacggcggtgttcagtggccgtgtaaggaaatggaagaagaagtgggtacgtgtctcaacctcatccgtcggtgttttcagagcatctaaatccaacggtcgtaacaacagcaacaacagtaactcaccacaccatctacttctccataagtggactccacttacctcagcgacggttactgcctccgacgctaatggttccggtgagacggaggagccgcctaagcgaagattcagatacgctccaattgcgatgcttgagcatagagaaaaagtgatttctaaggattctgaaattgaagagactgaagaattcgacactgaatctccattacctaaagctgttgagctagacatgaacctaacagactcggaccaaactaaggaagcaaaactggtaatttgaatctgggactgtgtctgaattctgaagggactgaagaatcaagagaatcatattgatttgggatgaagcaactataaaaaaggtgttcagcctgttgatgaaggctttatattcgtatcctaatttctaggcgtttttttgccctttgatgtcttctagttctctatgtagtgtgaaagtaagttaggaagaagttatataaatgtaagatttgaagcctttaccaag

SEQ ID NO: 96063 - DNA, 381 bp, Arabidopsis thaliana columbia
gaccacctcctcggaagcttgaaatgcctgtacgactcaaacaaaggtactgtggagttggtcgctgactttgtagtttgtgaagaaggaaaacaactttcgccaaaatcagcccacattttgcgtctattgcgaatgaagatggctactttcaagctgaacttgctctgcagatggagccctagtgactttgagctttacagagaagatctgtcagagctttaccgagaagatctctcagacgttgaaacctcttaggaagccaagattttgactccaccctttaaatttttcttaatatcatcactatcacatggattttatattgtggcacatggtttgcattcaaatgttttaagtcaaagttttgcttgctttaaa

SEQ ID NO: 96064 - DNA, 512 bp, Arabidopsis thaliana columbia
  unsure (1)..(512): unsure at all n locations
cagctcnnnnnnnnnnnnnnnnnnnnnnnnnnnnnnnnnnnnnnnnnnnnnnnnnnnnnnnnnnnnnnnnnnnccacgcgtccggtttactctatattaattactttacaaatttttgatccagttttctcaattttttctagactcgtatcgatatggcgaatcatgaaacgatatttgatcagctaaagaagcagattccagtagatgaggaagaacctctgattttgaatcgagactcaagcgttggtctcgtcatcgttgacgttgttaatggcttctgcacaattggctccggcaatatggctccaacaaagcataatgaacagatatcgaagatggtggaggaaagtgcaaagcttgctagagagttctgtgatcggaaatggccggttttggcgtttattgactctcatcatccagatattccggagagaccttatcctcctcattgtattataggaactgaagaatcagaacttgttcctgctctgaaatggcttgaaagtgag

SEQ ID NO: 96065 - DNA, 441 bp, Arabidopsis thaliana columbia
ttttaagaaccaatcccaaagctcatttattctttccttttcaattattctttcaatttttccgatcgacggaggttgatcggcgacggcgtaatggccggaggaatcgtctcaccggcctctctactcgacctaatcgctgatatcgtcgagattccactcaacaccggaatgttcaagaaggattgcgcagatctcactcgacgagtttgtctcttaacgcatttgttagaggagattagagactcaactcctatcgattccgccgcttcgtcgtcgtcggagaatgattggtggtctgatctcgtggtcggacttcaagccgcgaagcgtcttctcttccacagctcgagtcccagctcgcgattccctctgagggtgctgcgaagagaattccatttcaggtccaatgtgttacatgggaagcttgagaaagccttt

SEQ ID NO: 96066 - DNA, 559 bp, Arabidopsis thaliana columbia
  unsure (1)..(559): unsure at all n locations
cggacgcgtgggcggacgcgtgggggaagagagactcaaaacggcaattagcgaaagtgggcgggaggattcttttccggcgactcttttatgtcttctcttcctcttcgctccggtgagaagatggaatcgccttccatctccgacgccgttccacttcacgcaccagaagacgcgaccgcggatttttcccaaccgcaatcgccgttacatgaagttgattcgtttccagttactgaatcctccgatgatgttgttgttaacgtctcggagataccgaatttatctccgtctgatgatgattttgaccacgagcgaaatagcggcgaggatcgcgatcaggatcacggcgagaatccggttgagaccgatggtgttgttgttccaatcgatgagttgaatcagaagatcattagacaggttgaatactactttagtgacgagaatttgcctactgacaaatttcttctgattgcaatatgggggaacaaaaaaaggnttttttccccntttttaccattttacggtcccaaaatnaggngntttttttnggngaanc

SEQ ID NO: 96067 - DNA, 443 bp, Arabidopsis thaliana columbia
caacacagcaagcacgagcgaatctcctcaacttttttaacctaatagctcgccgtgtcgtgactactcaccgagtaggaacctaaccttatccaatggcttcgagtttcattacagtacctaaacccttcttgtccttccccatcaaaaccaatgctcctactctacctcagcagacccttctcggaattcgaagaaattcctttagaattaacgccgtttccaccaaatggggaaccggcaaaggttgtaccacaagcagacagggtccttgtccggcttgaaggtgcttcctgaggaatccccaggcagggagtactgttgcctaaatcagctgtgaaatttcggagagggacctaacaagcggaggttgtcttcttgttgggtctgagggttttgggggagtcggaacctggcaagaaggtttgttctctgatatgagc

SEQ ID NO: 96068 - DNA, 760 bp, Arabidopsis thaliana columbia
  unsure (1)..(760): unsure at all n locations
cggttaggatcccncccccccgggtgggcccacccttccaatggctcggnttnattncgggcccaaacccttttgccctcccccatcaaacccaatgctccttctctccctcagcacacccttctcggaattcgaagaaatccctttagaattacccccgccccccccaaatgggacccgccaaaggtttgtcccacaagccagccagggcccttgcccccccttgaagtgctcccttgagaaaccctcaggaggagtactgttccctaaaccagctgtgaaatccgagaggtacctaacaggcgaggttgtctctgttgggtctgaggttggggaagtggaacctggcaagaaggttttgttctctgatatgagcgcctatgaggttgattttggaacagaagatgctaagcattgcttttgcaaagaaagcgacttgttagctatcgtccagtgaaaagtagcatcgaagttgtgcattcaatgatatcatctaccaaagagtttctggttttcttgtaatttcagtgacagcagcatatgttctgttgtttgagtttcatgaaagagctcaaagtggagattgatcggaaaccgaaattgttaaagtcaacaatgttctctcaaacagaaatcgttttatttgcaaatttctcataagccttatgttcatagcttagctggtgaacaagaccgatcccattcaattttttcaaggatttgatctttacttgatatcaaaaaaacgaattattttacc

SEQ ID NO: 96069 - DNA, 611 bp, Arabidopsis thaliana columbia
tttagttgtggttttggtattgcagacattaaaaataacaaaaccaagtggtttatagactcggtttattttgggtcgttcgttttccattttattctcacaaaacaaaaaatagtaaattgaacttacaaaaaaaaaaaagatgtcttgttggataatccaaggttcttttctatataaaggttctttgctcatgatcttagtccctgtgatctatctttgaatctcaaaagcatacttgagagagatctgcttcgataatttgcttcaatcaccgtgttcgatggcggccgctggagtggaggcgacacctcctgtgacagccatggacgaaacctgctacgttaagggagccgccgccaaacacggagaagggcttaacaagtactacctccagcatctcgattagctccagctcctgcctcgcgaaaagtcgtataaccttaatcgtattgaagctcataggaatgaactttattttcgagtacaaatgctcatagaagagttacagctcctttaccaacctgtgtactatgtgtgtgaagagcttaaagtgatggaaacaaacaaggtcttggttaacgttcatccagatgggaagtctgttgtcc

SEQ ID NO: 96070 - DNA, 744 bp, Arabidopsis thaliana columbia
tgcttcgcgtgagggtttctgagattctgatcgacgaaaactaatctctctcctttttcttctcatctccttactagagatctctgtcttcgataatttgtttcaatcactgagaaaatggcggccgtaggagtagattcgaggcgtcctgagacagcgatggaggaaacctgtaacgtgaaaggagcggcggcgaaacaaggggaagggcttaagcagtactatctccagcacatccatgagctccagcgccagcttcgacagaagactaataacctcaatcgccttgaagctcaaaggaatgaactcaattctcgagtgagaatgctcagagaagagttacagctccttcaagaacctgggtcctatgtgggagaagtggtaaaagttatgggaaagaacaaggtcttggttaaggttcatccagaggggaagtatgttgttgatattgacaaaagtatagacattacgaaaatcactccatcaacgagagttgctcttcgtaatgatagctatgttctccacctggttctgccaagtaaagtagatcccttggttaaccttatgaaagttgagaaggttccagactccacctatgacatgattggtggtcttgaccagcagattaaggaaataaaggaggtcattgagctgccaatcaagcatcctgaattgtttgagtctcttggaattgcgcagccaaagggtgtgttgttatacgtccacctggaactgggaagacac

SEQ ID NO: 96071 - DNA, 413 bp, Arabidopsis thaliana columbia
gcaattggtgcattcctcttgtcactcttctgcttcttctacgtttacacactcttgaaatggaggaagttgctgaaacatctgtctacaacgggagagaagaaacgcagtcctggtagaacaagcgcaggaagtagagttcgtagcagcacaagcagatcaagcacagaaaacggagaaccaaagctagtgatgttcaataacaagatcactctagctgaaacaattgaagcaacacgacagttcgatgaagaaaacgttcttagcagaacccgatatggattgctatttaaagccaattacaatgacggaatggttctctctatccgccgcttacccaatggaatcactcttaaatgagaacttgttcaaaaaggaagccgaagttcttggtaaagtcaagcaccgaaaca

SEQ ID NO: 96072 - DNA, 601 bp, Arabidopsis thaliana columbia
  unsure (1)..(601): unsure at all n locations
cttgaggattccgatagaggtagtccagcagtgatgaaatttagatctagattatcaaaggttcttgaatctgtatctcctgatgctgacatacaaaagatagtgggggatataaaatgcattttgcaagatgtgaatgcttgtatggaccaggaaaagccttctnaggtgcatgtncatcctgaagaagtgtcagatttatgtccagaacaaaatctggttgaagattgtcatttggcagaacaaaagctgcagagcattcaccaagatttgaaaaatgctgtatctcggattcatgattttgttttgttgctaagaaatgaggtaaaggcaggtcaggacacctctattgagggaaatgattttgttgagctgattgagggcttctccgtcacgttcaaccatgttttaagcggtgataaaagtttggacgattttgtttcgaatcttgctaatgtcttcaacgaggcgatggagcgaaaggtaagttttaggggtctagcttcctctgaggttgaaactctgagtccagattgcatagacaaggttgcattacccgagagcaaggttgtagataaagattcatctcaagaaatatatc

SEQ ID NO: 96073 - DNA, 1057 bp, Arabidopsis thaliana columbia
  unsure (1)..(1057): unsure at all n locations
tacgactcactatanggaagctggtacgcctgcaggtcccgtcccggatttccggggtcgaaccacgcgtccggcagctgggataagtgtcaatgtcacgcttaatattctcaatcgccagatatgaagcagtgatcgatgcatattgggagggcctcgaggcgtttggacttgatgacctctcaagagttaccagtgttgcttcctttttgtcagtcgggtggatactctcatggacaagatgcttgagcaaattggtacccctgaagccttagatctccgtggaaaggcggctgtggctcaggctgcattagcatacaagctataccagcagaaattctctggcccaagatgggaagctctggtaaagaaaggtgccaagaaacagagacttctctgggcatcaacaagtgtaaagaacccagcttactctgacaccttatatgtcgctcctctcatcggacctgacactgtatcaaccatgccggatcaagccctggaagcattcgcagatcatggaatagtgaagaggacaatagatgcgaatgtgtcagaagcagaagggatttacagtgcactagagaagctgggaatagactggaacaaagtaggagaacagttggaagacgaaggagtagattccttcaagaagagtttcgagagtctgctcggtacactgcaagacaaggccaacactctcaaactagccagccattgaggaaatgagtcatcattatgtttttggttacgctaaaataaaaagaagaacctttggcttttgttcttcaatccttatgcatgctttctaaagtggttatgatggattttgcttgatgttccacattatgggttattctattttctttgttcttgtaagatgatgcttcagaagagtttgttactttttaccgtatttgtaatttacattttccctgaaaacaattggcgagtaaaaaagtgtccttgtcttttaaaaaaaaaaaaaaaaaaaaagggcggccgctctagaggatccaagcttacgtacgcgtgcatgcgacgtgcatagctgtgtaac

SEQ ID NO: 96074 - DNA, 403 bp, Arabidopsis thaliana columbia
aagagaaaacaacgatctcactcaatcatcggcgtgtgggatataagacgatggcttttactctaacaatccctagattttctgcaatttctcgcaaacccatcacttgttcttcttcgaggacacagtgtcctgctccctttacccatggacgatcgatttctctcagacgaagacttaccttattgccccttaaagcttctactgatcaatcaggtcaggtgggtggggaagaagttgtttgctagattttaccttattgtagcatcaacaagaatgagaagagaactatcggtgaaatggaacaagagttcctccaagcgatgcaatcgttttattacgaaggcaaagcgattatgtctaatgaagagtttgataaccttaaaaaaaagttgatgtggga

SEQ ID NO: 96075 - DNA, 547 bp, Arabidopsis thaliana columbia
  unsure (1)..(547): unsure at all n locations
nnnnnnnnnnnnnnnnnnnnnnnnnnnnnnnnnnnnnnnnnnnnnnnnnnnnnnnnnnnnnnnnnnnnnnnnnnnnnnnnnnccacgcgtccggtgcgttcactacggtttgaagacaaaccagattattcatacctaaagaggcttttcagagacctatttatccgagaaggttatcagtttgactatgtattttctctatgtgcgttcactacggtttgaagacaaaccagattattcatacctaaagaggcttttcagagacctatttatccgagaaggttatcagtttgactatgtatttgattggacaatattgaggtatccacagttcggctccagttccagctcgaattccaaaccaagaccaactttaagaccagctatgaatattccagtaccatctgccgacaaagcggaaaagcctccaattggacaggacagccgtgagaggttctcaggtgttttcgaggcatacaccagaagaaatggctcaggaaccggcgttcaagctgatcagtctagtagaccaagaacctcagagaat

SEQ ID NO: 96076 - DNA, 832 bp, Arabidopsis thaliana columbia
  unsure (1)..(832): unsure at all n locations
cgactcactcttgggagagagctggacacgcctgcaggtaccggtccggaattcccgggtctgacccacgcgtgggcccacgcgtccggacaaaccagattatccatacctaaagaggcttttcagggatctctttattcgagaaggttatcagtgtgactatgtatcctgattggacaatctctgaagtatccacagtttagttcgggctccagctctagctccttgccaagatcaagcctgagaccagctatgaatcctccagtgccaattgccgaaagaccagataaaccttcagctggagctgggcaagacagtcgagatagattctcaggtgctttagaggcatatgctagaagaaatggctcaggaagcggtgtggtacaagctgatcgatctagaccaagaacctcagagaatgtattagcatcggcaaaggatacaacaccacaaaactatgagagagtcgaaagaccaatctcttcaacaagacacgcacgttcttcaagaaaagctgttgtatcgagcgtacgagccacttcttcagctgatttcacagagaaccgctctagcagagttgtcccaagcaatggccgttcctcaaccgctcagagggactcagctcgtccctgacccaaccactagaccgtcatcttcttcttttanccgagctgcgccgtcgagnatggtcgtgaatcacggtccagagctttgggtactccccatagggatggnaagaggagtnaaggttnggttttcgnngcgtgttgggnantgggcattttatggngggacttgttttttccgattcggtccaatnaggaaangnnct

SEQ ID NO: 96077 - DNA, 1339 bp, Arabidopsis thaliana columbia
gagtatatgcatgtccggggatttcttcatcgtgacataaagcctgataactttttgatgggtcttggacgcaaagcgaaccaggtgtacatcattgactacggacttgcaaaaaagtatagagatctccaaactcatagacacattccctacagggaaaacaagaatcttactggaacagctcgatatgcaagtgttaacactcatcttggaattgagcaaagtaggagggacgatctggaatctcttggctacgtgcttatgtattttcttcgaggaagtcttccttggcaaggccttcgtgcgggtaccaaaaaacagaagtatgacaagatcagcgaaaagaaaaggcttacacctgtagaggttctctgtaaatcctttccacctgagttcacatcatacttcctctatgtacgatcattgcggtttgaagacaaaccagattatccatacctaaagaggcttttcagggatctctttattcgagaaggttatcagtttgactatgtatttgattggacaatcttgaagtatccacagtttagttcgggctccagctctagctccaagccaagatcaagcctgagaccagctatgaatcctccagtaccaattgccgaaagaccagataaaccttcagctggagctgggcaagacagtcgagatagattctcaggtgctttagaggcatatgctagaagaaatggctcaggaagcggtgtggtacaagctgatcgatctagaccaagaacctcagagaatgtattagcatcgtcaaaggatacaacaccacaaaactatgagagagtcgaaagaccaatctcttcaacaagacacgcaagttcttcaagaaaagctgttgtatcgagcgtacgagccacttcttcagctgatttcacagagaaccgctctagcagagttgtcccaagcaatggccgttcctcaaccgctcagaggactcagctcgtccctgacccaaccactagaccgtcatcttcttcttttacccgagctgcgccgtcgaggactgctcgtgacatcacgctccagagctttgagctactcaccatagggaatggaaagaggaagtgagaggcttggctttatcgtgagcgtgttggaggacactgcgacattttaatggatggagactttgtttttatttcacgaaattatcggtttcctaatttaaggaataaatcgaacatcatttgattacaaattatatgtgataaagtatatggttttaaaaaaaaaaaaaaaaaaaaaaaagggcggccgctctagaggatccaagcttacgtacgcgtgcgtgcgacgtcataatcttctatag

SEQ ID NO: 96078 - DNA, 1260 bp, Arabidopsis thaliana columbia
ccgggccagaattcccgggtcgacccacgcgtccggaaaaatggtgtcagctctgtcttctcttgtgtatgggacgaatccaataatgattcagctcgggtcgagacaagatgctggagatggaaattctagtttccgtggtaaaaccgcgttggataagattgcggaaactgttaagaggagtccgttctctgttatcttgcttgaagatattgacgaagctgatatgttggtgcgtggaagcataaaacaggcaatggatagaggcagaatccgtgactcgcatggccgtgagatcagtttaggtaacgtgatctttgttatgacagcgagctggcatttcgcagggacgaaaacatcgttcctagacaatgaagcaaaactacgagatttggctagcgaaagctggcgtttgaggttgtgcatgcgggagaaatttgggaaacgacgagcaagttggctgtgtagcgacgaggagaggctgacgaaaccgaagaaagaacatggatcgggtttatctttcgatctgaaccaagccgctgatacggatgatggttctcataatacgagcgatctaacaacagataatgatcaagacgagcaaggttttagtggaaagctgtcactacaatgcgttccatttgcattccacgatatggttagccgtgtagatgatgcggtagcgtttcgagcagttgatttcgcagctgtgagacggagaatcacagaaacattatctgagagattcgaaacgatcataggcgaatcactatcagtagaagtcgaggaagaggcacttcagagaatcttgagtggagtgtggttagcccaaacagagttagaggaatggattgagaaagcgattgttccggtgttgagccaacttaaggctcgagtttcgtcttctggtacttacggtgaccgtacggttgctcggctcgagctagatgaagattccggtgaacgaaacgccggtgatttactgccgacaactattactttggcagtatgagagttgtaaaacagagattggagttttgttgttacagtggactgtggaaaagggtagagatgtaaatatgtctcaactggttttggcggggggaacgggaaacagttaggggtaaaaatagtaaaaaaaaaggtgtttatagttctttacttctttttgttttaaaaaaaaaaaaaaaaaaaaaaaaaagggcggccgctctagaggatccaagcttacgtacgcgtgcatgcgacgtcatagctctt

SEQ ID NO: 96079 - DNA, 510 bp, Arabidopsis thaliana columbia
  unsure (1)..(510): unsure at all n locations
atgatactgccnnnnnnnnnnnnnnnnnnnnnnnnnnnnnnnnnnnnnnnnnnnnnnnnnnnnnnnnnnnnnnnnnnnnnnnccacgcgtccggatctgtgacctctcttcttctattgtgagaaagagatcaacaaatggagacaaagagcgaggagaagctaagtgtcatcgaactactaaaacgagctcttaagctactctttggtaacatcaatctcgctctcttcctctttctttgctctctcccactgttttgtttcttgatcttcttcgagctctccctccaaaccactgtctcactcgcttccacatacatctccaaactagtcaattctgaggaggacttgtcggagaatgatcttcttccttggctgattcagacaactctgctctacttctttccctatactattcttgacctcctttccaccaccacgatcgttgcagcatcatcgattgcttacacatctgaggaagagccgttaggggttgctttatttgggaagg

SEQ ID NO: 96080 - DNA, 526 bp, Arabidopsis thaliana columbia
gagttatccacagatctaaaattgagaaaacttaaaaaagttcccaatttcgaaaaatgtcactaaccgcacaattctcgccgccggtcaccggaataaccaggagtccccgggatacgaaaccgtcactgtccactcgccgtgtatttccggtttacactgagattagaaccatgacgacgagtaatctgaggaaatcggcgtgttttgtggctaaggctatagaacagagacgagatacagctggatctgaatcggaatcagaagcgactccgtcaccggcggaagagagtggaagcggagaagataaggaagtggagattagcgcgataggaccagagataaaaccagcgatggagcagaggaaaacggcggaggaagagaaagggaagaacgagtttcttagtggagttgcggaggaagtgaaggagattgagtggccggcgtttcagaaagttctcggaactaccggcgtcgtgctcggtgttatcgctggctctagcgtcgtcttgctcactgtcaattt

SEQ ID NO: 96081 - DNA, 458 bp, Arabidopsis thaliana columbia
caaaaagtttggttcttgagaaatgatggcggctcgttctcattgtatcaaccttatccccaaagtatgtcttccacaatccttcataactggagaatcagtgactaatctcagatttgattgcgtctctaagtcatcgaagctttctctcaagacatcatgtggaagatcaagaacgcatcaccggaggcaaaatctcagcatccggtccgtgtttactggaatcgtggaggaaatgggtgaagtcaaggacttgggaatggccgatcacggaggattcgacctcaaaatcggagcgagagtggtgttagaggacgtgaagctcggtgacagtatcgccgtgaacggtacttgtttaacggtgacggagtttaacgcagaggagttcacagtagggttagcaccggagacgctgtgaaaaacatcgttggaggagttaaagataggatctccggtga

SEQ ID NO: 96082 - DNA, 393 bp, Arabidopsis thaliana columbia
gactgacgatacaaactcgacgaagcaatgtggtctcttgcactaacgttaccatctccgtctttggtgtcggtgaggagcactaaactcggacgaagtgttagtaatggtggccggaattggtcgggacttactaagttgtcggagaaatcgaggactaaacgaggtaatggtctctgctgcaaggcggagctgtcggagctagctccagtcgtctctgctacttatggtgtacttcttctaggacgcggtctcttcgcttatagcaaatctggaagcaaaggttctctctttgggggtttgaccggttctgttcttatggcatctgcctacttccttactaaatcaccagagacaagagttctctgcgataccataggtcttggtgctgcc

SEQ ID NO: 96083 - DNA, 460 bp, Arabidopsis thaliana columbia
tattctgactcactttagggaaagctggtacgcctgcaggtaccggtccggtattccacgggtcgacccacgcgttcggtgacgttgacgtaggatgatcgttgaggtataagcttggagagctagaagctgaacttgtggaaatcaatgctaataatgacaagttgcagcgctcctataatgagcttatggagtacaagttggttcttcagaaggctggtgagttcttttcttctgctcatagaagtgccgctgatcaacggagagagacagaatcacaccgagcgggtgaagatctgcatggagtctcctttgtttctggaagagaagtccattgattccgacgaggcaggtgaagcttggatttcttaccggattagtgcctcgtgaaaagtctatggtctttgagaggattctgttccgtgcgaccaggggcaacatttttatccgacagactgtc

SEQ ID NO: 96084 - DNA, 1385 bp, Arabidopsis thaliana columbia
cgggcaccccctcggtgtcgacggtatcgataagcttgatatcgaattcgcggccgcttgcagcgctcctataatgagcttatggagtacaagttggttcttcagaaggctggtgagttcttttcttctgctcatagaagtgccgcagatcaacagagagagacagaatcacaacaagcgggtgaagatctgctggagtctcctttgttacaggaagagaagtccattgattcgacaaagcaagtaaagcttggatttcttaccggattagtgcctcgtgaaaagtctatggtctttgagaggattctgttccgtgcgaccaggggcaacatttttatccgacagactgtcattgaggagccagtcattgatcccaactctggggagaaggctgagaaaaatgtttttgttgtcttctattccggggaaagagcgaaaagcaaaattctgaaaatatgtgaagcttttggggccaatcgttatcctttcagtgaggaccttggaagacaagctcagatgataaccgaggtttctggtcgattatccgagcttaaaaccacgatagatgctgggttaggtcagcgtaacattcttttgcagaccattggagataagtttgaactatggaacctcaaggtacgcaaagagaaagctatctatcatacattgaacatgcttagtcttgatgtgacgaagaagtgcctcgtggccgagggctggagtcctgtctttgcatcaagagaaattcaagatgcattacagcgtgccgccgttgactccaattctcaagttggatcaattttccaggtcctaagaaccaaagagtcgccaccaacttattttcgcacaaacaaatttacttctgcaatccaggaaattgttgatgcgtatggtgtggccaagtatcaggaagccaatccaggtgtattcaccattgttaccttccccttccttttcgctgttatgtttggtgattgggggcatggaatatgcattctgcttgcaactatgtacttgatattgaaagaaaagaaacttgccagccagaaacttggggatattatggaaatggcttttggtgggcgttatgtcattttgatgatgtcactcttctcaatatacactggattaatctacaacgagttcttctctataccattcccattgtttgctccttcagcgtatgattgccgggatgtctcttgcagcgaagctacaacaattggtttgataaaggtcagagacacttatccatttggtctagatcctgtgtggcatggatcccgcagtgagctgccattcctgaactcgctgaagatgaaaatgtcaatccttctcggagtttctcaaatgaacctcggaatcataatgagctactttaatgc

SEQ ID NO: 96085 - DNA, 431 bp, Arabidopsis thaliana columbia
gtcaaaaactctcactcaatcgatggcagaaccatcttttgctcgtctgtttctcttgttcttcagctttctccttatctttgccacctactcttgggtctttggacccgactcaggcttcttggtcgggactcggggcccgaaaactctcggctcggatcggcaaggccaccgtggccactctttagaaaagcctcatcatccacttgatccactaacggtgcgagaaatcaatagagtcagaacaatactctcgaaccatgacccgggttttggttccgggtcggccacgattcactccatggctctcgatgagccggagaagtcacgtgtcgtccagtggaagaagggaaataagcttctgtcacgaagagctgcggtcgtagcttatttggggtggtcaaacacatgagataacgggtggatcttga

SEQ ID NO: 96086 - DNA, 686 bp, Arabidopsis thaliana columbia
gaaatggataatatcaactttgcaggatcagcgtccttatcgagcgtgtaccaattccatgaagcgaaaatgtccgcccttataagaagaaatgggattctggaagggcagttagaagcagcattggcgggaagagagccgcctgagaggaatgtgtcggttgcgttgaggagcaaacaagagactgataaaaagttatctgcccccatgagagatgttgaattgcttaaggagaagctgaccgggttagagctcgctcaagaggaagctaatagtttgtcaaacatggttcactccgacaatgtcaggcttgagcatgatgtagcgttcctcaaagctgtcctagacgatacacaaaaggagttgcattcaacaagaggagttcttgcaggagaaagagcaagagcgttccagttgcaggttgaagtgtttcatctgaagcaaagattacaatctctagagaacagagctgctacacccagaaagcctttccatgtctaaacacagaccagagacaacacgataacttttatgacttccattttgtagtactcgagacatgactgaattcatgtgtgttgtggagtaatgtataattgaagtggaaaaaaaaaaaaaaaaaaaaaaccccagcgcccccgctctagaggatccaagcttacgtacgcgtgcatgcggggtcatag

SEQ ID NO: 96087 - DNA, 528 bp, Arabidopsis thaliana columbia
  unsure (1)..(528): unsure at all n locations
gcgtccgcgattcgaaagtattccgacccggatgggtcggtttgtttcgattgatatctcaaaattcagaatcccggaagaagatcaaccaacctgaaccggagtgaacagtcaaattaacccgcccggtttaactcgagctccgtctatcttagaacgggtcaaatccattaagctatcctccttctacagatccgacccggatttggatcaaaaacaaaatccggatccggttcttcacgaggagcacaagcatgtacgaagcaaatcggaatcgaaaaaaccggtgaagaagaagaagaaagctttaacgaagatgacaaaatcggctagcgagaaatcaggttttggtttcgcaggaagccatgcggaagcgccggagacggtggaatccctcgaacggagaagaccagatacaacgagagtcgaaagatcgacgtctttcggcgacgnagaagatngcgtcgacgcgaaactttcagattttcatcaacaaattcaaacagcagctgaaattncagagactcg

SEQ ID NO: 96088 - DNA, 677 bp, Arabidopsis thaliana columbia
  unsure (1)..(677): unsure at all n locations
nnnnnnnnnnnnnnnnnnnnnnnnnnnnnnnnnnnnnnnnnnnnnnnnnnnnnnnnnnnnnnnnnnnnnnnnnnnnnnnnnnnccacgcgtccggttgagagtaattcactacacacacacaaaaaataaattgagtgcctcccccaaaaacaaaattggtagataacgagcaattgttttttttcagatttgatcctgaatttttacatttttttttttgcaatctccccctaatctgttgtttctcgcttcttcttctgttaatcatctgtctttcaaaaagaaagaaaaaagaaaaattcgatttctgggtttgtttttgtcatacagaaaaaaatcaagcttatgaatttgtgtttaattttttgttttaatttgaaaggcaggttttttcagaacgagatcgttttttcaaatttcttctgattttacctctttttttcttcttagattttagtgaatcgagggtgaaatttttgattccctcttttcggatctacacagaggttgcttatttcaaaccttttagatccatttttttttaattttctcggaaaaatccctgtttctttacttttttataagtctcaggttcaattttttcggattcaaatttttattttaaatggcagcttctatgaatttgtacacttgtagcatatcgttttatgactct

SEQ ID NO: 96089 - DNA, 503 bp, Arabidopsis thaliana columbia
cagacgcgtgggcggacgcgtgggagccactgctatgccttcagattaccgtgacaagaaggtttggatactttgcaacgattgtaacgacacaacagaagtgcacttccacataatcggacagaaatgtggacattgcagatcatacaacacacgagcgattgcgcctcctgttcttcctcaatgacaaaaccaagatcttcccatgtattgcctccagaaagcaagcaagaactttttgttgctaaaaaaactgaggcatagattgatgatcataacaaagaaagaaaaagaaaaagattgatgatcaatttgatcattggtcacaaaagcaaaacacacatttgtcttcttcatttgatttgttgttgttcttatactgttacatttttccatttgtgtttgggtgttggaaatgcgaggattatgtataatatactctatattcttgatccaggaaaagttacctggataatatgttttcaggattttttacggggtta

SEQ ID NO: 96090 - DNA, 598 bp, Arabidopsis thaliana columbia
acccatttctttaaagcttcaaatctatctctcacgaactcccaagctaacaacattcacaaggagagagaaacaataaagggcaaggaaaaagatcaaacctttttctttctttctttctcctgctctctgcaatttagaagaagatcgaagaatttgtttgttgtttatcttcttctataaaaacaaaccgtggggtctgttttcatttctggccttgcgattccgataaaactctcagcttcccattcaatccaatccaattccacttctcaaacatatatataattctatatttttgagagacagtttactttttctccttctctctctctctctctttctctttctctgtctctttggcttttctcctcctgttctcatggaagcttcacccaatgatcgacttcattttggcaaaatgggtttcgggtgtaagcattacaagaggagatgccaaatcagagctccatgttgcaacgaagtcttcgattgtcgccattgtcacaatggagagcactagcacattgcgcaatatctacgaccgtcacgatcttgttcgtcaagacgttaaacaagtgatttgttctgtttgcga

SEQ ID NO: 96091 - DNA, 834 bp, Arabidopsis thaliana columbia
  unsure (1)..(834): unsure at all n locations
agcaaaacacacatttgtcttcttcatttgatttgttgttgttcttatactgtctctttggctttttctcctcctgttctcatggaagcttcacccaatgatcgacttcattttggcaaaatgggtttcgggtgtaagcattacaagaggagatgccaaatcagagctccatgttgcaacgaagtcttcgattgtcgccattgtcacaacgagagcactagcacattgcgcaatatctacgaccgtcacgatcttgttcgtcaagacgttaaacaagtgatttgttctgtttgcgatacagagcagccggcagctcaagtttgttcgaattgtggtgtcaacatgggagaatatttttgcagcatctgcatattctatgatgatgatactgaaaaacaacagtttcattgcgatgactgtggaatttgcagagttggtgggcgtgagaatttcttccattgcaagaagtgtggatcttgttatgcggttggtctgcgcaacaaccatcgctgcgttgagaattcaatgcgtcatcactgtcccatttgttacgagtacctttttgactctctaaaggacacaaatgtgatgaaatgcgggcacacaatgcacgtagaatgctacaacgagatgatcaaacgtgacaagttttgttgtccaattttctcgaggtcagtgattgatatgtctaaaacatggcagngnctcgatgaagggatcgagccactgtatgcctcagattccgtncaagaggtttgnactttncacggtttaacgcacacagngggccttcccanatnggcaaatttngcattnagnnttcaccnggnggng

SEQ ID NO: 96092 - DNA, 753 bp, Arabidopsis thaliana columbia
  unsure (1)..(753): unsure at all n locations
cggaactctatacgattcatatagggcaagctggtacgcctgcaggtaccggtccggtattcccgggtcgacccacgcgtccgcacatatgtgatgaaatgcgggcacacaatgcactgtagaatgctacaacgagaggatcaaacgtgacaagttttgttgtccaatttgctcgaggtcagtgattgatatgtctaaaacatggcagagactcgatgaagagatcgaagccactgctatgccttcagattaccgtgacaagaaggtttggatacttttgcaacgattgtaacgacacaacagaagtgcacttccacataatcggacagaaatgtggacattgcagatcatacaacacacgagcgattgcgcctcctgttcttcctcaatgacaaaaccaatatcttcccatgtattgcctccagaaagcaagcaaaattttttttgctaaaaaagctgggggcttggttgggtggtcttcccaaggaaagagaaaaaaggggtgggggtcttttggtcttggccacaaagaaaaacccctttgtctttttatttgagggggggggtcttaaactgacattttccttnagggtggggttggaatgcaagatttcaaaaacccttttttttgggccgaaaagaaaaaagagtaatgactatcaaggggggggggggcgctttaagactaaattacaccggtggtggaggtatattttttatgggcccatattattccgggccggtttaaagggg

SEQ ID NO: 96093 - DNA, 781 bp, Arabidopsis thaliana columbia
ggcacgtcgttcttcctcctgaagtcgctaaacttcttcctaagaatcgtcttctctccgaagtaagtttttttccgcattgttctctgatttctgattctaaatccttcgattagatcatcgaagactatgaaaatttgttgctcttaagaaattaagtttgggaaaaatcgaaaaagagatcgtttaggtttaggatttgaatctttgctctgaatccaaattgcaactgttacgattttgaatctttgctttgggattttgtaaggtttagtgataaagagattttagacatttgtgttgtgcaatctcttcaatggttgtattgattggtggtgatggtaaaaactgtttggaatttcgaagaacgaatggcgagcgataggagtgcagcaaagccgcggatgggtacattacgcggttcatcgacctgagccgcacataatgctattcaggaggcctcttaactatcagcagcagcaggagaatcaagctcagaacatgcttgttaagtgaatcattatcatcacctgagtaagaatgttatatgcaacaattctatgagtattggtttatgtttcttgtaaacatggtttgaatctttgtggttatggatgaatatgtgagagttggtttgttgaacaacttctatgtaatgttagtcttggttctaatgtcatcttctgcttcttaaaaaaaaaaaaaaaaaaaaaaaagggcggccgctctagaggatccaagcttacgtacgcgtgcatgcgacgtcatgctgttctatagt

SEQ ID NO: 96094 - DNA, 742 bp, Arabidopsis thaliana columbia
atttttccccccaggaaaccagcctatggccccatgtttttccgcccaagcttcttaattccgccctcactataggggaaagctggtaccgccgcagggtaacggtccggaattcccgggtccacccacgcgtccgattacagattcttcaattcctctttcccttctcctccatttcctgattaaggcttcacatctctgagagagaaatgggtcagatccaatactccgagaaatacttcgatgacactttcgaatacaggcacgtcgttcttcctcctgaagtcgctaaacttcttccaaagaatcgtcttctctccgaaaacgaatggcgagcgataggagtgcagcaaagccgcggatgggtacattacgcggttcatcgacctgagccgcacataatgctattcaggaggcctcttaactatcagcagcagcaggagaatcaagctcagaacatgcttgttaagtgaatcattatcatcacctgagtaagaatgttatatgcaacaattctatgagtattggtttatgtttcttgtaaacatggtttgaatctttgtggttatggatgaatatgtgagagttggtttgttgaacaacttctatgtaatgttagtcttggttctaatgtcatcttctgcttcttaattaaaaaaaaaaaaaaaaaagggcggccgctctagaggatcccagcttacggacgcgtgcatgcgacgtcatagctcatcgatagtgtcaa

SEQ ID NO: 96095 - DNA, 1565 bp, Arabidopsis thaliana columbia
  unsure (1)..(1565): unsure at all n locations
nnnnnnnnnnnnnnnnnnnnnnnnnnnnnnnnnnnnnnnnnnnnnnnnnnnnnnnnnnnnnnnnnnnnnnnnnnnnnnnnnnccacgcgtccgcgtttgcagaaagaggttataaaaggctccgaaatatttcatccgaaccataaacttgttaacacacctaaagaacaatgatgcagtaatgggaatgaatacacacgtccatttgactgctgtgatggaaaggattttataagcaaatagtcgtaaatactggcggaagaaaatgatattttacggctgaatcatcaccggagaatgagaggaagatgttcgcttacaggactctgtttaggattgaccgtgtatttgggtttacgagtagatgttttcaatcgaaaccggaatcttttagtatcctgagctttaggggaagtgagaagagtgccatgggtggatatatgaagcagaagatggtaaatttagtgtggagacccatctccactcaaacctcttcagttattgctgaagctggaaatgaagtccaagaagtagctcagtgtagcaaatcaagtgatgtttctaaggaagttattgaaggagagacagcttcagttgtttcagctggaaagcattcagtttctcttgaggttggggcttctttgattaagttcattagagggaaagaaggaacgacgcagatgaaacttgaagaggaaatgggagtgaagatcattcttccatcatcaaggaacaaagatcatatcagcattgaaggcggttcagtggattgtgtgactaaagcttcaaaaagaatagcaaccattatcgatgaggttgtaaggagtccaagtctcgactactcacactttgtatcacttccattagccatacatcctgagttagtggacaagctagtgaattttcagaattctatcctcgggatccatagcatagctagtgataagcaagacgaccaagctaatagagcaaccacaagtgtggcagttgatctaaaagctaatagtgaaacaaaccaggtcaatgtgggtatcaagagcataccaattgtcagttacccgcctaaggccaaatcaaagtcatctactttattggacttaggaattgaaaagtccatatttattaagccaagtacttttcacttgactgtggttatgctgaagttatggaacaaagatcgtgtcaatgcagcgtgtgatgttctgaagagtatatttcctagtgtgatggatgctttggataacaaaccagtattcattagacttaaaggattggattgtatgagaggnccattagncaagactcgtgttctctatgctccctgttgaagnaattgggtgatgaaggccggcttttaccggggcttgncctaattnctgatgcattttgtgaagctngggcttnttccncgggaaaggttcaaannaaaggtttaagnttnaangtgcccctgnttgattccggggccccggaaagggggnanggccnttngggggnnggttgggccggttttttcaagggggtcccaacccgtttgaccggggcctggggnantttncccgggg

SEQ ID NO: 96096 - DNA, 1069 bp, Arabidopsis thaliana columbia
  unsure (1)..(1069): unsure at all n locations
ccttgccgtaccggtccggaattcccgggtcgacccacgcgtccgcaagtgtggcagttgatctaaaagctaatagtgaaacaaaccaggtcaatgtgggtatcaagagcataccaattgtcagttacccgcctaaggccaaatcaaagtcatctactttattggacttaggaattgaaaagtccatatttattaagccaagtacttttcacttgactgtggttatgctgaagttatggaacaaagatcgtgtcaatgcagcgtgtgatgttctgaagagtatatttcctagtgtgatggatgctttggataacaaaccagtattcattagacttaaaggattggattgtatgagaggaccattagacaagactcgtgttctctatgctcctgttgaagaaattggtgatgaaggccggcttttacgtgcttgtcttattactgatgcatttgtgaaagctgggcttgttctcgagaaagatgcaaagcaaagcttgaagctgcatgtgaccgtgatgaatgcgaggcacaggaaaaggagaaagaccaataagaagaagatggagacgtttgatgcaagagagatacacaaacagtttggaaacgaagactggggagaatatctgatccaagaagctcatctctcacagcgttttgtgttcgaccagaacggttattaccgttgctgtggttcaataccatttccaggagaacagagagcctgagaagaatcatctaaccagcggccacagtctcaaatctcaagcatcttcacaggttttggtcccgtggtatgagcacttacaactttgagaagagaacctgataaaattgtaaagttgtaccggtcatcttgtgttaaccaaatagttgtcttcggtttggttctttcttggtctttgttcaataaaccgagccaaaacgttcttgtactctttctacaaggtaataaaaaggttcttagtacaaaaaaaaaaaaaaaaaaagggcggccgctctagaggatccaagcttacgtacgcgtgcgtgcgacgtcatagtactactatagtgtcgacctaannnncgn

SEQ ID NO: 96097 - DNA, 472 bp, Arabidopsis thaliana columbia
  unsure (1)..(472): unsure at all n locations
gtgcactatagagacttgacgcgctgccgcgtcgtagctcgnattcgctcgagctgatcttttcagtctatattcgggccgaggtgctgtgacctcactaccatccagttcttcaaaaaattgacggttgttcatatgcgtacctacctccaaactttcaccattccttggactgtgttgagtctgcaacacttgttgtcttcgagcggaggtatgagtatctaggaagtcacaccacagagcttattgttggctccacagacacagcaaccactactcgagactcctggtgaggtttttgaactgcggaaacttcttccgatgtccgttgcttatgacttcaacatccatactatggatnttcagcctggagagnttctgaatgtaaaggaagttcattataaccagcatggttttgttgcttnctggaggggcaaggcatttatcgcttgggtgataacttgtatccagt

SEQ ID NO: 96098 - DNA, 809 bp, Arabidopsis thaliana columbia
  unsure (1)..(809): unsure at all n locations
aagtaccgcttcggaatttccgggtcgacccacgcgtccgggactgtgttgagtctgcaacacttgttgtcttcttttggagtttgaatatctaggaagtcacaccacagagcttattgttggctccacagacaagcaaccactactcgagactcctggtgaggtttttgaactgcggaaacttcttccgatgtccgttgcttatgacttcaacatccatactatggattttcagcctggagagtttctgaatgttaaggaagttcattataaccagcatggtttgttgcttctggaggggcaaggcatttatcgcttgggtgataactggtatccagttcaggctggtgatgtcatatggatggctccttttgtccctcaatggtatgctgcactcggaaagactaggtctcggtatttgttgtacaaagatgtgaatcgaaatccattgtgatcaaagattgatatgactttgcagtaaaagtcagaatcttgttgttcagcttcttgtcttataaacgccatgtccactctaagcactagctacgtgagacttagttgtatgaatcttataacaattgtgaaaagaaacacattgataaatgatgaaatgactctctctctctccagccnnnnggagcgcgcccgccccggttattataccccctcgcctgaaaaaaaacagggggcgggcccgctcttaaaagggatcccaaacttttaacggtaccgcgcttgctattgcggaacgtttataaagcttctttttttatatgggggtccaccctcaaatatttcaaatttccact

SEQ ID NO: 96099 - DNA, 554 bp, Arabidopsis thaliana columbia
  unsure (1)..(554): unsure at all n locations
gaccngcagnggtcttatnttaacctantnagggaccgggcctgaattcccggggtgaacccactgcagtccggggctcttcttcgtcgttccatggcatttccctccaaattctaggtcacaaatcaaaccagaagaaccctaatcccaatgttgccttcaccaatcactctctctctttatctactccttcactatgtcgtctccatcgtcacgcgacgtttccagactcaattccagcaaaatccagaaacctcacttcgtacttctccaccacaacacaagagccagtcctcgaatcttcttcttcttcttcttcagctcctgaggtagtagaagaagagatttctaaaaccagattgattgctcagaatgttccatggacatctacacctgaaggtattagatcgttgttcgagaagtacggggagtggttatcggcattgacgatgtctattgcataagaagggaaagaaattagggggtttnggggtcattgaaatgggttttccttnaggaggntgaaaaagttnttaaaanntttgaanncgggg

SEQ ID NO: 96100 - DNA, 409 bp, Arabidopsis thaliana columbia
cttctccttagggtctatctctcttatcttaagcagcagcagcagcagcagctagaacaaaaacgtcaccgatggcgtctcaagctgcgaatctctgggttcttctaggtttaggtctcgctgggattcttatgcttaccaaaaagctgaagaagaccgtccgtgaagatttcggcgcttttatcgataaactcatgcttcttccccctccgcaacctgctcctcccaaagctcctcatcctctcaccggtctaacctttgccgtttccgacgtatttcggtattacagggtatgtgactggatttggtcatccagactggggtcaggacccatgaagctgcttcgtcaacatctcctgtggtttcaactctcgttgaaggtggagccacttgtgttggaaaaactgta

SEQ ID NO: 96101 - DNA, 451 bp, Arabidopsis thaliana columbia
cggacgcgtggggcttggggctcgctcttgggaatgcagctagcagaaagagatatcattgtagcatgccttgactacaggaacgttcctcagggaacaattagtgatatggtgactgatgcttctcaaggaatctcatttgtctgcaataacatctctgcatttggaggtgaccccaacaggatctacctgatggggcaatcagcggagtgcccatatagccgcttgtgctctattggaacaagctactaaagaattaaatggagagagcatctcctggacagtgtcccagataaaagcttattttggattatctggagggtatcttctaagcttttggattcccgttggcttctatgtgctttttggtctacagcaattgatctgcttatcattttgaactttaataggtacaatctatacaaggtggttgatcacttccataatcggg

SEQ ID NO: 96102 - DNA, 716 bp, Arabidopsis thaliana columbia
  unsure (1)..(716): unsure at all n locations
nnnnnnnnnnnnnnnnnnnnnnnnnnnnnnnnnnnnnnnnnnnnnnnnnnnnnnnnnnnnnnnnnnnnnccacgcgtccgcccacgcgtccgcggacgcgtgggggaagagttgtgttcaataccaaaggccttctctacccagacagcgtggttggaactgattcacatacaactatgattgatggtttgggagttgctggatggggtgttgggggtattgaagctgaggcaacaatgcttggccagcccatgagtatggtattgcctggtgttgttggattcaaacttgccggaaaaatgcgtaatggtgtaacagctactgatttggttctaacagtgactcaaatgctgaggaagcatggcgttgttggaaagtttgttgagttttatggtaatggcatgagtgggctgtccctagctgacagggcgacaatttgccaataatgtcctccccgagtatgggtgcaaccattggggcttcttcccctgtggatccatgttacctctacaatatcctcaaaattgacctggaagaagccatgngacaagtggctaatgnatttaagnataantttcggggctaacaaaaatggtttttgnccncaaatnggccttagcaagacccgggttactncgcaaaatttgncctnatntggntnatgttanccttnattttggccaagggcccatncncggtncnttaaggattanggc

SEQ ID NO: 96103 - DNA, 766 bp, Arabidopsis thaliana columbia
  unsure (1)..(766): unsure at all n locations
nnnnnnnnnnnnnnnnnnagggaaagctcgtacgcctgcaggtaccgggcccgaattcccgggtcgaccccacgcgtccgacaatacacacttcttctcttaacaacacaacacaactttgaatttttcaccctcactttcatttatctcaaatctccttccagaaaagcgagggaatagtgttgttgagaggtttgtgatttccttttgaaaaaatgatggcttgtggcttaagcaagagccttggcttgtcttcctccttgaagaagcaacaaggcatagtgagtatccttggtggcatttcgtcgaacacttcatctgcaccttcacttaggcgaactttctccgccgatttgtcctccaagacttgggtttcccaaaatgggttttctcctatgaagagaatctcttcctctgagaagcttcgtcctgacgaagaagaagcagaggaagaatcaagatccggagtcgatatctgggcacagattcaacaagacaagaacgataagaagaaagaggaagagatcgagccgggtcaatccgatgtatggagctcgattttgtctgagaagaagaagactgaatcgagcaaggacactgttcctccaccgtatgttcatccattgatgaaacgtgcgagttccttgagtgagaaaagcctcgagatttgtactgagagtctcggatccgagactggttgcgatggtttctcttcgcatgcatcgtcggagactggagatgctgagatcgagattcatgatgagac

SEQ ID NO: 96104 - DNA, 404 bp, Arabidopsis thaliana columbia
aaaacaaaagaagagagagagagagagagacgatagaaacagagagattctctcgaaaatggccaccattagagtaccaaacgaagttccttctccagctcaggactctgaaactctcaaacaagctattcgcggatggggaacagatgagaaggcgattatacgagttttagggcaaagagaccagagccagagaaggaagattagagaaagttttagagagatttatggcaaagatcttatcgatgttctatcctccgaactgtctggtgatttcatgaaagctgtggtttcgtggacgtatgatccagcagagagagacgcatggcttgtgaacaagattttgaacaaggagaagaagaagaaaagcttagagaatttgaaggttatagtagagatctctt

SEQ ID NO: 96105 - DNA, 513 bp, Arabidopsis thaliana columbia
atggatgagctgatcaagtcaatctctctgatagctaagaactttgcttatgtccccatgctttcacgaactcatgggcagccagctacgccaacaactttggggaaagaaatggcgaattttgctgtgaggttaagcgaagaaaggagatatctttcagaaactaagattaaggggaaatttgcaggtgctgttgggaactacaacgcccatatttccgcatattcgaatattgactggcctcatgtttccgaggagtttgttacttctcttggattaacattcaacccatacgtgactcagattgaacctcatgactatatggctagactttttaataatatcagccagttcaacactattttaatttgattttgacagagatatatggagctacatatctctagggtactttaagcagacaactaaagcgggtgaaattggatcgtcgacaatgcctcacaaagtgaatcctattgactttgagaacagcgaagggaatctagggaaagc

SEQ ID NO: 96106 - DNA, 430 bp, Arabidopsis thaliana columbia
ctatgacgccgcatgcacgcgtacgtaagctcggaattcggctcgagaaagcgtactgcttcttcaaaacgcgaaaccacactgtaagttacgtacaccaccacctatcctcaccattcatcatcgacacgtggctggtttaactcatatcaccggaagaagatgacgtctgacggagcaacgtcgacgtcagctgcagctgcagcagcagcgatggcgacgaggaggaaaccgtcgtggagagagagggagaacaatcggagaagagagcggcggacaagagctggtgcggcgaacatttatactggtcttagagctcaaggtaactacaatcttccaaaacattgtgacaacaatgaggttcttaaggctcttggttctgaagctgggtgggttgttaaaaagacggaactacttatccgaagggaca

SEQ ID NO: 96107 - DNA, 636 bp, Arabidopsis thaliana columbia
tacggctgcgagaagacgacagaaggttacggctgcgagaagacgacagaaggggccagcgaagaagaaagaaaaaaaaaaagcgtattcctcgtgagcactaacttctcactcattcttcttcttcagctgaatccaaatacccatttccatttttaaccgtggttggattgttttgagagttgaaggaagaagatgacgtctgacggagcaacgtcgacgtcagctgcagctgcagcagcagcgatggcgacgaggaggaaaccgtcgtggagagagagggagaacaatcggagaagagagcggcggagaagagctgttgcggcgaagatttatactggtcttagagctcaaggtaactacaatcttccaaaacattgtgacaacaatgaggttcttaaggctctttgttctgaagctggttgggttgttgaagaagacggaactacttatcgcaagggacacaagcctctacctggtgacatggctggatcatcttctcgagcaactccttactcttcccataaccaaagtcctctttcttccacttttgatagccccatcttatcttaccaagtcagtccttcctcttcttcattcccgagtccttctcgagttggtgatccacacaatatc

SEQ ID NO: 96108 - DNA, 509 bp, Arabidopsis thaliana columbia
aatgatcgtcttcccttttatcactcactcttttatttctttgctcagcaaaagatttgatttttttttttgcttttatagattctgggaatagtttagagatggggagattgttcttggtgaatttggaaggcaagtcttacagttgtaagcactgcaagaccaatcttgctctctgtgatgatgtagtctctaagtcttttcagtcccgacatgggaaagcttacctcttcagtaaggtgtaagttttcttctccaagtttgatctggtgtttttggctagccatatttgaaggaacccgaagatccttttggatggataggacgggctatgcatttccaccagttattgggatttgtgtgaccagagggaaaatgtgtatgctggcaagaaaggaggttagggtgattgttgccggggatgcatacgggtggtcgatatttactgtgtcaaatgcggctcttatgttggatggaaatatgagtttgcttttgagaagaatcaaaag

SEQ ID NO: 96109 - DNA, 433 bp, Arabidopsis thaliana columbia
accacgcgtccgctaattcaaattttctccattctctcgttccaattattatttacttttttcacccaataaaaaaaaaaccatgcattcacttccggtgaatctcgtcctcaccgtacttacggtgttcctaacatcaccggcgcaagttatcggataccgtccatatccaccaaaaaccaacggctccgatcaaatcttcgacgcttcaaaaaaattcgaaggctcatcgaatctcgtccgcctccgttaccacatgggtccagtcttaaccaacaacatcaccgttcacccaatctggtacggcacgtggcaaaaatcccagaagaaaatcatccgtgagttcattaactcaatctcagccgttggatctaaacacccttcagtctccggttggtggaaaaccgtacagctttacactgaccaaactgga

SEQ ID NO: 96110 - DNA, 530 bp, Arabidopsis thaliana columbia
  unsure (1)..(530): unsure at all n locations
gatatctctgaggtaattctggagcagcataaacaatcaattgattcattcttcttgataccaggttgtggaaactctagcgagatcgttgctgagatttgtttgacagtctctaaccatgggtaaagagaagtttcacatcaacattgtggtcattggccacgtcgattctggaaagtcgaccaccactgggcacttgatctacaagttgggtggtattgacaatgcgtgtcattgagaggttcgtgaaggatgctgctgtgattaacatagaggttctttaagtacgcatgttgttcgttacatcttaaatattttgcaagnnnnnnnnnnnnnnnnnnnnnnnnnnnnnnnnnnnnnnnnnnnnnnnnnnnnnnnnnnnnnnnnnnnnnnnnnnnnnnnnnnnnnnnnnnnnnnnnnnnnnnnnnnnnnnnnnnnnnnnnnnnnnnnnnnnnnnnnnnnnnnnnnnnnnnnnnnnnnnnnnnnnnnnnnnnnnnnnnnnnnnnnnnnnnnnnnnnnnnnnnnnnnnn

SEQ ID NO: 96111 - DNA, 779 bp, Arabidopsis thaliana columbia
caggggcatttccggatatgacccactcgtccgacacgacactggagatttcatcaagaacatgattactggtacctcccaagctgattgtgctgttcttatcattgactccaccactggaggttttgaggctggtatctctaaggatggtcagacccgtgagcacgctcttcttgctttcacccttggtgtcaagcagatgatttgctgttgtaacaagatggatgccaccacccccaaatactccaaggctaggtacgatgaaatcatcaaggaggtgtcttcatacctgaagaaggtgggatacaaccctgacaaaatcccatttgtgccaatctctggattcgagggagacaacatgattgagaggtcaaccaaccttgacttggtacacgggaccaactcttcttgaggctcttgaccagatcaactagcccaagacgccattatacaagccccttcgtattccacttcaggatgactacaagattggcggtataggaacggtgccagtgtgacctgttgagactggcatgatcaagcctggtatggacgtgacctgtggtcacacagggtcgcccactgccgcctagtctgatgcgatgcaccacaagggtgtttttgagacaattcatgtctacagaggtacatttagtgcttacacagatgctcgaaaagatgctagtagaggatgctggaactctagctgcaaggatgatccaactaagggtgccgccaacttcaccttccaggtcatcatcatgaaccaccctggtcag

SEQ ID NO: 96112 - DNA, 528 bp, Arabidopsis thaliana columbia
  unsure (1)..(528): unsure at all n locations
nnnnnnnnnnnnnnnnnnnnnnnnnnnnnnnnnnnnnnnnnnnnnnnnnnnnnnnnnnnnnnnnnnnnnnnccacgcgtccgcaattatttttcttatcttctccgggatttagatatttgacataaatagtgagccccaacttttcttttgcagaagaatgaagcaggggttgataatgaaggtacaaggttaccaaggctgcagttaagaagggtgcaaagtgaactcgaatcctcaaaactctatccgcagatgaatcaaaaaacaatattagtttctttactttagtttggtatttggtcgcgtgttatagcttcgtttcttctccatcggaactctgttcccggaactgggttcttgatcggaggtggcggagctactttgcacctattttgcttttgaattgttatcaattttgaacctatttggagattcggttatatgatgtgattntccgaggnnnnnnnnnnnnnnnnnnnnnnnnnnnnnnnnnnnnnnnnnnnnnnnnnnnnnnnnnnnnnnnnnn

SEQ ID NO: 96113 - DNA, 704 bp, Arabidopsis thaliana columbia
acgttgggttcaatgttaagaatgttgctgtcaaggatcttaatagagggtacgtcgcatccaactccaaggatgaccctgccaagggtgctgctaacttcacctcccaggtcatcatcatgaaccaccctggtcagattggtaacggttacgccccagtcctggattgccacacctctcacattgcagtcaagttctctgagatcttgaccaagattgacaggcgttctggtaaggagattgagaaggagcccaagttcttgaagaatggtgatgctggtatggtgaagatgactccaaccaagcccatggttgtggagaccttctctgagtacccaccacttggacgtttcgctgtgagggacatgaggcagactgttgcagtcggtgttatcaagagtgttgacaagaagtgaaccatcctcaaaactctatctgccgcaggtgaatcaaaggacagtgttagtttctattactttagtttggtatttggtcgcgtgtctgtagttcttgtttctccccatcggaaactctgttcccggaactgggttcttgatcggaggtgggggagctactttgcccctattttgcttttgaattgttatcaattttgaacctattggagattcggttatatgatgtgatttccgaggatatttctcttaaaaaaaaaaaaaaaaaaagggcggccgctctagaggatc

SEQ ID NO: 96114 - DNA, 879 bp, Arabidopsis thaliana columbia
  unsure (1)..(879): unsure at all n locations
gggaaagcacgtacgcctgcaggtaccggtccggaattcccgggtcgacccacgcgtccgcggacgcgtggggttgaccactgaggttaagtctgttgagatgcaccacgagtctcttcttgaggcacttcccggtgacaatgttggattcaatgtcaagaatgttgctgtcaaggatcttaagagaggatacgttgcctctaactccaaggatgagccagctaagggggcccccaacttcacctcccaggtcatcatcatgaaccaccctgggcagattgggaacgggtacgccccagttctcggattgccacacctctcacattgcagtcaagttctctgggatcttgaccaaagattgacaggcgttctggtaaggagattgagaaggagcccaagttttttgaagaaatggggacccttgggtatgggtaaaaatcacccccaacccaagccccatggggttgttgagaacttttctcccgagttaccccacccttttttggggaaccttttccccctgttttanggaacntttnaaggcctaaacccgtttggctgtttgggtggtttatttaaaagaacctttggaaccaaaaaaggaacccaactggagccaaggtccccaaggctgcagtgaaaaagggtgccaaatgatgaaactttcgttatgatcgactctcttaaggttttctttggttcttaaaactttgatggcgtttgagcccttttcttttttctctttaattctgggactttccctcccccccccttttggaaatctctgagaccttttaatatggttttcaattaagcagtttccggaaaattttgcttgaaactgaaaaaaaaaaaaaaaaacttnannnnttnnnttnt

SEQ ID NO: 96115 - DNA, 1241 bp, Arabidopsis thaliana columbia
cacgttacaaaatttagacaaaaaaataaatatggagctcgagacctcagtttatcgaccaaacgtcgccgtttatgattctccggatggtgtggaggttcgaggacggtacgaccaaatcttcgccaagattttgacgagagaagctcttagctttgtggctgagttacagagagagtttcgtggccatgtgaagtatgccatggagtgccggagagaggcaagacggcgttataactccggtgccgttcctgggtttgatccttccactaagttcatcagagacggtgattggagctgtgccttccgccctcctgccgttgctgaccggagagttgagatcaccggtccggtcgagaggaagatgatcatcaacgctcttaactccggagctaaagtttttatggctgatttcgaggacgctttgtttcaaagttgggagaatctgatgagagggcatgtgaacctgaaagatgcagtggatggatctcattacgttccacgacaagtcaaggaacagagtttacaagctcaacgaccaaaccgctaagctttttgtccggccaagaggttggcatctcccggaggctcacatcctcatcgacggtgaacccgccactggatgtcttgtcgattttggcctttacttcttccacaactacgccaaatttagacagactcaaggttccggtttcggtccattcttctatctccccaaaatggaacattctagggaagcaaagatatggaacagtgtttttgagcgtgctgagaagatggctgggatagagagaggaagcattagagcaactgtgcttatcgagaccctcccggctgtcttccagatgaatgagatactctatgaactacgtgatcactcagtcggtttaaactgtggaagatgggattatatcttcagctatgtcaaaaccttccaagctcaccctgaccggctcttaccagaccgtgtcctagttggcatgggccagcatttcatgagaagttactctgatcttctcatccgtacttgtcataagcgcggtgtccacgccatgggtggcatggcggctcagattccgataagagatgacccaaaagcgaatgagatggcattggatctagtgaggaaagacaagctgagagaggtaagagcagggcatgatggaacatgggcggctcatccaggacttatcccaatctgcatggaagcattcactggtcacatgggaaaaagtccaaac

SEQ ID NO: 96116 - DNA, 1410 bp, Arabidopsis thaliana columbia
  unsure (1)..(1410): unsure at all n locations
nnnnnnnnnnnnnnnnnnnnnnnnnnnnnnnnnnnnnnnnnnnnnnnnnnnnnnnnnnnnnnnnnnnnnnnnnnnnnnnnnnnccacgcgtccgcccacgcgtccggacccgtgagcacgctctacttgctttcacccttggtgtcaagcagatgatctgctgttgtaacaagatggatgccactacccccaagtactccaaggccaggtacgatgaaatcatcaaggaggtgtcttcctacttgaagaaggttggttacaaccccgacaaaatcccatttgtgcccatctctggatttgagggtgacaacatgattgagaggtccaccaaccttgactggtacaagggaccaactctccttgaggctcttgaccagatcaacgagcccaagaggccgtcagacaagccccttcgtctcccacttcaggatgtctacaagattggtggtattggaacggtgccagtgggacgtgttgagactggtatgatcaagcctggtatggttgtgacctttgctcccacaggattgaccactgaggtcaagtctgttgagatgcaccacgagtctcttcttgaggcacttccaggtgacaacgttgggttcaatgttaagaatgttgctgtcaaggatcttaagagagggtacgtcgcatccaactcaaggatgaccctgccaagggtgctgctaacttcacctcccaggtcatcatcatgaaccaccctgggcagattgttacggttacgcccaatcctggattgcacacctctacattgaatcaagtctctgagatctgacaagattgacggcgttctgtaaggaattgagaggagccaagttcttgaaaaatggtaatgctggtatggtgaaaatgcctccaaccaagcccatggttgtggagaccttctttgagtaccccccacttggacgtttcgctgtgagggacatgaggcagactgttgcagtcggtgttatcaagagtgttgacaagaaggacccaaccggagccaaggttaccaaggctgccgtcaagaagggtgcgaagtgaaccatcctcaaaactctatctgccgcaggtgaatcaaaggacagtgttagttttattacaatagtttggtatttggtcgcgtgtctgtgttcttgtttcgttttctccccgtcagagcgttgttctcgtaattgggttcttgatcggaggtggcggatctacacacacattcttcctgtttttggcttttaatttgttttctcattttgaactgttttaaaatttctgttatatgaatgaatgttttccctgcggtttaaaaaaaaaaaaaattctttaaaaaaaaaaaaaaaaaaaaaaaaaaaaaaagggcggccgctctagaggatccaagcttacgtacgcgtgcatgcgacgtcagag

SEQ ID NO: 96117 - DNA, 1247 bp, Arabidopsis thaliana columbia
  unsure (1)..(1247): unsure at all n locations
ggttccaancccccaaaaatnaagaaaatccccanaaacnttgccaaaattaacagncgttntggtaagnattttagaaggagccctaaattcttgaagaatggtgatgctggtatggtgaagatgactccaaccaagcccatggttgtggagaccttctctgagtacccaccacttggacgtttcgctgtgagggacatgaggcagactgttgcagtcggtgttatcaagagtgttgacaagaaggacccaactggagccaaggttaccaaggctgcagtcaagaagggtgccaagtgaactctgaacatcaaaactctttccgctgatgaaatgaaggactattttagtttctttactttagtagtttggtatttggttggttgtttgtgttaccgcttcgtttattctccgtcggagctcaattctcggaattgggttcttgatcggaggtggcggaggtacttggcactcgagcttcctgtttatttcttttgttttgtgttatgattttgaacctttttggatattcggttatatgatatttgtgtcattcctgcggtaaataaatcaatttcttttattcagtggaaaaagagattgatcgtgtttataaaggatacagtctcataaatattataagagtatatgatacaacaacaaatgaatatctcaaatgaatccgagggaaagtcacactcaaagaataacctgttgttttttggacagaactagaatataagcagacgacatgcatagagaagtcgtcactgcaaataaacagaaggttgtcacgaagactcgctagcggaaaaattttatggttctggctgttaagattttgactgagtcacacacagggaaatcttacgagggtggaagacattatcaacagaggagatgagatcaagggttgatcacagaagtagaagagaggcaagaaccattgcgaaaacagaaagtagaagagatagagtgattcgggtttgtccactaggtgcttgtgcattggttgatggggttccaggggatgaggttggggcttttgcggtaaccggaggtagtggtggctcagtgacatcagcatctgtgaaaaccgggtttggagcttcggctggaggaaaggcagtaggactcacaagggttaagagggcaccgggttgggcaggggccatgtaaggtatagtttctttttctgcccaaacatagattccttttgtatctttggcagctgtaaaaaggggaac

SEQ ID NO: 96118 - DNA, 1760 bp, Arabidopsis thaliana columbia
  unsure (1)..(1760): unsure at all n locations
atgcnnnnnnnnnccagcactatacgactcacttagggaaagctggtacgcctgcaggtaccggtccggaattcccgggtcgcccacgcgtccgatttctcacattttcgtagccgcaagactcctttcagattcttacttgcagctatgggtaaagagaagtttcacattaacattgtggtcattggtcatgttgattctggaaaatcgaccacaactggtcacttgatctataagcttggtggtattgacaagcgtgtcatcgagaggttcgagaaggaggctgctgagatgaacaagaggtccttcaagtacgcatgggtgttggacaaacttaaggccgagcgtgagcgtggtattaccatcgatattgctctatggaagttcgagaccaccaagtactactgcacagtcattgatgccccaggacatcgtgatttcatcaagaacatgattactggtacctcccaggctgattgtgctgttcttatcattgactccaccactggaggttttgaggctggtatctctaaggatggtcagacccgtgagcacgctcttcttgctttcacccttggtgtcaagcagatgatttgctgttgtaacaagatggatgccaccacccccaaatactccaaggctaggtacgatgaaatcatcaaggaggtgtcttcatacctgaagaaggtcggatacaaccctgacaaaatcccatttgtgccaatctctggattcgagggagacaacatgattgagaggtcaaccaaccttgactggtacaagggaccaactcttcttgaggctcttgaccagatcaacgagcccaagaggccatcagacaagccccttcgtcttccacttcaggatgtctacaagattggtggtattggaacggtgccagtgggacgtgttgagactggtatgatcaagcctggtatggttgttacctttgctcccacagggttgaccactgaggttaagtctgttgagatgcaccacgagtctcttcttgaggcacttcccggtgacaatgttggattcaatgtcaagaatgttgctgtcaaggatcttaagagaggatacgttgcctctaactccaaggatgatccagctaagggtgccgccaacttcacctcccaggtcatcatcatgaaccaccctggtcagattggtaacggttacgccccagttctcgattgccacacctctcacattgcagtcaagttctctgagatcttgaccaagattgacaggcgttctggtaaggagattgagaaggagcccaagtttttgaagaatggtgacgctggtatggttaagatgaccccaaccaagcccatggttgttgagactttctccgagtacccacctttgggacgtttcgctgttagggacatgaggcagaccgttgctgttggtgttattaagagcgtggacaagaaggacccaactggagccaaggtcaccaaggctgcagtgaagaagggtgccaaatgatgagactttcgttatgatcgactctcttatggttttctttggttcttaaaactttgatggcgtttgagcctttttcttttttctctttatttctgtgactttctctctccctcctttttggatatctctgagactttttattatggttttcaattatgcagtttccggataaaaaaaaaaaaaaaaaaaaaaaaagggcggccgctctagaggatctcaagcttacgtgacgcgtgcatagcgaggtcatagctcttagtata

SEQ ID NO: 96119 - DNA, 1743 bp, Arabidopsis thaliana columbia
  unsure (1)..(1743): unsure at all n locations
nnnnncgactcactatatggaaagctggtacgcctgcaggtaccggtccggaattcccgggtcgacccacgcgtccgcacgcgtcgttctcgtcaccctatccttctctcttgcgatatctctgagatttgtctgacagtctctaaccatgggtaaagagaagtttcacatcaacattgtggtcattggccacgtcgattctggaaagtcgaccaccactggacacttgatctacaagttgggtggtattgacaagcgtgtcattgagaggttcgagaaggaggctgctgagatgaacaagaggtccttcaagtacgcatgggttttggacaaacttaaggctgagcgtgagcgtggtatcaccattgacattgctctctggaagttcgagaccaccaagtactactgcactgtcattgatgctcctggccatcgtgatttcatcaagaacatgatcactggtacctcccaggctgattgtgctgtccttatcattgactccaccactggtggttttgaggctggtatctccaaggatggtcagacccgtgagcacgctctacttgctttcacccttggtgtcaagcagatgatctgctgttgtaacaagatggatgccactacccccaagtactccaaggccaggtacgatgaaatcatcaaggaggtgtcttcctacttgaagaaggttggttacaaccccgacaaaatcccatttgtgcccatctctggatttgagggtgacaacatgattgagaggtccaccaaccttgactggtacaagggaccaactctccttgaggctcttgaccagatcaacgagcccaagaggccgtcagacaagccccttcgtctcccacttcaggatgtctacaagattggtggtattggaacggtgccagtgggacgtgttgagactggtatgatcaagcctggtatggttgtgacctttgctcccacaggattgaccactgaggtcaagtctgttgagatgcaccacgagtctcttcttgaggcacttccaggtgacaacgttgggttcaatgttaagaatgttgctgtcaaggatcttaagagagggtacgtcgcatccaactccaaggatgaccctgccaagggtgctgctaacttcacctcccaggtcatcatcatgaaccaccctggtcagattggtaacggttacgccccagtcctggattgccacacctctcacattgcagtcaagttctctgagatcttgaccaagattgacaggcgttctggtaaggagattgagaaggagcccaaattcttgaagaatggtgatgctggtatggtgaagatgactccaaccaagcccatggttgtggagaccttctctgagtacccaccacttggacgtttcgctgtgagggacatgaggcagactgttgcagtcggtgttatcaagagtgttgacaagaaggacccaaccggagccaaggttaccaaggctgcagtcaagaagggtgccaagtgaaccatcctctaaaactctatctgccgcaggtgaatcaaaggacagggttagttttattacaataagtttggtatttggggtcgcgcggacatgggttccttggtttccgtttttcttcccccgtccaagaagccgtttgttttcttcgctaaattgggggtttcctttggaacccggaagggtggggcgggaattcttaacaacgacaccaatgtcttttccctggcgttttttttgccgttttg

SEQ ID NO: 96120 - DNA, 1233 bp, Arabidopsis thaliana columbia
aacacgcgtccgcaaatttagtttcttcttcttttggttctgtctgaatccaattttcttatattttatttcctccaccaccgtgagatatgatcgccgccggagctaaatcgctattagggctttcgatggcttctccaaaagggattttcgatagcaattcaatgagtaattcaagatctgttgttgttgttcgtgcttgtgtttctatggatggatctcaaactctgagtcataacaaaaatggatctattcctgaggttaaatccattaacggtcacacgggacaaaagcaaggacctttgtctacggtcggaaactcgacaaatataaagtggcatgaatgttctgttgagaaagttgatagacagagattgcttgatcagaaaggatgtgtgatttgggtcaccggtcttagtggttcagggaagagtactttggcttgtgctttgaatcagatgttgtatcaaaaggggaagctttgttatattcttgatggtgataatgttaggcatggcttaaaccgtgatcttagctttaaagctgaggatcgtgcagagaatattcgtagagttggagaggttgctaagctttttgcggatgctggaataatctgcattgcgagtttgatatctccttatagaacagatagggacgcttgtcgaagtttgctccccgagggagattttgttgaggtgttcatggatgtaccgcttagtgtttgcgaggcgagggatccaaagggtctttacaagcttgctcgtgcaggaaagatcaaaggttttaccgggatcgatgacccttacgagccaccattgaactgcgagatttctctaggacgtgaaggaggaacttctcctatcgaaatggcggaaaaggtcgtcggatacttagataacaagggttatcttcaagcataacatacttctagatacacaaatttgttatctcacggtcttagttctattttacgagccaaagtataaaagtaagcaaatccatggctgttttatggaatcacaagttcgacaaaataaatataaatctcataatttttcttgtccctttttttttgtatcataaatcttgatgttatggttctgtatataatatgtgtgaaataaggttaagcctactaaccattttatatgatctataatacaatatactttgtatgcaaaaaaaaaaaaaaaaaactcgagactagttctctctctctctctcctcgtgccg

SEQ ID NO: 96121 - DNA, 745 bp, Arabidopsis thaliana columbia
  unsure (1)..(745): unsure at all n locations
cacttcttctaagctggagatgagtacaggttctactagtttccgtttcaaatgtagcgaacgagctgagaagagaaaagagttctatatgaaactggaggagaaaatacatgctaagaaaacagaaacaaaccaagttcaggccaaaacacagcaaaaggcagaagctgagattaaacagttcaggaaaagcctcaattttaaggcaacaccaatgccttcattctacaacatcggtactagaccggtgtctcataacaagaccgagccatctaaagtagcacaatcaagatcacgaccagcgacctcagcctcaattacaaacagggcggtcaccagagtttcttataaacacggttttgaagaagctgaaatggtaaaggtaatggtcagtaatagaaaacagagtgcggctaaagattcagatttgcaaaagggtaatcttatggcggttgaaatgaaacaacagattggtgctcgaagaagcagaaactagacagaggcaatttgaattctgcggttggctgcatagctttctattgcgattagtactttaaccaataagaaaactatgaatagtatagtacttaataataacattacatccgctgtcaaaaaaataaaaaaataacaacattacatccatttatttcatttttaaaaaaaaaaaaaaaaaagnnnnnnnnnnnnnnnnnnnnnnnnnnnnnnnnnnnnnnnnnnnnnnnnnnnnnnnnnnnnnnnnnnc

SEQ ID NO: 96122 - DNA, 604 bp, Arabidopsis thaliana columbia
  unsure (1)..(604): unsure at all n locations
tggccctgcaggtcccgttccggaattcccggttcaaccccccgtccggatttggtgtctctatggacttccaaatgagacatgggaggttaatctacccgttgaggaagttcctcctgagcttcctgaaccagctttaggcatcaatttcgctagagacggaatgcaagaaaaggactgggtatctttggtcgcagttcacagtgattcatggctgctttctgttgcatttcactttggtgcacgtttcggatttggcaagaatgagaggaagaggctgttccagatgattaatgagctgccaaccattttcgaagttgtgagcggcaatgcaaagcagtccaaggatctatctgttaacaacaataatagcaaaagcaaacctagtggcggccaagtcttcggccaatcccgaatctcttttccaaaggttgcaaaggatgtcatctccaccgccaaaagaaggtggaggaggcaggaagatgagagtgaaggtgtagagtgaaggcggttgaccaaggttcgggttttggggcttttnggggcaacttcggnncanattggnttcttggntttccttccncgggtttnaaaantggtccct

SEQ ID NO: 96123 - DNA, 639 bp, Arabidopsis thaliana columbia
  unsure (1)..(639): unsure at all n locations
ctaccgcggacgcgtgggttcacgctcattctctcttcctcatatatttccaaaacaatacctttcttcttctctcttcagaagaaacgagagattcgagtgatgttttatgaactactactagtgtttttttccgtgaagtaaagagaaacggtaactttttctatttgttttcaagaaaagccaaagaaaaaaagaatttttaatatactctgttttttgcaatgattttgttttgtgaaatttttctcggagaagaaagtaatttagaagacggagagtggcaaaacgaaatataaaaaaaaaagttttcaatttcttttaagaaaaaaaaagctttttcccttcttaaaacccttcctctgtttcagaaacagagacataagaagaaaatagatcacaagctaattgcgttctcttctcttcttcttctactgggttttaaaatcaagaaaccatgtctgcgagtgttctaagtgatccaacaatgctaatttcaacaccggagggaatactcgtctcgccggtgccggttactcaaatctccggggatggagccagattccgggacctgtgtgctgttgcggattaaccgagggggtcacaatcgtccatagggtgnnnagggnggtncatggg

SEQ ID NO: 96124 - DNA, 456 bp, Arabidopsis thaliana columbia
ggcactacatcttctctctcttcttcgctcattctctcttcctcatatatttccaaaacaatacctttcttcttctctcttcagaagaaacgagagattcgagtgatgttttatgaactactactagtgtttttttccgtgaagtaaagagaaacgaaacagagacataagaagaaaatagatcacaagctaattgcgttctcttctcttcttcttctactgggttttaaaatcaagaaaccatgtctgcgagtgttctaagtgatccaacaatgctaatttcaacaccggaggtaatacttgtctctccggtatcggttactcaaatctccggagatgagccagattcggtgacgtgtgattgttgcgggttaaccgaggagtgtacccaatcgtacatagagatggtcagagagcgttacatggggaaatggatctgtggactttgttctgaag

SEQ ID NO: 96125 - DNA, 963 bp, Arabidopsis thaliana columbia
  unsure (1)..(963): unsure at all n locations
aatacgactcactttagggaaagctcgtacgcctgcaggtaccggtccggaattcccgggtcgacccacgcgtccgtaaaatcaagaaaccatgtctgcgagtgttctaagtgatccaacaatgctaatttcaacatccggaggtaatactcgtctctccggtatcggttactcaaatctccggagatgagccagattcggtgacgtgtgattgttgcggattaaccgaggagtgtacccaatcgtacatagagatggtcagagagcgttacatggggaaatggatctgtggactttgttctgaagctgtgaagtatgaagtcatgagaacgaaaagattgttaacgacagaggaagctatggccagacacatgaacatgtgtaataagttcaaatcctcaagcccaccaccgaatccgacaggacatttgatctctgccatgagacagatcttgagaaaaagcttagattcaccaagaatgcttagatctatgcctaatagtccatctaaagacgaccaagatcatcatcatgattgtgtttctaatgttttgtctaggtctgatagctgtttcgctagtttgacttgaaaaaagctcatcgttgaaaaaattgttttaaaccgtcggtttagggacccacttggatcaaatccggttttctgatttgaaattttcgtcggtaaatcaaaaattggtttctgtatgtgtttttgccggatttgttgttgtacttttggaaaattttgggctaaaagaataatttggtgctctgtttctgtcttttattctttctccaattgctagctaatattcggaattctgttgctgtgagcttagttaaacaagaacaaaatgaaatgaaaatatgtttatactaaaaaaaaaaaaaaaagnnnnnnnnnnnnnnnnnnnnnnnnnnnnnnnnnnnnnnnnnnnnnnnnnnnnnnnnnnnnnnnnnnna

SEQ ID NO: 96126 - DNA, 526 bp, Arabidopsis thaliana columbia
ctagattcgctcctccactgtcttaaatttcactatcttcttcttcattttccttccttctcacttcaaatccataatcgctctacttctctctctctctctagattcgaaaaaatggcgaaactggtgatgatgatggataaatgggtgtaacctaacatcgctatattgagtggggggaaaaatgtttggtccattctaccaacaaagaggcctgtccaatcacaaagctctactgaattagacacttgtctcagcagaactctgggttcaccgcctagctctatctctgcttcactaccaaatagtgaatacatcgataaagtaaatgcccctggatggagatctatcgttcatcgtcctaggatcattgtcatcaactctgaaatatcacttccacctccacttagttttccattatgcgacgctggcgatgtattgaaaagattaggccttcctccgtcgaaagatttagactctctgctccaagatgcatcaaaaccttcctcataactctaagaacaat

SEQ ID NO: 96127 - DNA, 753 bp, Arabidopsis thaliana columbia
  unsure (1)..(753): unsure at all n locations
caaagttcttccctgaagttctttctgccttaaggcgtttgtgtagggccggtctcaaaaagtgctgcaaccgtcatcacatatccagcaatcaggtgcaaggttatgattcaaccagcagatgactccaaggaaaatgaagcgaagaagccccgacaaagaatcaggaaaccggtccccggggtagtctatgctatatggaaaaaagaagggatcttaggcttctttaaaggcttgcaggctcagatcttaaagacagttctgagctcagcattactactaatgatcaaggagaaaatcactgcaaccacatggattctcattctagcaataagaactctgtttgtcacaaaggctagattgaaaagtccataaaagattaccattccgcaagagtcccaaggccaagtaagagcaaagtcatttgtttggcgatcagaatcgaaagatcaagtattgtagtctttctcatttcaagaactattgattttttttagtaaagatctgattgtactaggtccacataaagcttcttgttgttgccagattgagtttctgggcttagagattattctatggttattatgtagtttatgtttgttttcttcagctgtaataaaattggggatttatactattttcccaaaaaaaaaaaaaaaaaaaaaaaaaaaagnnnnnnnnnnnnnnnnnnnnnnnnnnnnnnnnnnnnnnnnnnnnnnnnnnnnnnnnnnnnnnnnnnnnnnnnnnncattc

SEQ ID NO: 96128 - DNA, 507 bp, Arabidopsis thaliana columbia
  unsure (1)..(507): unsure at all n locations
gtttccgtntcttttctnngtccgcgaatgcatgtattcatgcctgttgaaaatgccaatcatagtattcattcttatgggaatgggaatgaaaaacaagagattctttttctagaaatatggacaaatggaagtttaactcctaaagaagcacttcatcaagcctcccggaatttgattaatttatttattccttttctacatgtagaagaagaaacgttctatttagagaacaatcaacatcaagttactttacccttttttccttttcataatcgattagttaacctaagaaaaaaaaaaaaaacaaaagaactgagcctttcaatatatttttattgggccaattagaattggctcccaggatccgacaattggcctcaaaaaaatcccatcttccatacattattgggcccttttggaataacaggcaagagggccctttccaaattggacattttcccggtgaggtggtaaaaggggttttgggcctttttggnaaaantt

SEQ ID NO: 96129 - DNA, 547 bp, Arabidopsis thaliana columbia
  unsure (1)..(547): unsure at all n locations
caaaaccatcatctggaatggtcccatgggtgtgtttgaattcgataagtttgctgctggaactgaggccgtagcaaagcagcttgcagaactaagcggaaagggagtaaccacaatcattggaggaggtgactctgttgctgccgtcgagaaggttggtttggcagacaagatgagccacatctctaccggaggcggtgctagtttggagcttcttgagggtaagccacttccaggagtcctcgctctcgacgaagcttgaaaatcctcacgttggatttcatcgctattttgtgttgttatatgtataacaagtcgtctggttatcttgtgaccagacgagcaagccattatttatcagcttgagattttcgtctacggctctctttttatgagttttttagtttggagcctttttttaataataagagatgaaactctgattgacgacaaaaaaaggaaagaagtgaaactctgattagcaaaaaannnnnnnnnnnnnnnnnnnnnnnnnnnnnnnnnnnnnnnnnnnnnnnnnnnnnnnnnn

SEQ ID NO: 96130 - DNA, 1547 bp, Arabidopsis thaliana columbia
agctgctacgcctgcaggtaccggtccggaattcccgggtctacccacgcgtgcgcaccaactctttataccagcctctgtaacgttcgatcatcttgtatttcatttcaaccactcattgtttttagtttgttttacgaagaatcaactatggcgacgaagagaagcgttggaactttgaaggaagcggatctgaagggaaagagtgtgttcgtgagggttgatctcaacgttccttttggatgataccctctaacatcaccgatgacaccaggattcgtgccgctgttcccaccatcaagtacttgatgggtaatggatctaggggtgttctctgcagtcacttgggccgcccaaaaggtgttactcctaagtacagcttaaagcctcttgtgcccagattgtctgaacttcttggtgttgaggttgtaatggcaaatgactctattggtgaggaagtccagaagttggttgcaggactacctgaaggtggtgttttgctcttggagaatgtgaggttctacgccgaggaagagaagaatgatcctgaatttgcaaagaagcttgctgctcttgccgatgtttacgttaatgatgccttcggaactgctcacagagctcatgcttccactgagggagttgccaaattcttgaagccttcagttgctggtttcctcatgcagaaggaacttgattaccttgtcggagctgtggcaaaccccaagaagccttttgctgccattgttggaggctcaaaggtttcaacaaagattggtgtcattgagtctctcttgaacacagttgacatcctcctgctcggtggaggtatgatttttactttctacaaggcacaaggactctcagtcggatcttcccttgtggaggaggacaagcttgacttggcaaagtcactcatggagaaagcaaaggccaaaggtgtctctctcttgctcccaaccgatgtggttattgctgacaagtttgctcccgatgctaacagcaagatagtgccagccactgccatccctgatggctggatgggtctagatattggtccagactccatcaagacattcagcgaagctctggacacaaccaaaaccatcatctggaatggtcccatgggtgtgtttgaattcgataagtttgctgctggaactgaggccgtagcaaagcagcttgcagaactaagcggaaagggagtaaccacaatcattggaggaggtgactctgttgctgccgtcgagaaggttggtttggcagacaagatgagccacaatcttctaccggaggcggtgcctagtttggagcttcttgagggtaagccacttcccaggagtcctcgctctcgtcgaagcttgaaaaccctcacggtggatttctcctgcttttttgtggtagccaatgatagcacaagcctgtacggatatctttgtgaaccgacaaaccagcctttatatattacttagatattttcgctgtacggtatttttttatgagtgttaaagatgggagcctttttttaattttaagagatgaaactctgt

SEQ ID NO: 96131 - DNA, 746 bp, Arabidopsis thaliana columbia
  unsure (1)..(746): unsure at all n locations
nnnnnnnnnnnnnnnnnnnnnnnnnnnnnnnnnnnnnnnnnnngcctgcaggtaccggtctcggattcccgggtcgcaactctttataccagcctctgtaacgttcgatcatcttgtatttcatttcaaccactcattgtttttagtttgttttacgaagaatcaactatggcgacgaagagaagcgttggaactttgaaggaagcggatctgaagggaaagagtgtgttcgtgagggttgatctcaacgttcctttggatgataactctaacatcaccgatgacaccaggattcgtgccgctgttcccaccatcaagtacttgatgggtaatggatctagggttgttctctgcagtcacttgggccgcccaaaaggtgttactcctaagtacagcttaaagcctcttgtgcccagattgtctgaacttcttggtgttgaggttgtaatggcaaatgactctattggtgaggaagtccagaagttggttgcaggactacctgaaggtggtgttttgctcttggagaatgtgaggttctacgccgaggaagagaagaatgaccccgaatttgcaaccacgcttgctgctcttgccgacgttcaccatacccgcacgccttctgaacctgctcccagagcttcactgcttccccctgcagggagtttgcccaaaattccttgcaaacccctttaaacccggcgcttggtttttacctcccatgcgccaagaatcggtgaaaacttctg

SEQ ID NO: 96132 - DNA, 521 bp, Arabidopsis thaliana columbia
  unsure (1)..(521): unsure at all n locations
gatttatacacataaatgctctatatatagaacttgtttcagaaactgtaaagttatcgacacgtgcgccagtgatccttcaaagacctgcattgcatttttaacagttccaatgtcgatatctgctagttttccagtcttcgaagcaataattacacagttactcttctcttctgcatacggtacaaagagcttccctttctcttctgaagagaacaacccaatacatggtttgtctcgcgcattagctagttgaatcgcagctgtgtttgttgcgatgactccagcagaatcggtttatcagagcagccaactgtcctggtggtgtgatgatcactatagatgtatcatcaccctcaaaatcctcaacggtttccccttccttcncatgnggaanccaaaggccngnttgaatccccttanacccttaaaanctaggccatttttcaggggaggaaanatcagatccccttggtgnatggggcctagaacggtcanaccaggtcccnaantcccgcnng

SEQ ID NO: 96133 - DNA, 606 bp, Arabidopsis thaliana columbia
  unsure (1)..(606): unsure at all n locations
tngatnctggggagtaccgntgtgtcatccagcccgngtncaattgatgtganctcacccttgcccacactccccntacacagtggtncaagtatgccagtggctaaagctttggttctgtcccggtcagtggtctcagacattttactggtggttcccaagattcaagcttcagggatgtcacctgtgatagggatcttaacaaggcaagatctcagggcttataacattctacaagcatttcctcacttggataaacacaaaagtggaaaagctagatgaataagccaaaatgcaaagagcgttcactattatttggtttgtgtgattcgtgtgtctttccacattcttagttggatatatattctgtccagttttgcttgcattcttccttcaagaccaaaaacaaattataccatttggtagatttgtgttttctacttgtaaatctccttttttttccccacgttttcagtttcaaaagaagaagaataagaaatttgaatacagaacaaaaaaaaaaaaaaagggcggccgctatagaggatccaagcttacgtacgcgtgcatgcgacgtcatagtaattctaatagttcgcctaaatt

SEQ ID NO: 96134 - DNA, 799 bp, Arabidopsis thaliana columbia
  unsure (1)..(799): unsure at all n locations
accggtccggcaattncccggagtcgnacccacgncgtccgggcattncccagtcttggatggagcagatcaaaacactggcacagagctccatggtctgatcctaagagctcaccttgtgaaagttctgaaaaagagatggttcttgaatgagaaaaggagaacagaagagtgggaagttagggaaaagttcacaccggttgaattagctgagagagaagataacttcgatgatgttgcaatcacaagctcagagatgcaattgtatgttgatcttcatcctttgaccaacactacaccttacacagtggtgcaaagtatgtcagtggctaaagctttggttctgttccggtcagtgggtctcagacatttactggtggttcccaagattcaagcttcagggatgtcacctgtgatagggatcttaacaaggcaagatctcagggcttataacattctacaagcatttcctcacttggataaacacaaaagtggaaaagctagatgaataagccaaaatgcaaagagcgttcactattatttggtttgtgtgattcgtgtgtctttccacattcttaggttgatatatatccggtccagttttgcttgcattcttccttcaaggccaaaaacaaattataccatttggtagatttgtgttttctacttgtaaatctccttttttttccccacggttttcagttccaagcggccgcgagttttggcagcccgggggatccactagttctagaacggccgccaccgcggtggagctccagctaatgttaacctggagtgg

SEQ ID NO: 96135 - DNA, 2936 bp, Arabidopsis thaliana columbia
  unsure (1)..(2936): unsure at all n locations
actagtaaatgttatgtttgtatcaccatacatataatggtgtatattgatgcatgcatgtatcatatgtagagagagatctataaagcttcataaaagtgtttctctagaaaaaacgacaaaattcgcagagaaaatccaaaccaaaagtagttttgtaacagagagatagatagaaagctcttgaagatctaaccaaaatctacttttgttcttcttcttcttcttttcataaattttcggagtggtcctatttattgtttcttggatcattagagagacagctatcgatggatgaagatggaaacttgcagattagtaatagtaattacaatggagaagaagaaggagaagatccagagaacaacactttgaatcaaccactgcttaagagacatagaactctttcttcaactcctcttgctttggtcggtgccaaggtttcacacatcgagagtttagattatgaaataaacgagaatgatctgttcaagcatgactggagaagcagatcaaaagcacaagtgtttcaatacatattcttaaaatggacattagcttgtcttgttggtctcttcactggtcttatcgctactctcatcaaccttgctgtcgaaaacatcgccggttacaaacttctcgccgtcggctactacattgctcaagataggttttggacaggtctgatggtctttacgggggcgaatttgggtctgactttggtggcgacagtacttgttgtttactttgctcctacggcggctggtccggggatccctgagattaaagcttaccttaatggcattgacactcccaatatgtttggttttaccaccatgatggttaagattgttggaagtattggagcggttgcagctggacttgatcttggtaaagaagggccattggttcatattggaagttgcatagcttctttgcttggtcaaggtggtccagataatcacagaatcaaatggagatggcttcgttacttcaacaacgatagagatcgaagagatcttattacatgtggatctgcctctggagtatgtgctgctttcaggtcaccagtaggaggagtacttttcgctcttgaggaagtcgctacgtggtggagaagcgctctcttgtggagaacattcttcagtacagccgttgtggtggttgtattaagagcgttcattgagatttgtaactccgggaaatgcggacttttcggctcaggaggactcattatgttcgatgtgagtcatgtagaggttaggtaccacgcagcagatataatcccagtcacattgattggagtctttggtggcattcttggaagcttgtacaatcatcttctgcataaagttctccggctttacaatctcatcaaccagaagggaaagattcataaggtgcttctaagtcttggggtatctctattcacatcagtttgcttgttcggtcttcctttcttagcggaatgcaagccttgtgatccttctatagacgagatatgtccaacaaacggaagatcaggaaatttcaagcaattcaactgtccaaatggttattacaacgatctatccactctgcttctcacaaccaatgatgatgcagtcagaaacattttctcttcaaacactcctaatgagtttggcatggtttctctctggatattctttggcctctactgcattttgggtcttataacattcggtatagcgacaccgtcgggtctcttcctaccgattatcctcatgggttctgcatacggtaggatgctaggcacagcaatggggtcttacacaaacatagatcaagggctttacgcggttcttggtgcagcttcactcatggctggttcaatgagaatgactgtttcactctgtgttatatttctggaactcaccaacaaccttcttttgttgcccattacaatgtttgtgcttctgatagctaaaacagtaggtgacagcttcaatctaagtatctacgagatcattctccatcttaagggcttacctttcttggaagcaaatccagagccgtggatgaggaatctcactgtaggtgagcttaacgacgctaagcctccggttgtaacacttaacggagtagaaaaagtggcaaatatagtcgatgtactaaggaacacaacgcataacgcattcccagtcttggatggagcagatcaaaacactggcacagagctccatggtctgatcctaagagctcaccttgtgaaagttctgaaaaagagatggttcttgaatgagaaaaggagaacagaagagtgggaagttagggaaaagttcacaccggttgaattagctgagagagaagataacttcgatgatgttgcaatcacaagctcagagatgcaattgtatgttgatcttcatcctttgaccaacactacaccttacacagtggtgcaaagtatgtcagtggctaaagctttggttctgttccggtcagtgggtctcagacatttactggtggttcccaagattcaagcttcagggatgtcacctgtgatagggatcttaacaaggcaagatctcagggcttataacattctacaagcatttcctcacttggataaacacaaaagtggaaaagctagatgaataagccaaaatgcaaagagcgttcactattatttggtttgtgtgattcgtgtgtctttccacattcttagttgatatatattctgtccagttttgcttgcattcttccttcaagaccaaaaacaaattataccatttggtagatttgtgttttctacttgtaaatctccttttttttccccacgttttcagtttcaaaagaagaagaataagaaatttgaatacagaaccaaactttgaagcttccatggagttcacaaatcttttaaggaattgtgttaaataaacatctttctatgnnnnnnnnnnnnnnnnnnn

SEQ ID NO: 96136 - DNA, 507 bp, Arabidopsis thaliana columbia
aatcaccttaccctatttaatattcatatcgcaacttctctcccccgttcgacccacgcgtccgcgaagcaggaacgagtgaaactgaaaaccatggagatggagaaaaaccaacacatttcttcgctggacatccccgttattgatctaagtaatcccgatgaagagcttgtggcaagtgcggtggtcaaagcgagccaagagtggggaatatttcaggtggttaaccacggaatcccgaccgagctgatactgcggttgctacaagtgggaatggagtttttcgagctaccggagacagagaaggaagccgtagcgaagccagaagactccttggacatagaaggatacagaaccaagtaccagaaagatctagaaggtagaaacgcatgggtggatcatctctttcaccgcatctggccaccgtctagagtcaatcacaaattctggcctaagaatcctccagaatccattgaagtgaatgaagagtacgcaagtcacataaag

SEQ ID NO: 96137 - DNA, 424 bp, Arabidopsis thaliana columbia
ctttcgatgccagaaagttccccattttctccaaccagctattcactactagtggccagaagtatgacacaaccaagatcttgacaccgcagtttgatctggatattggtcttataacaactacgggaaactttacctcagccctcttttcgcactctctatcggatccgggtttgcgagattcactgcaacactaactcatgtggcattgttcaacggcagggacatatggaagcagacttggtctgcagtgaacaccacgaagctggactgccatggaaaattgatgcaatgctacaaaaaagtgcctgagtggtggttttatatattgctgccaggaagtgtagccatgtctttcctaatgtcattggtgtgggtggcgttagggctgcgtatcatttgacatgcaatgtatttttgtttt

SEQ ID NO: 96138 - DNA, 541 bp, Arabidopsis thaliana columbia
aatgtattaggaacactatagaagagctatgacgtcgcacgcacgcgtacgtaagctcggaattcggctcgagcgacaccgcagattgatctggatattggcgcttataacaactacgggaaactttacctcagccctcttttcgcactctctatcggatccgggtttgcgagattcactgcaacactaactcatgtggcattgttcaacggcagggacatatggaagcagacttggtctgcagggaacaccacgaagctggacatccatggaaaattgatgcaaagctacaaaaaagtgcctgagtggtggttttatatattgctggcaggaagtgtagccatgtctctcctaatgtcttttgtgtggaaggagtcagtgcagcttccatggtggggaatgctctttgcttttgcattggccttcattgtcacactccctatcggtgtcattcaagcaactacaaatcagcaaccaggatatgatataatagggcagctcattatcggatatatcctgcctggaaaacccattgcaaacc

SEQ ID NO: 96139 - DNA, 476 bp, Arabidopsis thaliana columbia
cggacgcgtgggcttcctctcttctcctctcctcttattaatctaatcctcctccccgaatatttctctgcctttagttctttcttttttggtaatatatttatttttcgttacgatttggtcaaaaccctagatttgttttccaaaagcatatctgaaaatgaaggacaactttcctcttctccttcggttataaatattctctccggttttgcttgtttaacctaaaagcctcagatctaactccaacaccttcaaagtctgcctcctttccaatcttctttcttctgttcgatctctaatctcagaatttgtgtcggtaaggtaaaggtgataatgagtgatgactgatgagggagttttgggacaaattttaagagtaacgcatagaaactgacagtagagagtgagcacacaaaggcactttgtatgttcgatgcatttgcttctcttgcgtgctaactgctctatctgtc

SEQ ID NO: 96140 - DNA, 368 bp, Arabidopsis thaliana columbia
  unsure (1)..(368): unsure at all n locations
gnaaaaatcataaagaaaaaaaagtaaagagatgaagacagcagagctcatattcgttcctctgccggagaccggccatctcttgtcaacgatcgagtttggaaagcgtctactcaatctagaccgtcggaggtctatgattacaatcctctccatgaatcttccttacgctcctcacgccgacgcttctcttgcttcgctaacagcctccgagcctggtatccgaatcatcagtctcccggagatccacgatccacctccgatcaagcttcttgacacttcctccgagacttacatcctcgatttcatccataaaaacataccttgtctcagaaaaacatccaggatttagtctcatcatcatcatc

SEQ ID NO: 96141 - DNA, 528 bp, Arabidopsis thaliana columbia
ctttgtcaatggtaaatgagctgaggcagatagtttctatccaaggagacccttctcagagaatcgcagcttacatggtggaaggtctagctgcaagaatggccgcttcaggaaaattcatctacagagcattgaaatgcaaagagcctccttcggatgagaggcttgcagctatgagatcctgtttgaagtctgcccttgtttcaagttcgggtttttagcagctaatggtgcgatacttgaagcaatcaaaggtgaagaagaagttcacataatcgatttcgatataaaccaagggaaccaatacatgacactgatacgaagcattgctgagttcgcctgggtaaacgacctcgcctgaggttaaacaggaattgatgaccctgaatccagtcccaaccgctccattggagggctaagaaatattggtctaagacttgagcaactcgcagaggataatggagtattcttcaaattcaaagcaatgccttcaaagacttagaattgtctctccatcaacacttcggt

SEQ ID NO: 96142 - DNA, 458 bp, Arabidopsis thaliana columbia
ccacgcgtccgttactctaattaaaatggctgttcccacgggaagcgccaatctctttctccggcctctcatcctcgccgttctctcctttcttcttctctcttcattcgtctcctctgttgagtggctcgatatcgattcctcagatctcaaagctcttcaggtcatcgaaacagagctcggagtcaacagtcaacgttcttcggccagtgatgtcaacccttgcggtcgccgaggagttttctgcgagagacggcactctgccaccaccggagaatacgttctccgtgtcacgaggctcgtctaccgatccaggagcttgacggggactatctctccggtcatcggaatgttgtcggagctcaaggaacttactttgtctaataaccagttggtcaacgctgttccggtggatatcttaagctgtaagcaacttggaagtcttgatctttcggaaa

SEQ ID NO: 96143 - DNA, 820 bp, Arabidopsis thaliana columbia
  unsure (1)..(820): unsure at all n locations
nnnnnnnnnnnnnnnnnnnnnnnnnnnnnnnnnnnnnnnnnnnnnnnnnnnnnnnnnnnnnnnnnnnnnnnnnngtgggtcgacccacgcgtccgtacggcggcgtgatgacgacagaagggggaggtcaaggatgaggaaacagaagcaacttggtgatttgatcaacgaagtcactcttctcaagaatgataacgctaaaatcactgagcaggttgatgaagcttcaaagaaatacattgaaatggagtctaagaacaatgtcttgagggcacaggcttcggagttggcggataggttgagatcattgaactctgtgcttgagatggttgaagaaattagtggtcaggctttggatattcctgagattcctgaatctatgcagaacccttggcagatgccttgtccaatgcaaccaatcagagcttctgctgatatgtttgattgctgaagatggatgattcatatctgaaggatcaaaaatgaagcattgagttcgagtctttggtctgttttacttactgtccttgttgtaacaattagtgtgtcattggtgaattgagtcttgtgttgtcaatggacaacgcaatctttatgcaatttcaatttgttcgtgtctttgtatggttttgtagcctcagtcctctagtcttgtgtctcatgtaattggtgtctaatgtgtttcttattgaattcaagctttcttatttnnnnnnnnnnnnnnnnnnnnnnnnnnnnnnnnnnnnnnnnnnnnnnnnnnnnnnnnnnnnnnnnnnnnnnnnnnnnnnnnnnnnnnnnnnnnnnnnnnnnnnnnnnnnnn

SEQ ID NO: 96144 - DNA, 1272 bp, Arabidopsis thaliana columbia
  unsure (1)..(1272): unsure at all n locations
atacgactcactttagggaaagctgctacgcctgcaggtaccggtccggaattcccgggtcgacccacgcgtccgcgttgatcctatcataagctttttttcgtttatcaatcttctcgattcagccacaattcttgtttctcagataattcatctcctttctttgattcgtttccttctcttctgtcactcagatctagatctagatctaggtttttttctttctcatcggaaatttggcttagaggcttgttttgatctagggtttggtttttgggaattttgaaaaaaaaacaaaattaggaatgaatctatgagctactcaatcctgtttcgtcggattcgaattctacactctttctccgtcgtttacctctactacacctacgttttctcatgaagtaatcgttctcgatctcagttttcgtttttgatctaacttattctttgatagatttagaaatcggggattttcagattgtgtttttgagaggtttttataggaaaatatctctagaagaagaagaataatattatattgattttaattttggtgagaagaagtcaaaaagtcaacgagaaatggggtcgttgcaaatgcaaacaagtcctgaatccgataatgatccgaggtacgccccggtgacggatgagaggaagaggaagagaatgatctctaacagagaatctgctcggaggtcaaggatgaggaaacagaagcaacttggtgatttgatcaacgaagtcactcttctcaagaatgataacgctaaaatcactgagcaggttgatgaagctccaaaggaaatccattgaatgggagtctaaagaacaatgttcttgggggccaccaggctccggagttggccggatgggttgagatcattggaactcctgtgcttgagattggttgaaggaaattaggtggtcaggctttggatattcctgagatccctgaatctatgcagaccccttggcagatgccttgtccaatgcaaccaatcagagcttctgctgatatgtttgattgctgaagatggatgattcatatctgaaggatcaaaaatgaagcattgagttcgagtctttggtctgttttacttactgtccttgttgtaacaattagtgtgtcattggtgaattgagtcttgtgttgtcaatggacaacgcaatctttatgcaaaaaaaaaaaaaaaaaaaaaaagnnnnnnnnnnnnnnnnnnnnnnnnnnnnnnnnnnnnnnnnnnnnnnnnnnnnnnnnnnnnnnnnnng

SEQ ID NO: 96145 - DNA, 354 bp, Arabidopsis thaliana columbia
gatcttatcatttcctcgaatagataaacaaaagtcgacaccgagagatccttaccgtctcacgtttctccgcttctcttgtttgtcacttttcgttaaaccccaattcacggcagaatcttgataattggagaaaacgaaagcgtttatggtgttgtgggagaacaattcatagttgtgaagttagttggattcaaggtgaagaaatctaagtatgtcgagcagaactatggatgttctagaaggtctggttaaagatagttcacttaaatggttgcttgggaagcaaagttcttttgatgaagaaatcgaagagattgagaattctccatctgctggtgccaattggatacc

SEQ ID NO: 96146 - DNA, 986 bp, Arabidopsis thaliana columbia
agctctggtatctaacaatcatgaggcgtactcaagttgtctacctaaatgtgtcaaaatattagaacgccttgctaggaaccaggatgttcctcaggagtacacatactatggcatcccatctccttggctccaggttaaggcaatgagggctcttcaatattttccaaccattgaagatcccagtaccagaaaagctctctttgaggtccttcagcgaatattgatgggcacagatgttgtgaaaaatgtgaataaaaacaatgcgtctcatgccgtgctgtttgaagctctctccctggtcatgcatcttgatgctgagaaggaaatgatgtcacagtgtgttgctcttcttggcaagtttatttctgtccgtgagcccaacatcagatatctaggcttggaaaatatgacgcgaatgctgatggtcacagatgttcaagatatcataaagaagcatcagtctcagataatcacctccttgaaagaccctgacatcagtattcgtaggcgcgctcttgatttgttatatgggatgtgcgatgtgtcaaatgcaaaggatatagttgaagagttgttgcagtatcttagcacagcagaattttctatgcgggaggaattatcacttaaagctgctattcttgctgagaagtttgctcctgatctttcatggtatgtagatgtgatccttcagttgatcgacaaggctggggattttgttagcgatgacatttggtttcgtgtggttcagtttgtaacaaataatgaagacctgcagccttatgcggcatcaaaagcaagagaatatatggacaaaattgcaatccatgagaccatggtgaaggtcagtgcttatattttgggggagtatggtcaccttttagctagacaacctggatgcagtgcaagtgaactctttagcatcttacatgagaagctccctacagtatctactacgaacattcctattcttctttctacatatg

SEQ ID NO: 96147 - DNA, 603 bp, Arabidopsis thaliana columbia
  unsure (1)..(603): unsure at all n locations
gcaccggntccaccagctcgggatccgnagnnccgggttcccaggatgcccaattnttcncggtaancncntccagggntccnaatgncccttgggttggaacattttccncattgtcacacggccggttcctggcgaagcctttgggaacaaccggcgaatttttccggcgaagagatgaatggaggaagcatccgatgctttcgaatcaaatgagacacgctcttcccggacttggaatcggcgtcgccgccttctgcgtttatctcgtcggtgagcagatctacaacaaagctttggctccttccaaatcatctcaccaccaccaggaacagactgctccgtctcactgaagagcatctttcttcttcgatgagatgcttgaaacagtggcacaaggctgaactcagggtctcttcttggttactagttttcgttggattgtcttaataatcatgtttaaatcgaatacaaagaatttgatatctatatttgaactgtaaagcttgttggctcaaaggttctctttgtatcgcacaagttaagattctgcatattcttatcttatttgatacttgctacttagctaaatgcgtcgttaaa

SEQ ID NO: 96148 - DNA, 358 bp, Arabidopsis thaliana columbia
gtcttacacaacaatccttcttacatttctaccaacaaaacacaaaacacaaacatagcattcaaaactttgaaaactggcaccagctcctagtccaatcaattctcaacacgtggcggtgatcggagccggagcagccggtttagtagcagccagagagcttcgtcgtgaaggtcacaccgtcgttgtccttgaccgagagaaacaagtaggtggtctttgggtttacacacctgaaaccgtgtccgacgagcttggtcttgacccgacccgacccatagttcactcgagcgtttacaagtcttttcgaaccaatctccctagagaatgtttgggttacaaggattttcctttcgtg

SEQ ID NO: 96149 - DNA, 458 bp, Arabidopsis thaliana columbia
agagaacccaccattgaaattgggggaagaagagatgagaggctaacacacaaaaaaaaaaaaaccctgctttttcgctggctgactcgggcccttgtcggcttacttcgccggaaatctgaattatccttttgccggagactacttacccttctctttcttcatcttcgaaacggggttttaaagctcagctcttggtgacgccgtcgtgagagagagagagactgaagtcgaagaagaagaaattgaggttgagagatgtatgtagtgcctccgcctcagcgatctgattctggatccaatggtgatttaagggtttaccaaacttggaaaggcagcaatatattctttcttcagggaaggtttgtatttgggccagatgttagatcactggcgctgaccatttgtctcattgctgtccctgttacaattttctgcatctttgtcgcaaggaagct

SEQ ID NO: 96150 - DNA, 780 bp, Arabidopsis thaliana columbia
  unsure (1)..(780): unsure at all n locations
cagctactcnnnnnnnnnnnnnnnnnnnnnnnnnnnnnnnnnnnnnnnnnnnnnnnnnnnnnnnnnnnnnnnnccacgcgtccgctcgcggctcagcagcagcagcttataacgacggatcttacttccattatcatacagcttatttcaactgcagagtcagaacaataacaactgtggtgctcgagagttcgatttgcctaagccggttcttgttgatgagagggaaggtcatgttgtggaggaacatgagatgaaagatgaagatgatgtggaagaaggagagaaccttcctcccggttcgtatgagatattgcagcttgagaaagaagagattctcgcaccgcatactcacttctgcacgatatgtggcaagggtttcaagagagacgcgaatttgaggatgcatatgagagggcatggagatgagtacaaaacagcagctgctctggcgaaaccgaacaaagaatccgtacccgggtctgagccgatgctgatcaagaggtactcgtgcccattccttggttgcaaacgtaacaaggagcacaaaaagttccagcctttgaaaacgattctatgcgtgaagaatcactataaacgcacccactgcgataaaagcttcacttgcagccggtgccataccaagaaattctctgtcattgcagatcttaaaacccacgagaagcactgcgggaaaaacaagtggctttgttcctgtggtacaacattttcaaggaaagacaagttgtttggtcacatagctctgttccagggacacac

SEQ ID NO: 96151 - DNA, 505 bp, Arabidopsis thaliana columbia
cggacgcgtgggtccaaagagaagcttcaataattggcttgcaaaacgattttgcgttccgttttcgtatcggaatcacgacggacttccggcgcacgtagatgcttctttctccctccttctccagcatcagttccagtccatggtttgttcccggcgccaaagagtctatgtttcaatggttttgcatctgttcccgagcgggctactcggcttaattgcagccataacgatcaatccgatcaaggtccgcctcaagaagctgttctcaaggcaatctcagaagtgtcaaagactgatgggagggttgggaaaactactaacatgattattggaggcactgtggctgatgattctgctaaagattggctcgaacttgaccaaaagggcaatacatacccaacagaaagagggtttactgcaattgggactggtggcaatgactttgtgcatgctaatgttggtgctggtgaatctggtattgaccgacaaattccagaggact

SEQ ID NO: 96152 - DNA, 744 bp, Arabidopsis thaliana columbia
  unsure (1)..(744): unsure at all n locations
cggacgcgtggggttcacgcttgtctcagcttgttctctactgctacaaccttgataagaccattggagaaatgagatggagttgactcatgcacatgaggatgccgatgtgaagcttagatctctcgacaaacatcttcaagaggtgcataggtctgtccagattcttagagacaaacaagagctagcagatactcagaaagagctagcgaagctacaacttgtgcagaaagagtcatcttcgtcgtctcactctcaacatggtgaggaccgtgtcgccactcctgttccagagcctaagaagagcgagaacacctctgatgcacacagccagcagcttgcacttgctttgcctcaccaaatagccccacagccacaggtgcagccgcagccacagcctcaacaacatcagtattacatgcctcctcctcctacacagcttcaaaacacacctgcaccggtgcccgtttctactccaccatcacaacttcaagcaccaccagcgcagagtcagttcatcgcccccacctcctgcttccatctcacccaagctcagcccaaactcagtcattcccgcagtaccagcaaaactggccaccccaaccacaagcaaggccgcagtnaagtgggggttcaacatattgcctgtncacagggaacaaccgcagtgatngttgaagagggtgaggtgattncatanttggccnctaaaggtttgaagttgggtgngtgcanccaggtttc

SEQ ID NO: 96153 - DNA, 397 bp, Arabidopsis thaliana columbia
ctctctctctctgtgttttttttaactccgtttaaattttccgtctgaattttacaaaggaacactaatgtcagcttttgacggcgttgaaaatcaaatgaacggtccagattcatctcctcgtctctctcaagatcctcgtgagcctcgctcattattatcatcttcttgtttcccaatcaccctcaagttcgttgatgtgtgttaccgagtcaagatccatggcatgagtaacgattcttgtaatatcaagaaactattaggattaaaacaaaaaccgtccgatgagacaagatcgacggaggagaggacgatactaagcggagtcaccggaatgatatcacccggcgagtttatggccgttcttggaccatcgggaagtggcaaatctacgcta

SEQ ID NO: 96154 - DNA, 529 bp, Arabidopsis thaliana columbia
aaaatttcagcgtttccgaactttccattagagtcgcgagacgatagatgagactcgttccagaaatttaatcgttgcttctcttccccgcgcgtccgcgtccaacatcactgtttccaggatcttcagaatcagcgaaggaagaagataagaggacgacgaagtaattgaagttggagaatcgcacatttggctctcgatatttgctcaatgacttcttattcgaggtagccttcaatttaggatcggagttcgtaaataaggtgatttagcgaagatgatggtcgaagatcttggtgtggaagcgaaggaagcggctgtgcgagaagtggcgaagctcttacccttacctgaacttttgcagtctatttcttcaatcaaggccgattacatcgctcgtcaacaggcaaatgatgcacagctcagtactatggttgctgagcaggttgaacaagctcaagctgggttagagtcactttcatcatctgagaaaaccatttatgaactgcgggataatttcatttctatg

SEQ ID NO: 96155 - DNA, 577 bp, Arabidopsis thaliana columbia
  unsure (1)..(577): unsure at all n locations
acgcgtccgggggaatcggattaatgctgcaaagctagacttctcatgagtatatctgggctgatgaaattgaagcagaactgaatgaggctgctgtgatatctatgggaactgaagtcagtgaccttgatttattgcacatccgagaactctgtgaccaggttctttctcttgccgagtacagagctcagctttatgactacttgaagagcagaatgaacacaattgcaccaaatctaactgcccttgtcggggagctagtcggtgctcgcttaatatctcacggtggtagtttgttgaacctcgcaaagcaacctggaagcacggttcagattcttggagctgaaaaagccttattttagagcccttaagaccaaacacgctactccaaagtatggtttaattttccatgcatctgttggtggccaagcttgcaccgaaggaccaaggggtaaaatttcacggtcaactagctgcagaaatctgttcttgctatccgcttgtgatgctcttggtgctccaagacaacacttatgggggtttaaccngtttaagnttgangncggttggnccngta

SEQ ID NO: 96156 - DNA, 2618 bp, Arabidopsis thaliana columbia
  unsure (1)..(2618): unsure at all n locations
ctctgtaagaaccttaaaaaggttctgttgcagaggttccgaccaaaagccagagtttcatctttatgtgaacaaagacagagagatggtggaagaagatttaaaccagattggtggtaatagtaattacaatggagaaggaggcgacccagagagcaacacacttaaccaacctctagttaaggctaatcgaacactttcttcaactccacttgctttggttggtgccaaagtttcccatatcgaaagcttggactatgaaataaacgagaacgatctgtttaagcatgattggagaaaaagatcaaaggcacaagtacttcaatacgtgttcttgaaatggacgttagcttgtcttgttggtcttttcactggtttaatcgctactctcatcaacttagctgttgaaaacatcgccggctataagcttttagccgttggtcacttcctcactcaagaaagatatgttacaggtctgatggtgcttgttggggcgaatttgggactgacgttggtggcgtctgtgctttgtgtgtgctttgctcctacggcggctggacctggaatccctgagatcaaagcttatcttaatggtgtagatactcccaacatgtttggtgctactactatgatcgttaagattgttggaagcattggagcggttgcagctggacttgatctaggtaaagagggtcctctagttcacattggaagctgcatagcttctttgcttggacaaggtggaacagacaaccaccgtatcaagtggcggtggcttcgttacttcaacaacgatagagaccgcagggatctgattacatgtggctcagctgcaggagtgtgtgcagccttcaggtcacctgttggaggtgtacttttcgccctcgaggaagttgctacttggtggagaagtgccttattgtggcggactttcttcagcacagcggttgttgtggttgttctaagagagttcatagagatctgcaattcagggaagtgtgggttgtttggaaaaggagggctaatcatgtttgatgtgagtcatgtaacttatacttaccatgtaactgatataatccctgtcatgttgattggtgtaatcggtggaattcttgggagcctgtacaatcatcttctgcataaagttctcaggctttacaatctcatcaatgagaagggtaagatccataaggtgcttctcagtcttacagtatcactctttacatctgtttgcctttatggccttcctttcttagcgaaatgcaagccttgtgacccctcgatagatgagatatgcccgacgaatggaagatcgggtaacttcaaacagttccattgccctaaaggttactacaatgatctagctactctgcttctcaccaccaacgatgatgctgtcagaaaccttttctcttccaacactcccaatgagtttggtatgggttccctttggatattctttgtgctatactgcatcttggggcttttcacatttggtattgcaacaccgtctggtctcttcctccccatcatcctcatgggtgctgcatatggccgaatgcttggcgctgcaatgggatcatacacaagtattgaccaagggctttatgctgtccttggtgcagctgcactcatggctggatcgatgagaatgactgtgtcactctgtgttatattccttgaactcaccaacaaccttcttttgcttcctataacgatgatcgtgcttctgatagccaaaactgtgggagacagctttaacccgagtatatatgacatcatcttgcatctaaagggcttacctttcttagaagcaaatccagagccgtggatgaggaacctcaccgttggtgagcttggtgatgctaagcccccggttgtaaccctgcaaggtgttgaaaaggtttcaaatatagttgatgtgctaaagaacacgacgcataatgcattccctgttttagatgaagcagaagtacctcaagtgggtctagcaactggggctacagaactccacgggttgatcttgagagcgcacctcgttaaagttctgaaaaagagatggttcttgacagagaaaagaagaacagaggagtgggaggtcagagaaaagtttccatgggatgaattggctgaaagagaagacaactttgacgacgtggccatcacaagcgctgaaatggaaatgtatgtcgatcttcatcctctcaccaacacaacaccttacacagtcatggagaacatgtcagtggccaaggctttagtacttttccggcaagtgggactccggcatttgcttattgttcccaagattcaagcctcaggaatgtgtcctgtggtagggatcttaaccagacaggacctaagggcatacaacattctacaagcctttcctctcttggaaaaatccaaaggtggaaagacacattgaaagagctacttgcttgttgtaagaaatcgcttgcagccttgtgtttttcttctcattcttaaagatgtatctgtccagttttgcactttttcttcatatccaacagaagttgataagataaatattgcaatgacacaaaaagagagactcatatctccttatcaacaggaacagagcaaaactgtttncc

SEQ ID NO: 96157 - DNA, 437 bp, Arabidopsis thaliana columbia
gacatacatctgatctcaagtgatttcaagtggttggttctgttccttttctcgtccccgatcaagtttcttctcctaaactccagaatttggtcttgaagatctctaaaggctcttcctttttgttcatttctctacccagatatcgatgggtacatacctaagttctccgaaaactgaaaagttatcagaagatggtgagaatgataagctcagatttggtttatcgtctatgcaaggttggcgcgctaccatggaagacgcgcatgctgcaattcttgatcttgatgataagacatcgttcttcggtgtgtatgatggccatggaggtaaagtcgttgcaaagttctgtgccaagtatctacaccagcaggttatcagtaatgaagcgtataaaactggagacgtcgaaacatctcttcgaagagcattcttta

SEQ ID NO: 96158 - DNA, 1353 bp, Arabidopsis thaliana columbia
cagctctactacgactcactatttggaaagctggtccgcctgcaggtaccggtccggaattcccgggtcgtcccacgcgtggcgccacgcgtccgcccacgcgtccgcccacgcgtccggattgatgtgtttgatcccaagttcaacattgtctctcctggtgctgatatgagcatctacttcccttacacagaggagaagcgtagattgactaagttccactctgagatcgaggagctcctctacagcgatgttgagaacaaagagcacttatgtgtgctcaaggacaagaagaagccgattctcttcacaatggctaggcttgatcgtgtcaagaacttgtcaggtcttgttgagtggtacgggaagaacacccgcttgcgtgagctagctaacttggttgttgttggaggagacaggaggaaagagtcaaaggacaatgaagagaaagcagagatgaagaaaatgtatgatctcattgaggaatacaagctaaacggtcagttcaggtggatctcctctcagatggaccgggtaaggaacggtgagctgtaccggtacatctgtgacaccaagggtgcttttgtccaacctgcattatatgaagcctttgggttaactgttgtggaggctatgacttgtggtttaccgactttcgccacttgcaaaggtggtccagctgagatcattgtgcacggtaaatcgggtttccacattgacccttaccatggtgatcaggctgctgatactcttgctgatttcttcaccaagtgtaaggaggatccatctcactgggatgagatctcaaaaggagggcttcagaggattgaggagaaatacacttggcaaatctattcacagaggctcttgacattgactggtgtgtatggattctggaagcatgtctcgaaccttgaccgtcttgaggctcgccgttaccttgaaatgttctatgcattgaagtatcgcccattggctcaggctgttcctcttgcacaagatgattgaagagaagagaaaagactcggaaccagtaaagagtttgaagagagtggttccggtgtttgaagaataaaacaagatctccttttgattcttattatcattcggattgggaagcgcattttgtgttcctctgcttctttgttatttcaatcatttgtctttgttttcctttgcctctgtggcattgctttgaattctggctgttgggagattccccttctaattgcagtaaagtgtcttttgcaaaaaaaaacaaaaaaagaaaaaaaaacaaaagggcgaccgctctagaggatccaagcttacgtacgcgtgcgtgcgacgtcatagtcttctatagtgcaccta

SEQ ID NO: 96159 - DNA, 800 bp, Arabidopsis thaliana columbia
agctgctatacgactcacttagggaaagctggtacgcctgcaggtaccggtccggaattcccgggtcgacccacgcgtccgtctctctacaaaaaaaacagtagagagagatatagagagcatcaatggcgtcgtcgtcaagactttgcgattcgtgcaaatcgacggcagcaactctattctgccgcgcagacgccgcgtttctctgcggcgactgcgacggtaagatccacacagctaacaaactcgcatcacgtcacgaacgagtttggctatgtgaagtatgcgaacaagcaccagcacacgtcacgtgcaaagctgacgccgctgcgttatgcgtcacgtgcgaccgtgatatccactcagctaatccactctctcgccgccacgagcgcgtaccaatcactcctttctacgacgctgtaggtccagcaaaatccgcttcctcctccgtcaatttcgtagatgaagatggcggtgacgtcactgcttcgtggcttttagctaaagaaggaatcgaaatcactaatttgttctccgatcttgattatccgaagattgaggtcacgtcggaggagaatagctccggtaacgacggagttgttcctgtgcagaataagttgtttctcaacgaagattacttcaatttcgatctctctgcttccaaaatttctcaacaaggattcaatttcatcaaccaaactgtttcgacgagaacgatagatgtaccgttggtgcctgaaagtggaggagtgaccgccgagatgacgaacacggagacgccagctgtgcagttatca

SEQ ID NO: 96160 - DNA, 1235 bp, Arabidopsis thaliana columbia
  unsure (1)..(1235): unsure at all n locations
gccggctctatacgactcctatagggaaagccggtacgcctgcaggtaccggtccggttaacgtctgtctctttcttcttctttactttttcttcttcttttagatcaaagaaatcgttttgtgcagatttgatcttgcgttaattttctaagcaaaatatggcgggagaagatagccgtgaagctcaacgaggcgacgaatatgaggaatcgagtcctctcttgaaggtgaacgagaatgacggcaagatctgctcgaaaagagatgccaaggcggcgcctcttgtgcctcctcccgcggcggaggaatacggctggacggcggatggattgcctgtgagccatggtagcgtgattggcgagccgatcaggagaaaccagtggaattctggtctttttacctgtcttggtcgcaatgatgaattttgcagcagcgatctcgaagtttgtcttcttggaagtgtggctccttgtgtgttgtatggaactaatgcagagagacttgggtctgctccgggaacattttcaaaaccattgcttgacgtatttgggattgtactttgtttggtaattctttgtttggctggaactgtcttgctccatgggtctcttattctagccgttctgctattcgccgaaagtttaaccttgagggaagctttgaggctatgaacaggtcttgtggttgctgcggtggctgcatagaggacgagatgcaaagggaacacttggagacgacttgtgactttgtgacacatgtcctttgccatacatgtgccctttgccaagaagggcgtgagctccgcaggaaggttcttcacccaggtttcaatgctcagtccaccgttgttgtgatgccacccatagaacaaaccatgggtcgtaagtgaagcttacatagagtcgagtggtctaaagagcacttgtaatattgagtcgactgaagcttacacacgttgtgaaaacaagtgtttctgtggaacttgaatcatgatccttgtcttttgcttactttttgaataaggccttctctggatgtaatttgtcgtgtgtctttcttttgctatcgaaaaacaaacatatgtatatctttattgcttacgcatttcttttgacattgtctaaaaaaatcatttgtttcacaaaaaaaaaaaaaaagnnnnnnnnnnnnnnnnnnnnnnnnnnnnnnnnnnnnnnnnnnnnnnnnnnnnnnnnnnnnnnnnnncgtcctcaat

SEQ ID NO: 96161 - DNA, 556 bp, Arabidopsis thaliana columbia
  unsure (1)..(556): unsure at all n locations
tataggcgattgggtaccggacccccctcgaggtcgacggtatcgataagcttgatatcgaattcgcggccgcgcaagattcctcgtgagctcggaagattgactaatatagagagggatttatctgagcaacaacaatctttccggcgaaattccgatggaagttggagatttgaaagagttatcatctctgcatcttgaaaacaattcatttacagggtttatccctaaggaattgaagaattgtgtcaaactttgttgatctgaatctcgctaagaacttcttgacccggagaaatccctaacagtttatctcagattgcttctttaaactcgttggatttctcagggaataggctaacaggtgaaatcccgggcgagtcttgtgaaggtgaacctgagtttcattgacttgtctggaaatcaactttcaggaagaataccaccggatcctttagcggggggaggatccaccgcggtctcacgtaacgagaagctctgtgttgataaagagaacgctaaaacaaatcagaacttgnggttgagtatttgcagt

SEQ ID NO: 96162 - DNA, 962 bp, Arabidopsis thaliana columbia
  unsure (1)..(962): unsure at all n locations
atgatatgccagctactnnnnnnnnnnnnnnnnnnnnnnnnnnnnnnnnnnnnnnnnnnnnnnnnnnnnnnnnnnnnnnnnccacgcgtccgctggtttcggcgatctaagtcacctcacttctctttcgatttatagaaacaacttctccggtgaatttccggttaacatcggccggttctcgccgctcgacacggttgatatatctgaaaacgagtttactggtccatttccaagattcttatgccaaaacaagaaactacaattcttgctcgccttgcagaacgagttttccggcgagattccgagatcttacggcgagtgcaaatctctattgagactaaggattaacaacaaccgtctaagtggtcaagttgttgaaggattctggtctctaccgcttgctaagatgattgatctcagcgataacgaactcaccggagaggttactcctcagattggactttcaacagaactgagtcagctctttttacagaacaacagattttccggcaagattcctcgtgagctcngaagattgactaatatagagaggttttatctgagcaacaacaatctttccggcgaatttccgatggaagttggagatttgaaagagttatcatctctgcatcttgaaaacaattcattaacaggatttatccctaaggaattgaagaattgtgtcaaacttgttgatctgaatctcgctaagaacttcttgaccggagatatccctaacagtttatctcagattgctgctttaaactcggtggatttctcagggaataggcttacaggggaaatcccggcgagcttgtgaagctgagctgagttcatattgacttgtctggaaatcaactttcaggaagaataccaccggatcttttagcggtgggaggatccaccgcgttcttacgtaacgagatgctctgtgttgataaagagaacgctgaaacaaa

SEQ ID NO: 96163 - DNA, 611 bp, Arabidopsis thaliana columbia
  unsure (1)..(611): unsure at all n locations
cccaaaggtcttcaatggaaagcatggaaccgtcttggatagtggaacaacatatgcttattttcccaaggaagcatttattgccattaaggatgcggtcattaaggaaattccatctctcaaacggatccatggtccagacccaaatnatgatgatgtttgtttctctggcgctggaagggatgtggctgagatacacaatttttttcctgagattgctatggaatttggaaatggtcagaaactgattctttctcccgagaactacttattcaggcacactaaagttagaggcgcatactgccttggaatcttttcctgataggggttcaacaacactcctaggagggaattgttcgttcgcaatactctttgtcacctatgatcgtgaggattgataagctcggggtttctgaagacccaactgttctgatcatttggggggagcctggcggcaccagaatcttctgcacctacttcaccaatatcccaaaataaaagttctaacatttctccaagccctgctacaagcgagtctcctacctctcatcttccaggtgttttccgggttggagttattaccttcgaagtatcaattaatgtgaacaatt

SEQ ID NO: 96164 - DNA, 723 bp, Arabidopsis thaliana columbia
  unsure (1)..(723): unsure at all n locations
ngcgcatcaccagatattggtctctttatacaaatctgcttagcggatacaggagtggcgtatactcagattggctacacattatcggttgcagctgcctttggaggaggcttgcctccgggtataaccggcacaaatgataggtgtacagtccttgtctctaacctgaatgcagatagtattgatgaagataagctattcaatctattttctctttacgggaacattgtaaggattaagcttcttcggaacaaacctgaccatgcccttgtccaaatgggcgatggtttccaagctgaacttgcagtacatttcctcaagggagcaatgctgtttggtaagcggttagaagtaaacttctcaaagcatccaaatataacaccaggcacagactctcatgattatgtaaactctaacctgaaccgcttcaaccgcaatgctgcaaagaattaccgctattgctgctcccctacaaagatgattcacttatcgnctcttcctcaaggcgtgacagaggaggaagtgatgnaccatgtccagnacacggtgcagtagtgacacaaaagtgnttnangtgacggggaaagnaagcnctggncagtttagnccggggggagttcggacgtttggtttaagacgggcttttttgggggtcanttnaggtttctttccagttcagcggtttantncggggccttttttntnnnnttnancctttccaac

SEQ ID NO: 96165 - DNA, 875 bp, Arabidopsis thaliana columbia
ccaaccacctatagggaaggctggtccccctgcaggtcccgtcccggaattccggggtcaacccacccgtccgacagtccttgtctctaacctgaatgcagatagtattgatgaagataagctattcaatctattttctctttacgggaacattgtaaggattaagcttcttcggaacaaacctgaccatgcccttgtccaaatgggcgatggtttccaagctgaacttgcagtacatttcctcaagggagcaatgctgtttggtaagcggttagaagtaaacttctcaaagcatccaaatataacaccaggcacagactctcatgattatgtaaactctaacctgaaccgcttcaaccgcaatgctgcaaagaattaccgctattgctgctcccctacaaagatgattcacttatcgactcttcctcaagacgtgacagaggaggaagtgatgaaccatgtccaagaacacggtgcagtagtgaacacaaaagtgtttgagatgaacgggaaaaagcaagctctggtacagtttgagaacgaggaggaagctgcggaagcattggtatgcaagcacgcgacttctctaggcggatcaattatcagaatctccttctcccagctacagacgatttaaaatcacgaaagacctctctctctctctctctctttctctatctctctttcctctaataacattagggtttggtgaggattaatgaatgtatgttgcttttaacttaaaactctctgctctttgttctgttctctctgttttttctttttaacgtgttggttttaattgtttggcttgatttcatgggcttaacatttaatggtaataaagacataaggaaaaaaaattggtaggggcc

SEQ ID NO: 96166 - DNA, 496 bp, Arabidopsis thaliana columbia
atggtatcacgatattccaagaaagtcgttgagactctgaagctaggactcaaacaagctgtacttgtcgggttgttcttcggaggactaaacgcagctttcacattatctgttattacggttgttagttatggagcatacttaacaatatatggttccatgaccgttggagcattcacttccttcattctttatagcctcacagttggttcatcggtatcttctttatcgagtttgtacacaactgcaatgaaagctgcaggcgctagtagacgagtttttcagatcttggaccgtgtttctagcatgtcaagttcaggggataagtgtccagtcggtaatcctgatggagatgtggaattaaatgatgtctggtttgcttatccttctcgtcctagtcacatgatactcaagggaatatcgttgaggttgacaccaggctcaaaagttgcactagtaggaccaagcggtggaggaaaaacgaccatagctaatt

SEQ ID NO: 96167 - DNA, 497 bp, Arabidopsis thaliana columbia
  unsure (1)..(497): unsure at all n locations
cgagcttctgtttctattgattcaaaaactggtttgcctgaagattctatccagaagattgtgaatcaggttgaatactatttcagtgacttgaacttggctactacagatcatctcatgagattcatttgcaaggatcctgaaggatatgtgcctattcatgttgttgcgtcgttcaagaaaattaaagctgtcattaacaataattctcagcttgccgcagtgctacagaactcagctaagctttttgttagtgaagatggaaagaaagtgagacgcataagtccgattactgagtcggctatagaagagcttcagtctcgcattattgttgctgagaatctccctgaggatccattgctatcaaaacctgatgaagatttttttaactgttgggagggtgaaggacatccgtacctgccagcctcaaaaattgaagaggggtcccccgcggggggtcagcagctaaagggntggncggtttaaggaccaaggcc

SEQ ID NO: 96168 - DNA, 502 bp, Arabidopsis thaliana columbia
  unsure (1)..(502): unsure at all n locations
nnnnnnnnnnnnnnnnnnnnnnnnnnnnnnnnnnnnnnnnnnnnnnnnnnnnnnnnnnnnnnnnnnnnnnnnnnnccacgcgtccgcccacgcgtccgcccacgcgtccgcccaaatctgacgcttctctctctctttctggtatctgcgtttgattcggagaagaaaaaaaaaaaaaaggcaaagagagagcttcaatggagttagcttctttccttggtagagctctgtttgtttccgtatttcttctctccgcatggcaagagttcaatgattttggtgaagatggtggccgatcagctaaatctttgaaaccaaaattcaatgcctttgtaaaccatgtgacaactcacactggccagcaattgccaccagtcgatatgaagattcttgttgctgctgctatagccttgaagggtattgggggactattgtttgctttcgcactccattgtgagcttaatctcttgcttctgcatcaagccgttgccaccccaattct

SEQ ID NO: 96169 - DNA, 2725 bp, Arabidopsis thaliana columbia
caattatatagctttccatttctgtggctttgtaatctgatcggaaatcgaaaacaaacaattttattttcttaaaaaaacaagatcgtggaggagagatggatgatcggcacgaaggagaccatcatgatatagaggttgaaggaggagctttacatggtttcgagaggaagatatctgggattctagacgatggatctgtcggatttcgacagcctcttctcgctaggaatcgaaagaacacaacttctcagatcgctattgtcggagctaatacttgtcccatcgaaagccttgattacgagatcttcgaaaatgattttttcaagcaagactggaggtctaggaagaagattgagatacttcagtatacgtttctcaaatgggcgcttgcttttcttattggtttagctactggacttgttggctttttgaataaccttggtgttgagaatatagctggatttaaactcttgctcatcggtaatctcatgctcaaggaaaaatatttccaggcattttttgcatttgctggttgtaacttaattttggcaactgctgctgcttcactctgtgcttttattgctcctgcggcggcaggatctggcatacctgaggttaaagcatatctcaatggtatagatgcttattcaatattagctccaagcaccctctttgttaagatctttggctctatatttggagttgctgccggatttgtagttggaaaagaagggcctatggttcatactggtgcttgcattgctaatttacttggacaaggtggttccaaaaagtaccggttgacttggaagtggctcagattcttcaaaaacgatagagacagaagagacctgatcacttgcggggctgctgctggtgtagcagctgccttccgtgctccagttggaggagtgcttttcgcccttgaagaagctgcttcatggtggaggaatgcccttctctggaggacattcttcactaccgcagttgtagcagtggtcttacgaagtttgattgagttctgtcgctctgggagatgtggactgtttgggaaaggaggtctcatcatgtttgatgtaaactcgggaccagtgctatatagcactccagatttgctagcaatagtattccttggagttattggtggtgtgcttggaagcctttacaactaccttgtggacaaagtcctccgcacatatagcattataaacgagaaaggtccgagatttaaaattatgcttgtaatggcagtttccattttgagctcgtgttgcgcatttggtctcccatggctttcacagtgtactccatgtcctattggcatagaggagggaaagtgccctagtgtaggtcgatccagcatctataagagtttccagtgtcctccaaaccattacaatgacctttcctccctacttctcaacaccaatgatgatgcaatccgtaatcttttcacatccagatctgaaaatgaattccatatctctacccttgccatcttctttgtcgcagtgtactgccttggcatcataacatacggcatagccataccctctgggcttttcattcctgtcattcttgctggagcctcttatggacgactagtgggtagactgctgggtccagtatctcagcttgatgtaggtctgttttctctgctcggagctgcttccttccttggaggcacaatgagaatgacggtctctctatgtgttatactgctcgaacttacaaataatctcctaatgctgccactggtgatgcttgtactccttatatcaaaaacggttgcagattgtttcaacaggggggtctatgaccagattgtaacaatgaaaggactgccttacatggaagaccatgcagagccgtacatgcgcaatttggttgcaaaggacgtagtttctggagctttgatatccttttcgagagttgaaaaggttggggtaatatggcaggctttaaaaatgacaagacataatggtttccctgtaattgatgagccacctttcacagaagcttctgagctatgtgggattgccttgagatctcatctccttgtgcttctccaagggaagaaattctcgaagcagagaacaacttttggttcacaaattctgagaagttgcaaagcccgtgactttggtaaagcagggttaggtaaggggctcaagattgaagatttggatctaagtgaggaggagatggagatgtatgttgatctccatcccatcactaacacatctccttacactgtgcttgagactctgtctctagctaaggcggctattcttttccggcaacttggtcttcgccacttgtgtgtggtgcctaaaacaccagggagaccgcctattgttggaatactgacaaggcatgatttcatgccggaacatgtcctgggactctaccctcacattgatcccctcaagtgaataaggtaataaagaatggagaaacaagtacgtgagagttctctaaagatctacaatgtaataatatgtgaatatcaaaaaattaaaagcccagatgaccaatgtcacttaggcatttatttcaattattcgttgagattgattatggaaaagcaggggaaggatgattgtgtaatgaggtgatacaagttttttttttttgggttttggttttcacaacatttattcaaaacaataaataaaaactaaacatgtaattatattataagtcgatatcaattttgctc

SEQ ID NO: 96170 - DNA, 436 bp, Arabidopsis thaliana columbia
ccacgcgtccgcaaaaatcctggcgttgatagcgattggttaattgtccgtgaatcaacgtttttctgttacacatatcaatcaatcatcatcctcttcatactctcttcttcttcttcatcgtaatcattagcttcaattccgagttttctcttcgtcgccgttgtgctagagttttgtcagatctcgccgggaaattagcaatggcgttttagtctgtttacctgtgaagcttttgcgtaaacgctggattcttctcaaatctctctcacctgatctcttattagattccgaggatggcgctaaagcgagggctatctggagttaaccggattagaggaagtggtggtggatctcgatctgtgcttgtgcttctcatatttttctgtgtttttgcacctctttgcttctttgttggccgaggagtgtatatcga

SEQ ID NO: 96171 - DNA, 523 bp, Arabidopsis thaliana columbia
  unsure (1)..(523): unsure at all n locations
cnnnnnnnnnnnnnnnnnnnnnnnnnnnnnnnnnnnnnnnnnnnnnnnnnnnnnnnnnnnnnnnnnnnnnnccacgcgtccgcgagaagacgacagaagggagccggagatggattcgccaaactgggaactccgtggttgttgtaaccggaatcaaaatactttcctcatcaccatcggagtcttcaccatagttatccttctgctatggaggacatttctattgactccatttaaactcattacggtgtttttgcacgaagctagtcatgccgttgcttgcaagcttacatgtggagatgtaaggagctttctcacttcaactactagtcttcaaatgaacttaaaagggtagaggggatggaggtgaatgcaaatgaagggggttcgaccacaacacgtggtggcatttattggttgatcttacctgctggctatcttggctcatcattttggggaatggcattgattcttgcatctaccaatctgcttacagcaagaatagctgctgctggtcttggtc

SEQ ID NO: 96172 - DNA, 685 bp, Arabidopsis thaliana columbia
cccacgcgtccgcccacgcgtccgcccacgcgtccgaacagattctcataatcatctcttcttttttcctctttacgaaaagaagaaagatcaaaccttccaagtttacacaaaaagaaaaaagaacgatggctcttgtcaccttcttgtttattgctacccttggagcaatgacgtcacatgtcaatggttacgccggaggaggttgggtcaacgcacacgccacattctacggtggtggtgatgcttccggcacaatgggaggtgcttgtggatacggaaacctatatagccaaggctatggaaccaacacggcggcgctaagcacggctctattcaataatggtctaagttgtggtgcttgcttcgagataagatgtcaaaacgatggaaaatggtgtcttcctggctcaattgtcgtcacagccacaaacttttgccctcctaacaacgccttaccgaacaacgcaggaggttggtgtaaccctcctcagcagcattttgatctctctcagcccgtatttcaacgcatcgctcaatacagagccggcattgtccccgtcgcttaccgaagagtgccgtgcgtgagaagaggaggaataaggtttacgataaacggacactcttacttcaacctagttctgatcactaacgtcggaggagccggagatgttcactcagcgat

SEQ ID NO: 96173 - DNA, 867 bp, Arabidopsis thaliana columbia
  unsure (1)..(867): unsure at all n locations
nnnnnnnnnnnnnnnnnnnnnnnnnnnnnnnnnnnnnnnnnnnnnnnnnnnnnnnnnnnnnnnnnnnnnnnnnnnnnnccacgcgtccgtacggctgcgagaagacgacagaagggggtagtaaggaactcccatcagagaaacccaaaaacccaaaatctctctctctatctctatctcgcccgaggaaaagctccgataatggcgtggatgcgactgatacagagcgcgagatctgttcttacgacagcaccagcgtcttcgactcttaacttccatagattctactccaaatccgccgctccttatcacgtgaaagttggaattcctgagtttttgagtgggattggtggaggagttgagactcatattgctaagcttgaaaccgagttaggcgatcttccgaaattgctcgtgactcgtacgcttagactcaagaagtttggtattccttgcaaacataggaaattgatactgaaatatagccacaaatacaggctaggtctatggaaacctagagctgacgcaataaaggcgtgattggttcctgtactcatcgaatcataagttcctctcatactttgttatgctaatggaatgagttgttctcagaatgatctaggcatagcaatgttgcaaatcacttgaaacattgtacccatttgcattcatgtacttgttttttccatggttataaacattaagcgactgttcacatcctggagcagtaacttttgaagtgttgaatgtatcggtcttgggcaaataaaaaaaaaaaaaaaaaaaacccaaacgttaaannnnnnnnnnnnnnnnnnnnnnnnnnnnnnnnnnnnnnnnnnnnnnnnnnnnnnnnnncggctcaat

SEQ ID NO: 96174 - DNA, 486 bp, Arabidopsis thaliana columbia
  unsure (1)..(486): unsure at all n locations
acgactcacttaggaagctgcacgntgcagtccggccgattccggtcgaccacgcgtcgccgagaaaacgcgcggggaatgcaatttgttcaatctgctacgaagatcttaaacccgtgggttgagaatctgcaatcattctccgcttgtggccatgtctttcacgaactttgtttgcagcatgggtttgagtattgcccgtgttcgaacaggcgaaattgtccgatttgtaagcagaagtgctctctaaaggatccttgtcgactttactttcagtcttctgggaatcaaaccgattcgattgcctcggataaggttgttggaatcgaagaagatccggttttgttgagaggagaagtgaagcggcttgaagggaaggtacagaatcttacttcggctctggaggcgaagaaaaaggagaatgttgaagtctctgataagttgcatcaatgcaatgagcaattgaaggaggataaagtgaaaagg

SEQ ID NO: 96175 - DNA, 584 bp, Arabidopsis thaliana columbia
  unsure (1)..(584): unsure at all n locations
ggaggagtgactcattgattaaagtttagaaataggaatctcaatcactttcattagtttccaatttaacaaatcaaaatcagaagaagaaaaagatgaccagctctgatcctcaatctcacaacgtcttcgtctacggtagcattctagaacccgccgtcgccgccgtgatcctggatcgcacagccgatacagtccccgccgttctccatggctatcacagatataaactcaaaggacttccatatccatgtattgtttcttctgattctggaaaagtcaacggaaaggttataactggagtgtctgatgctgagttaaataatttcgatgtgattgaaggtaatgattatgagagagtaactgttgaagttgtaagaatggataattctgagaaggtgaaagttgaaacttatggtttggggttaataaaggatgaaccctagaattgtatggggaattgggatttccgaggaattggagagtgggtcaccgcggagaaatccgtggggccttttagaaaaatttgtatttgccaggaacccattggaagccttggggggncttnggccctttttnccttt

SEQ ID NO: 96176 - DNA, 298 bp, Arabidopsis thaliana columbia
gcgacgcttgcatcactcccatcagttctgatccattctgcaaatgtgtgcaatgcgagttcttccttcataaagtatgtgctagtcttccacggaggaaacgaaatatcatgcacaccgagaagcttgatctacaagttacgaaggctggcgagtataataagtgtatatcttgtagaaaaatatttgatggcttccggtactgttcaaggtttgaaaagtttgatgtgcggtgcggctccatttccgagccttttcaccatgaactgcatccccatcccttataccacattttgtc

SEQ ID NO: 96177 - DNA, 586 bp, Arabidopsis thaliana columbia
  unsure (1)..(586): unsure at all n locations
gagacgacgacgaggaaggaggaaaccttgctccntgttttcangaagccancgncgccggggcgaattttggggaaactctgcaaccctcaattcacgagcacatgcttcctccagtttacacagtagcctttctcttctacaccaaaagcgatttgagctctcaagaacacactgcccacagactcaagacttctctgtctgaaaccctgaccaagttctaccctcttgccggaagaatcaccggagtaaccgtcgattgtaccgatgaaggagctatctttggcgatgctcgtgtcaataactgtcctcgcactgaatttctccagtgccctgatttcgacgncctccaacagttgcttcctctgaacgtaggggacaacccatacttggctgctgccacgtggncttttgcttgctcgtgaagggaacttactttcccatgcggnggcatggccatagggatctgcattanttaaaaaaatcgggggcgnagcctccattttnggctttaatttggggcctnggnccgccangggtnttgggggggaanaatttccccaangnttggaaancccnctnnttt

SEQ ID NO: 96178 - DNA, 831 bp, Arabidopsis thaliana columbia
  unsure (1)..(831): unsure at all n locations
gtgacgtcctttgcggtaccggtccggaattcccgggtcgacccacgcgtgatgaaggttgaaaccattagtaaagaaatcataaagccatcttcgccaactccaaataatctccaaactctccaactctcaatttacgatcacatccttcctccagtttacacagtagcctttctcttctacaccaaaaatgatttgatctctcaagaacacacttcccacaaactcaagacttctctgtctgaaaccctgaccaagttctaccctcttgccggaagaatcaccggagtaaccgtcgattgtaccgatgaaggagctatctttgtcgatgctcgtgtcaataactgtcctctcactgaatttctcaagtgccctgatttcgacgccctccaacagttgcttcctctagatgttgtagacaacccatacgtggctgctgccacgtggcctttgctgctcgtgaaggcaacttacttcccatgcggaggcatggccataggaatctgcatcactcacaaaatcgcggacgcagcctccatctcgactttcattcggtcctgggccgccacggctcgaggagagaacgatgccgcagcgatggaaagtcctgtatttgctggagcgaatttctacccaccagccaatgaggcttttaagcttcctggccgatgaacaagccggcaagagaagcaagcggttaccaaaagagatttgggttccnaagcttnttaaggnggnaaatctcngggccaaaancccttttnaaaaancagttngccaancccnggggggggnnagngtttcncgggtntttttggaattgtttggngc

SEQ ID NO: 96179 - DNA, 478 bp, Arabidopsis thaliana columbia
ccacgcgtccgaaaaaaatgcaagaggggaagcagaagaagaaagaacaaaaatcaggagttggcattttgaagacgaaactcatcatcatcttcttcctcagacaacaaaaaaagcttttcactttctctccacccttctctctctccttctgaaagtctctctctttgccgtcgttagcctcttcctacacttggggctgcgattcttccaatcctccgatttcaatttcatcctctcaatcatagtttgaaatcatcgagcttttacggtgctgttggtgtttgacgccgtaaaattcgatccttttttatacatttgatgttgattttatcgatagttttgtgagatcgattttttagggtttcgagtttggcgctgacttgagggtttgattggatgagaataaggggttatgggacttgagtcaattgggtttgtctccctaatcatcgcaaattcctgatttctcagctct

SEQ ID NO: 96180 - DNA, 387 bp, Arabidopsis thaliana columbia
  unsure (1)..(387): unsure at all n locations
tnagaagagaacgaaggaagaagaagaagaggaacgatggggtacgtgtttagagtacgattggcttctttcttcgccggagctgcgactgcgtcttttatcggactctccgttctctacaaggattacaaagtcgctcacgaatcgatttctcagcaggcgaagtcttttcatgactctctggatagaaggatctctactcttgaaagcttgagacaaagtgaagctcctcagcttgctgagacaactgaatagtaatctgtctcgacattgaacactctctgcttggcaatgatgttttgagttgagatgctctttttcnggttttatgaataacttggaagtncttgtatgactctnctgttataaaacaatgaagtttaaggt

SEQ ID NO: 96181 - DNA, 850 bp, Arabidopsis thaliana columbia
cgaaggaggatgtctcgttcggcgacttgacctctctctctctctctcttttaccttcattgttcactgtttccagacattgaaagaaagatcattagtttctgaggggataaccatttttttttcttcttaaaaagtttttttttttgtcaattggtcttcttcttcctcatccgctcgcttatatttaatttaataataataaaaatcggtgttcatttttatataaaagtataaattttgtgtttggttgatccatccgtagtcgtagtagatctacaagctctgaaattccacgcccacatctcctccgtcctcttgagatccttctcttcattcattttcttgctcaacttgagttgcttccaacatcttgcaagattgtctttgagttcattcaggtcttgaagaagagcactcttttaagctgtgtgaaacttgcgccgttcctgtgaagaactacttttggcattgcagatttcagagagctgtgatttgtgctatcttaaaaacggacaagttctatgttgtggcggatgagatgagggatgctatctgggttgatgaattttctgaatgcctgtctctggccacggtcagatcagcaggctcgttctgcctcagattctggtggccgccaagagggtttgctctggttcagagactccggccagcacgtctttggtgacttctccatggccgtcgttcaagccaacagcttgctagaggaccagagccagctcgagtctggctctcttagctcccacgactctggtccctttggcacctttgttggcgtctactacggccacggtgggcctgagacatctcgcttcatcaatgatcatat

SEQ ID NO: 96182 - DNA, 2861 bp, Arabidopsis thaliana columbia
aaaaacccacaaaatgaatctaagatagtttgctttacaattcaaaaacccgtctctgtgattcaaaatccctaaatccagagatcgaactctcgatcatgttatcgaatcatctccagaacgggatcgaatccgataacctactctggtctcgtgtccctgaatccgatgatacttccaccgacgatattactctactcaactctcaccgtgacggtgacggaggtgtcaatagtctcgattacgaagtcatcgagaattacgcttatagagaagaacaagctcatcgaggaaagctttatgttggttactacgttgctgtcaaatggttcttctctttactcatcgggatcggaactggattagctgctgtgttcatcaatctctctgttgagaatttcgctggatggaaatttgctcttacttttgctattattcagaagtcgtattttgctgggtttattgtttatcttctcatcaatttagtcttagtgttttcttctgcgtatattattactcaatttgctcctgctgctgctggttctggcattcctgagattaagggttatctcaatggaattgatattcccggcaccttgctctttagaactctcattggaaagatatttggaagcattggttctgttgggggtggcttagccttggggaaagaaggtcctcttgtgcatacaggtgcctgcattgcatcgttgcttggtcagggtggatctacgaaatatcatttgaattctagatggccgcaactttttaagagtgatagagatcggcgtgatcttgtcacttgtggatgtgcagctggagttgctgctgcctttagagccccagttggtggagtgttatttgcattagaggaggtcacatcatggtggagaagtcaacttatgtggcgtgtctttttcacttccgctattgtggctgttgttgtgcgtactgccatgggatggtgcaagagtggaatatgtggacattttggtggaggtggtttcattatatgggatgtatcagatggtcaagatgactactacttcaaagagctactgccaatggctgtaataggagttatcggagggctacttggggcattatttaaccaacttacactctatatgacatcttggcgtcggaactctttgcacaagaaaggaaatcgagtgaagataattgaagcatgcatcatctcttgtataacttcagctatctcatttgggctgccactcctaagaaaatgcagtccatgccctgaatcagttcctgactctggtattgagtgtccacgacctccaggaatgtatggaaattatgtaaatttcttctgcaagacggataacgaatacaatgatctcgctacaattttcttcaatactcaggatgatgctataaggaatttgttcagcgcaaaaacaatgcgagagttcagtgctcagagtctactaacttttctggctatgttttacacattagctgtagtgacctttggcactgctgttcccgccggccagtttgttcctggaataatgataggatcaacttatgggcgccttgtaggcatgtttgtggtcaggttttataagaagctcaacattgaggagggaacttatgctttgctgggagctgcttcatttctcggaggctcgatgcggatgactgtatctttatgtgttatcatggttgaaatcacaaataacctgaaacttctgcctcttataatgttggtacttctcatctcaaaggccgtcggtgatgctttcaatgagggattatatgaagtacaagcacgcctgaagggcattccgttacttgaatcgagacctaagtatcacatgcgtcaaatgatagcaaaggaagcgtgtcaaagtcagaaggtaatctctttacctcgagttatcagggtcgcagatgttgcttcaattttgggcagcaataaacataatggatttcctgtaatcgaccacacgagaagtggtgaaacacttgtcatagggttagtccttcggagtcacttgcttgttctccttcaatcaaaagtcgatttccaacatagtcctttgccttgtgatccaagtgccaggaatatcaggcacagttttagcgagtttgctaaacctgtttcatcgaaagggttatgcatagaagatatacatttaacttcagatgatttagagatgtacatagatcttgctccatttttgaatccgtctccatacgttgttcccgaagacatgtccttgacaaaggtatacaatcttttccggcaacttgggttgcgacatctattcgttgttccccgtccttcccgtgtgataggcttgatcaccagaaaggatttactgattgaggaaaatggggaatcatcagcagtggaactccaacagtcaactagtgtaagaggtcggtacagtgagacagcaacgcggatggacgctgcacgaccgcttctagacgatcttttaggttaataaaacagaccaaacatatacaagcagttgaagctggtagctaagatctttagtcgggccaattcttcgtccatacaaggatacaagcttgttccgcatgttgccacccaaatccggtatggaggatatatgatcgtctcttgagatgggattgtgttgttcgctaaccgatctcattctccgttcacagagagtagaaagattatatatgtagagggcttttgattgttgtaattgtgcaatctttgattattttcttggtcactgtaaaataatccagcttttgatatatttacttgattaacttaaaaaccatattgtaaacaagaaagagaaaaccagaatttatcggtcataccgccatggaaaaataaatcatatttt

SEQ ID NO: 96183 - DNA, 546 bp, Arabidopsis thaliana columbia
  unsure (1)..(546): unsure at all n locations
nnnnnnnnnnnnnnnnnnnnnnnnnnnnnnnnnnnnnnnnnnnnnnnnnnnnnnnnnnnnnnnnnnnncccacgcgtgcgagcaaagcctctctaaataaaaacaaaaagctaactgaataagaagaagtagtgatgcatatcacaaaaccacacgccgccatgttttccagtcccggaatgggccatgtcatcccggtgatcgagcttggaaagcgtctctccgctaacaacggcttccacgtcaccgtcttcgtcctcgaaaccgacgcagcctccgctcaatccaagttcctaaactcaaccggcgtcgacatcgtcaaacttccatcgccggacatttatggtttagtggaccccgacgaccatgtagtgaccaagatcggagtcattatgcgtgcagcagttccagccctccgatccaagatcgctgccatgcatcaaaagccaacggctctgatcgttgacttgtttggcacagatgcgttatgtctcgcaaaggaatttaacatgttgagttaatgtgtttatccctaccaacgcacgt

SEQ ID NO: 96184 - DNA, 756 bp, Arabidopsis thaliana columbia
  unsure (1)..(756): unsure at all n locations
gaagaatgtgaatcatcttctccaagtttaatcgttggttnnnnnccccactgngatcgtgagctttatatattatatacacgagaatcttgtacccaattaacatatacatacatgtaaatgtgtgtatgtatataatataaaattattctccttttcactaatttttcttcaaatactttaatgcccaccacctgttcgatcaaattccccatctcgaaaagctagaactttcttcgtctctattggtctctcactctctctcttacctcttctcatttgttctttctccttctaaattgggttatcaagtatattggatcaacgggtttgattcacgatttgtcatttcatcttcgtggagagagtttgatctgatttgttgatcgtcagcgttatgtctagtccgagaagtaacaagccgaagattgtcaacggccctggtggttatgttctacaagacgttccgcatctctccgattaccttcctggtcttcctacttatcctaatccattgcaagacaatccagcttactcagtggttaagcaatactttgttcatgctgatgacagtgttcctcaaaagatcgttgttcacaaggatggtccaagggggattcattttagacgagccgggccacgtcagaaggtatacttcgaatctgatgaagtgcatgcttgcatagttacctgtggaggtctttgtcctggccttaataccgtgattagagaaatagtgagcagtctatcttatat

SEQ ID NO: 96185 - DNA, 791 bp, Arabidopsis thaliana columbia
  unsure (1)..(791): unsure at all n locations
cttcgattaggttaatcgtatctgggttccaccggactcaacccctaggatcgccggtatattctccgagcgtcttcatctccgtacctaaattcttcaactctgagtcaaaatcgacgggaactggttcaagatccgtagcaatgagcagcgttgagaaaaccgggtcggattctggagcaatagagaatcgagcgagcaggatgagagagaagcttcaaaaagagctcgaaccagtggagttagtgatcgaagatgtttcgtatcagcacgctggtcacgccggaatgaaaggtagaaccgacgatgagacgcatttcaatgtgaagatcgtttctaaaggattcgagggaatgaatttggtgaagagacacaggttggtctatcatttgctccgggaagagttggatactggattgcacgctctttctatcgtctccaagacgccgtctgagtctccttctaaagactagtgtactggtactgtttaatgtatcttctgtttctgttatcagagtttctcatcaaactctggtcgaatccaaaaatgaatttttaccaaccaaagggtttggtttgggaattaatgcggaacccaaagtctccattttaccaacggcttaaggtggggggtgggggtttcggaaatggggggtggaaccaaagcccctggctttaaggtcaaatcgaagttctttcttnnnnnnnnnnnnnnnnnnnnnnnnnnnnnnnnnnnnnnnnnnnnnnnnnnnnnnnnnnnnnnnnnnnnnnnnnnnnnnnnnnnnnnnnnn

SEQ ID NO: 96186 - DNA, 548 bp, Arabidopsis thaliana columbia
cagacaaattcacaccattctttattttcatttttccccctttgcccagattccgacaaaatccactcgtttgattccaccactatatataattgagcggagaagcttgacatgaagagcagagtcattcttaaccatagagacagaagagataagaatcataacaacaacaacaccaatcattacacacaggttgatactatggagagaaagcctcttgaggttgagccatctactacgacgactaacaccgatgtggtcgattctttcgaggaagagcagagaaaaatcgtttatagaggatggaaagtcatgccttttatcattggtaatgagacatttgagaagcttgggatcatagggacattatcaaaccttcttgtgtacctaacttctgtattcaaccttaagagctacacagctgcaactatcatcaatgcctttagtggtacaatcaatttcgggacttttattgctgcctttctttgcgacacttactttggtcgctacaagactctcagtgtcgctgtcatcgcttgttttctggg

SEQ ID NO: 96187 - DNA, 494 bp, Arabidopsis thaliana columbia
  unsure (1)..(494): unsure at all n locations
gaatnnnggggcggacccaggcgtccgccaacccataataataataatttttgggggccggaggaaaggggtgggggaccagagaaaagggcggaccaggccctggggtttttttaactaacctcctttgttaaaccagttggccagattttgggttaaaaaccagttgcgtttgcctaacagaaaaagagttccttggtggttaaagttgttgcaactccacctgtaaggcagggggccaccagaccatgggggttggtttaatcgaaaagttttttttactgggatggcagttaacctggggactttggattcgaccttttgggtttttaagacccagagggtcctgggggattaatggagccaagatggttggcttccggggggatcataaacggccggttcgccatgttgggggcagttgaggcttttgttcttgagattttaggaaaggttggtttgtttccagcaaaaactgcttttctttggttcca

SEQ ID NO: 96188 - DNA, 675 bp, Arabidopsis thaliana columbia
  unsure (1)..(675): unsure at all n locations
cgggncggcccaggccttccgaactaagcaaaaaataagatctttctctctctgacgacgcaatccctaatttctggttctccgttcgtcggcggagaagatgggattcctttccaataaaatctccagagacgatgtgaaaccaggcgatcacatctattcatggcgtcaagcctacatttacgctcatcacggaatctatgtaggtaatggacaagtcaaccattttactcgtggtgatggtcaagagactggaactgggactttcttggacaacatcattgttagttcatctcataatcatggagacaacccatgtcctgattgtggagatcgatccaatcttggcggtgttatatcttcctgccttgaatgtttccttgccggaggtgatctctatgtctttgagtacagtgtttcccctgctatctttcttgccaaacctcgaggcggcgtatgcactatagcatcttcagatcctccagaagaagtcatctatcgagcaaattttctcttgcaaaatggttttggtgtgtacaatgtcttcaagaacaactgtgaagattttgccatctattgcaaaacgggtttgctagtggcaaacaccgacgtgggaaggagtggtcaagctgcttcaattgttgcagctgccagtgttcttctttcttcaccact

SEQ ID NO: 96189 - DNA, 534 bp, Arabidopsis thaliana columbia
agttgctaaacctggtgctatcattgttctttatacgtggcactaagttccatgctgggagggatatttttattggtcgggctcctaccatcttctctttaatcgatggattagtcaagttcgagaagtttggtcctgacaggaagaagataagtgtgtatccaagagaaattgtaccagagaatcccaatagctacagagcaagaaagagagaaaacttcagattgcaaagggagaagaagaaggcgagacgcgagaattactcgtacacacttcctacaccagaacttgttcttgcatctgcctcagtcgatgatgctgaagccaatccggagtgctagaagattgaatgtggagtttccttgtctctttttgtttagtcttgtttatgaaaaatgatcctttcagagtattaagagttggttgtattgtcgaatccaagcctctcttttgtcaaattgagtcccaagcaggcggatttttacccaacttgaggtattagtgtaatcaaatggttattgttaattagtcaaa

SEQ ID NO: 96190 - DNA, 641 bp, Arabidopsis thaliana columbia
  unsure (1)..(641): unsure at all n locations
cgttctccaaggagtcgagtctgtgaaacgttttgttctgatcattaagcagattatgcgcgcggggcattacatatatgaggggcgtgcatnncacnnncattgttcaccgnnacgtgaagcctgccaacttggtggttacaaagaagggccagattaagctcatcgactttggtgccgctgctgatcttcgcattggcaagaattacatcccggaacgcactttactcgatcctgactactgtcctcctgagctctatgtcctcccggaggaaacgccaagccctcctccggagcctatagccgctttgctttccccgattctctggcagttgaacagtccggatctgtttgatatgtattctgctgggatagtgcttctccaaatggcggttccgaccttaagatctactgccggtctgaagaattttaatctggagatcaagtctgttgaatatgatcttaataggtggcgggacaggactcggacgaggccagacttgagcatactagatctggactcgggcagagggtgggacctcgtcactaaactcatatccgagagaggttctctgagacgtggacgcctttcagcagcaaatgctctcagacacccttattttttgttgggcggtgatcaa

SEQ ID NO: 96191 - DNA, 507 bp, Arabidopsis thaliana columbia
  unsure (1)..(507): unsure at all n locations
cnnnnnnnnnnnnnnnnnnnnnnnnnnnnnnnnnnnnnnnnnnnnnnnnnnnnnnnnnnnnnnnnnnnnnnnccacgcgtccgatgatgatgattcagagattttgatttttcaagaaaactctgtttttcctctttttgtttttgcctcttggggcatttggagagcaatggcgacttttgctgaacttgttttatcgacttctcgctgtacatgcccttgccgttcattcactagaaaacccctaattcgtccccctttatctggtctgcgtctccccggtgataccaaaccattgtttcgttccggacttggtcggatttctgttagccggcgtttcctcacggccgttgctcgagctgaatcagaccagcttggtgatgatgaccactcaaagaatggggaagataagcagaagaaagcaagccagcttaagaaaagagtgatctttggtattggcattggtttacctgttggatgtgttgcgttagctggaggatgggtttt

SEQ ID NO: 96192 - DNA, 564 bp, Arabidopsis thaliana columbia
  unsure (1)..(564): unsure at all n locations
aaaaaaaaatcatttcttctctgaaacgaaaaaccaaagaaacgagaagaagaagctatggcggatcagctaactgatgaacagatctctgagtttaaggaagcttttagcctcttcgacaaagatggagatggttgcatcaccacaaaggagctgggaacagtgatgcggtcactagggcagaacccaacagaagctgagctacaagacatgatcaacgaggttgacgctgatggaaacggaaccattgacttccctgagttcttaaacctaatggctaaaaagatgaaggacacagactcggaggaagagctgaaagaagctttcagggtgttcggcaaaggccagaacggtttcatatcccgctgcagagcttcgccatgtgatgacggatctaggtgagaacctgcctgatgaagaggtcgaggggttgtttcgtgaagcagttttttatgggggtggccagataaacctcggggggttttcaaggttattgtgctagtcttgtgtaggaaaattgnggtaaaagtgnntttntgccttnngnttnctttcaaaatgtng

SEQ ID NO: 96193 - DNA, 743 bp, Arabidopsis thaliana columbia
ggacttcctgaaaaaaaaaaaatcatttcttctctgaaacgaaaaaccaaagaaacgagaagaagaagctatggcggatcagctaactgatgaacagatctctgagtttaaggaagcttttagcctcttcgacaaagatggagatggttgcatcaccacaaaggagctgggaacagtgatgcggtcactagggcagaacccaacagaagctgagctacaagacatgatcaacgaggttgacgctgatggaaacggaaccattgacttccctgagttcttaaacctaatggctaaaaagatgaaggacacagactcggaggaagagctgaaagaagctttcagggtgttcgacaaagaccagaacggtttcatatccgctgcagagcttcgccatgtgatgacgaatctaggtgagaaactgactgatgaagaggtcgaggagatgattcgtgaagcagatgttgatggagatggtcagataaactacgaggagtttgtcaagattatgatggctaagtgatgatgataagaaaaaaatgaagaataaaagtggtgatgtgatgaccttttaggcttttactatctacaaaagaatgattcgacctttaatgtcttgggtttgatttgagcctagtagtttcttaaggttttaacagactgaatttgtgacttatctttttttataatcgttggtttctttctcgttggcataatggcatgtttagatttcggtaaaaaaaacc

SEQ ID NO: 96194 - DNA, 623 bp, Arabidopsis thaliana columbia
  unsure (1)..(623): unsure at all n locations
gnttaacccccnttgggaatttccccccaggncggccggatccgggnacccanggccgttaaagatcacttcccacatcggggaggaagaagaagatcgcagccatgttcccaggaatgttcatgcggaacccagacaaagccgaggctctgaacgcagctacgcactcatgtcgctctttttggcagctgggttgtcattatccgtgctgctccctacgtcctctcctatttctccgattccaaagatgagctcaagatcgatttctaaatgactctttcaattttcagcgttgaagcggtgagatagatgcattatgaagcaatggaaggtatcttgtttgtttttgcaaccttcttactcttaagacctgagattacggaaatcatgagacatttaggtatatagtggtgtacttttgggatttgtttttggtttatgttcttctcaccaacgttctccaatttccagcaaattaccttcggctattcactaccgatttgcagatcagattctgcccattattcttttgaatttgccaaattttcttctcagaactagttttgtcttttgtggagcgttttaattaaaacactttttaatgaaacgagtaagttttggac

SEQ ID NO: 96195 - DNA, 607 bp, Arabidopsis thaliana columbia
  unsure (1)..(607): unsure at all n locations
gccggcactaatacgactcacttagggaaagccggtacgcctgcaggtaccggtccggaattcccggttcgacccacgcgtccgtacggctgcgagaagacgacagaagggggagggttagggttttagaatctttaaagaatcacattcacacatcagagaggaagaagaagatcgcagccatgttcccaggaatgttcatgcgaaagccagacaaagccgaggctctgaagcagctacgcactcatgtcgctctttttggcagctgggttgtcattatccgtgctgctccctacgtcctctcctatttctccgattccaaagatgagctcaagatcgatttctaaatgactctttcaattttcagcgttgaagcggtgagatagatgcattatgcagcaatggaagatatcttgtttgtttttgcaaccttcttactcttaagacctgagattacgaaatcatgagacatttagttatatagtggtgtacttttgggatttannaaaaaaaaaagaaaaannnnnnnnnnnnnnnnnnnnnnnnnnnnnnnnnnnnnnnnnnnnnnnnnnnnnnnnnnnnnnnnnnnnnnnnnnnnnnnnnnnnn

SEQ ID NO: 96196 - DNA, 410 bp, Arabidopsis thaliana columbia
atctaacacaaaaaacaatctcagatattaaatgaagtgtttatcaaccggagaactctccgacaaaacctcgccgacgattttccgacgatgaaagatgggctttttcgggagactgttcgggagtaaaaaaaagtctgataaagctgcttcgtcgagagataaacggaggtggagcttcaccaccagatcttcaaattccagcaagagagctccggcggtgacgtcggcttcggtggttgagcaaaatggtttggatgctgacaaacatgcgatagctgtggctgctgcgacagccgcggtggcggaagcagctcttactgctgctcatgcggcagctgaagtcgtgagactaacaagcggaaacggcgggagaaacgtcggtggcggtggaaactcgtcggtgtttc

SEQ ID NO: 96197 - DNA, 438 bp, Arabidopsis thaliana columbia
gggtcggccccaggcgtccgaaattggttcattggggaccagggaaaaataaaaccatgggcacctaaggccgccgggatcttaaattccgccttaccaccggcggaaccctccggggtaaggaaactccattttttttaaacaaccaacggtccaaaatccttttctttaaccaaaaccgaaatccgggccgggaaaccagattcttccgccgccgttgttgaagccccggccacgaaggaggctccggggggattaacgccaccgaagttggaccaaaccacacggtttccgattttggttggaggcaccggggggtttttacgtaaggggcagggggaggagttttacgttattacggggaactaaccgaaggaccagatcttggggatgccgccggggggggcagcgttcatgaaagagggtccgatttttttg

SEQ ID NO: 96198 - DNA, 608 bp, Arabidopsis thaliana columbia
cgtccgtggtttggtaggctctcacgtgtttctttatgattggttgttacacaaaaaaaatcatattaagtggggtttactctaagcatgagaaacagaagcttctgccgcaaaaaattaaaaattacaggatctcatttcccgaccaaactcatcgaactaagaactcactgtaataaaacttttaaaaggtgtaaacaccaatggcagtttattacacaagtaatgtcggttgttaccagcaagaaccaatctttctcaaccatcaacaacaaaaccaacaagcttcttcttcatccgccgccgcttctttcaccgtcaccggcggcgatactgttcgaaacgagatggtttttatcccaccaaccaccacaggagacgttgtaacaggaaacggtaccgtttcaagcagcgatctaagctttcacgatggtcaaggactgtctttgagccttggtactcagatctctgttgctccgtttcactttcatcaataccaattggggtttactagtcagaatccttcaatttcagtcaaggaaacgtcaccgtttcatgtggatgagatgagtgtgaagagcaaaagaatgatcttgtgggtcaatctg

SEQ ID NO: 96199 - DNA, 424 bp, Arabidopsis thaliana columbia
aaaatttggaggatgggaggagggggccattgttcaaggttccataaccggggaaggtggccattcggtaccagacgttaacataaccgccatgggtccttaaacttaatggccagaggatccaaccctttcatcagttatggacctaggggttgccgggttagcagatgggggggatgcctttgcagttgggggggcctccttaattaaaggcccgtttagtagaaggaacctgaagatggtcctggttagggccgttggggttgatggaggttaccaggccttatttgatattatccatatcttggtattttaaaggcagggtttctaacattattaaaaaattccagaaattcaactttctgtgtccattaagtatattactgaaattaattggaaaatagttggggtttaagcttttgtt

SEQ ID NO: 96200 - DNA, 637 bp, Arabidopsis thaliana columbia
gaagatgcaagtgtatccgtcgactccagcatttgcctaaaggctgagaaagatgcagttgatttgaagaagcgagagcttgccagcttcatagtaaagtcatcacagaaagaggttccggctgctcttagcaaaacgagccccgaagctgagtcaggaggtacctccgaaaaggatagtgcagtaaccgagatagtttatagtagagaagaggagaatggagcgaatgcaaatgagacaaatggaggtgaagggtttgtgattgtggcaaagaaaaggagaaggaagaacaaggtgcgacttacaaatgttgcggctgggctgtacgcatcaaaccgtcgtcagtttgtgcatgatctgataagtgggtttcatcaggttaacaaaataaagcttcttgtgaagcagagaatattctcatctcatttggtttattggcttttttttattgggataggtagttggttgcttctattcttatgttgcactctaggtgcagcttgacgccgttgtgttgtaaatttttcgtcgctagttgtcttgtttctgagattttggaagttttttctggtctattatagtccagaaatcaacagcaattttaggtggacaatctgaatctgataccagttttttc

SEQ ID NO: 96201 - DNA, 620 bp, Arabidopsis thaliana columbia
  unsure (1)..(620): unsure at all n locations
acgcgccacagctatcactctgctctgtcactttgtcttttactcagagaatcagagacagagagagaaagagagagagagagagcgaggggaagggaaatggagaaggcattaacgaaagtgacgagctttaaagtgggaagttcatggatctctaagaaagctaaagaagagctctcaaacatcaccaatgacctcactacattctccagtacggttgaagagaaagcaaaatggattttcaacaagcttaaaggaaaaccactgaaaagcttaccagacctcctcaaagaatacaacttaccaccaggactcttcccacaaaacataatctgctacgaattcgatgagacgaagaataaactcaccgtcttcttctcttcaccatgtgaagtcacattcaaagatggatcagcgattagatatgcaacgcggtgtgcaaagggnttttcctttgaggggagctgatgggtgtgggaggattgaggccaaagtgttggtgtggggtaaagccccccaatccaggccgggccccagcttggnaancttggtccctggtggggcaagaacccggccttnggggttttgnnccccctggngntncaagcctnggggtttgg

SEQ ID NO: 96202 - DNA, 591 bp, Arabidopsis thaliana columbia
  unsure (1)..(591): unsure at all n locations
aaccnctgcttntggagtcngcatgctcccnagganttcgggcagtcctgtgaaccctgaactccgatncactgctctgcnnttttcantcncccttaaccatcctcggtaccccggactacactncattgaagctgcgtattcttactacaatgtgccacacagacctcgtttcttcagctgatgtatgatgcgctaattgtctcaaagcaaaagggtttcgatgtgttcaacgcgtgggatgtgatgcacaatgagagtttcttgaaagaactgaagtttgggccaggagatggacaactccattactatctctacaattaccgtttgaaaagtgccttgaagccagcggaactcgggcttgttctcttataagctcaacaacttgatttgatggtatcaacaaacttgaaatttgtctctctttttttttcttcagtctgaactacttctcccatggtttactgaaactgagtttaattattttggcaatgcaattttggattttgctttttaaaaaaaaaaaaaaataataaaaaaaataataatataaaataattaaaagggcggccgttctagaggatccaagct

SEQ ID NO: 96203 - DNA, 743 bp, Arabidopsis thaliana columbia
gagagaggcaaataatatattcagtagcaaaaaaaaaatctgggatttctaaaaaaaggtaagaaggaaaatggcggatcagctcaccgatgaccagatctcagagttcaaggaagcctttagcctcttcgataaggatggtgatggttgtatcaccaccaaggagctcggaaccgtgatgaggtctctggggcaaaacccaacagaagctgagcttcaagacatgatcaatgaagttgatgcagatgggaacgggaccattgatttcccggagttcctgaacctgatggcaaggaaaatgaaggacactgattcagaggaagagctcaaggaagcttttagggtttttgataaagaccagaatggtttcatatctgcagcagagcttcgacatgtcatgacaaatctcggtgagaagctatccgatgaggaagttgatgagatgatccgagaagcggatgttgatggcgatggtcagattaactatgaagaattcgtcaaagtcatgatggctaagtgagagaattttatcttaagcccacaaaaagaaacaagatttatgatttctacagtgaagttacattatgacttgattctggttgcgttctttaggacatcattttgcttatttcccttgtttgtttggttaagccttttagtgttatgtgaagtatgaactcatattttgctcatccttgtgacaatttttatctctctttttaaggcatctgattttattctgt

SEQ ID NO: 96204 - DNA, 517 bp, Arabidopsis thaliana columbia
  unsure (1)..(517): unsure at all n locations
nnnnnnnnnnnnnnnnnnnnnnnnnnnnnnnnnnnnnnnnnnnnnnnnnnnnnnnnnnnnnnnnncgacccacgcgtccgcaaaaactgaattatcttcttcccttgtaaaccactcaatcaatcattgatcatgcctcgtaacttcaacttgttgttagttctggtgatcattgctctgtttattactaaaaactcacttggcaggcttcttgagggatccactggtattatcaatggtttcctgacgtggacaaacaccaagaagcccgtggacgctgaaagctgtgtcgaggtcggttgtgcaattatatatgacgttgttgctctatatattttatgttgttcattgtattgaatgtatcgtgtggtctgttatctactcaagtcggctgtaacattgtgaactactttatctgtagaagctattactttatcttcggattttggtttgggaactgctctaacatgcgctgttaccatcaggcgcctggacaaacaagcagacatgatgccag

SEQ ID NO: 96205 - DNA, 492 bp, Arabidopsis thaliana columbia
gggatttccgggtccgccccacccgtccgcaattttagaaaatgggaggagggggccattgttcaaggctccttcaccagggaaggtaggcattctgaaacagacggtcacatcagcgacaatggtccttcaacttcattgccagaagatccaaacctttcatcagataatgaactagaggatgacgagttagcagattggggtgatgactctgcagctggtggtgcctccctcactcaaagcccgcttagtagaaggaaactgaagatggtacttgataaggacgatgaggatgattgaagataacaagacttatatgattatatccatatctgggttatataaatgcaaggtatctcacaataataaaaaaatccagaaattcaactttcatgttacatttagtaatatactgtaattcattggaaaatagttggtgttttagtctttgttttgccatattgttgctctatgttttgacttgttatcaat

SEQ ID NO: 96206 - DNA, 297 bp, Arabidopsis thaliana columbia
  unsure (1)..(297): unsure at all n locations
ggaataccatatgttgtgagccttgaattaaatggggaactgtgttgaggggaatattatcaagggtcaagcagtggttgcatggtgtggtgggacaccaggaaagtgtattaccagttggttgaggagaaagtggaatgggagccctgtggtgatcgatggagctgaagatgaggaatatatgttatctttagatgatgtgggatcaagtttggttttcatgtacacaccagtcacagaaggaggtgcaagaggagagcctcagtataagtacacagagttcgtanaagcagcgcc

SEQ ID NO: 96207 - DNA, 639 bp, Arabidopsis thaliana columbia
  unsure (1)..(639): unsure at all n locations
agctacatggttggttatggtaacaatttccctcagagagttcaccacagaggctcttccatcgtctctgtcaaggtggaccgtacatttgtcacctgccgaggtggatatgccacttggttcagccgtaaaggcagtgacccgaaccttctcactggtgctattgtcggtggccctgatgcttacgacaatttcgctgacaggagagataactatgagcagactgagcctgctacttacaacaatgcaccactccttggtgttcttgctcgtctcagcagtggtcattccggttatagccagtttcttccagtggttcctgctcctgttgtccgaagaccaatgcctattcgtagaccgaaagtgactactccagtccgagcttctggtccagtggctatagttcagaagataactagttcatgggtctcaaagggaaggacttactacagatactcaacaactgtgattaacaaatcttctagacctctgaaaagtctcaacctttcgatcaagaatctctatggaccaatctggggactctcgagatcaggcaactcgttcggtttaccctcgtggatgcactcattgccatncggaaaatccctagagttcgtctacattcaactcaacaananc

SEQ ID NO: 96208 - DNA, 536 bp, Arabidopsis thaliana columbia
ttaggtgcactatagaagagctatgacgtcgcatgcacgcgtacgtaagctcggaattcggctcgagcatttttccccttcctcttctcatctctcgataacacctctctctctatctctctcactcgtttcaacaatggcgattcaaactcagcttccttgcgacggagacggtgtatgtatgcggtgccaggtgaatcctccgtcagaagagactctcacgtgtggcacctgtgtcactccatggcacgtgtcgtgtctccttcctgaatcactcgcttcttccactggagactgggagtgtcccgattgctccggcgttgtcgttccctccgccgctccgggtaccggaatctccggacctgaatcttccggttcagttctcgttgctgcgatccgtgcgattcaggctgatgtgactttgaccgaagctgagaaagccaaaaagaggcagagactgatgagtggtggtggtgaccatggtgtcgttgttgaagaaaagaagaagttagaaatcttttggtctatttgcattc

SEQ ID NO: 96209 - DNA, 419 bp, Arabidopsis thaliana columbia
ggattcacaatcacattcttcttaaattgccgggttttggggtgggatcttttaggtttagctggggttaagggttacggcaactactaaggcctgggcctggattttccgacctggtccttaaaagccaagattcctaaccggtttttccggtgggtggaaccgggactggtcgtttacatggatcggttaatgggccaaaacgtcgtcgttcaaggtggaagctaaaaaaggagaagggtggcccggttgggcatcgccggattatctaaccggcggttttgccggggccaatgggttggacccgtggggtttagctagggttccagagaacttgaaatggttggtccaggctatagttggtcaacggccgatgggctttgctcggggttgctgggaggttttttgccggaggtttt

SEQ ID NO: 96210 - DNA, 424 bp, Arabidopsis thaliana columbia
tttaaatcctttcctttaatggaggttaattataagattccgattttggccacataagttttccaccaatcctccttggccggccaaacggttttaaggccttccagcgacctaatccaaaaggggggcgtttgggccgggtggccgggggaccatcgcgtggacccgtaaggtttactccccaaggcattgggtttggcccagaccgtcccaggtcctggggacctttttgggggaccacaccgccttacttaactggggattcccccggggcctccggttgggccaccgttggactttgggttgccccggggccattcgttaagaaccgggggctggaggtattccacagcagaggggctttgtggggggctttcggtggcccattccttgaaattttttccaagaccggggttaaattcgg

SEQ ID NO: 96211 - DNA, 621 bp, Arabidopsis thaliana columbia
  unsure (1)..(621): unsure at all n locations
tccctcgcgtccgtacggcgaagacgacagaaggggaacacacaaagattccattacaaataaacaattttcatatatatctataacaaaaaaaaacaatggctacctcaagcatgaagagcattccaatggcgatcccaagtttctccatgtgtcacaagctcgagctccttaaagaaggcaaaactcgcgacgtcccgaaagccgaagaagatgaagggctaagctgcgagttccaagagatgttggattctcttcctaaggagagaggatggagaactcgttacctttacctattccaagggttttggtgccaagccaaagagattcaagccatcatgtctttccaaaaacatttccaatccctcgaaaacgacgtcgttctcgccaccatacctaaatccggtacaacctggctaaaagctttaactttcaccatccttaaccgtaaccggttttattccggttgcctgggggtcccaccaacccttttttaattttcaaacccttttggcctttgtaccttttttttggggtaaaggtttttngngaacgggggntntcccgntnntttngggggtttgccngnccaagganggttggaaaccctttnccggttgg

SEQ ID NO: 96212 - DNA, 530 bp, Arabidopsis thaliana columbia
gccagctctatactgactcacattagggaaagctggtacgcctgcaggtaccggtccggaattcccgggtcgacccacacgtctctctcctttgccctcgttttttttcggttctcgtctttcgttcttcacttttagacaagcaaatatgagacccccagttacaggaggacgtggtggtggaggattcagaggtggaagagatggtggtggaagaggttttggaggtggaagaagctttggaggaggccgtagtggtgacagaggccgtagtgggcctcgcggcagaggacgtggtgcgcctcgtggtcgtggaggaccacctcgtggaggaatgaaaggaggaagcaaagtgattgttgagcctcacagacatgcgggagtgtttattgctaagggtaaagaagatggctctcgtaattaaaaatgttggttcctggcgatctctgtgtacaatgagaagagtatgtttgaggcgattcaatattgatctaagaggagatttcaggatgtggggatggtgttagatc

SEQ ID NO: 96213 - DNA, 486 bp, Arabidopsis thaliana columbia
cacacgcgtccggaagtgagagacactgagactttgtagttgaccggatcattctcacttcgccggccgacgttcttccttccgccgtcggtatctatatttacgatccacgatctctcttgctgtttctgtcttcatcgtgacgaaaatggctgctcgtatcgggatcttctccgtcttcgtagctgtattgttatctatttctgcattttcctcagctcaggatctccagatcgtaaatgccgagcgaaggattgatttaagctcacatatcgtgaaggccttcttgactctcaaggttgaaaatattgggaaagatcctgctgcagaaatgcttcttgctttcccacctacccagatcaagaatttggctatggtacaagccctggcaactactggcaagaagaagaagaaaacttatttgccattagatgtaaaaccaactgaacaacctgatgcaccaaatgacactggatactaccgtgt

SEQ ID NO: 96214 - DNA, 1623 bp, Arabidopsis thaliana columbia
cttttagccaaactctctctagtctctctctctctctctacttgagagtgccgtctccattttctcaacgtagtcgtttattttgaacaaagactctctccgtttaccaaagtgttgttaacgatgaggaggtgcttctccaaaattactgattgccacttgggtttcaagaattccaacttcttattggttggttctgaagttggttcaggttcagtaacgagaaccattactactactactagtgagcgtttatttagcagtagttatgcagctcatcaagttgatcagataaaagacaatcctgtctctgacatgttgattgataaatttggtcgcttacatacctacttgaggatatctttgactgagcggtgtaatctccggtgtcagtattgtatgccgtctgaaggtgtggaacttactcctaagcctcagttgttgtcacagtctgagattgttaggttggctggtctttttgtttctgctggtgttaacaagattcggttgactggtggcgagcctacggttaggaaagatatcgaagagatttgtctgcagttgtctagtttaaaagggttgaagaatttggctattactaccaacggtatcactcttgcgaaaaaactaccaaggcttaaggaatgcggacttgattcgctgaatatcagcttggatactctggttccagcaaagtttgagtttctgactagacgtaaagggcatgatagggttatgaaatcgattgatactgctattgagcttggatacaatcctgtgaaagtcaattgtgttatcatgaggggattgaatgatgatgagatttgtgattttgttgagttgacacgcgacaagccaatcaatgtccggttcatcgagtttatgccatttgatggaaatgtttggaatgtgaagaaacttgtaccttatgcagaagtgatggataaagtggtcaagaggtttccgagcataaaacgaatgcaagatcacccaactgaaacagctaagaactttacgatcgatgggcattgcggttctgtttctttcatcacatccatgacagaacacttctgtgctggctgcaatagattgagacttcttgcagatgggaacttcaaagtttgcttgtttggtccttcagaggttagtctgagagatcctctccggtctggtgctgatgatgaggcgctaagggaaattataggcgctgctgtgaagagaaagaaagctgcacacgctggaatgcttgacattgctaaaacagctaatagaccaatgatacacattggtggctaagctccggtgaacgttggtgaagttcctggaaaacactacaaggaacatttgagttttatatcttgtaagaatctatctgctgctcccaactctgtgagactgtgacaaacttttttgcaaacaagaacaagaagactgaagagtttctcaaactgtttcttctctgtatacgtaacagacactgtacaggaactcagaatttccacacgaatcttttcagtccaattacttttcttatttatggccaaaaagatcaactataagcttttattatgttaagaattttaaaatcttaaatttgataacaacaacaaatccacttgcgat

SEQ ID NO: 96215 - DNA, 551 bp, Arabidopsis thaliana columbia
acaagagcttctacatctagcagagtctctccagctttcactttcctcgtcatcttcttcctcttatctctcactgcttcagtagaagctgctggtcgtggagttaacaaccacgcgtccggcggcggattaggagcttctttcatattcggagattctctagtcgatgccggaaataataattatctatcgacgttgtctagggctaatatgaagcctaatggtattgatttcaaagcctccggaggaactcctaccggccggttcaccaatggacggaccatcggtgatatcgttggggaagaactcggatcagcgaactacgcgatcccgttcttggcaccagacgcgaagggaaaagctttattagccggagggaactatgcatctgggggaggaggaatcatgactgcccccgggagaatctttgggaatagattaggggtggatgcccaagttgatttcttcaccactacacggaaacagtttgatgatctcctgggaaagagaaggcaaatattccttcccccagagttcgttttctcatccct

SEQ ID NO: 96216 - DNA, 843 bp, Arabidopsis thaliana columbia
  unsure (1)..(843): unsure at all n locations
gtccccattgaataccgtcaggaccaacagcttgtgtctcatgatgtgaaaagcagtttggacaactataagtacacttactgtgttaagatctgtcctgtttgccgtgaggatcttgtttgcttgccttctaaagttgctagcggcttggggaaccttggtccacttgtggtttgcacaaaagtctctgataatatcactctacttgatccgagaactctaaggtgtgccttcttggatgcgagacagtactggaggtctgggttccgatctgcgctcaccagtagacaacttgtcaagtactttgtgtttgatgttgagccacctgttggtgaagcgactgttggtgggcaaaagtacgctctttcctatgtccagattgcccgtgaatcagacattggtaagatgttttatgtccaaactcatcttggacacattctgaaacctggggatcaagctttgggttatgacatctacggagctaatgtgaacgacaatgaaatggagaaataccgtctgagtgtgaagaatgggcttcctgaagcaattctgatcaagaaatgttacgaggagcagagagagaggaagcagaagaaatcccgtaactggaaactcaagtcgcttccaatggaaatggatgattcaagaggcagggttgatccagagaagacagacaaagaatacggagagtttttgaggggatcttgaaggaaaaccctgagctaaggttcaacatatctttgttacaggggccaaggtttatcaagcttcttgagacctgctttcaatgacagttggggaagggtgcccccttttttccccatttnnggngtttcnttnctt

SEQ ID NO: 96217 - DNA, 517 bp, Arabidopsis thaliana columbia
atcaaagccacaataaaatacgttaaattaataattaccaacctcaaaactataatctatatatatatatatatataatcagcattttcttcagtgtctctctactctctctcagatttgcatttgtttttttttggtttggttatggagcgtgcaaggagacttgcttacagagggatcgtgaaacgtctcgtcaacgagacaaaacgccaccgtaacggcgaatcctctcttcttccgacgacgactgttactccctcaaggtatgtctcctccgtctcctcctttctccatcgccgtcgtgatgtctctggatcggcttttaccacctccggtagaaatcaacaccagacacgatcgatctccgtcgatgcgttgaagccaagcgacactttcccgcgccggcacaactcagcaacaccggatgaacaagctcagatggcgaattactgcggattcgataatctcaacacgttgattgatttgactgtttcgaaatgtatctgttagattcgat

SEQ ID NO: 96218 - DNA, 539 bp, Arabidopsis thaliana columbia
aaacgactctcttcagagagttttgagagggtgagagagccgtgctcggcgttgttagaaagaaagctgagaattgcaactgcttacaagagcaatgtcgacaagctgatcaagagtctcttggatttgtgcttctgtacttcttaagaggaaggtcaaactttgctttctggtacggcggcgatgtcgacgatttcgatccatcggactgagactctacgagtcactcacgctcggtcacgaatcttccggcagagatatcggagaactatccctctttggaaattaacaatcaattcgagatcttctgatacatctaagaaggaagaactctctgtacaaatatcaattcctcctcaagttgatcaatcaagacctgaaggtttgagattcgatcgtttacaacctccggagccagagtttggtcatgaggatagatttgagtttggtaaattcgtagctagagaagctatgcatgatgaagaatattggactgcagcttggcttcgtgcagagagtcactgggaagatcgctccaa

SEQ ID NO: 96219 - DNA, 459 bp, Arabidopsis thaliana columbia
atacgactcactttagggaaagctgctacgcctgcaggtaccggtccggaattcccgggtcgacccacgcgtccgttccaacaaaaccacaaagacgactctcttcagagagttttgagagggtgagagagccgtgctcggcgttgttagaaagaaagctgagaattgcaactgcttacaagagcaatgtcgacaagctgatcaagagtctcttggatttgtgcttctgtgcttcttaagaggaaggtcccgcaagataccatcttctcaaaagtccaatcaatctacgcttttcaattcgccacgtcacagaatcctgaccgttagatacaaacgcgccaactcgtttgtacccaggcggaaaatgactatattacccttattcattatcatctttatccatgtgacggtaaactaaaattctctctcaggtcaaactttgctttctggtacggcggc

SEQ ID NO: 96220 - DNA, 395 bp, Arabidopsis thaliana columbia
atcacatttaattaactaaggagcctttaacttgccccacactttaaccgaaagggccgcttggccatgggttttttcttttccggtttggaccggaagggccgttaagttttccccgggggcctccgaagattttggaaccggccgaataaccatgcgcaaggcctccaagccaaccggtccatccggaagccaatggtccggatccgcccgggtaaagtcctggggtccattttccggggggcctccgggttacctaactggggagttccccggggtttacgggggggacactgccggtttttccgccgatcccgagaccttcgttgggaaccgtgggctagaagtattccacagcagatgggccatgctcggagccctaggttgggttttcc

SEQ ID NO: 96221 - DNA, 402 bp, Arabidopsis thaliana columbia
aatcccggggcggaccacagccgtccgaccaaaaaaacctaaaaggttttagagggaaggagggggggggttggagggtaaagaaaaagatgttggagtcggggttaacaggtttccggaggggcacccaaccggaacttcggttaaaagggccagggcctccaaagggccaccacctgccccgttgttcaagcccggcaggctagcttaatggtccttttggagggctgggatggctgagttaatagctccgttttggttcctgaccataactgtttggactgtaatgggtgtgaaggggcaaccgaccttgtgtgcttccgccggaatccaaggtttcgtttggcctttcgggggattgattttggttctcgtttactgaaccgttggaatttctggtgg

SEQ ID NO: 96222 - DNA, 502 bp, Arabidopsis thaliana columbia
tttccaggtacatacgactcactttagggaaagctggtacgcctgcaggtaccggtcccgaattcccgggtcgacccacgcgtccccccacgcgtccggtcttttagagactcgttagatgcgttttacaggttttctaggcctcatacaggtattggcacagtgcttagcattttatctgtatctttcttagcagtagagaagggttctgatatatctcctttacttttcactggcatcggggaggctgttgttgcagctctcatgatgaacatttacataggtgggctaaatcaggtgtctgatgttgaaatagataagggtaacaagccctatcttccatgggcatcagggagaatattctgttaacacccgcattgcaatagtagcttccttctccatcatgagtttctggcttgggtggattgttggttcatggccattgttctgggctctttttgtgagtttcatgctcggtactgcatactctatcaatttgcca

SEQ ID NO: 96223 - DNA, 797 bp, Arabidopsis thaliana columbia
aatttatgctctctgttccttcaaaatcatttctttctcttctttgattcccaaagatcacttctttgtctttgatttttgattttttttctctctggcgtgaaggaagaagctttatttcatggagtctctgctctctagttcttctcttgtttccgctgctggtgggttttgttggaagaagcagaatctaaagctccactctttatcagaaatccgagttctgcgttgtgattcgagtaaagttgtcgcaaaaccgaagtttaggaacaatcttgttaggcctgatggtcaaggatcttcattgttgttgtatccaaaacataagtcgagatttcgggttaatgccactgcgggtcagcctgaggctttcgactcgaatagcaaacagaagtcttttagagactcgttagatgcgttttacaggttttctaggcctcatacagttattggcacagtgcttagcattttatctgtatctttcttagcagtagagaaggtttctgatatatctcctttacttttcactggcatcttggaggctgttgttgcagctctcatgatgaacatttacatagttgggctaaatcagttgtctgatgttgaaatagataaggttaacaagccctatcttccattggcatcaggagaatattctgttaacaccggcattgcaatagtagcttccttctccatcatgagtttctggcttgggtggattgttggttcatggccattgttctgggctctttttgtgagtttcatgctcggtactgcatactctatcaatttgccac

SEQ ID NO: 96224 - DNA, 540 bp, Arabidopsis thaliana columbia
accacgcgtccgcggacgcgtgggcaaaataaccatttttaattcccagcctctttttatacgtagtctaaattgacaaacacatcattcgctctctttctcttctttctctagctctcttggttttttgctaaaaacagagcattttctctctagctctcactgtttctttaccataagtttcgtcatattagtacatgcaagtgtaagggatggtgatggaggaaggaagaagcatagaagaagggcttttgcagctcaagaacaaaaacgacgattcagagtgtcgtattactgcttgtgttatccttagcacttttgtcgccgtttgtggctccttctcttttggtgttgctactggttacacttcaggtgctgagacaggagttatgaaggacttggatctttctatcgcgcaattttcagcttttggctcattcgccactttaggagctgcaattggtgcactgttctgcggtaatctggcaatggtcattggcagaagagggacaatgtgggtctccgatttcctatgcatca

SEQ ID NO: 96225 - DNA, 571 bp, Arabidopsis thaliana columbia
ccagcactaatacgactcacttagggaaagccggtacgcctgcaggtaccggtccggaattcccgtgtctctcatcagaaatcaaaaaccctaaaaaaagtcctttctgattcatctatacagacacatactgtattctcaaaacaatggagattccttctctgaataagcagcaagagttcactctcgcctccgtcactgatctcacttctccttcctcatctctttcgtcctctcctgttgtagctacgttttcatgcgttaatgaagtcaaggaactccgatttcaggaatcgaaatcgtctgatggtttcagttttgatcttagttcgactcagttgttcaagttggggccacttcagttcacttgtgtatctgatggttcgatttcttctgcaaaggagaaatcgtcattttctcgaggagttgtaataaaatttagagatgagacggatagcacggagttttgtgactcatttgaggaacgccaaaaggatgatgctgttaacaaggatcagccttgccgaacggaacagttgtttcagctaataaaagcaagttcgatgataag

SEQ ID NO: 96226 - DNA, 541 bp, Arabidopsis thaliana columbia
  unsure (1)..(541): unsure at all n locations
aggattcagtgccttggtattctgcggatacatagtctatgataccgacaacctcatcaagcgtttcacatatgacgaatacatcctagcatcagtagctctctacttggacatccccaatctcttcttgaccatattgcgtatactgaggcaaggcgacaactgaaaggcataaaacgatgcttcagtgatgtgatccagtttataactataagagaatccaaaagcctttatgtgtgtatatctgatttctgtttggagaattaagtatatgatgctatgtggttaaacgattgatataaacaaaatcaagcaatgtcgattttcaacttcaaataaatttgttaattttggcggaattttgatgccttttgtcgtatccatttcgatattctgattgcttaagagcaaaagcaaccattgataccaaaaaaaaaaaaaaaaaaaaaaggnnnnnnnnnnnnnnnnnnnnnnnnnnnnnnnnnnnnnnnnnnnnnnnnnnnnnnnnnnnnnnnnnnnnnnnnnnnnnnnnnnnnnnnnn

SEQ ID NO: 96227 - DNA, 512 bp, Arabidopsis thaliana columbia
  unsure (1)..(512): unsure at all n locations
cannnnnnnnnnnnnnnnnnnnnnnnnnnnnnnnnnnnnnnnnnnnnnnnnnnnnnnnnnnnnnnnccaccacgcgtccgctctcttgcaacggcgaatccgccgtcgcaatctgcgatacttataactggaatcctcgtcgacgatctaaagtaccggagaaacgtcatcctcctaagcttcgggttttcaactacgacgaactcgccgtcgctactaacggcttctccgccaataacttcctcggaaaaggaagtcacggcagagtttacaaagcagttctcgacgacggaaagcttctcgccgccgtcaagagaacaacaatcaccactaccgttggtaataacaataacaacgtgagtcaggtagacaatgagatcgagattctttcacgggttcgtcaccgttggatggtcaacttaatcggttactgcgttgaccaccggaggaaaacaaagctgttagtcgtcgagtacatgcctaacggtacgcttcacgatcagttacattct

SEQ ID NO: 96228 - DNA, 1076 bp, Arabidopsis thaliana columbia
gtggtgaaataaaatgatttcgacgctccgtcgcgccgtgtttctccgtcgatttccggcggtggtttctccgatcaaaagggctttcagcagtagaattgacgatgaattcgatccccaaatcatgaatataaatgagctgaatcaggagatgcagtcaatctttggacaagaaccttctcccgatggtcctgggacaatggatttctctgagttgaaatcatccaaaatcgaacctttgagatcgaagaatattgattttagacaacaaattgagtatcataaatctacacactcgagcaagaatgattcgcaagctatagaacaatatgcaaaagtggctagtgatatgtctaagctaacacatgttggtatcgcaggggaagctcaaatggtggatgtttcttctaaggacaattccaagagaactgcattggcctgttgtaaagttattcttgggaaacgagtatttgatttggtcttagcgaatcaaatggggaaaggagatgttcttggagtggcgaaaatagctgggatcaacggagcaaaacaaaccagcagcttaataccattgtgtcataacattgctcttacgcatgttcgtgtagacttacgactaaaccctgaggattttagtgttgacattgaaggagaagcttcttgcactggaaaaaccggagttgagatggaagctatgactgctgtatcagttgctggtttgactgtttacgatatgtgtaaggctgcttccaaagatatcagtattacagacgtgaggctcgagcgtaaaactggtggaaagagcgggtcttggtctagactctagaggggactgaacacattcaacatttgcctctgttgctataaaggttagctttctttatcttatttggatgcttgggtgatatctcttatatggaaagatggaaacttttgaatctcgattagtcaattaggcactgtgaaagacactatagttttgctcacaatttgttgcttctgctgttttagtttgggtactctctaagaacacaggtgaaatattacctattgatgcctaagagcggtttgaaact

SEQ ID NO: 96229 - DNA, 664 bp, Arabidopsis thaliana columbia
  unsure (1)..(664): unsure at all n locations
ggcgattgctctctcgtcgtcgtcgagatcacgtccattactctgcagccgaagctgaagacgattcatggattagggacagtacttcctggttattcggtcaaatctcactttcgtagtgtctctctccggcgtagcgccgtggtcgtgtcggccattaccggagcttcttccggagctggaatagggaaaggtacagctgattcgctagatacagtgaaagtcttggatttgagaggaaatgagattccgatttctgatttatggaaagataggaaggccgttgttgcatttgctcgtcattttggatgtgtgctctgtcggaaacgagcagcttatcttgcagaaaagaaggatgtgatggatgcatctggtgttgccccttgttctgatcggaccgggaagcatcgatcaggctaatacttttttggacagactaagtttaaaggagaggtctatgcggatccaaaccacgcatcatacgaggcgcttgagttcgttccaggggtttctgttacatttacacccaaagctgctatgaagntactagagtcttacatggaaggntaccgccaagactggaaccctcgtttatgaaagtncagttgaagnggcggcttgnaacaagggggatnttagttctggccnnggaaaaananaanta

SEQ ID NO: 96230 - DNA, 469 bp, Arabidopsis thaliana columbia
catttcccatatggcttctccacagtcactaggttacccaactatctcccctttcaacacgaggtacatgtcaccgtatagacctagcccgagcaatgcatcacctgcaatggctggatcatcgaattatccgttgaatccactgcgttacagtgaatcagctggaactttctctccatacgcctctgcaaactcgcttccagactgttagaaagtctacagaaccaaccactcttggttcaggtcatataagattatttcttttgcatttgagttttactacgaaacgtacttctggcgtttgtgtgtggtgtgtgtgtgtgtaaccatgcttttatagtcttttggttgagatgaaacatcatcgcaggtaggttagagagattttaacacttcgacaattacacaaactcggttcctttgtacaaagaaatatgagctaaagaaaatacacgtctctttccttgtt

SEQ ID NO: 96231 - DNA, 913 bp, Arabidopsis thaliana columbia
  unsure (1)..(913): unsure at all n locations
cgagtcttatattcagttcgtttcatgaagataacactactgcattcacttgtgctatttgccttgaagactacactgttggagacaagctcaggctcttaccttgctgtcacaagtttcatgctgcgtgtgttgactcatggttaacctcttggagaactttctgtccggtgtgcaaacgagatgcaagaacgagcacgggagagcctccagcttcagagagcacgccattgctctcatctgctgcatcgtctttcacttcttcctctctgcactcttcagtcagatcatctgcactattgattggtccttccttgggctcattaccaacttcaatctctttctctcccgcatacgcaagctcatcctatattagacaatcattccagtcttcctctaaccgtcgatcacctccaataagcgtaagtcgaagctcagtggatctcagacaacaagcagcttctccatctccatcaccatcacagagatcatacatttcccatatggcttctccacagtcactaggttacccaactatctcccctttcaacacgaggtacatgtcaccgtatagacctagcccgagcaatgcatcacctgcaatggctgggtcatcgaattatccattgaatccactgcgttacagtgaatcagctggaactttctctccatacgcctctgcaaactcgcttccagactgttagaaagtctacaggaccaaccactcttggttcaggtcatataagattatttctttttgcaatttgagttttactacggaacggacttctggcggttgtgtgtggtgtgtgtgtgtgtacggtggttttatagcttttgggtaaggggaacacatcggtttgggtngggggtttacactngggattnnaaaangggccttttcaagnaaggc

SEQ ID NO: 96232 - DNA, 473 bp, Arabidopsis thaliana columbia
  unsure (1)..(473): unsure at all n locations
gcccgaaannccggggcggaccgaggcgtccgttaacacccccccgtttaaaccgttttacttggggctgaactacttaacctaaaggcccgcctgaccaagggttgtgtctgcccgggccttccccggtaaggccgccaagctttcccccggggattttgaagtcctgggaggcggccgggtgccattgaggaagactgtggccaagccaaagggcccttcaggcagcccttggtccggttctgcccgggtcaggtcctggggtccattctttggcaattaaccgacctaccttaccggaaggttccccggggcctccggttgggccaccgccggcctttaagttgaccccgagccattcgcagggaaccgtgacctagaagttttccccagcagggggcccttgctcggagccctaggctgcgtcttccctgagctttgggctagaaacggagtcaagttcggaaaggcgg

SEQ ID NO: 96233 - DNA, 442 bp, Arabidopsis thaliana columbia
cggaatccccgggccgcccacacccgtccgaaaacctaaactgggattctttcgggtaaccttggtttcggttccttcttcggtccccaggggttcaactgaatcttaaggatggcgagcctcctttgttttttttcctttcggcaggaaacttttttccgatgggttcgtttccatcgtttccttccagacttttgcattgggaggcagggggggttccaggaagggtgggcctgaggccaaccttaagggggccattaatggattcggtgggaccggggggaccttcctgggatgttggcttggccgcagggcctctcctttggttatcatggccattaatgccactggtggcgtcaggcaggcttcgcttttccttaattccgactttcctttcggattcttggttgctgttgtcaaaccttttgaggggcctgcattt

SEQ ID NO: 96234 - DNA, 495 bp, Arabidopsis thaliana columbia
  unsure (1)..(495): unsure at all n locations
nnnnnnnnnnnnnnnnnnnnnnnnnnnnnnnnnnnnnnnnnnnnnnnnnnnnnnnnnnnnnnnnccacgcgtccgctttctcagtcttcttctagaatcatctttgctctttctcgtcgactatttgctcgccggagaatctctctcagaatggctaggtcaccgagcaaacacggccgcgatcaaactcaggattgggaactctcattgaaggataaagacaagaagattaagcaacaacctgctaattcgtcgaatccgagtagtgagacgttcagaccaagtgggtcagggaaatatgactttgctaaaaagtatcgttccattagggatttgtcgagtagtttgattggagaaagtctattggattctagttcagagaaggagcagggtaatgaattcttcaagcagaagaagttcaatgaggcgattgattgttactctcggagcattgctttatcgccaaatgctgtgacttatgcaaatcgagcaatg

SEQ ID NO: 96235 - DNA, 639 bp, Arabidopsis thaliana columbia
  unsure (1)..(639): unsure at all n locations
accgtccgattcccgtcgacccacctcgacgaagacacatagaggaagaagtcgccggagaagtgaaaagacgttgatggtgattatgaagaagatgaaagattcagtcttgttcctcgtcgtaggcctcttctctttatctgttttggtctctcagtcgatcgcagggagagtcaaagctccattgttgcagagcaatactggtggattagttttcagcaaatccttcaattcgatctatgatacttctatgtacggacgcttgcagctcaacaatggccttgctcgaactccacaaatgggatggaatagctggaatttctttgcttgcaatatcaatgaaactgtcataaaggaaactgctgatgctttggtttcatctggcctggctgatttagggtacatacatgtcaatattgatgattgctggtccaatttgttacgcgattcaaaggggcaattggttcctcatcctgaaaccttcccatcaggattaagcttcttcctggttatgttcattcaaaggggctcaaactcgggatatattctgatntggggttcacttggnaaggtcacccgggcccctttncataagggggttntcaagnattttgcttttnggggggggnntctnaaatg

SEQ ID NO: 96236 - DNA, 750 bp, Arabidopsis thaliana columbia
tcgacggtatccataattctcgatatgaccttcgcggccggtaggcctatgacatatacctgttttggtctctcagtcgagcgcggggagagtcaaagctccattgttgcagagcaatactggtggattagttttcagcaaatccttcaattcgatctatgatacttctatgtacggacgcttgcagctcaacaatggccttgctcgaactccacaaatgggatggaatagctggaatttctttgcttgcaatatcaatgaaactgtcataaaggaaactgctgatgctttggtttcatctggcctggctgatttaggatacatacatgtcaatattgatgattgctggtccaatttgttacgcgattcagagggtcaattggttcctcatcctgaaaccttcccatcaggaattaagcttcttgctgattatgttcattcaaagggtctcaaactcgggatatattctgatgctggcgttttcacttgtgaagttcatccggggtccccttttcccatgaaggtgggttgatgcagacattttttgccttctttggggcgtgggttaacctgaaatatggcaatttgtttcaaacctgggaataaaaccaatcggaaggtacccccccaatgcgggaggctctaaacgcaactggccgctcaatcttctattcactatgtgaatggggcgttgatgatcctgccttgtgggcaaaagaagttggaaacagttggcgcacaaccgatgac

SEQ ID NO: 96237 - DNA, 451 bp, Arabidopsis thaliana columbia
  unsure (1)..(451): unsure at all n locations
cgggncggccggggcgtccggtttttttttcctttttccaaacttaattttttccgaaacccttttttttttaaaattttggggaaaccttgtttgccgccgggcgccattttggggccggcgaatccggagtttccaagacctatcctaaataagccggtaccatccgtaaggggggcaacatggtaataaaaaaccgtccttgcagggtggtgggggtttcgacttccaaaactggcaggcccggtacccccaaaggtaacttggtggttatggatattttaactgttaaaaagctggaagatatggttccattttccaccaatggggaggttccacatgtgacccgggtggattaccagtggatggatttaactgaggagggtttcgggggccttttaactgacagggggggcaccaaggatgatctaaagcttccaaccgatgatgg

SEQ ID NO: 96238 - DNA, 686 bp, Arabidopsis thaliana columbia
aggaatcttctgctgcattggtcttggatggacatgacttgaagctactttctgtcaaggttgaggggaagcttcttaaggaaggggattaccagttggactctcgccatctaactcttccttcgcttccagctgaggagtcctttgttttggagattgatactgagatatacccccacaagaatacttcacttgaggggctttacaagtcttctgggaatttctgcacacagtgtgaagcagaaggtttccgcaaaattacattttaccaggatcgtcctgatataatggctaagtacacgtgtcgtgtggaaggtgacaagacactttatcctgtgttattgtccaatggaaacctcatttctcaaggagatatagagggtggtcgacactatgccttatgggaggatccattcaagaaaccgtgctatctatttgctttggtggctggacagctagtgagcagagatgatacatttaccacacgctctggtaggcaggtttccctgaaaatctggactcctgcagaagatctaccaaagactgcccatgccatgtattccctaaaagcggccatgaagtgggatgaggatgtgttcgggcttgagtatgacctggatctcttcaacattgttgctgttccagattttaacatgggagccatggaaaacaagagtttgaatatt

SEQ ID NO: 96239 - DNA, 451 bp, Arabidopsis thaliana columbia
attggtaataatccagcaaaaggggggttattccgagcgggttcaatggacaatggggatggaatagctgttggatggttaggccaccccgtctttagaaataaagaagggcgtgaactttttgtacgccgcatgcctactttttttgaaacttttccggtagttttggtagacggagacggaattgttagagctgacgtcccgtttagaagggcagaatcaaaatatagtgtcgaacaagtaggtgtaactgttgagttttatggtggtgaactcaatggagtgagttatagtgatcccgcaactgtgaaacaatatgctagacgggctcaattgggtgagatttttgaattagatcgtgcgactttgaaatctgatggtgtttttcgtagcagcccaagaggttggtttacgtttggacatgcttcgtttgctctacttttcttctttg

SEQ ID NO: 96240 - DNA, 481 bp, Arabidopsis thaliana columbia
gtcttctttcttcttcggtaaacttcaaatcagaagcgaagaagagatcaaatcaatctgatcgtagatgggttgtttcagttgcttcgacggaacccaaaaggaacagcgtaaggaaggagagagacaagcctccgccgaagctcgtgccaaagccgccgaagctgcccagcgacggaaagagcagtttgataagtctgcagctggaagagctgcacaagctcaattacaacaaatggctaaacaatctgcaaatactaacaaaggagagcctgttcttaagtggcaaatgacgtagtgatgagtcctggtttcaaaaggaatcaatttgtgcgatttggttctttggaaattgtgtgttcttcaatgtttgcaatactttggttatgtgaattgaagcctattttcctccttattcatctgattatcttttgactttcggtaaaacaaaaaagaaattacagagttcattgttaagatc

SEQ ID NO: 96241 - DNA, 652 bp, Arabidopsis thaliana columbia
cgactacacctgttgatgttgtttcctctttttaaagatatgaggaatctagaagactgagagtcgctattatccatgcaatggcgaggatggctgcaattatggcttccacttacaaagcatacttaggtgttgggcttggtcctctgtctttcttgacaaagtttagagtaccacatccaggaagagttggtggtagattcttcgttgacattgctatgccatcgatgcttgactgggtccttggaggtaacagtgaaaaactccaaggaaggccacctagttgcagactcactgacattgccgatgaccggcttcgagagtggtttggggatgacgatgctcttgaacggactataaaggggagaatggtatctaattccacacggcgacgattgttgcgtttcggaaaccattatgtctaaccaaagatgaagatcaaccttgcatcgtcggaagcgaaccagatcaagatttttctggaatgcgcattgtgatcccttcgtctcaggtttcgaagatgcatgctcgtgtgatttacaaagacggagcttttttcttgatggatcttttaagcgaacacggaacctatgtgaccgttaactaaggaagacgatattgagcaacaccgaattttcccgccgcggttaaa

SEQ ID NO: 96242 - DNA, 497 bp, Arabidopsis thaliana columbia
caacaactgcatccaccaaatcctcaccgttatggaaaccctttgcctcaaactgttgttccgttgatgaccaaaccgtctttggcaatctcagccgttgccgaccttcgagatcagaattctccaagaaccatctcggaccacttccttcttttcggcgactctcctttgctgatctaagccgttcttcttcggctaggatcaatgaagatcttgcacagactcttggagccgacttagtggattttcagatgtgtgaactcaagatgatcactcagagtttctccgggaactatcttctcggagaaggtgggttcggcaaagtgtataagggttatggttcgatgattatctccggcaaagtctcaaggctcagcctgttggctgtcaagctattggacattgaggggcttcaaggacatcgtgaatggctttctgaggtcatatttcttggacagctaaaacacccgaatttagtcaaacttattggttactgc

SEQ ID NO: 96243 - DNA, 679 bp, Arabidopsis thaliana columbia
ctctcctcttcctctggctccggcgaaaaaccccttttcgatttcattgataaaacgcaaatcgatctctcgtgtggaagaagaagaagaacacgatgggaacaatgggtaaagcattctacagcgtaggattctggatccgtgaaactggtcaagcacttgatcggctcggttgtcgcctccaagggaaaaatcatttccgagaacagctatcaaggcaccgcacactcatgaatgtttttgacaaaacccctaatgtggataagggggcttttgtggctcctaacgcttctctctctggtgatgtccatgtgggaagaggttcttccatttggtatggatgtgtcttgagaggagatgctaacagcattagtgttggagctgggaccaatattcaggacaacgctcttgtccacgttgctaagaccaacttaagtgggaaggtcttacctactgtcattggagacaatgtcaccattggtcatagtgctgttttacatggctgcactgtcgaggatgaggcctatattggtacaagtgcaactgtcttggatggagctcatgttgaaaaacatgccatggttgcttcaggagctcttgttaggcagaacactagaattccctctggtgaggtttggggaagcaacccagctaaatttctgaggaaggtgacagaaga

SEQ ID NO: 96244 - DNA, 463 bp, Arabidopsis thaliana columbia
ccctacgacttatatagggaacagctggtacgcctgcaggtaccggtccggaatttccgggtggggccacgcgtgcgattttatgcgggctataaacacagatttcgataggattattgcaatggtgcaaaaactggcaggacgataattggggacttttcaccagtgaacatggatactgctgttgctattcccactctcgaggcgacttatagggcgtgctgcagatgctgattctgtccaagctatgataataaaacttacccgaaggggagggcccacagcttaaatccaggggaaaggccggtcctcctacacgtgttgcagtgctcacatggcgatcacttttagttatgtcaagagaatggaaatactattggctccgacttatcctctacatgattcttacacttagtattggcacattatattctggcttaggtcactctttgtcttctgttgc

SEQ ID NO: 96245 - DNA, 703 bp, Arabidopsis thaliana columbia
  unsure (1)..(703): unsure at all n locations
aacagtaccgtttgagctaagctttgattactagtcgtcacacaagacgtccgaagaagaggtaatgaagaacgttgaaagtagtggtgaatgtgttgttaaggtgaaagaggaagaacataagaatgttctgatgctaagattaaactatgactcggtgatatccacttggggagaatggaggagaaagtactcatcagaagcaatacgttggtggatgtttaccatcaagtgggtttggagatggaggtagagaagctagagtttcgagatacagagagaagaggaggacaaggttgttttctaagaagatacggtacgaggtacgtaaattgaatgcagagaaaagaccacgaatgaaaggaagattcgtgaagagagcctcgctcgctgctgctgcttcaccattaggtgttaattactgaatagttaatatctattcatgttatatctcactttacaaatttcggtgaatcttttttcttctgaaacaacagaagttattttggcacttaattgtgctttgaggacttgtatgtacatagaagtaaccaataataatgtgacttttacttgtattgatagcactgatgtatatatctggtaataagaatgtgcaaactgaaaaaaacaaaaaaaggannnnnnnnnnnnnnnnnnnnnnnnnnnnnnnnnnnnnnnnnnnnnnnnnnnnnnnnnnnnn

SEQ ID NO: 96246 - DNA, 453 bp, Arabidopsis thaliana columbia
  unsure (1)..(453): unsure at all n locations
gntgagggnccgggncngaantnccgggnagcccactgtgccggagtatttctccgttcgtnctctccctctctctcgcttcacgttggcgcccgatcggacaaaagtaaacgacaatggcggatgttttggtgaaatctatgcacaaggaagaagctctgatggagaagatcgctgggaagatccacgatcacgactcttcgtcgtcgtctgattccgagcacgagaaaccagagtctccgtcagctttgaaggccaagatatatcgtttgtttggtagagagaagcctgttcataaggttctcggtggtggcttaccggctgatgtggttctttgtggagggacaaaaaacttctcagcttctgttcttggtgtagcgacctgccatatggggntctggtttgaattggttgaggatcaattttctttnagncttggtgtggnancatttt

SEQ ID NO: 96247 - DNA, 363 bp, Arabidopsis thaliana columbia
gaacagcactagtgttcatgcttctatcccaagaagaagctacagagatgcatcatctatctacacttgattaattttaacaaatattcttctgtgtgatcaattcatataatttaaattagatgcataagatttatttgtttgtaaattcagcgaacaataaaagggttgtataaggaaggtattggagatgtgttccaacttccaagtttgttcttgcttttatgtaactctttcttgtcattttagagatgcactaactttttcccccatttgtaatcttttaaggattgaatgaaaatcaaatttgttggttgatgacaacaagattgataaataaaaaaaaaaagggcggccgccgac

SEQ ID NO: 96248 - DNA, 713 bp, Arabidopsis thaliana columbia
  unsure (1)..(713): unsure at all n locations
cgagtcgacgcagcctctgtactgagtcgaaataacgacagaggggggaagcagacccaaaagaaaaacacacacaagacttggcttacaaaacaaacaagtcttcaagaaacttggaaagctaagagctatggctatggagttagagcttgatgatgatgtcttctttgcagacataagcaaacagatctctcttctcatcatggatgaagatgaacacttaaaccctgtttctctctcttcctcctcctcctctctctcattccagggtttgttcagaggaggttaccaaacggctccatatatgtatcaacaagaacagagcaaagggactggtgtgttcatccctaaatcgtctcagcctagaagaagacctcatcatcatcagaagcaaggtaggtatagttccttcaacgccaagcaacaacactctcttcatcaaaacagacaagagtatcagcaaaatcatgagaactcaagaagtactctcaccacttcacaaccaataacaacaacaagagcaacatgaaccagcactagtgttcatgcttctatccccaggaggagcttcagagatggatatctttttcacttggtaattttacaaatattttcctgggggncaatcntataattttaattggtnctnnggttttttgttgaaattcnggcataaagggttttggnggtttgggtntnccctccaggtntnt

SEQ ID NO: 96249 - DNA, 363 bp, Arabidopsis thaliana columbia
  unsure (1)..(363): unsure at all n locations
aattgtttgtntgaagaaagaaaccgaatcgattcaatttcaacgtctcgtccttcaattttcgttttccgagaaaatttaggaaagaaagagaaagagagggcagagacaaaaatttcttcgccgtctgagtgggaaagatggcggaggatttcgctagagcggtagacgatgggcttaaactcgcgaaacggatttatttcggcaaagaccgagccgttgcggcgccgagaccacctgctccgatggacagatcttccactacgcagccttacctttcctacagcacctatgggttacggcgttatacccgncccggggatttttggtaancccgggtttncctaggtnttaagcttaang

SEQ ID NO: 96250 - DNA, 428 bp, Arabidopsis thaliana columbia
cacaagtgaaggttcaagatacaacctcacttttaccttaggcgatgctaacgatgcgtgcggaggacatttcgtggtgggtgctcaagctggctccgtaactcaaaacttcacattggagagtaatgggactggctctggtgagaagtttgggttagtgtttgaagcagacaaagatgcagcacagataagtttcaccagctactcagttacaatgacaaaagagaatgttgtttgtggtcctgtgattgatgaagtgatggtacatcctcttggtggaacagcctcagtaaaacccacttggctgctacttattttcgctttgttgtatgttgcagttctctgattgaaactgtttgggagagaggtcataaagaagatatttttgcaaggagatgtgataatcattctagcttcatgatttatat

SEQ ID NO: 96251 - DNA, 957 bp, Arabidopsis thaliana columbia
  unsure (1)..(957): unsure at all n locations
aggattctcattgttcctttgttagacttatccatttcacattccatttaaactaagagattggattaaattttcagaggaatggttcgaaggcaagcgacaacaacagactgtaccctgctcacagggagacattctcagccacagacgaagaagaaaagattcttcaaatcgacaggaaacacatcagttcttacacaagacgcaacagaccagacatgttctactcatcccacctcatcctagacagtgctggcctgtctgaaccagttttcgccacgccttttagcccgtcctcgtcgcatgaagagattacaagccagttttgcactgcagagaacagtcctcagttatactcagctacttctagaagcaaacgcagtgctttcaccgctagttctatagcaccgagcgattgcacaaaaagctgctgtgatggtgaccatccaagctacatggcttgtacagagtcctctagggctaaggctaggtccgctagtgccccgaagtctcgaccacagttattttacgagcggccttcatcaaaacggtttggatttgttgatttgccgtactgtggtgatacaaagtccggtccccagaaaggctctgctctgcatactagttttatgaacaaggcttatcccggttcaggtcggttggaccgtctcgggatgccaattgggtataggtactgagaacgttgttggaccctttaacctggttttgttgtagatcagtggattgagctttgcttctaattttctttgtttgtagtttggagctaagtggatttaatctaaaatgcaaatagaacttgcttaatccaaaaaaaaacacaaaaaagggcggccgctctagaggatccaagcttacgtacgcgtgcatgcgacgtcnnnnnnnnnnnnnnnnnnnnnnnnnnnnnnnnnnnnnnnnnnnnnnnnnnnnnnnnnnnnn

SEQ ID NO: 96252 - DNA, 378 bp, Arabidopsis thaliana columbia
  unsure (1)..(378): unsure at all n locations
cttaanttaaaccananccacatgttttctattggtcctaaaccgccccctccggcattcatccagattaccagggatctccgccgtttccggtaaagagctgatactttccggcagggtacgggcggtggagcccaaagaagccaatgcggttgtggcgtcggagggatatttactgtaggacgtggggccggcttgggaaagagaaaaggcacccgggaaaggttccttacacgtgccactgttcggggaagacccagacattgggccgaccacgttgcttgaagaaagggattcatttgggatatattcggctttggcggggccagaagttcaccatnntcaattgnnggatttncccctccgttttttttgnng

SEQ ID NO: 96253 - DNA, 503 bp, Arabidopsis thaliana columbia
agcccacgcgtccgcggacgcgtgggttgcaatggcttccttcacaacaacttcttcttcctcgcttctcctcaaaactcttctccccgtaagccacctgaatcgtttctctacactctctggtatccgcgttggcgattcatggactcctctgctccggaacatctccaccgctgggtctcggcgtcgagtggcgattgtgaaagctgcgacggtggattcggattactcgtcgaaacggagcaatagcaatgagcagagagagacgattatgcttcctggttgcgattacaatcattggctcattgtaatggagtttcctaaagatccagcgccaagtagggatcagatgattgatacttaccttaacactcttgctactgttcttggcagcatggaagaggcgaagaagaacatgtatgcattcagtaccacgacatatactggattccaatgcaccatcgacgaagaaacatctgagaagttcaagggtttgcctggag

SEQ ID NO: 96254 - DNA, 463 bp, Arabidopsis thaliana columbia
aaaccaacaacaaaaagttaaagaaccatcttatcatcataatcataatcatgataccacaaacttaaacctctccattgcaccatcatcatcatatcaacattacaacaactttgatcgtataaaagagattatggcgagcgagcaaattatgaagatagcgatgaaggagaaagcttacgctgaggaagctaaaagagaagccaagaggcaacgagagatagcggaaaacgagtttgcaaatgccaaaaagattaggcaaaaagcacaagctgaactcgagagagctaagtttttaaaggaacaatctatgaagaagataagttcaacgatcatgcaggtcacttgtcaaacatgtaaaggacagtttcaagcagttgcggttccggcggctacggctgatgagacgtctcttgtcgtgagttacatgtcgtcagcgaatactgacggagagttggaaaat

SEQ ID NO: 96255 - DNA, 459 bp, Arabidopsis thaliana columbia
  unsure (1)..(459): unsure at all n locations
gatttctggcattttagcagatatgagaaagatatttccatttgagcttttccacttgggtggtgatgaagttaatacagattgctggaaaaacacaactcatgttaaagaatggcttcagggtcgcaacttcacgactaaggacgcatataaatactttgtactccgagcgcaacagatagctatatcgaaaaattggacacctgtcaactgggaagaaaccttcagttcctttggaaaagatcttgatccgcggactgtgattcaaaactggctagtgtctgatatatgtcaaaaagcagtagcaaaaggtttcaggtgcatttccagtaaccaaggatattggtacctcgaccatttagatgttccgtgggaagaggtttttaacaccgggcctctaaaatgggntcnggggtccttctttccnaaaagctttttcatcggggggggnagtttcat

SEQ ID NO: 96256 - DNA, 478 bp, Arabidopsis thaliana columbia
  unsure (1)..(478): unsure at all n locations
cagctannnnnnnnnnnnnnnnnnnnnnnnnnnnnnnnnnnnnnnnnnnnnnnnnnnnnnnnnnnnnnnnnnnccacgcgtccgctgaagggttacatggtaggaaatgggctgatggacgatttccatgacaggcttggtcttttccaatatatttgggcgttgggttttatatctgaccaaacatacagcttactgcaacttcaatgcggtttcgaatcgtttattcactcctccaaacagtgtaacaagattctggagatagcggacaaagaaataggtaacatagaccaatacagggtcttcaccccagcttgtgttgccaatgcttcccagtcaaatatgttgctaaagaaaagacctatgactagccgcgtgagcgaacagtatgatccttggacggagaaacacactacaggttattttaatcttccagaggttcaaaaagccctccatgtcccaccaggacttgccccat

SEQ ID NO: 96257 - DNA, 506 bp, Arabidopsis thaliana columbia
acattttccccagggaaacaggtatggccattggttcccccaagctttaatacccctcccctatagggaaaattgggttcccttcaggtaccggtccggaatttccggggtggccccacgcgtccgttttttttttatgtatactcaattttttcaaggccaaaataaaatattgtatgtcaaaatacaaatacagatactccactgatccactcaaagcttgcaaactttgaattgaagactataaataagtggagaaaatgaaataaacaatgaggacgaaactctgaagtaaggaacatatagccaagccaaaacaggaatacacccacttaccctcaaatgctaaaattggatatttaggaaagaagaagaaaaaaaaacaagatttgagactcaattgagcaaagaatagtcttcaaaaaaaaaaaaaaagggcgaccgctctagaggatccaagcttacgtacgcgtgcgtgcgacgtcataatcttctatagtggacct

SEQ ID NO: 96258 - DNA, 593 bp, Arabidopsis thaliana columbia
  unsure (1)..(593): unsure at all n locations
cnnnnnnnnnnnnnnnnnnnnnnnnnnnnnnnnnnnnnnnnnnnnnnnnnnnnnnnnnnnnnnnnnnnnnnnccacgcgtgcggcagagcaaagagtttttgtgtggctagtggcatcaatggagctctcgatctcacaatcaccgcgtgttcggttctcgtctctggcgcctcgtttcttagcagcttctcatcatcatcgtccttctgtgcatttagctgggaagtttataagcctccctcgagatgttcgcttcacgagcttatcaacttcaagaatgcggtccaaatttgtttcaaccaattatagaaaaatctcaatccgggcatgttctcaggttggtgctgctgagtctgatgatccagtgctggatagaattgcccggttccaaaatgcttgctggagatttcttagaccccatacaatccgcggaacagctttaggatccactgccttggtgacaagagctttgatagagaacactcatttgatcaaatggagtcttgtactaaaggcactttcaggtcttcttgctcttatttgtgggaatggttatatagtcggcatcaatcagatctacgacattggaatc

SEQ ID NO: 96259 - DNA, 983 bp, Arabidopsis thaliana columbia
cagctactcatacgactcactttagggaaagctcgtacgcctgcaggtaccggtccggaattcccgggtcgacccacgcgtccgcaaaaccactcccactttatttcttcttctctggttttcttaccaaaagaaactttcttcgtcttcctctgtatttaagctttaacaccctgtttttggtttccaacgttcaatcttcatcttcttctcgctgaaggtgtgtttggctctaacggtttaaagctttcttgaaacaccaattgaatcttttctctctaccggcaaaaaaaaaaagattagtccttttaggtctggaaacgccaagatcactcgttctaaaccttagattttgtctgcatttcgggataatcatttcatcgtcagggttcttcaaccaaactacatttacagaagaagaagaagaagaaaagttcgttactttttatgcgtttggataaacaaactcaagtttcttcttcatacatcgatctgattttccagatcaaacttcgaaaagagaaaaagccttctttaaatgattcgtgagttctccagtctacaaaacgacatcataaacattcaagaacattattctctcaacaacaacatggacgtgagaggagatcataaccggaaaaacccgagttttcgtggttcagctccagctccgattatggggaagcaagaattgtttcggacattgtcgtcgcagaacagtccaaggaggctaatatcagcgagttacttcagtttagaatcaatggttgtgcttgttggtctcacagcatctctcttgatcttaccgttgattcttcccccattgcctcctcccccttttatgctgcttttgattcctattgggattatggttttgcttatggttcttgctttcatgccttcttctaattccaaacatgtttcttcttcttccccttttatgtaataaacgtttctttaattgaagaaagaaatccttaacc

SEQ ID NO: 96260 - DNA, 377 bp, Arabidopsis thaliana columbia
tccaaccaaaaaaaggaaaccccaaaaccaaggtttttatgggtttcctaaaccatggtttggtcctcccttgccttggccggaagggttgggaagcctgccgaataaaatgtcctgggaggcggccgggtgaccatgaggaaaacggtcgccaagccaaagggtccataaggcagccaatggtccggatctgaccgagtaaggtcctggggtccattttccggcgaggcccccgggttaccttaccggggggttcccgggggactacggttgggacaccgttggtttatccgccgacccaaagaccttcgccgggaaccgggggctagaagttttccacagaagatgggccatgctcggagccctaggttgcgttt

SEQ ID NO: 96261 - DNA, 403 bp, Arabidopsis thaliana columbia
cccgcggccccccccgcgtccgagaagaagaagaaagatggagaagaaatctcagatttcgtcaacggaagctgttttccttggagctctagctccaggcgttaatggtccaacatggaacacattgagattcgcgtttctgctactgggtctatgtctagctttcatgctctctgtagctttcaccagtggccaatcaatgttgcttgttcatgttggctttctcattgttatcgcatctactctctttatcctcctcaattggtttcttgctcagacaggcttagtacaagtggaaacacatatgcaggagctgaatttgttacccgatgataaaaccacatgatcatggtcaaacgggtaaaagcaaagcttgtgtaacagaacaacagttaacaacaga

SEQ ID NO: 96262 - DNA, 411 bp, Arabidopsis thaliana columbia
agaaaattaggggggtcatgggagctcctctgtaccgacctccaagcaatcagatggtggaggatccttgggttcctatgtcctcgccggtggattcgaaacccggttttccaagggagggaatcaacctaggattttttcaggaggccaggttggtccgtcctgaaggttgggaggacttgttttttttctgcactggggattccgctcctgtggctagggaggttggggccagaccacggggggggggactcctcggccttgagggggctggtaaaacctctctattccgcgctatactgggccaaagcatgctaagttcgatgactcatgtggaaaatcttcagatccaatctgatgttaaagaatgtattattgggggggttggttactcggacactgggggcgtaa

SEQ ID NO: 96263 - DNA, 657 bp, Arabidopsis thaliana columbia
tccgtttatatatatattccaagttaaacttcatatcatacacacaaacctaaaacaccgaaacaaaaacaaagagatttaaacaagaagagttattatggcgagcttgctagataaagccaaggacttcgtggcggataaactcaccgcgatccctaaaccggagggttcagttacggacgttgacctcaaagacgtgaaccgtgactcagttgagtacttggccaaagtctctgtcaccaatccttacagtcattcgattccgatctgtgagatcagtttcactttccacagcgccggcagggagattggaaaggggaagataccggacccgggttctctgaaagctaaggacatgacggctcttgatattcccgtggtggtgccgtatagtatactgtttaacctggctcgagacgttggtgtggacttgggcatttactacgagctccaaatcggtctaaccatcgaccttcctgttgtaggggaatttactatccctatctctagtaagggaggaatgcaaacttcctacttttaaagatttcttctgatcgcacaaaacctatatataagaccacacatcgttatgatggtgaatggtgatcgtcgtaatgtaataaggtgggtttgctataactaataatatgttatttt

SEQ ID NO: 96264 - DNA, 502 bp, Arabidopsis thaliana columbia
aaaaccaatttcttcttcttcttctctcaagtttgagtctgaggcatcacaacagataaagtcttgaactttgatcaagaattctaaacggagtttttgctcttctcgtcggtgaaagaaaaatcgagatgggttcaactccgttttgctactctatcaatccatctccatcaaagcttgatttcacgaggacccatgtgtttagtcctgtttctaaacagttttacttagatttatcatcgttttccggaaaacccggaggagtatctgggtttaggagccgtcgagctttgctcggagtaaaggcggcgacggcgttagttgagaaggaggagaagagagaggcggtgacggagaagaagaagaaatcgagggttttagttgccggaggtggaatcggaggattgggtgtttgctttagcggctaagaagaaaggattcgatgtgttagtgtttgagaaagatttgagtgctataagaggagaaggaaaatacagaggcc

SEQ ID NO: 96265 - DNA, 479 bp, Arabidopsis thaliana columbia
aagaaagaggccaaagttattatggacaaacttcgtttaccaaatggtctagctctaagcaaaaacggttcgtttgtagtcacatgcgagagtagtacgaacatttgccatagaatatgggtcaaaggtcccaaatccggaaccaacgaggttttcgcaacgctccctggttccccggacaatatccggcgtacgccaacaggcgatttctgggtcgcattacattgcaaaaagaatttgttcacacgtgcagttttgattcacacttgggtcggaaggtttttcatgaacacgatgaagatggagactgtaattcatttcatgaacggaggaaaacctcatggaattgtcgtgaaactctctggagagacaggagagattcttgagatacttgaggacagtgtaggggaagccggtggaatacgttagtgaggcttatggggcaaaagatggaaagttatggatcggatctgtgtatt

SEQ ID NO: 96266 - DNA, 479 bp, Arabidopsis thaliana columbia
ccatcttcttcttcttcctctctccttctccggccactttcctcactctctggtctccctatatcagcgctttttagctgatcctctctccggcatttctctctctctcttttttttagccatggagaaatttgcgcctgtcgctgctctgttactgcttcttctctgttttccggtagctttctccggtcatgattatggtcaagctctttccaagagtcttctcttcttcgaagctcagagatctggtgttcttcctcgtaaccagagagtcacttggcgctctcactccggtctcaccgatggcaaatcaagcggcgtgaatctggtcggaggttactacgacgccggagacaatgtgaaatttggattaccgatggcttttacggtgacgatgatggcgtggagtgtgattgagtacgggaatcaattacaagcccacggcgagcttggaaactccattgacgcctttaaatggg

SEQ ID NO: 96267 - DNA, 1168 bp, Arabidopsis thaliana columbia
atgatcctgccagctacaatacgactcaccttagggaaagctggtacgcctgcaggtaccggtccggaattcccgggtcgacccacgcgtccgtggcgctctcactccggtctcaccgacggcaaatcaagcggcgtgaatctggtcggaggttactacgacgccggagacaatgtgaaatttggattaccgatggctttcacggtgacgatgatggcgtggagtgtgattgagtacgggaatcaattacaagccaacggcgagcttggaaactccattgacgccattaaatggggtactgattatttcatcaaagcccatcctgagcccaacgtcctttacggcgaggttggagatggcaacaccgaccattactgttggcagagaccggaagaaatgacgacggaccggaaagcttacaggatagatccgagtaatcccgggtcggatcttgccggagaaacagcagccgccatggccgccgcatcaattgttttccgccgatctaaccctgtttactctaggctactactcactcacgcctatcagttgtttgatttcgccgacaaatacagaggaaaatacgacagcagtatcactgttgcccagaaatactaccgatccgtcagcggttactatgacgagttattgtgggccgctgcgtggctataccaagcttccgaacaatcagttctacttggactacttgggttcgcaacggtgacgccatgggttggtaccggttggtccatgactgagtttggttgggacgttaagtacgctggtgttcaaacccttgttgccaagtttttgatgcaaggcaaagcaggacgtcacgcacctgtgttcaggaagtatcaagagaaagctgattcctttatgtgttccttgttgggtaaaagctcgaggaacattcagaagacaccaggtggtttgattttcagacaacgttggaacaatatgcagtttgtcacaagcgcttccttcttgaccacggtttactcagattacctaacttcttctcgaagcaacttgagatgtgccgcgggaaatgtcgcaccttcgcagcttctttcctttgctaaatctcaggtggattatattcttggagataacccgagagctaccagctacatggttggttatggtaacaatttccctcagagag

SEQ ID NO: 96268 - DNA, 373 bp, Arabidopsis thaliana columbia
catttcttcaatttcggttaaaccattttcgttctttcttcttttaacaagaaaccaccgctctgtacaaaacaaagtctccgtcgtttcttctccgttctccggtcaattcgaattcctcagagagaaatttgtgctcgcgagttccgcgtgaaatacatggaaatgttggcggcgttggactcgcgttcttctctccatcttcatcgttccatgtctcgcgttgacctttttgccggtgttcgtatgaaaccatctcctacaagtcctgttccgaatacgcctcgaatatgtggaagtaaactctgttgattcgactcttcctcttccctttagtagttcctccgtttgtttttcctttgcatctgaattt

SEQ ID NO: 96269 - DNA, 601 bp, Arabidopsis thaliana columbia
  unsure (1)..(601): unsure at all n locations
angccatttggttnncttaggtgccaggcccccatggggttngtttttcagggaaggcttcnacaaccngttttggattttgggntcaccatgccggtctgcctgcgngaccntngacggtcacncgggtttttcccaggacntttttgggccttgngatcaacgaagcaaggcctcacggacaaggcttccattatagggggagcatggttatgggtnggttcagaaatgattcatcttatggagcttcccaaatcccagatccattaacaggtagacccgagcacggaggccgggatcgacacgcttgtattgcaatccgtgatgtttcaaatctgaaagagatcttagacaaagctggaattgcatatacaatgagtaagtcagggaggccagcgatatttactcgtgatccagacgcaaacgctcttgagttcacccaagtttgatttgagtctatttgtagatgaatcctctaaactttcacttgattatcagttgtaaatgctcttcatatagaactgcaaaaagcaaaccaaatccttgttgacttattatataataccacaatacatattcacaggggnancagacaagnaag

SEQ ID NO: 96270 - DNA, 528 bp, Arabidopsis thaliana columbia
  unsure (1)..(528): unsure at all n locations
gaaaaatgggacgcctccaggaaccggtccgggaattcccgggttgacccacgcgtccgtccggttgggagaaggcgacagaagggggggcatgaacccgtaagctcccaagcagtgggaggagccctgggctctgaccgcgtgcctgttgaagaatgagccggcgactcataggcagtggcttggttaagggaacccaccggagccgtagcgaaagcgagtcttcatagggcaattgtcactgcttatggacccgaacctgggtgatctatctatggccaagcttgatttcagtctatttgtagatgaatcctctaaactttcacttgatgatcagttgtgaaggctcttcatatagagcgtgcaaaaagcaaaccaaatccttgttgacttattatataatacccccaatacattgtcccgtgaaaaaaaaaaaaaaaaaaaaaaaaaaaagcggccgctctagaggatccaagcttacgtacgcgtgcatgcgacgtcatagtactctantagtgtcgtcctaaa

SEQ ID NO: 96271 - DNA, 585 bp, Arabidopsis thaliana columbia
  unsure (1)..(585): unsure at all n locations
gcggtaccggtctcggattcccggctcgacccacgcgtccggagcctaatccaagattctcttccatggcttctattttcagaccttcttcagcttcacttgatttacgaccaaaggttatttgcacgaatctctctacgaaagagcggtttgagtttcagaagaagagtgtgaggaaagaaaggatcaatgttaggttttatagcttgaaggctaaggcacaaggatcgtcaattgaagggattagtgttgtacaagagaaagagcttaacaacaaaaccgattatggagttgttggggttcatcatgtcggtctgctctgcgagaacctagaacggtcactcgagttttaccagaacattttaggccttgagatcaacggagcaaggcctcacgacaagcttccatatagaggagcatggttatggggtaggttcagaaatgattcatcttatggagcttccaatccagatccattaacaggtagacccgagcacggaggccggatcgcacggttttnttcaaancgngntnttaaatctgaagggtntttgcaaantggnttcatttcatgggngncgggtc

SEQ ID NO: 96272 - DNA, 542 bp, Arabidopsis thaliana columbia
  unsure (1)..(542): unsure at all n locations
atgatattgccnnnnncccctgngcctcagagggtataccaaagcttgatatcgaattcgcagccgcccggcgatagccatgccgcccggccggggaaatattggaaagaatacaatggtggttcaaggtagcacctactgtgacatttgcaaattcggcttcgagactcctgaatcctcctacttcatccccggtgcaacggtgaagctatcatgcaaagacaggaagacattgctagaggtttacacagacaaagctgtatcagacaaagaaggaaagtattagttcattgtccacgacgatcacagagaccagatgtgcgatgttttgcttgtgaaaagctcggataaaacctgctctaaaatctccgttggacgtgagaagtctcgtgtgatcttgaaccattacagtggcattgcctcgcagatcagacatgctaacaacatgggatttggagaaggaagtgagtgatgtgttctgctctgctttgtttcagaagtatttggttgatgaagatgaggatgatattaaaaaccatctc

SEQ ID NO: 96273 - DNA, 1014 bp, Arabidopsis thaliana columbia
  unsure (1)..(1014): unsure at all n locations
cagctactaatacgactcacttagggaaagctcgtacgcctgcaggtaccggtccggaattcccgggtcgacccacgcgtccgcttcttcctagattcgctcctccactgtcttaaatttcactatcttcttcttcattttccttccttctcacttcaaatccataatcgctctacttctctctctctctctagattcgaaaaaatggcgaaactggtgatgttgttggttctctgtatcttaccggcgatagccatggcggcaaggaggggaaatattggaaagaatacaatggtggttcaaggtagcacctactgtgacatttgcaaattcggcttcgagactcctgaatcctcctacttcatccccggtgcaacggtgaagctatcatgcaaagacaggaagacaatggaagaggtttacacagacaaagctgtatcagacaaagaaggaaagtataagttcattgtccacgacgatcacagagaccagatgtgcgatgttttgcttgtgaaaagctcggataaaacctgctctaaaatctccgttggacgtgagaagtctcgtgtgatcttgaaccattacagtggcattgcctcgcagatcagacatgctaacaacatgggatttgagaaagaagtgagtgatgtgttctgctctgctttgtttcagaagtatatggttgatgaagatgaggatgatattaaaaaccatctctaatctctctgtttaatcttatgatctgctgttttcttcattaatgagtttcgagttatggaagagatatatttgtatttgtttgattacttatttgttgtctttagagatgttgactctggtgatcggataactatctgtttgtgtaagcttcttatatattgatgtgtcatttccttgcttaggaagtgtcttttattnnnnnnnnnnnnnnnnnnnnnnnnnnnnnnnnnnnnnnnnnnnnnnnnnnnnnnnnnnnnnnnnnnnnnnnnnnnnnnnnnnnnnnnnnnnnnnnnn

SEQ ID NO: 96274 - DNA, 717 bp, Arabidopsis thaliana columbia
  unsure (1)..(717): unsure at all n locations
gncccttcncaatcnccgacccatgggnccccgnccccggcttttccntgtaaatggctncatccaaggggtggttttngaggttttgnccanctnccatngccttcaccancatgatcccttgatttttgggaccagaccattcgtcatgcttatgagcttttggaattgaatggaaaccgggttatcgtcatcggagaactcgcttctgaacttggtgttggatcatccatcccggttcataccattctaaatgactggataagacatactgacgggaagctgagtttcttgggttttgtcaaactgctgcacggtgtctcgactcgacaatctttagcgaaaacgcgatgaggaaagtgactcggtgttataacggattcgaaagaggaagaacatacaactgcaagaagcaaatgggtggattggggttgggaattggaatttttttcaggacccattcctatgtttatagtgttagaaaaagaatgctaagttccgacaaagaaagagagtatccagaaaaatccgacaggcctggagagttgtataataagatgataatccacagtcgtgttcttccaaatcatggaagacagacattaagaacatccctttctcttttcaaaaaaaaaaaaaaaagnnnnnnnnnnnnnnnnnnnnnnnnnnnnnnnnnnnnnnnnnnnnnnnnnnnnnnnnnnnnnnnnnnnnnnnnnn

SEQ ID NO: 96275 - DNA, 603 bp, Arabidopsis thaliana columbia
  unsure (1)..(603): unsure at all n locations
tggagagcatggccttcaacatcacggccagaatagatgatgtgctttatgttgatgatgccatgagaagatccatctctgtcacagaatcgctatccctattcagcatcaatggactcaaccctcaaaaagcgttctctgtgcagagctctccgcacggttcaccatttgcaacgcctgccctaagtgtagcatcaagaagcccgaggagagcaccgccgctgtattcagtgaagaggaatgggacgagagagaagggaatagtgggagaaacagagaaagcatggtcgtatgcagggaatctgagttcaagaagagtaacgggagtgacgccggaaagagattaagattgaaaatagaagaatgtaaatcaatggttgtagagactgtagttgtttcttgtttgtctgactacgaagacgaatgtggtaatagcaacaagaatgttatcttatgtggagttctgaaatgttgttaccaaatcaattccttagcgcatttaccaagtttaaaaaaaaaaaaaaagnnnnnnnnnnnnnnnnnnnnnnnnnnnnnnnnnnnnnnnnnnnnnnnnnnnnnnnnnnnnnnnnnnnnnnnnnnngg

SEQ ID NO: 96276 - DNA, 592 bp, Arabidopsis thaliana columbia
ttcggtctcgtccgcccacgcgtccggtttttgtttacagagcatattacagatgcacgcatcgattcacacaagactgtttagcagtgaagcaagttcagaaatcagacacagatccttcccttttcgaagtgaagtatctcggaaaccacacttgtaacaacatcacatccccgaagacgacgacgaacttctctgtttcattgacgaacacgaacatctttgaaggaaacagagtacatgttacagagcaatcggaagacatgaaaccgaccaagtccgaagaagtgatgataagccttgaagatctggagaacaagaagaacattttcagaacgttttctttctctaaccatgagattgagaacggtgtgtggaaaagtaaccttttcttgggaaatttcgtggaagatctttctcctgcaacatcagggtctgcaattaccagcgaggttttatctgcacctgctgctgttgagaattccgaaactgcagattcgtatttctcgtctttggacaatattatcgatttcggacaggattggttgtggtcgtagctttgaataattgatttggtgaatgtaatgtctct

SEQ ID NO: 96277 - DNA, 504 bp, Arabidopsis thaliana columbia
  unsure (1)..(504): unsure at all n locations
ctccgtttcaccgattagtaggcctttttttttttacgagagagctgccactgaggccttgactgattacagagaaggtgtcgctgaaatactcggcgatgtctctatctttactgcttcaggccaacgcgtgcaattcagtgatctctgggatcagaaagatggaattgctgccgttgtactcttgaggcatttcggatgcgtttgctgttgggaacttgctactgctttgaaagaggctaaaccgagatttgatgcggctggtgttaaattgatagctgttggagttggaactcctgacaaggctcgtatacttgcaactcggttaccttttcccatggaatgtctttatgcggatcctgaaccgcaaggcattttgatgttcttggtttattacttcggttttgggccgcacttttnttnaaaccccagnctagnaccaaggtcttntnaaanatttagcgagattccgtgaaagcaccaaaaaaatttcacccctaggag

SEQ ID NO: 96278 - DNA, 587 bp, Arabidopsis thaliana columbia
tctatgacgtcccatgcacgcgtacgtaagctcggaattccgttcgagtgcgtgtgctagcgggaacttgctactgctttgaaagaggctaaaccgagatttgatgcggctggtgttaaattgatagctgttggagttggaactcctgacaaggctcgtatacttgcaactcggttaccttttcccatggatatgtctttatgcggatcctcagccgcaaggcatatgatgttcttggtttatacttccggttgggccgcactttcttcaacccagctagcaccaaggtcttctcaagattttgcgagaattcaagaaccaccaaaaatttctccatagaatcccactcctgaaaaacgaaaccattgtggtggcaccagggaaggacctttgggttcaaaaggaaaaaattatcggtccggtcaaaaagacaaaggcccgggaaaccttcctccctgggagaaggcacttatgggcggcgcaaagcactgggtgctgaaacataggggaacaaagccctttgggttggccccctacctaaaaaaaaccggtttttggagcttgaaaaaaaggtcttttttttttaa

SEQ ID NO: 96279 - DNA, 1136 bp, Arabidopsis thaliana columbia
cttatttcgggtcgacccacgcgtccggtgactttggagactccaagaccgcttctctctgcgtcttgagactagtttacacaaatgatggcggagagattgttaagggggtctgctccaacttcttgtgtgacttgaagccgggtgatgaagctaagatcactggacctgttggcaaggaaatgcttatgccaaaagaccccaatgccaccatcatcatgcttggaacaggaactggaatagctccattcagatcatttttgtggaaaatgttctttgaggagcacgaggactacaagttccatggtttggcgtggcttttcttgggtgtacccacaagcagctcacctgctatacaaggaggagtttgagaagatgaaggaggaagaacccagacagacttcaggctggacttttcggtgagcagagagcagacgaacgagaagggagagaaaatgtacattcagacaagaatggcagagtatgcagaagagctgtgggagttgctgaagaaagacaacacctttgtttacatgtgtggtcttaagggtatggagaagggtatcgatgacattatggtctcgcttgctgctaaagatgggatcgattggttggagtacaagaagcaattgaagaggagtgaacagtggaatgttgaagtctactaaggaagcttctgagggagtaattatataatgtagataaaaagcttctgatgcattgtgaaatcttcatatctgcttcttttttctttctcaaggattttcaatcaaaacattcaaaagagagcatcaataccaccaaactactctttctcacttgttgttcatgttatatttcttgcaacaatatagtgagttttgtgaaatatgtttttctcatctccctttttgaagggctaaatcacttttcagtaaagtcatcaaccgaacgacccttttgagcgaggtatcacaacacattcttctttgcttcgttgggtggcaatttcctgatttttgcaacgaaaaggccgctggttgctgaggtggaaggatcaaaccgcagtgtcttaggcgtgcgacacttctacacggccaatccttggccatttcaatctcttgtagctctgcagagaacttttcagaaggacttga

SEQ ID NO: 96280 - DNA, 312 bp, Arabidopsis thaliana columbia
gagaaatgcaaggaagcagaagcttgggtgtgtgtagcttgaaaaacaggtaacttcgctgggggaaggtgtatcattggaagctaaacttctgagccgaaaagaagcagctttgcgtcaaagagaggcggccctcaaagatgcaaggcagaatagagatgggactaatagagagactactgctcttcggtctcaagtagagactgcaaaactggtgaccgctgctatagtagcacaacttcaaggagcagaatctgtagtcaatggtctacggacaatgacgcatagaatgatattgaccccaaatgagat

SEQ ID NO: 96281 - DNA, 555 bp, Arabidopsis thaliana columbia
actgtcctacgatgtggtcacactatgcatctagaatgcacgaaagatatggggctacataaccgatacacatgccctgtatgctccaaatccatatgtgacatgtctaatctgtggaagaaacttgatgaagaggttgctgcatacccaatgccaaagatgtatgaaaacaagatggtatggattctctgcaatgactgcggctcaaacacgaacgttcggtttcatttgatcgcgcataaatgcagtagctgtggttcctacaatacaagacagacacagagaggctctgatagtcactcttgctcctctggaatgcctcaggttgttggttcaaccggttaatttttaaccagagctggttttggtgtctgaatttcccatgaggagattatttgtactttctataagtttggtatcagtcaatgcctttggttgttaacaattatatcatcacagattcaaaagctgctttgagccaatccaacttgcaagtctagaccattatagcccaaaacaaccatatcttgaaataaattatatatattaatgttt

SEQ ID NO: 96282 - DNA, 654 bp, Arabidopsis thaliana columbia
  unsure (1)..(654): unsure at all n locations
acatttttattttttataaaaacccaanacancagtggtgcctgggaatatataatgaaaaagctaaataacatttaagggtaaaaagattataagttttctttttttgacaaacaatatttttttacttcgtcctttgcattaaaagaagagatacaaaaaaaatgatatgattcaaccacaaacctatttgaatgtagcagacaacagcggtgctagagaattgatgtgtattcgaataataggagctagtaatcgccgatatgctcatattggtgacgttattgttgctgtaatcaaagaatcaataccaaatactcctctagaaagatcagaagtgtattacagctggaattgtacgtacttgttaagaactcaaacgtaacaatgggacgataatacgatatgatgacaatgccgcagttgtcattgatcaagaaggaaatccaaaaggaactcgagtttttggggcgatcccacgggaattgagacaattaaactttactaaaatagtttcattagctcctgaggtattataagatctaaatatcgatagcgatagttagtatcggattaaaaaaacaggtactgaaataaaattaattaatcgattttggatcacggataatcccttaattattaaataattaggat

SEQ ID NO: 96283 - DNA, 612 bp, Arabidopsis thaliana columbia
atcttgacccagagtatttcagacggcagcaactgactgagaaatccgatgtctactcctttggcgttgttctattcgaagctctatgcgctcgtccagccttgaacccaacacttgcaaaggaacaagtgagcttagctgagtgggcaccatactgctacaagaaaggcatgctagatcaaatcgttgatccctacctcaagggcaagatcacaccagaatgcttcaaaaagtttgctgaaaccgcgatgaagtgtgttctagaccagggcattgagagaccatcaatgggagatgttctgtggaacttagaatttgcgttgcagctccaggaaagcgcagaagagaacggaaaaggagtatgcggtgacatggacatggatgagattaagtacgatgatggaaactgtaaaggaaagaacgacaagagttctgatgtgtatgaagggaatgtgacggactcgaggagcagtggaatagatatgagcatcggtggtaggagtttggccagcgaagattcagatggactcactccaagtgctgtgttttctcagatcatgaatccaaagggacgttagagaagtcttataacacggtacaacactactacct

SEQ ID NO: 96284 - DNA, 552 bp, Arabidopsis thaliana columbia
  unsure (1)..(552): unsure at all n locations
gtntctgggncttggattccgtccnncccgggaaccccaaagggnccggaangggntttccggtgacatggccngggtgngaccagtccggtggtggaaactgtaangggaaggaccgcccaggagttctcgatgtgtatggagggaatgtgacggactcgaggagcagtggaatagatatgggcatcggtggtcggagtttggccagcgaagattccagatggactcactccaagtgctgtgttttctcagatcatgaatcccaaagggacgttagagaagtcttataacacggtacaacactactacctttctaaaccggctccatccaaaggagaccggttcgtttctcttttttatattttttttcctcttaactatttattattattctctttgctgttatttatttagaattttggatttgtgtatttgatactgccacgatggagagtgtaaaaaataatgtatttttttttcttctttctacaaaaacattaaacatgaatcgcgtcaatgtactatttggtttgttatctataacgtttttgg

SEQ ID NO: 96285 - DNA, 511 bp, Arabidopsis thaliana columbia
  unsure (1)..(511): unsure at all n locations
aacaaggaaaccgccgtcgccggatttgattgtgcatatccatgaagtagaagacgggggggcttactttctgatcttagaacggagtatatgtacagaagattcgcgtccctcaatttttgatctcaagggtcgggtttacctttttttccttcttatttttggtggctttgcgttttctcattcgacgatttctggatttggggatttcaaaaccatgaggaagaagctcgatactcggttcccagctgctcgtattaaaaagattatgcaagctgatgaggatgttggcaagatagctgtggcagtgcctgtcttagtctcaaaatcttttggagttgttcttgcaaagcccttttgttgatccgaccatattgaaattacccccttgaaaagaggnngccaangnctntanagcctcattgcaccctaaaaanatttttttgggaaggtnttaccgnggtttaatttttttngggnaagntttttggaaaggncccctncttttggc

SEQ ID NO: 96286 - DNA, 1085 bp, Arabidopsis thaliana columbia
  unsure (1)..(1085): unsure at all n locations
tgannnnnnnnnnnnnnnnnnnnnnnnnnnnnnnnnnnnnnnnnnnnnnnnnnnnnnnnnngaccgtaccgaaatttccggccccacgtcccgagacacgcaaacatatccattagggtcacaacggttcttacagcttctattaccagaaaggaaagaaagccgaaatttgtttcaagataaagtaatttaagttggagcttgtttcttggtcgtacagtgtcaggtgaatagagaagaagaagatggaaaacacagacgagcttgtctccattgagctaccagctccagcttcatggaagaaactgttttatccgaaaagagccggtactccgagaaagacggagattgtgtttgtggctccaacgggtgaagagattagctcgcggaagcagttggagcagtacctgaaggcccatcctggcaatcctgtcatctctgagtttgagtggacaactggggaaactccaaggaggtcttcaaggatcagccaaaaggttaaggctacaacgcctactcctgacaaagagcccctcctgaagaagagacgatcttctctcacgaagaaggacaataaggaggctgctgagaaaaatgaagaggctgctgtgaaggagaacatggatgttgataaggatgggaagacggaaaacgcagaggctgagaaggagaaagagaaggagggagtgacagaaattgcagaggcggagaaggagaacaacgagggtgagaagactgaggctgagaaggtgaacaaagagggtgagaaaactgaggctgggaaggagggtcaaacggaaattgcagaggctgagaaggagaaggagggtgaaaaggctgaggctgagaacaaagaggcagaagttgtgagagacaagaaagagtccatggaagtggatacctctgagttggagaagaaagctgggagtggagaaggagctgaagaaccttccaaagtttgaaggcctcaaggacactgaaaatgaaagaggcgccaggaagttgtttactgaagcctgatgtaaagaaagaagccctgccggaggaaaaagactgagaacaagggccacgtgacaaccgaagct

SEQ ID NO: 96287 - DNA, 504 bp, Arabidopsis thaliana columbia
cgtataggtggggccgcgattttgctttctaaccggtctatggcccgtaaacgcgcaaaatacgagcttgtccactccgtgcgggcccataccggagcagaggaccccgcctatgaatgtgcaactcaggaagaggatgaagatggcatagttggggtttccttgtcaaagaatctaccaatggtagcctgcaagaaccctaaagatcaatatcgcaactttgggtccgcttgttcttcccataagcgagaagtttcacttctttgtgaggttcgctaaaaagaagtttctcaaccccaagctaaagcattacattccggatttcaagctcgcattcgcgcattttctgtatccatgcgggtgggtagagcgcttaattgatgagatggagaagaatcttcatataactccactagacgttgaggcttcaagaatgacattacacaagttttaagtgtaatagttcaatttgggtggctctttgtaacgtcaaaccttttacta

SEQ ID NO: 96288 - DNA, 781 bp, Arabidopsis thaliana columbia
aggatccggacaagaaaccatcagtgaatgttattcagggtcctaaacctgggaagccaactgatctagggagaatgaggcagatattcttgaagctcaagacaaatcccccacctcacatgatgccgcctcctcctccagccaaagatgccaaagatgggaaggatgcgaaagatggcaaagatgcaaaagctgggaaagatgggaaggatgcaaaaggagggaaagacgctaaggacttaaaagatgggaaacctgcagatccaaaggtgacagaggaaaaacgtccttcacctgccaaagacgcaagtgttgaaacagcgaaacctgatgctgctgcctcgggagagggagagaaacctgtagctgtgactgaggccgagggaaccaaggcggagtgaagggtctttagtattactgttgggggattatttgatattgatgaagtcccaatagctgcgggcgaaaataagaagaggtaagttatgtgcacatagaagctcttatgggcgctgtctgtgagcacaacatttcctcttctggggagagaattttagtccttttgtttttggttattattttttattaccattatatttgttctgcaaaatttggttattgtcttggatgatgttcaccttaaatcattttggttccacgtattttacatttataagacttgagagaagtaaaggtttgttggatgaatcatttgattgtattgtgtgatgtgggcatgaggtagttgaggattgtcatggcatgtgaacgatccttcttt

SEQ ID NO: 96289 - DNA, 850 bp, Arabidopsis thaliana columbia
  unsure (1)..(850): unsure at all n locations
ctggagctcctttctcttctactcagtatacaccaggtggattattgtttaaaatggcagacgccaacatgcaatacgtgacgtcaacatcgttcttgctcttaatctatgccaaatacttaacctccgccaaaaccgtcgtccattgcggtggctccgtctacactcccggtcgtcttcgctccatcgccaaaagacaggtggattatctacttggagacaacccattaagaatgtcttacatggttggttacgggtccaaaattcccacggagaatccaccaccgtggctcctcattaccttgtgttgcaagccacccggccaagatccaatgccaccaaggatttgcaatcatgaactctcaatctccaaaccctaacttccttgttggtgcagtcgttggtggtccggaccagcatgatcgcttcccagacgaacggtctgattacgagcagtccgagccggctacttacatcaattcaccactcgttggagctcttgcctacttcgcccacgcctatggtcaactctagtttagtaacgagtgtgttagtttaagtaaaaataaaaatgaaggaagttttatctttgtttttacttttatttgttagtaatgtagtggaccgaaaatcggatcacaagtggacattggtccgagggatggtttatttggttcgttataatataacgtcaagtgtaatcttattgtggttattaatgttatcatcctattaattactatatccatgtcgttaaaaaaaaaaaaaaaaaaaagnnnnnnnnnnnnnnnnnnnnnnnnnnnnnnnnnnnnnnnnnnnnnnnnnnnnnnnnnnnnnnnnnnnnnnnnnn

SEQ ID NO: 96290 - DNA, 655 bp, Arabidopsis thaliana columbia
  unsure (1)..(655): unsure at all n locations
ggcgtccgcgattctccacgaagcgttacactttcnctttatttgtactatgagctcagcaaacgtgctggcggtgcttaagaactcgcgaacgcaagagtagcagcagcggtttcaagaatcgaggaagctaaagaaacagaaatgagaagcttggagaagttggaagaagtaaacagagacatggatgcgagaaagaaggcattaaaagaagcaactgaaaaggctgagaaggccaaagaagggaagttgggggtggagcaggagctgaggaaatggagggcagaacatgaacaaaagagaaaggctggtgatggagtcaacactgagaaaaacctaaaagaaagctttgaaggaggaaagatggagcaatcacctgaagctgttgtttatgcctccagcccaagtgagtcatatggaacagaagaaaactctgaaaccaatctatccccacagaccaagtctcgaaagaaaaagaagaagctttctttcccccggttttttatgttcttgtcaaagaagaagtcacataataattgagttcagtttcaattcaaacgcctaattctcttttgatctattggagctttgtattcagaaagaactccatttgaacaagtattgtggtgtaaatggttttttcatttcttttcaa

SEQ ID NO: 96291 - DNA, 871 bp, Arabidopsis thaliana columbia
  unsure (1)..(871): unsure at all n locations
cagggatcaagctgtggccatcaaatgttctattcaggtgcagttgctggaggcagggaggctttgatttctggggtaccctctttgtcaatatcgttgaattggaagaaaaatgaaagccaagaaagtcactttaaggatgctgttggtgtctgcttacctttgataaacgcaactatcagagacattgcgaaaggagttttccctaaagactgctctctcaacatagaaattccaacatcaccctcatcaaacaagggtttcaaggtaacaaagcaaagcatgtggaggcagtatcctagttggcaagctgtttcagctaatcgtcaccctggtgctgggaatttcatgtccaaccaacaaagtttaggggctcagcttgcccagcttggcagggatgcttcagcggctggggcggctcgtcgttttaccactcagaagaagagtattgtagaaattgaatcagttggtgttgctggtaaaactgatacccgtgttaagaaattctttcgtctagagtttcttgctaaagaacaagaacacacagatgaagatttggatgtcaaggctctagaagatggtttcgtttccgtgactccattttctctccttccaaaaacggattcagaaactcaagccgcagcatcagaatggatctccaaagcccttaactctgaccaatggaaaagggcatactcggtaaattattgttccatggtttggcccaaaactctcccacaatctggtttcctgggtttnaaatttttttgnccttgggggtttttnnaanttanccctttggtntttattttttnncccccccaaagcttgggngccctttngggntttttannagggttaccctnaatgc

SEQ ID NO: 96292 - DNA, 637 bp, Arabidopsis thaliana columbia
  unsure (1)..(637): unsure at all n locations
ggaanacccgggacggcgcccgcgtgcgagagactaaaatggtttcgttgaagctccataatcgtctcgcatcctcagtactcaantgcgggaagggaaaaatatggcggggcgccggcgaangaagtgatatctccatggccaattcgcgtcaaaacatcaggaagcttgtgaaggatggattcatcatcaggaagccaacgaagatccactcacgatccagggcacgttcaattgaatatagccaagagaaaagggacgtcactctggttatggtaagaggaagggtacccgaggggggcaaggtttgccaacaaaagttttggtggatgaggaggaggtatgagagtcctgaggcgtctgttgaaagaagtaataagggagacccaagaagattgacaagaccatatggtcccttgacatgtacatgaaggtaactcaagggaaacacgtcttcaagaacaagcgtgtnttgatggaaagtattcacaaatccaaggctnagaaggctntgngagaaggncattntnttgnccngtttnagggcttagaggggcttaggaccaaggttttcccnggagggggaaacatttttccccgggngggggnttttttcccaagggtccncggggggnaa

SEQ ID NO: 96293 - DNA, 740 bp, Arabidopsis thaliana columbia
  unsure (1)..(740): unsure at all n locations
accaatctccagaaaaggggagaagcaaaaatggtttctctgaagctccagaagcggctcgccgcatcantgatgaagtgcgggaagggcaaagtttggctcgatcccaacgaaagctccgacatctccatggccaattcccgccaaaacatcaggaagcttgtnaaggatggtttcatcatcaggaagccaaccaagattcactctcgttccagagctcgcaaaatgaagattgccaagatgaagggtcgtcactntngatacggtaagaggaagggtacccntgaagctaggttgncaacaaaggtactgtggatgccgtaggatgngtgttcttaggcgtctttttntgaaatacaggcgggcctggaaggaaggatttgtcaacgcaacaatggtacccttgaacatgtcacatgcccggtgtttaaggggtaatttgtgttcaaggaccaagcgtgtcttgatggagagtatccacaagtcaaaggctgagaaggctagggagaagactctgtctgancantttnaggctaagagggcgaagaacaaggctagccgagaaaggaagcatgctaggagagaggagcgtttagctaagggtcccggtggagattttgcgcctgtagcttgctcccagcacnctgctgctacacctgntnccaactncaagctntacccncagaaagnaagtctnaangaaaggtttaagaggggttatataagttgtgaaagctaat

SEQ ID NO: 96294 - DNA, 627 bp, Arabidopsis thaliana columbia
  unsure (1)..(627): unsure at all n locations
cccacgcgtccgcccacgcgtccgcccacgcgtccgcggacgcgtgggtaactatcatcagatcaataaaaaccagaagaagtcatggctcagaacgatacagtgaagctgataggttcttggtctagcccttattcccttagggcacgtgtggctctacacttgaaatctgtcaagtacgagtacttagacgaacctgatgttcttaaagaaaagagtgaactccttctcaaatctaaccccatccacaagaaagtccctgtcctcctccatggtgacctctccatctctgagtccctcaacgttgttcaatacgtcgacgaggcttggccctccgttccttcaatccttccttctgatgcctatgatcgcgcatctgctcggttttgggctcagtacatcgatgacaagtgttttgcggcggtggatgcggtggtcggagcaaaagacgacgaagggaaaatggcggcggtgggaaagctgatggagtttttggcggtactttaagaaacgttcaaagagcaacaaaagggttaggggttttttgaggggggaccattggtacctttaaatttctttttcggccttttaggcccaaccttttaatcnaggggttccggggaaatt

SEQ ID NO: 96295 - DNA, 570 bp, Arabidopsis thaliana columbia
  unsure (1)..(570): unsure at all n locations
atccccnnnaaggttnccaangnttattgggncccggttncccanccgcttttaacccccccctggattgtttgggccccttttgaggctttcccccccatcccccttccacacttggccccctaggccccccaccctctttaaatttggattccttaggatccctgttcttaggccgtcttttgaaggaattccgggggccgaagaaggtttgccaagcacatttcccttgacatgtacatgcgtgttaagggtaatgtgttcaagaacaagcgtgtcttgatggagggtatccacaagtcaaaggctgagaaggctagggagaagactctgtctgatcagtttgaggctaagagggcgaagaacaaggctagccgagaaaggaagcatgctaggagagaggagcgtttagctaagggtcccggtggagatgttgcgcctgtagctgctccagcacctgctgctacacctgctccaactgcagctgtaccgaagaagaagtctaagaagtgaagaggatatatagcttcacactatatatcctcttcacttcccggattagacttcttc

SEQ ID NO: 96296 - DNA, 834 bp, Arabidopsis thaliana columbia
  unsure (1)..(834): unsure at all n locations
gaccggtcccggnaattncccggngtgcgnacccacgcgtccgnaatcagggagaggctaaaatggtttcgttgaagctccagaagcgtctcgcatcctcagtactcaagtgcgggaagagaaaagtatggctcgacccggacgaaggaagtgatatctccatggccaattcgcgtcaaaacatcaggaagcttntnaaggatggattcatcatcaggaagccaacgnagatccactcacgatccgccgcacgctcaattgattatggtgcccttagaggcttggccgtcgcatgcactctcgtcatggtaagcgggaagggtacccctagaccgcccaggcttcgccatcttagagttgttttggattccgtaggggtttgcgtgttcttcaggcgtcagttgaagaaataccagaggagacgaagaagattgacaagcacatgtaccatgacatgtacatgcgtgttaagggtaatgtgttcaagaacaagcgtgtcttgatggagagtatccacaagtcaaaggctgagaaggctagggagaagaccctgtctgatcagtttgaggctaagagggcgaagaacaaggctcagccgagaaaggaagcatgctaggcagagaggagcgtttagctaagggtcccggtggagatgttgcgcctgtagctgctccagcacctgctgctacacctgctccaactgcagctgtaccgaagaagaagtctaatccgtgaactgatggatcgatcatagcttcgcactatatatcctcttcacttcactcctcctactcctcccacaaaacaaacaaaccaaaggaangaantctggca

SEQ ID NO: 96297 - DNA, 789 bp, Arabidopsis thaliana columbia
  unsure (1)..(789): unsure at all n locations
taacggcggcctttnttttcccactncnaggggtttccncagcnattagtggnnccccgggtttcccagtccgccttntaaccgccgccagtnattgatttgggtccccnttggagngctatncgtcgcatncacgcgtccgtagccttgctccgctgccggcccgccnctcatcgcgaaattctagacgtgattccgtaggatgccgtgttctttagccgtctcgtttgaaggaattacagagngaccgaagaagattgccaagcacattttccatgacatgtacatgcgtgttaagggtaatgtgttcaagaacaacgtgtcttgatggagagtatccacaagtcaaaggctgagaaggctagggagaagactctgtctgatcagtttgaggctaagagggcgaagaacaaggctagccgagaaaggaagcatgctaggagagaggagcgtttagctaagggtcccggtggagatgttgcgcctgtagctgctccagcacctgctgctacacctgctccaactgcagctgtaccgaagaagaagtctaagaagtgaagaggatatatagtgtgaagctatatcgatcatcagttcacggattagactctgaagaaggttttgaatgttttatcgaatgcgtttgtggaataacttttattttcgcaaagaacataacttatgtcagttaatctttatgctttcaaaaccttcttcagagtctaatccgtgaactgatgatcgatatagcttcacactatatatcctcttcacttcttagacntcttc

SEQ ID NO: 96298 - DNA, 895 bp, Arabidopsis thaliana columbia
  unsure (1)..(895): unsure at all n locations
tagggnngnccccanttcccatttaagggntccaacctttttgggaanncnacnnggtcgggcccttttcnnntttttccccagnttncnaaaaggggggtttttcttcaangccgnttaagttgggntaccnccagggntttccccaggttacggccgttgtaaacctgccccccgcccagtgaatttgaatttggggcgccccttttgaagcgcttttgccgccggcatgcccccgtccgtaagcgctttggaccctctaggcgcgccggccccctcgacgactctagaagttggatcccgttaggattgcgtgttcttaggcgtcttgtttgaaggaaattccagagagccgaagaaggtttgacaagcacttggtcccatgcatgtcatgcgtgttaagggttaatgtgttcaagaacaagcgtgtcttgatggagcgtatccacaagtcaaaggctgagaaggctagggagaagactctgtctgatcagtttgaggctaagagggcgaagaacaaggctagccgagaaaggaagcatgctaggagagaggagcgtttagctaagggtcccggtggagatgttgcgcctgtagctgctccagcacctgctgctacacctgctccaactgcagctgtaccgaagaagaagtctaagaagtgaagaggatatatagtgtcacagctatatatcctctcctcactacttagaccctgaagaaggttttgnntgttttatcgaatgcgtttgtggnataacttttattttcgcaaagaacataacttatgtcagttaatctttatgctttcaaaaccttcttcagagtctaatccgtgaactgatgatcgatatagcttcacactatatatcctcttcacttcttagacttcttc

SEQ ID NO: 96299 - DNA, 764 bp, Arabidopsis thaliana columbia
  unsure (1)..(764): unsure at all n locations
gcgnttcctcagcnttagtggtacccaggttcccngnncgcgtttaaccgcgccngtgattgatttngnnccctttngagggctttgcntcccatncccccttcctaagcttggancctcnagaccggccgtcgcgatcttgaagtggatncgtaggatgcgtgttcttaggcgtctgttgangaatacagagagncccgaaggaaggattggccagccaccctgcacccattgccaatgttaccatgccgtgttaagggtaaatgtgttcaaggaccaacgccgtgtccttgatggcagngtatcccaccaggtcaaaaggctgagaaggctaagggagaagactctgtctgatcagtttgaggctaagaggccgaagaacaaggctagccgagaaaggaagcatgctaggagagaggagcgtttagctacgggtcccggtggagatgttgcgcctgtagctgctccagcacctgccgctacacctgctccaactgcagctgtaccgaagaagaagtctaagccgtgaactgaggatcgatatagcgtcacgctatatcgcccatcagttcacggattagactctgaagaaggttttgaatgttttatcgaatgcgtttgtggaataacttttattttcgcaaagaacataacttatgtcagttaatctttatgctttcaaaaccttcttcagagtctaatccgtgaactgatgatcgatatagcntcacactatatatcctcttcacttcttagacttcttc

SEQ ID NO: 96300 - DNA, 758 bp, Arabidopsis thaliana columbia
  unsure (1)..(758): unsure at all n locations
tntccccgtccccaacctttttggggaaggcgaacnnggtncggggccttttccnattttccccnagcttncaaaaaggggggattttnctccaangncgnntttaagtttgggtacccnccagggttnccccagtccaccgccgttttaatttgacccccgcccagtgattgaattttgggtgccccttttggaagcgcttttgccgtcccattccacccgtccgtaagcttggaccctctaggccgcccgctcgcgatctagaaagtggatccttaggatccgtgttcttaggcgtcctgttgaagaaattccagtgagacgaagaagaattgacaagcacatgtacccatgacatgtacatgcgtgttaagggtaatgtgttcaagaacaagcgtgtcttgatggagagtatccacaagtcaaaggctgagaaggctagggagaagactctgtctgatcagtttgaggctaagagggcgaagaacaaggctagccgagaaaggaagcatgctaggagagaggagcgtttagctaagggtcccggtggagatgttgcgcctgtagctgctccagcacctgctgctacacctgctccaactgcagctgtaccgaagaagaagtctaatccgtgaactgatgatcgatatagcttcacactatatatcctcttcacttcttagacttcttccaggactctgtgggntgcccaggnagtncaggccnggtccatcagagggtaannaagggacccggtc

SEQ ID NO: 96301 - DNA, 673 bp, Arabidopsis thaliana columbia
  unsure (1)..(673): unsure at all n locations
ccccntnnaggccccccccccccccnnannctnaaaanntgggncccnnngggncccnngttttcctaaggcgtctcttttggaaaggaattcccggggggggcccgaaggaaggtttttgccaagccaccttgttcccccttgcaccatggtcccatgccgttgttaaggggtaattgtgttcaaggaccaagccgtttcttgatgggagagttctcccacaaggtcaaaggcctgagaaggctagggagaagactctgtctgatccagtttgaggctaagaggccgaagaacaaggctagcccgagaaaggaagcatgctaggagagaggagcgtttagctaagggtcccggtggagatgttgcgcctgtagctgctccagcacctgctgctacacctgctccaactgcagctgtaccgaagaagaagtctaagaagtgaagaggatatatagtgtgaagctatatcgatcatcagttcacggattagactctgaagaaggttttgaatgttttatcgaatgcgtttgtggaataacttttattttcgcaaagaacataacttatgtcagttaatctttatgctttcaaaaccttcttcagagtctaatccgtgaactgatgatcgatatagcttcacactatatatcctcttcacttcttagacttcttc

SEQ ID NO: 96302 - DNA, 667 bp, Arabidopsis thaliana columbia
  unsure (1)..(667): unsure at all n locations
ccttgcnnccatcgccgtcgtacccctcctgatcctctggacctctacgccccctctgccatctagaaaagtggatccttgggatgcgtgttcttaggcgtctgttgaagaaatccagggagacgaagaagattgacaagcacatgtaccatgacatgtacatgcgtgttaagggtaatgtgttcaagaacaagcgtgtcttgatggagagtatccacaagtcaaaggctgagaaggctagggagaagactctgtctgatcagtttgaggctaagagggcgaagaacaaggctagccgagaaaggaagcatgctaggagagaggagcgtttagctaagggtcccggtggagatgttgcgcctgtagctgctccagcacctgctgctacacctgctccaactgcagctgtaccgaagaagaagtctaagaagtgaagaggatatatagtgtgaagctatatcgatcatcagttcacggattagactctgaagaaggttttgaatgttttatcgaatgcgtttgtggaataacttttattttcgcaaagaacataacttatgtcagttaatctttatgctttcagatttttagcttacagtgtttcaacagacctactttgcaagttgttctttttttggtttcttattgttttttgttcgtcaaaaaa

SEQ ID NO: 96303 - DNA, 963 bp, Arabidopsis thaliana columbia
tgatacttctaatacaactcattatagggaagagctggtccgcctgcaggtaccggtccggacccgcggtcccacgccccaccaatctccagaaaaggggagaagcaaaaatggtttctctgaagctccagaagcggctcgccgcatcagtgatgaagtgcgggaagggcaaagtttggctcgatcccaacgaaagctccgacatctccatggccaattcccgccaaaacatcaggaagcttgtgaaggatggtttcatcatcaggaagccaaccaagattcactctcgttccagagctcgcaaaatgaagattgccaagatgaagggtcgtcactctggatacggtaagaggaagggtacccgtgaagctaggttgccaacaaaggtactgtggatgcgtaggatgcgtgttcttaggcgtctgttgaagaaatacagagagacgaagaagattgacaagcacatgtaccatgacatgtacatgcgtgttaagggtaatgtgttcaagaacaagcgtgtcttgatggagagtatccacaagtcaaaggctgagaaggctagggagaagactctgtctgatcagtttgaggctaagagggcgaagaacaaggctagccgagaaaggaagcatgctaggagagaggagcgtttagctaagggtcccggtggagatgttgcgcctgtagctgctccagcacctgctgctacacctgctccaactgcagctgtaccgaagaagaagtctaagaaggcctttttattacaccaggagttgacggggtccaatatttctgtaggtaaccctccggactgggttgggactttggttccaaagattaagggcctcaatgtgttttgagactttcaagaaaaatttccaaaatggaatgggaacaccgagaatcattatcttacgtgttttgcaccaaacttatgaattcttttgttttctcaaatcatgt

SEQ ID NO: 96304 - DNA, 520 bp, Arabidopsis thaliana columbia
cagctctctacgactcatatagggaaagctgctacgcctgcaggtaccggtccggaattcccgggtcgacccacgcgtccgcccacgcgtccgcggacgcgtgggttcatcaatccctcctgctaccgcgagagagtaacaactcaccggacgtttcaaatccatcctccgataactatattcgtttcgttagatctagatctgagcgtcggtgagagattttctggatctgtgatacgttccaggaaacatggcgacgatgaaaagtttgataggtctgataaacaaaatccagagggcgtgtactgtcctcggagatcatggcggtgaaggaatgtcgctttgggaagctctcccaaccgtcgctgtcgttggtggccagagttccggaaaatcttcagttctagaaagtgttgtgggaagagattttctgcctcgtggatctggtatcgttacaaggaggccattggtgttgcaacttcataagactgaagacgggacaactgagtacgctgagttt

SEQ ID NO: 96305 - DNA, 1584 bp, Arabidopsis thaliana columbia
  unsure (1)..(1584): unsure at all n locations
nnnntgctacgcgnnnnnnnnnnnnnnnnnnnnnnnnnnnnnnnnnnnnnnnnnnnnnncacgcgtccgtctacttctctaattccgggctggtcggaaagtgaggaagatacactgaagcaaaagagcaagtcatggcggcgacatcttcctctgcttttctccttaatccgttgacttctcgccaccgtcctttcaaatactcgccagagctctcttctctctccttatcctctcgaaaggctgctgctttcgatgtttcctcagctgctttcacgctcaagagacagagccggagtgatgttgtgtgcaaggctgtatctatcaagccagaagctggtgttgaagggctcaatatcgccgataacgccgctcagcttattgggaaaactccgatggtgtacttgaacaatgtagtcaagggctgtgttgcaagtgttgctgctaagcttgagatcatggaaccatgttgcagtgtcaaggataggattgggtacagtatgattactgatgctgaagagaaaggacttataacacctggaaagagtgttcttgtggaatctacgagtgggaacacagggattggccttgcattcattgctgcttcaaaaggctataaacttatcttgacgatgcctgcgtccatgagtttggaaaggcgggttcttttgagggcatttggagctgagcttgtgttaactgaacctgcaaaaggtatgactggagcaattcagaaggctgaagaaatcttgaaaaaactcccaattcctacatgctccaacagtttgacaaccctgccaatcccaagattcattatgagacgactggtcctgagatttgggaagatacaagaggcaaaatcgatatattggttgcggggattggaactggtggaactatcactggtgttggtcgattcattaaagaaagaaaacctgaattgaaggttattggtgtcgaacccacggaaagtgctatactttctggtggaaaacccggacctcacaagattcaaggaattggagctggatttgtacccaagaatttggatctggctattgtagatgaatacatagcgatttccagtgaggaagctattgaaacctcgaagcaactagctctccaggaaggcttgttggttggtatatcttctggagctgctgctgctgctgcaatccaggttgcaaagagacctgaaaatgccgggaaactcatagccgttgtgttcccgagcttcggggaacgttacctctcgacccagcttttccagtcgattcgagaagagtgcgagcaaatgcagcccgagctttgattttcttctgtaatttcgtgaccaacaaggaacctcttctttgatttattgctgattgtttttcttctaatagacgtttctgcagaaatctctacgtctactgtgtatatttacaattcgcaacgcaatttggtgtttgttattaataaaggcataagaggttttggtcaaaaaaaaaaaaaaaaaaagatgacaaaatcaaagacaagatccnnnnnnnnnnnnnnnnnnnnnnnnnnnnnnnnnnnnnnnnnnnnnnnnnnnnacaatcc

SEQ ID NO: 96306 - DNA, 411 bp, Arabidopsis thaliana columbia
aagtttcagacataacatctcttcccatctctctcccctctaagcaattaagcagacaagacactgatgatatgagacgaagagaaagaagtcttatcactcatcctttcctcttatgaatctctccgccgaccaagctcccgtcaccgccgtcgacgaactagctccgccttctcaaccgcatcgcttatctacatcatgtgatctccacccagaagagcgtttctccggtttctgtccttcttgtctttgcgaccgcctctccgtcttagatcacaacgccgctccgccaccgtcttcttcttcccggaaacctccctctatctccgctgtttcgttaaaagctctcttcaagccctcctctagtggtaccaacaactccaacggaaacggtcgggtcagacccggttt

SEQ ID NO: 96307 - DNA, 549 bp, Arabidopsis thaliana columbia
  unsure (1)..(549): unsure at all n locations
atgatactgccnnnnnnnnnnnnnnnnnnnnnnnnnnnnnnnnnnnnnnnnnnnnnnnnnnnnnnnnnnnnnnnnnnnnnnnccacgcgtccgcggagaatctcagtcgcgccgtcaactttttgttgagaagagatatcatctgttttcgatccaaagaatagaaagcttggattccgaaatctccctttttgcttccccaattcgttttcctttacaagctcggcgcttgatctcgctatctctcagagagctgagagctgaggatattggaaatttggaaggtggaatctcaaatggctgaacttcctggtcaaataagacatataggcggtcgaatgagtcaactgctagagcagatatatgggttttcgagaagatctttgtttcgggtcatatctatgggtcctataccttgtcatattgcctttatcatggatggaaatcggagatatgcaaagaagtgtggtcttttagatgggtctggtcacaaagcggggttttctgcgcttatgtcgatgctgcaatactgctacgagctgggtatca

SEQ ID NO: 96308 - DNA, 667 bp, Arabidopsis thaliana columbia
  unsure (1)..(667): unsure at all n locations
atgatgatactccagctctctctcactatatggaaagctggtacgccctgcaggtacccggtccgggaattaattccctgggtcgacgagctcactagtcggcggccgccctttttttttttttttggagttagaatgctatgaattccaaaccagagaagattcaaataaaacagagactaaaaaggctgttcaaacagtaataattcttgcacatgaacactaaaccagaacgataacaggaaacaaagatacagtcagtactcagtagtttgagggcacctacggaaagcaagtaatactacagagggtagacgttccagtgcttaatgatgaaacatcatcagtacaagcaaacgtgtttttcatcatacaccgtatcactttcacaagtggctgcagtcattccgcagcataaggagattgacttcgagaagcagcatcaactttgcgcagaggagcagggctaccaggagatggggacctctcattgctacgcctttcaggagacatctccttagaaggagaggccttttgcaaagcagggcttcttgggctgaggctgcgacgaggagatggagacctctcattgctacgcttatcaggagaaacttctctagcagtgacaggttctggggagactctaggntnggnaacaggaatnctt

SEQ ID NO: 96309 - DNA, 556 bp, Arabidopsis thaliana columbia
  unsure (1)..(556): unsure at all n locations
cacgcgttcgactactttatgctgacaatgaacaccgggtatgcaccttgcttcagtctacaatggtaggaggatgcgttgcagctatgcctatccttaaaatgatcccaacatcagtcctttggggctattttgccttcatggccatcgaaagcttacccggaaaccaattctgggaaagaatcttacttctgttcaccgccccaagtcgccgcttcaaggttcttgaagattaccacgcgacattcgtggaaaccgttccattcaagacgattgcaatgtttactcttttccaaacgacttatctcttgatctgctttggtctcacatggataccaatcgcaggagtcatgttccctttaatgatcatgttcttaatccccgtacgacaatatctcctccctagattcttcaaaggagctcatcttcaggacttagatgcagcagagtatgaagaagctccagctttacccntcaatctngcagcggaaacggagattggttccacaacatcgtatccgggngatttggngattnttnatgaggttatggcccg

SEQ ID NO: 96310 - DNA, 579 bp, Arabidopsis thaliana columbia
  unsure (1)..(579): unsure at all n locations
nnnnnnaatacgactcactttagggaaagctcgtgcgcctgcaggtaccggtccggaattcccgggtcgacccacgcctccgcaaatatcttcactcacaagttttgagtatgttgaaccaaatgggaaagatgtgggaatcaacgtgagaaagaaggcggaaaacatagtcgctcttttaaataataaagagaaaatctcagaaatcagagacaaagcagtagcaaatcgtaacaagtatgttggcctctcatcaacgggaataacatataaatctggttcctcagcttcatttggtggtagttttcaaagtggttcaagcaattttgacagctacaaggatagagattccagagaagacaagaatgactacgagtcttttcaaaagtcaagacgtggtgttaaaactgaggagcaaagctacacttctaagaagagtttttcacgctatggcagcacggaccatgacaatctatccagtggtaaaaagtcacccgattctgccaaacataggtcatatgtatctgcagctccttcaaacaacgatgatgattttgatgattttgatccacggggaac

SEQ ID NO: 96311 - DNA, 660 bp, Arabidopsis thaliana columbia
caaacatagacgagtatctatggttaatgggcttatctcattacaaacccgtaatcgagtattgtggcggaactgagattggaggcagttttatctcaggttctttgcttcaacctcagtcgctggctgcttttagcacagctgccatgggttgcaagcttttcattctcgatgaagatagcaatcctattcctccatatgctgcaggagtaggcgaattggctctttgtcctcacatgtttggagcttcaagcactcttctgaacggtaatcacttcaaagtttacttccaaggaatgcccaccttccaaggacagatcttacgaagacatggggatttatttgaacggacttcaataggatactaccgtgctcatggacgtgctgatgacacaatgaatcttggtggtataaaggtcggttctagtgagatcgaacgagtctgtaattccgttgatgacagtgttctggagacagcacccattggtgttccacctcctagtgggggtcatgagcagctagtaatcgctgttgtgttcaagagcccataattttcaaatcccgactttaacctgttcaagacgtccttcaactccgagatacatgacatactgaatcctttagttaaggtatcatctgttgtgactcttccttctctac

SEQ ID NO: 96312 - DNA, 539 bp, Arabidopsis thaliana columbia
  unsure (1)..(539): unsure at all n locations
nnnnnnnnnnnnnnnnnnnnnnnnnnnnnnnnnnnnnnnnnnnnnnnnnnnnnnnnnnnnnnnnnnnnnnnnnnnnnnnnnnccacgcgtccgcggacgcgtgggttcattcttcatcgaatagtcgaaaaatatttgaactttcttaggaaaccaaaccaacaaaacaaaaaggaaaacgagataatggtgttaccttggagatcaagaggaggagtagcaaagagacgtaatcaattgatttccggcgatatctccgtcgtggaaaccaagattccagttcaactccgatcgccatcaaggatagagcggattcagtcaccgcgcgtgctgttgacgccgcgtgatgcggtggagataagtcggagattgcaaaacgcagcggcgcgtgaggagtatgccgagtgtttggagattgtgagcaaaatcaagaaccttgggaagaggaggggacacgaacaagaagtgtttggtcccaaaacggaagcggtttcggctttgtcttcttgttttgaaagattcgcggcggcgcgtgatgg

SEQ ID NO: 96313 - DNA, 554 bp, Arabidopsis thaliana columbia
  unsure (1)..(554): unsure at all n locations
ccacctcccaactatggaggagcaccaccagcaaacaacatgggaggagcaccaccaccaaactatggaggaggaccaccacctcaatatggagcagtaccaccacctcaatacggaggagcacccccacagatcgacaactaccagcagcagggtagtggaatgcagcagccacagttccagaacaactacccacctaaccgggatggcagtggcaacccctaccagggttaaagcagttgaagcagtcgtgggtttcctttttaatcatgcattctgggctgtgtatagataatttgaggaagagagagtgcagtagcaagactttaaaactccttttatctcgagtgtttatcagtctgggattatgtgagagagaatagcctaagttactgtggcatggttagaacttttcactcttgcgtttctttttagtagtttatatcctaaatcgatctcaagttcttccttgtgatgcttgctactcttatgtccactcctggttctgcattaaacgggatttagtaacatgtctccctaannaaaaaaattat

SEQ ID NO: 96314 - DNA, 2339 bp, Arabidopsis thaliana columbia
  unsure (1)..(2339): unsure at all n locations
cccaagcgtccgggaattcgccattgacaaagtactcaattccaaaacaaagaataagcaaacaacaacaattttcacttccttcaaaaattataaaaatccagtttttatctttgcaagattcaaaagtttgaatttttacttgttttgatttctgggttttgtttgttttttgatttcggtaatgatacaattgagattttgatttcgtgtgatgttgagagattcttaaatgggtctatgtacttcgaaaccgaattcatctaattccgatcaaactccggcgaggaatagtccacttccggcgtctgaatccgtcaagccttcgagctcttccgttaatggtgaagatcagtgtgtaacaacaacgaacaatgaaggcaaaaagtctccgtttttccctttttatagtccaagtccagctcactatttcttctccaagaagactccggcgagatctccggcgactaattcgactaattcgactccgaagcgattctttaaacggccgtttcctcctccgtctccggctaaacatatcagagctgttttagcgagaaggcatggttctgtgaagcctaattcgtcggcgatccctgaaggtagtgaagctgaaggaggtggtgttggattggataaaagctttggtttttccaagagttttgcgagtaagtatgagcttggtgatgaagttggtcgtggtcattttggttatacttgtgctgctaagtttaagaagggtgataataaaggtcaacaagtcgcggttaaagtcattcccaaagcaaagatgacgacggctattgcaattgaagatgtgagaagggaagtgaagatattgagggctttgtctggtcataacaatcttcctcatttctatgatgcttatgaggatcatgataatgtctatatagtgatggaactatgtgaaggaggagagcttttggatagaatactttcaagaggtgggaagtacacagaggaggatgcaaagaccgttatgatacaaatattgaatgtggttgctttttgtcatctgcaaggcgttgtacacagagatcttaaaccagagaattttctttttacctcaaaagaagacacctctcaattgaaggcaatagatttcggtttgtcagattacgtgagaccagatgagaggctcaatgacattgttggtagtgcatactatgtagcacctgaagttctgcatagatcttacagtacagaagctgatatttggagtgttggtgtgattgtatatattctattgtgtggaagccgaccgttttgggctaggacagaatcaggaatctttcgtgctgttctaaaagctgatccaagttttgatgaccctccttggcctttgttatcttcagaggcaagagattttgtaaagcggttgctaaacaaagatccgcgtaaaagattaacagctgctcaagccttaagtcatccatggataaaggactcaaacgacgcaaaggttccaatggatattctggttttcaaacttatgagagcttatttacgatcatcatctctccgtaaagctgcattaagagctttatcgaaaacacttacggttgatgaactgttttatctgagagagcagtttgctttgttagaacctagtaagaacggaaccataagtctagaaaacatcaaatcagctctgatgaaaatggcaacagatgcgatgaaggactcacgtattccagagttcttaggacaactgagtgctcttcaatatagaagaatggactttgaggaattctgtgcagcggcattgagtgttcaccagctagaagctcttgatcgatgggaacaacacgctcgttgtgcttatgagcttttcgaaaaggaagggaaccgaccaatcatgatcgatgaactcgcttcggaacttggtcttggcccttctgtaccggttcacgcagtgcttcacgattggcttagacataccgatgggaagcttagctttctcggatttgtgaaattgcaacatggtgtgtctagccgcacgatcaaagctcattagaagggttttgaaactttgaatgatatgtatgaaatttgtctgagctctaaggtctcattctcctaggagttataatatgtggcttttgacttttgttatgaaagctgagaagcaaagattataaaaaaaaatgagtgtagcaaaaaaagagagaagtgtgttagttttgtagagaatgatatgatattttccccaaatttggtaacttatgacgattgatgatatttctgacatttttagattttgctttttttgacaccnnnnnnnnnnnnnnnnnnnnnnnnnnnnnnnnnnnnnnnnn

SEQ ID NO: 96315 - DNA, 510 bp, Arabidopsis thaliana columbia
  unsure (1)..(510): unsure at all n locations
ccnnnnnnnnnnnnnnnnnnnnnnnnnnnnnnnnnnnnnnnnnnnnnnnnnnnnnnnnnnnnnnnnnnnnnnnccacgcgtccgaccagctatgctctccgtcgcaagacgtctcggttcggcgacgccgtcgcttcaaaacggagcttccttactccggttcatgagaacggaggcaagtcagccaagacggcggaacaaatttccctctctatcgccactcaagaagaaagaggagaaatcagagtggtggatcgtcgacggagagatgcacgagatcggagatcacgtacctctgcgtgagcgtttcacaatcccgagagacaatatccccaataagcgccggaaacagctccgggagcagttcatgcgacgaactcgtctcgttcttaaagaatcggagcatgagccatggggcaagaagtacatggaattgtataatgaggttagagaaaactgggagaggctttattgggatgaaggatattctaagaaaattgcgagagatct

SEQ ID NO: 96316 - DNA, 630 bp, Arabidopsis thaliana columbia
  unsure (1)..(630): unsure at all n locations
ctcttcccatctcgagatccgccgttaaactctttttgcccaaactctgagcttctctctctgtcttcttcttcttcatctcctcttttgtattcaatcacagagagactctcttctccagatctatcatttggtttaatcaaggttagctagtgaacatggcaacgggggctgagaaccaatggcttaaaggaagagtgaaggctgttacctccggagactgcttagtgatcacggctttgagccacaacagagctggacctccaccggaaaagaccattactttttcttctcttatggcacctaagatggctcgcagaggaggtatagatgagccttttgcatgggaaagcaaagaatttttgaggaaactttgcataggaaaggaggttgcattcaaagtggattacaaggtggaagctattgctggaagagaatttggctctgttttccttggcaacgagaatcttgctaagcttgttgttaaaactggttgggcaaaggttagggagccaggtcagcagaatcaggacaaggttagtccttacattaaagagttgctacagcttgaagagctggccaagcaggaaggatatggtcgttggagccaggttcctggtgctgctgngg

SEQ ID NO: 96317 - DNA, 597 bp, Arabidopsis thaliana columbia
  unsure (1)..(597): unsure at all n locations
nnnnnnnnnnnnnnnnnnnnnnnnnnnnnnnnnnnnnnnnnnnnnnnnnnnnnnnnnnnnnnnnnnnnnnnnccacgcgtccgcgcaaggactccaggatcatttccaccaaagcatcatatgccagtgattgactcttctccaaaacttaagcctagaaacgacagaatttcaccttctcctgctgctaaacatgaggctgaagaggcgatgtcagttaagcgtaggcaaagaacacctcctactttgccaagaagaacgtctttgatagcgcaccagtcgagacaactaggagcagatatttcaaatatggcagcaaaggaaaccgcgaagctacatccatctgtgccatcagagtctgaaactaattctcatcaatctcgtgttcatgcttctcctgtgagtacgacgccagagccaaagagaacctctgttggatctgccaaaggaatgcagagtgaaagcagcaactctatctcgtcgtcgttgtccatgcaggcatttgagctctgtgatgaatgcttcaccccatatattggcatgacagaacatacaaactcttgtggaccacagaaaaacctgttacatgtgaattac

SEQ ID NO: 96318 - DNA, 578 bp, Arabidopsis thaliana columbia
atacgactcactttagggaaagcacgtacgcctgcaggtaccggtccggaattcccgggtcgacccacgcgtccgcccacgcgtccgcgcagagtcacaacaatgacattcaccttccttctccaatcaccaccactcccaatttctccatctcctcctcaattctctctttcctcttctcctttatcaaaaacgcagcgattcatcactccaagccagggctctcgtctacggactttgtgtaccaaagtcatcataccaaacatgcaagattcaggatcaccaccactctcttatcttactcagcgagaagccgctgagattgatgagaccttgatgggtcctcttggtttctccattgatcagctcatggaattggctggtcttagtgtggcagcttcaattgctgaggtttataaaccggaagaatatagccgggttctagctatctgtggtcctgggaacaatggtggtgatggtttggtggcggcgaggcatttgcaccactttggatataaaccgtttatttgttatcccaaacgtacagccaagccactttatactggactggtcactca

SEQ ID NO: 96319 - DNA, 851 bp, Arabidopsis thaliana columbia
  unsure (1)..(851): unsure at all n locations
ttttttggggtcttccttttttccatccgaaatattgggtccaaatatacttttaaaacctttctttcttcaatccccttttgaataaaaaaagagaaacctttaaaccccacaggtggccctgtgctcttgggccctttggaaatgaaacaatattcgatcctcaatgcctggaaacgcaagaaagtgcaccgatcaataccattactggcagaacctgaatgaagacagaactctctggaaattgggaactctacctccgggattgatcacattctattcaaagacgaaatcattggacaaatcatggcatgtacttgggttaggctataacccgggagtgagcatggacgaaatcagaaatgcaggagtgattcattacaatggaaacatgaaaccgtggctagacattgcgatgaaccaatacaagtctctctggactaaatatgttgataacgaaatggagtttgtgcagatgtgcaattttggtctctaaagagagaacgatgaaaacaaacaaaccggaaagaggaaaaaatagggagaagaggtaacctcggatcgatgtgtttctgtctttctcggcattctttaactgatgatacgtttatctttatatagggttacaaaaaaaaagaagcattttgcttgttatttctgtcatagttttggtctttatttttattttgtaaactcttcacagcaatatgttctcccaagctacaatgtcttgttgtctttatttcaaaaaaaaaaaaaaagagaatcaaaaaaaaaaaaaaagnnnnnnnnnnnnnnnnnnnnnnnnnnnnnnnnnnnnnnnnnnnnnnnnnnnnnnnnnnnnnnnnnnn

SEQ ID NO: 96320 - DNA, 494 bp, Arabidopsis thaliana columbia
atacgactcactttagggaaagctcgtacgcctgcaggtaccggtccggaattcccgggtcgacccacgcgtccgcccacgcgtccgagacgacgaagtcgagagaaagaaataatggcggaggagacgatggagaacgaagagagggtgaagctgttcgtcggacaagttccgaagcacatgacggagattcagctcctcacattgtttcgagaattctctctatcgtcggtgaagtcaacatcattaaagagaagacaacacgagctcctcgaggatgttgttttctgacatgtcctacaagggaagatgctgacaaggtgatcaatagttttcataacaagaagacattgcctggggcatctagtccgttgcaagttaagtatgcagatggcgacttggaaagactagatgttcttgactgttgcggcaatccagagcacaaacttttcgtcgggatgcttccaaagaatgtctctgaaactgaagccccg

SEQ ID NO: 96321 - DNA, 468 bp, Arabidopsis thaliana columbia
ggggggggccaccccaagggccgggggcttggtagtgattgatctaagggggcaagtgcaaggaaccggacaagtattcgtggatacatttggacccaaggacaggaagaagatgaagccattggcacttgtggtgggttcaaacccatatagcaaaggattatgtgaaggcatagattatgtacttaaggtccatgaaggctggaggtaaacgcagagtgattgttccaccatcgttaggatttggtgtagacggtgctgaattggaatcgggtttgcagattcctcctaatgcttcgttgggatatatagttgagattgatagagtctcaattgcaccacctttgagttgttgttacggacagctttggtttcattcccaaatccttcaaatatttggttgtataagtatgagtggaaaacaaagtgtaaatttttgtttcttttggggtcgatgtgattgaaccg

SEQ ID NO: 96322 - DNA, 793 bp, Arabidopsis thaliana columbia
  unsure (1)..(793): unsure at all n locations
caacaagtggtcagattctactagatggggttcctttgaaagagttggatgtcaagtggcttaggcaaagaatcggatacgtggggcaggaaccaaagctcttccgcacagacatcagttcgaacatcaagtacggatgtgatcgtaatatatcgcaagaagatataatatcggctgcaaagcaagcctatgcacatgactttatcacagcacttcngaatggttacaacacaattgttgatgatgatctactcagtggagggcagaaacaacggattgccattgctcgtgccatccttagagatcctagaatcctcatcctcgatgaagccacaagtgcactcgatgcagagagcgaacacaatgttaagggcgtacttcgttctatcggaaacgactcagcaacaaagagaagcgtcatagtgatagcacacagactttctacaattcaagctgcggatagaatagtggctatggacagtggacgagtcgtcgagatgggcagtcacaaagaacttttgagcaaagatggcttatacgcgagattgacgaagagacaaaacgatgccgtcttatgattgatcctacacatgctaaactgttcatgaaatagtcatgattatgtttttgaatggtcatgacgatatgtaatggcaaaattatgtaaagtgtaaccatagagaattcttattatttcacacaaaaaaaaaaaacaaaagggcggccgctctagaggatccaagcttacgtacgcgtgcaggcgacgtcataagatcttctatagttgacctaa

SEQ ID NO: 96323 - DNA, 1564 bp, Arabidopsis thaliana columbia
  unsure (1)..(1564): unsure at all n locations
ggaattcggcacgaggaaaatagaaaagtaggatcatggtggcgatgaatggcttcaaggtttaaccgggaagctaagctcgcatctcaaatcttgtctacacttttgggaaaccgaagctgctacacatccatggccgccacatcttcctctgctttacttcttaatccgttgacttcttcttcttcttctactctccgtcgtttcagatgctcgccagagatctcttctctctccttctcctccggttctgatttctctctagcgatgaagaggcagagtcggagttttgctgatggttcggaacgagatccgtctgttgtgtgtgaggctgttaagcgcgagactggacctgatggactcaacatcgctgacaatgtgtctcagctcattgggaaaactcctatggtgtacttgaacagtatagcaaaaggttgtgtagcaaatattgctgccaaactcgagatcatggagccatgttgcagtgtcaaggataggattgggtacagtatggttactgatgctgagcaaaaaggatttatatcacctggaaagagtgttcttgtggaacctacaagtggaaacacgggtattggcctagcattcatcgcttcaaggggctatagacttatcttgacaatgccagcatccatgagtatggaaagaagggttcttttaaaggcatttggagctgagcttgtattaacagatcctgctaaaggcatgactggagcggttcagaaggctgaagagatcttgaaaaacactcctgatgcatacatgctccaacagtttgacaaccctgcaaatccaaagattcattacgagactactggtcctgagatctgggatgatacaaagggcaaggtggatatctttgttgcaggaattggaactggtggaactatcactggtgttggtcgatttattaaagagaaaaatcccaaaacgcaggttattggtgtaagacccaccgaaagcgatatactttctggtggcaaaccgggacctcacaagattcaaggaattggagctggatttatacctaagaatttggatcagaaaattatggatgaagtcatagcgatttcaatttccaagttagaagctatagaaaccgcaaagcaactagctcttaaggaaggcttgatggttggtatatcatctggagctgcagctgctgcaatcaaggtggctaagagacctgagaatgctggaaaactcatagctgttgtttttccgagcttcggagagtatctatcgaccccgctgttccagtctatccgggaagaagttggagaaaatgatcagcctgaggtatgaacattagcaacttggtctacttctgcaaagctctttctccataattacagtctgagtgctagcaatttatttttatcaataaggcattagtgaatgtggtttaggttctattttggatatccaacactagtctatgttttactcaaacattttcttgttggaaatcccaatgcttaattatattgaattgnnnnnnnnnnnnnnnnnnnnnnnnnnnnnnnnnnnnnnnnnnnnnnnnnnn

SEQ ID NO: 96324 - DNA, 387 bp, Arabidopsis thaliana columbia
  unsure (1)..(387): unsure at all n locations
cacaaactaaacaaaaaaccctagttctctctctctagttagccgccgcaaaccagatcaaatcttcaaacgccgttttgcctctttggtggtcggtttcggccggcaccgtgagagggcctctcttctctttttagttttttttttcctttgtgtcgattttttttagccggcggcggctcctccttctttgtggcttaatcaaagagttttaagtcgacggcgagcggagatagttctctcagatggaggttcgttggtagatctacaatggggaactatgactctcgacgacggcagcagatctggtggatttcttcgtcagtctcttcgcggaggtacctctcctccgatgaacctccttgggtagtggtgggtcccaatntt

SEQ ID NO: 96325 - DNA, 464 bp, Arabidopsis thaliana columbia
  unsure (1)..(464): unsure at all n locations
gtcgaggtttctctctctctgaaaaagtgcttttgctgcgtttccatgctctcggaaggaacttggctgaatcgttggagaattatcgatctggcgtcgttggtgcatctctagctgcgccaattcatcggatccggtttgatttctccctttcgcgaatctagccttccgtgatcttagcagccatgttctatggcacagctgtatgggacccttggcttatcgttggccagattatttgcctccaatgctcttactatctcactcttggactcttcaccatggtctttcttggccttcgggttcctcgccttagtcttgtctacttcttcgattacgctactctcactacttccaccttcaccggttggtctgttattgcctaattcccttttctctttcactcgctggggcgcttgtgtacatggaatttttttgggtggaggggggcancggaaantttt

SEQ ID NO: 96326 - DNA, 777 bp, Arabidopsis thaliana columbia
  unsure (1)..(777): unsure at all n locations
ngcaatgacctttttttctgcaggggggctctaaagcaaaacccttttcctgaaatcgccgtcgcaaattagaagaatcacctacagtcttttgtagggttttcaagacgaggcaatatgagattggagaagtgttggttttgctcttccacaatatatcctggtcatggtattcaatttgtccgtaacgatgccaagatattccggttctgtaggtcgaagtgtcacaagaacttcaagatgaagagaaacccacgtaaagtgaaatggactaaagcattcagagctgcacacgggaaggacatgactaaggatacaacatttgagtttgagaagaagagaaacagacctgagagatacgacaggaacgttacagagaatacactcatggccattaagaagattgctaagatcagaaccgcaagggaagccaaacatatcgaaaataggttgaagccaaacaagcagaagaaactcaatgacgatatgaaagaacttgatcagaacattcatatggtccaggctcccggggcacagaagatcaaagttgatgtttccgaaaagaagtctgttcaaaacgaagccatggaagagtgattctgtggtaacaatatgatccgtctaaaagcctctcccttactctgatgctggtgtcatcttaaagaacaagtcttctttagtttctcttaccatttgtttttggaagtctttaaaaaaaaaaaagttttggtttttgtactgataaaacggctttaagttgctatccttttgcaatgt

SEQ ID NO: 96327 - DNA, 490 bp, Arabidopsis thaliana columbia
  unsure (1)..(490): unsure at all n locations
nnnnnnnnnnnnnnnnnnnnnnnnnnnnnnnnnnnnnnnnnnnnnnnnnnnnnnnnnnnnnnnnnnnnnnnnnnnnnnnnnnnnnnnnnnnnnnnnnnnnnnnnnnnnnccacgcgtctgcccacgcgtccgcccacgcgtccggttttagggaaacggctatgtcacagttgaataattcgtggttggtgcagactggtcaatgagcagtgattgtcaaaggatttgcactgtaaattatttatactctttgggttttgattatgaaacccttatggatgatcaaattacatttgttattaatacagaacattttttaggaatttggattggtgatataaatgtaaataaaatggtcaaagttggttggttatagtgatttgtttaatcaaaaaaagaacaaaacaaaagnnnnnnnnnnnnnnnnnnnnnnnnnnnnnnnnnnnnnnnnnnnnnnnnnnnnnnnnnnnnnnnnnnnnnnnnnnttcat

SEQ ID NO: 96328 - DNA, 703 bp, Arabidopsis thaliana columbia
cgagactctgtcactctcttacactcatcactttctcatttcttttccgcatttcgaagccatggctaaacaactgcttcttcttctccttctcttcatcgcccacggcgttgaatcagctcctccgccgcactcctgtgacccttcaaatccaaccacgaaactctaccagttctgccgcacttgacctcccaatggccacccggcccgtgatctcgtctcgaggctaaccatagacgagaagatctcgcagctggtgaatacagctccagggataccgcgtcttggagttccggcgtacgaatggtggtcagaagctttacacggcgtagcctacgccggtccaggaatccggtttaacggaacggttaaagctgctaccagctttcctcaagtcatcttgaccgctgcttcattcgactcctatgaatggttccgcattgctcaagttataggaaaggaagcaagaggagtgtacaacgcagggcaagcgaatggaatgacattttgggcaccaaacattaacatatttagagatccacggtggggaagaggccaagaaactcccggcgaggatccgatgatgaccggaacttacgcggtggcttacgttagaggactacaaggtgactcttttgacggtcggaaaacactctccaatcatctccaagccttcgcttgttgtaagcattttacagcgtac

SEQ ID NO: 96329 - DNA, 450 bp, Arabidopsis thaliana columbia
aataccggggcggacccacgcgtccgaaacaaaaagggtttggcaaaagcttcctttattggggctgttttggctccggaccatgggggcttttccagcaaaggcaaagggccctgttggcccgccgtcaaccaaactaagccgggcaggtttccttgagggtttttaattgggcccggttcctggggattaccaggtcgagggggcgattaaggaaactggtcggggcccagccttatgggccatttactgtggaagatttccaggggggggcattaccgataccggcgatggggccgtggattttttccatcgttttagggaggatttccacctaatgaagattttaaccccagccccctttagatggtttatggcatggccaagaatttttcttaatggaagaaaggagaagggagtgagtcaagctggggggcaattttaccacga

SEQ ID NO: 96330 - DNA, 493 bp, Arabidopsis thaliana columbia
accagaaaatgggccatgctcggagccctaggttgggttttccctgagctatgggttaggaccggggggaagttcggagaaccggttgggttaagggccggttaacagatcttaagcgccgggggatgggactactgggccaacccgggctgggtccaccctaaaagcattttacccatttgggctactaaggttatcctaatgggagctgtggagggctccaaagtccccggagatggcccattgggagaagcaaaggactggttttacccagggggcagcttcaaccaatggggcctggttactgaccccgaggttttcgcggagttgaaggtgaaggacctcaaaaccggaaggtgggctatgtcctttatgttgggattcttcgtccaggccattgtaaccggaaagggaccgttgaagaaccttgcggaccacttggttgatccagtcaccaccaatgcatgggccttggttaccaacttggtccccg

SEQ ID NO: 96331 - DNA, 490 bp, Arabidopsis thaliana columbia
gacccacgcgttcgcccagagctctataagacgacttctcttttcttctttgttctccttttctcgtctcttctcataagcaatggcgatgccaacccaaattacaaagaagctctctccaagtcattgctcttcttccaaggtcagcgatctggtcctcttcctagaggccaacaaatttcctggagggctagctctggcctttccgatggctctgctgctcatgtggacttaaccggcgggtactatgacgcaggagacaacgtcaagttcaatttaccaatggcgtttaccaccacaatgctctcatggagcgcactggaatacggtaaacggatgggtcctgagctggaaaatgcacgtgtgaacatccgttgggccacagattatctgctgaaatgtgccagagccacgccggggaagctttatgtcggtgtaggagatcctaatgttgatcacaaatgctgggaacggcctgaggacatggaca

SEQ ID NO: 96332 - DNA, 757 bp, Arabidopsis thaliana columbia
  unsure (1)..(757): unsure at all n locations
atgatactctnnnnnnnnnnnnnnnnnnnnnnnnnnnnnnnnnnnnnnnnnnnnnnnnnnnnnnnnnnnnnnnnnnnnnnccacgcgtccgaatcaacgcaacgccgagaagctttttcaggggtttggtgcgttgaatttgtggatcaagaaacaatgcaaattcaatgcaaaaccctaacttttacagtttcttcgattccttgtaacccaaagctaccattcccatcttccctcactttacggtcatggaatccttcattcccgagtttcaggagctccgctgtttccggaccaaagtcatcactgaagctgaacaggtttttaagaaactgtgcaagtacgaatcaggagcttgttgttgatggagaaaccggaaatgggtcgatttcggagctccaaggagatgcagcaaatggttcgatttcgccggtggaagtggaagcagaagtagaagaagtgaaggtagatgatttggcgactcagagcatttggggacagatgaaagagatcgtcatgtttaccggacctgccgcgggattgtggctatgtgggccgttgatgagtctcattgatacggcggtgattggtcaaggaagctcactcgaactcgctgctttaggtcctgctaccgtcatctgtgattatttgtgttatacgttcatgttcctctcagttgcgacttcaaatcttgttgctacctctcttgctcggcaggataaagatgaagtacaacatcagatatcgatcttgcttt

SEQ ID NO: 96333 - DNA, 460 bp, Arabidopsis thaliana columbia
cccacgcgtccgacagagctttcaaatatatccctctcctgcgagagcagagaaagggagagagactagtgagtgagagagtccatcgctttctttctttctctctctcgctctctcttcatctccaacagagacttctttctagagaaagagatcttcacaaatatgactgtgatgaatcaccgacacaagcaatgtcattttctcctcctccttctgatcactgtcttctctgccgcgttggatggtgtttcttccgagacagacgtcggagggtttgactacggtgaagcattgtctaaaagcttactctactttgaagctcagagatcaggaagacttccgtacaaccagcgcgtgacttggcgtgatcactctggtctcaccgatggtcttgaacaaggggttgatttagtgggaggatatcacgacgccggagaccatgttaaatttggacttc

SEQ ID NO: 96334 - DNA, 574 bp, Arabidopsis thaliana columbia
  unsure (1)..(574): unsure at all n locations
agcgacgcgcacggagtactttgctgcgccatatccccttcccaaaatggatatgattgcaataccagattttgctgccggagctatggagaattatggttgagttacataccgtgaaacagctcttctctatgatgaacaacattcagctgcttctaacaaacagagggttgccactgtagttgctcatgaactggcccaccagtggtttggcaatcttgttactatggagtggtggactcatctatggctgaatgagggttttgctacttgggtcagctacttggctactgatagtttgttccctgaatggaaaatctggacccagtttttagatgaatctactgagggtctaaggctagatgggcttgaggagtctcacccgatagaggtggaggttaatcatgctgctgaaattgatgaaatatttgatgcaataagctacagaaagggtgcatctgtcatccgcatgctacaaagctatcttggtgctgaggtttttcagaagtctcttgctgcatacattaaaaatcacgntttntccaaacggggnggccagnaggtttntgggcct

SEQ ID NO: 96335 - DNA, 689 bp, Arabidopsis thaliana columbia
  unsure (1)..(689): unsure at all n locations
aaaccctttcttcttccttgttcaaatccattcactcttggagagagacgactcaagcgcgagagtctctcctctgtatgtactcgttatcgtcactgtgagagagagagagagagcgcgcgcattcccccaattaaagcctctctgctccaaaccgtgatatactctttacgttgtttgtttttgcctttatccttccctagttgtgtataattttgtccttttcttatggagatggatctcagcaaggttactcttgacattttcacaaagcttgaacagaaatggctctctcactgcgactcctcccggaagactcgtatccttagcatcgacggtggcggtaccactggcattgtcgccgctgcttctattctccacctcgagcaccagatccgccttcaaaccggcgaccctcacgctcacatctctgatttcttcgacattgtcgccggaactggcatcggaggcattctcgccgccctccttgtcgccgacgacggctccggcaggccgatgttcactgccagagacgcggttaagtttgtcgcggagaagaactcggagctcttcgggatcaaggtacaaccggagttttcagggggaacaaaaggattcttggggaagagcattgnanagggttttttgaangnnttttagggnaaagnccggaaaaggttttncggtta

SEQ ID NO: 96336 - DNA, 859 bp, Arabidopsis thaliana columbia
  unsure (1)..(859): unsure at all n locations
ataaaccctttcttcttccttgttcaaatccactcactcttggagagagacgactcaaacgcatagtctctcctctgtatttactcgttatcgtcactgtgagagagagagagagagcgcgcgcattcccccaattaaagcctctctgctccaaaccgtgatatactctttacgttgtttgtttttgcctttatccttccctagttgtgtataattttgttcttttctcctcgcgttcgatctcagcaagggtactcttgacattttcacctaagctcggacagaaatgggctctctcactgcgactcctcccggaagaattggattcttaagattgaccggggggggaccaattggattggcggccgttgtttttattttcaactttaagcaccaaatccgccttcaaaccggcgaccctcacgctcacatctttaatttcttcgacattgtcgccggaactggcatcggaggcattctcgccgccctccttgtcgccgacgacggctccggcaggccgatgttcactgccagagacgcggttaagtttgtcgcggagaagaactcggagctcttcgagatcaggtacaccggagttttcaggaggaacaagagatactcggggaagagcatggagagggttttggagacggcgtttaggagagaggacggtaaggtgttgacgatgaaggacacgtgtaagcctctccttgttccttgctacggcctcaaaaacctctgntcctttcggtttttttaaaggggccggcggtttaattatccgagctttgactttnagcttttggaaagtttccgtncaangtaagaaacnccaagctttttaangccgttaanttag

SEQ ID NO: 96337 - DNA, 956 bp, Arabidopsis thaliana columbia
  unsure (1)..(956): unsure at all n locations
actnagggaccgggcctgaacnnccngggtcancccactgnngtccggaaaaacctgttgggttaagaaaggaggtgctttcaccnggtgaagtgagtccggagatgcttgtaaacttggatatnccatgggttatccttggtcactctgaaaggagggcaatccttaatgaatcaagcgagttcgtcggagacaaggttgcctatgcacttgctcaaggtttgaaagtgattgcttgtgttggtgagactcttgaggagcgggaagctggatcgaccatggatgttgtggctgcccagaccaaggctattgccgatcgggtgacaaactggtcaaatgttgtcataagcctatgaaaccagtgtgggccattggaaccggaaaggtcgctagcccagcccaagctcaagaagtacacgatgagctgaggaaatggctggccaagaacgtgagtccctgatgtcgctgctacaacccgcatcatttatggaggatccgtcaatggtggtaactgcaaggagctaggtggacaggccgatgttgatggtttcttnggcggtggtnttctctaaagcctnagtttatcgncatcattaaggccnaagaggtaaggaaagtnccaattggntcattaagaatttaaaagcccttggcttttccagtcgcaactttgaaaaaatgaataagtgggtattatgatatgatacattttgcttcagttgtatttggcaaaagtttctctcttactatattgttttgagaacgcaacaatcattttcttcgccatttatttagctgtggacttgcaatttgcaaatcccttccttttacagtcttctcaactcttcagagaatctgtgtttggagttcataacccctcgggccttttgatcaaacccctatttctaatgtcgtccgatcataaacctgtgtgttatataatatgttgtttgttc

SEQ ID NO: 96338 - DNA, 1187 bp, Arabidopsis thaliana columbia
  unsure (1)..(1187): unsure at all n locations
acgcgtcaaccaactcgacactatcgatctaatcttttcagctctctccatcgtcgtcgtatctgtgactctcgtgatcatcgcctgaaaaaaatttgagataatggccagaaagttcttcgtcggaggcaactggaaatgtaacggaactgctgaggaggtgaagaagattgtgaacactcttaatgaagctcaggttccttcacaggatgttgtagaggttgtggttagccctccatatgtttttcttcccctggttaagagcacattgaggtctgacttttttgttgcggcacaaaactgttgggttaagaaaggaggtgctttcactggtgaagtgagtgcggagatgcttgtgaacttggatattccatgggttatccttggtcactctgaaaggagggcaatccttaatgaatcaagcgagttcgtcggagacaaggttgcctatgcacttgctcaaggtttgaaagtgattgcttgtgttggtgagactcttgaggagcgggaagctggatcgaccatggatgttgtggctgcccagaccaaggctattgccgatcgggtgacaaactggtcaaatgttgtcatagcctatgaaccagtgtgggccattggaaccggaaaggtcgctagcccagcccaagctcaagaagtacacgatgagctgaggaaatggctggccaagaacgtgagtgctgatgtcgctgctacaacccgcatcatttatggaggatccgtcaatggtggtaactgcaaggagctaggtggacaggccgatgttgatggtttcttggtcggtggtgcttctctaaagcctgagtttatcgacatcattaaggccgcagaggtgaagaaaagtgcctaatgagctcattaagcaatttaaaagtcctttgcttttccagtcgcaactctgaaaaaatgaataagttggtattatgatatgatacattttgcttcagttgtatttggcaaaagtttctctcttactatattgttttgagaacgcaacaatcattttcttcgccatttatttagctgtggacttgcaatttgcaaatcccttccttttaaaaaaaaaaaaaaaaaccaaaaccnnaagnnnnnnnnnnnnnnnnnnnnnnnnnnnnnnnnnnnnnnnnnnnnnnnnnnnnnnnnnnnnnnnnnnnnnnnnnnnnnnnnnn

SEQ ID NO: 96339 - DNA, 610 bp, Arabidopsis thaliana columbia
  unsure (1)..(610): unsure at all n locations
attaggatgtgctttaaagttttataaaacatcatcaattcatcagagtccctcatccatcttctcatcctccaacgcgagatcagacttcgacagagagtgcgatgagttcatcaacaagaaagcttgaggttgtttcaccagttcccgccgatatcgacatagctaattccgtcgagcctttacacatctctgagattgccaaagatcttaatatcaaccctcttcactacgatctctatggcaagtataaagctaaggttttgttgtctgcgtttgatgagcttcaaggacaagaagatggatactatgttgttgttggagggattactcctactcctcttggagaaggcaagagtactaccactgttggactttgccaagccttaggcgcttacctcgataagaaggttgttacttgtcttcgccaaccgtcacaaggacccacctttggaatcaaaggaggtgcagctggtggtgggtatagtcaggtgattcctatggatgagttcaatctcaactcactggggatattcacgcggtacgcttccaaaaccctnanngtgaanggacncgntttcatanngcnatcgnaggctttaaagnngtc

SEQ ID NO: 96340 - DNA, 508 bp, Arabidopsis thaliana columbia
ccaatatttagggaagctggcccccgcgcggcccggcccgaatttcccggttcaacccacgctgtccgaaagatctaaccacccgcccgcttcactacgatctctatggcaggtataaagctaaggttttgttgtctgcgttggatgagcttcaaggacaagaagatggatcctatgttgttgttggagggatcactcctactcctcttggtgatggcaagagtgctaccactgtttggactttgccaagccttaggcgcttacctcgataagaaggttgttacttgtcttcgccaaccgtcacaaggacccacctttggaatcaaaggaggtgcagctggtggtgggtatagtcaggtgattcctatggatgagttcaatcttcatctcactggagatattcacgcgattaccgcttccaacaacctcttagctgctgcaatcgacactcggattttccatgagacgtctcaatccgacaaggctctttttaataggctgtgccctc

SEQ ID NO: 96341 - DNA, 1034 bp, Arabidopsis thaliana columbia
  unsure (1)..(1034): unsure at all n locations
taggtgcactatagaagagctatgacgtcgcatgcacgcgtacgtaagctcggaattcggctcgagcttgtcttcgccaaccgtcacaaggacccacctttggaatcaaaggaggtgcagctggtggtgggtatagtcaggtgattcctatggatgagttcaatcttcatctcactggagatattcacgcgattaccgcttccaacaacctcttagctgctgcaatcgacactcggattttccatgagacgtctcaatccgacaaggctctttttaataggctgtgccctccgaataaagaagggaagcgtagtttcagtgacattatgttcaggagattgacaaagcttgggatatccaagaccagtcctgaggagcttactcccgaggagataaagaagtttgcgaggcttgatattgatcctgcttctatcacttggagaagagtgatggatgttaatgatcggttcttgaggaagattactattggtcagggacctgaggaaaaggggatgactagagaaactggttttgacatttctgttgctagtgagattatggctgttttggctttgacaacctcactaggtgatatgagagagaggcttggtaaaatggtgattggtaacagcaaggcaggggatccgataacagcagatgatctcggtgttggaggagccttgactgttctgatgaaagacgctattaacccgacactcatgcagacactggaagggacccctgttctagtgcatgctggtccttttgcaaatatagctcatggaaattcatcgattgttgctgataaaatcgctttgaagctggtgggacctggtggatttgtggtaactgaagcgggttttggttctgatattggaacagagaagttcatgaatattaagtgccgttacagtgggctaacgcctcagtgtgcaattgttgtggcgactgttanggctttgaaaatgcatggaggtgggcctgatgttgttgccgggagaactcttgatcgtgcttatgtaagcgagaatgtt

SEQ ID NO: 96342 - DNA, 1145 bp, Arabidopsis thaliana columbia
  unsure (1)..(1145): unsure at all n locations
acnnnnnnnnnnnnnnnnnnnnnnnnncacttccgcagtaccggtccggaattcccgggtcgacccacgcgtccggttgcgggttttggttctgatattggaacagagatagttcatgaatattaagtgccgttacagtgggctaacgcctcagtgtgcaattgttgtggcgactgttagggctttgaaaatgcatggaggtgggcctgatgttgttgccgggagacctcttgatcgtgcttatgtaagcgagaatgtttccttagttgaagctggctgtgtgaatctggcaaagcacatctcaaacacaaaggcctacggtgtgaatgtaattgttgctgtgaatatgttcgcaacagataccgaagcagaactaaatgcagttaggaaattttcaatggatgccggtgcttttgatgctgtggtctgctcccaccatgctcatagtggtaaaggagcggtggatcttggtatcgcggttgaaaaagcttgtcaaaacattacacagcccctcaggtttctctacccattggacattggtatcaaagacaaaattgaggcaatagctaagtcatatggagccagtggtgttgaatattcagaccaggcagagaaacagattgagatgtacacacaacaaggcttctcgaatcttcccatatgcatgtcgaaaacacagtactcattctcacatgatgcatcaaagaaaggagcaccttcagggtttgtattgccaattagggatgtaagaggaagcattggagctggtttcatatatccactggttggtacaatgagtacaatgcctggacttcctacaagaccttgtttctacgagattgatattgacactgaaactggaaaagttcgtggcctttcttaagtttggtagatctgtcaaagcttcaaggctttccttcatcgtcgtttctcacttccacaataaaaatttggcgattgtactttgatactgagtgtttttccattttaagatgaataataataaagtatcttttcctaaaaaaaaaaaaaaagggcgacagcannnnnnnnnnnnnnnnnnnnnnnnnnnnnnnntnnnnnnnacgggagtgcaannnnnnnnnnnnnacaatccnnnnnnnnngagcagctggcagtatcat

SEQ ID NO: 96343 - DNA, 824 bp, Arabidopsis thaliana columbia
  unsure (1)..(824): unsure at all n locations
ccccgcccccccccctttgattttgcaatggcatttggnaccccccccgaggtcgactgtatcgataagcttgatatcgattcgcggccgctgcaaatatagctcatggaaattcatcgatttttgctgataaaatcgctttgaagctggtgggacctggtggatttgtggtaactgaagcgggttttggttctgatattggaacagagaagttcatgaatattaagtgccgttacagtgggctaacgcctcagtgtgcaattgttgtggcgactgttagggctttgaaaatgcatggaggtgggcctgatgttgttgccgggagacctcttgatcgtgcttatgtaagcgagaatgtttccttagttgaagctggctgtgtgaatctggcaaagcacatctcaaacacaaaggcctacggtgtgaatgtaattgttgctgtgaatatgttcgcaacagataccgaagcagaactaaatgcagttaggaaattttcaatggatgccggtgcttttgatgctgtggtctgctcccaccatgctcatagtggtaaaggagcggtggatcttggtattgcgggtgaaaaagcttgtcaaaacattacacagcccctcaggtttctctacccattggacattggtatcaaagaacaaaatgaggcaatagctaaatcatatgggacccagtggtgttgaaatatttcagacccaggcagaagaaaacaagattgaggatgttccaccacaaacaaaggcttttcttcgaaaatcttttccccattattgccatggttcggaaaaaacaacagggtacctctcaatttc

SEQ ID NO: 96344 - DNA, 721 bp, Arabidopsis thaliana columbia
  unsure (1)..(721): unsure at all n locations
cagctannnnnnnnnnnnnnnnnnnnnnnnnnnnnnnnnnnnnnnnnnnnnnccgcgccattattgccgggacccacccgtccgcccacgcgtccggtctccttctcgacttcttcttcttcttctcatttctcaatctcaacttttctcttctcttctcttcttcgctaacggcaggagagagagagacccagaaatccgatccctcctctccttggattatcggagtcagcgattcatcgtcgctgataaagcttctacctttctcttcgatttttgttgtgagattcgattcgatcttaaggcggattagatcgaggtatgcagcaaggcgatcaaacggttctgagcttgagacctggtggcggtcgaggaaacagactatttggttcctcttcttcttcttcgtctctctcttttggctctctttcatcttcggatctacctctccttcgtcctcatggtggtgctcctgcttcctcttttcccttcaagggtggagactcgaggttcgatggccgtgaacgtgtgaagtacacccgtgagcagctcctggcagcttaaagaggcccactcaaactctctgatgaaattctgagggtccaacgggaaactgcagcttgaactgttttgggtgaggaagggctttgggcaccgtggagaantttncgaagaaatttnggtncccgtnaanncgaaagcgtttttttngccaactttg

SEQ ID NO: 96345 - DNA, 561 bp, Arabidopsis thaliana columbia
  unsure (1)..(561): unsure at all n locations
acccacgcgtccgcgtgtgcacaacgcatccttgattgctcaaccagcacttgttcagaacgagaagaagcttggggaaaagatcaacattctctgccttatcgagatcatcttcagccgacccgctgaagatagaaccattcctttgagcatcatcgctgagcgtactaaactttccattgaagatgttgagcaccttctcatgaagagcctttctgtgcatttgatcgagggcatcatagaccaagtgaacggaacaatttatgtctcatgggcgcaaccgagagtactagggattccacagatcaaggctttgagggatcaattagacagttgggttgacaaagttcacaccactttactatctgttgaagccgagacaccagatcttgttgcagcataagagaaaagaaaaccttcttcctccttttggagctactgaatgtaaaacaccatcttctctgggattagattcaagtttttaatttcagtcgtagaagaaattacaattgcttttnaatcttttgacttccatttcaagatgtccgaaatttcagttct

SEQ ID NO: 96346 - DNA, 359 bp, Arabidopsis thaliana columbia
cggccccgtggccaaaaaaataatgttgaaccgtccgagggccatttttttgggccgcccatcgccgttaaggagggggcttaaacctcggcccgccggccgacgtggttttccggttggtccaaaagggggtggtctttcggaaggtggttcaccaggctttttgcgaaaaaggagatccgtttcctgtgggtgggcctcgatcctgctggtaggacgcctttcctttccaggctcaaactgggggggaccgtccccactattccacccatggggtccaccgttgggactgtggaatccaaaaccatcagcttaaccgggtggaatgtggggggtcaagacaggatccgtccattggg

SEQ ID NO: 96347 - DNA, 492 bp, Arabidopsis thaliana columbia
acgactcactttagggaaagcatcgtacgcctgcaggtaccggtccggaattcccgcggctgatctctgtattggatttttgatataaggtttgaaatcatggaggtcgttgatattgatgcccgagctgctaagttagggattgattggtctcaggttaattttgattccatccaacttcctcctggagaagactttgggatcgagagtgatgatgaagctgtttaccaggatgaccagtctgaattcgacactggattcggtaacattatcgtggtcgatcacctccctgttgttcccaaggagaagtttgagaaacttgaaggtgttgtcaagaaaatttacaaccagttaggtgtgattaaggaaaatggactgtggatgccctgtgatcccgataccaagatgacattgggctactgttttattgagttcaacactcctcaggaagcacaataacgcttaggtaaagtcttatggtttcaagtttgt

SEQ ID NO: 96348 - DNA, 1622 bp, Arabidopsis thaliana columbia
agctaccatacgactcactttagggaaagctcgtacgcctgcaggtaccggtccggaattcccgggtcgacccacgcgtccggcctttcgtctatctctcacctgaaagaaagacgttcagctttctctttccaaaatcaaaagctctccgatcagtttctccggcttaggaaattaattgaaggaaggtgatgagaggtactactgagaatacggatctgttcgatcccaaaacccaaatggatcctgacttcactcgtcatggttcttcctccgacggcgattttggattcgcttttaacgacagtaacttctctgatcgtttgcttcggatcgagatcatgggtggaccttcggattctcggtctgaagttgaagggtgtacgagtatcgctgattgggctcgtcatcgcaagagaagaagagaagatatcaagaaggaatctggtgtcacgatttcagacattgtggcatgtcctgaggagcagattttaactgatgaacaacctgacatggatggatgtcctggtggtgagaatcctgatgatgaaggaggagaggcaatggttgaagaagctttatcaggtgatgaagaggaaacgtctagtgagccaaactggggaatggattgttctacagttgttagggttaaagaacttcatattagttctcctattttagctgccaaaagccctttcttttacaagttgttctccaatggaatgagggaatctgagcaaaggcatgtcacccttaggattaatgcatcagaggaagctgctttgatggagcttttaaactttatgtatagcaatgcggtatctgtcaccacagcacctgccttattagatgtgttgatggctgctgataagtttgaagttgcctcttgtatgaggtactgcagtagacttctccgtaatatgcctatgactccagagtctgccctgctctatctcgagcttccctctagtgttccaatggccaaagctgttcagcctttaactgatgctgcaaaacagttccttgcagcccgctacaaggatattaccaagtttcatgaggaggtaatgtctctacctttggctggaattgaggcaattctatcaagcgatgaactccaaattgcatcagaggatgcagtttatgattttatcttgaagtgggcaagggcgcaatacccttgtttggaagagcgaagagagattctcgggtcacgccttgcactctccatccgcttcccattcatgacatgccgaaagctgaagaaagtgctgacttgcagtgactttgagcatgaaatagcatcaaagcttgttctagaagctcttttcttcaaagcagaagccccacacagacaacgtagcctagcctccgaagaatctgcatccctgaaccgccgcctgatagagagggcttacaaatacagacccgtcaaagtggtcgagtttgagcttcctagaccgcagtgtgtagtctacctagacttgaaaagagaagaatgtgggggactgttcccgtcgggtagagtgtattcgcaggcctttcacttgggaggtcaagggttttttcctgtcagctcactgcaacatggaccaacagagctcgttccactgtttcgggct

SEQ ID NO: 96349 - DNA, 426 bp, Arabidopsis thaliana columbia
  unsure (1)..(426): unsure at all n locations
cccctttggggaaagctggtaccncctgcaggtccccggtccgggattccccggtcgnccccacgcgtccggtccgaaagacgccttcgaaagaataaaataataaatgtctttgacatccaattataccactgaaattttttttcatttttgaatggcagttccaaaaaaacgtacttctatctcgaaaaagcgtattcgtaaaaaaatttggaaaaggaagggatattggacatcgttgaaagctttttcattagggaaatcactttctacaggtaattcaaaaagtttttttgtacagcaaaataaataaaaaacactataataattagaattagcctaacttaaaaaccaatttgtttaaatacatctaaaaaaaataggaagcaaaagaagaaaaaaagacaatatatagataanatatat

SEQ ID NO: 96350 - DNA, 454 bp, Arabidopsis thaliana columbia
ccacgcgtccgctcttcagctaaaactttgatcatccatacagtggaaatggagaaggtgcaacaaatgacggacaacaaaggaatcatgaaggttgaaattcatagccatttcaattctgcggtggaagtgggttcccgtgggctatctcgtcagacaagcatgaccaagaccaactgcctttgctcaccaaccactcaccctggttctttccggtgtaggattcaccgttctctttcgttgcaacgtaccaagagtatcgaggctgcatctctattggattctccaccaaagccagcggattcccctagtaccgctacatagattcatgcatgaatccatgacattaccaatgtttgttgtaacttgtaatttgatcattatatggaggagtaggcctttatttttccaacaatacgcatgaatttacgcgttaatcaatggcattacaatt

SEQ ID NO: 96351 - DNA, 471 bp, Arabidopsis thaliana columbia
aatcgacctgcatcgatgtatggtagcatcgcgagggagctcatcggagaaggaagtcaaagcccgcttgtgatgggtttgatctcgatattgaagtcaacgacgggtcatgagtcgtcaacgatgaatgttccgtgtccaaaaggaatggaagatgcaaagaaaaggaaccgatttcctgtgattgttatgtgtgaaaaccctggacaagaccctgtagtaaacccctaccacgcaactgttaaacaaaagtgtgattttttgttgttatgagtttgtactatagaatcgtgtaaaacctcctttgtgttgttgtatgtaaattgggatattgttaaattcatgttttggccactccaagaaacaaaaaaaaataatataaaaaaatcaaccccatagagcggccgctctagaggatccaagcttacgtacgcgtgcgatgcgacgtcatagtcttctatagtgttacct

SEQ ID NO: 96352 - DNA, 1506 bp, Arabidopsis thaliana columbia
atggcgataagaatcactttcacttactccacccatgttgctcggaatctcgtcgggacccgtgttggtcccggtggttactgctttgaatccttggttcgtcctagattcttctcccacaagcgtgatttcgatagatctcctcggaatcgacctgcatcgatgtatggtagcatcgcgagggagctcatcggagaaggaagtcaaagcccgcttgtgatgggtttgatctcgatattgaagtcaacgacgggtcatgagtcgtcaacgatgaatgttctgggggtttcatctttcaaggcttcttctattattccgtttcttcaagggtcgaaatggattaagaatccaccggtgattgatgacgtggataaaggaggaacagtttgtgatgatgatgatgataaggaatcgaggaatggaggaagtggatgggttaataagcttttgagtgtttgttctgaggatgctaaggctgctttcacggcggttactgtttctatcctttttagatcagctcttgcggagccaaagtcgattccttcaacgtctatgtaccctaccttggacaagggtgatcgcgttatggcggagaaggtctcatactttttcaggaagccagaggtttcagatatagtaatcttcaaggctcctccaattttgctggaatatccggaatatggctacagttccaatgatgtattcataaaaaggatagtggcaagtgaaggtgactgggttgaagttcgtgatgggaagctctttgtgaatgacattgtgcaagaagaagattttgtcttagaaccaatgtcatatgaaatggaaccaatgtttgtccccaaaggttatgtctttgtccttggtgataaccgcaacaaaagctttgactctcataactggggtccacttccaatagagaacatcgttggaagatctgtgttccggtactggccaccgagcaaagtatcagacaccatataccacgaccaagctatcacaaggggacctgttgcagtttcatgacaaaagaaagttggatttttcttaggattaaagcacaagattgtgcaaaaccagtctggtcagaattgggtagacttggaattgaaactcaaaaccgttatgatatctgcagatacatactgtatcatcgttatggatcgcatctggttcttagctgatggtcgggaagccggagatgttacgtgttcaaaaggaatggaagatgcaaagaaaaggtaacgatttactgtgattgttatgtgtgaaaaccctggacaagatactgtagtaaaaccataaaggcaactgttaaacaaagtgtgattttttgttgttatgagtttgtactatagaatcgtgtaaaacctcctttgtgttgttgtatgtaaattgggatattgttatattcatgttttggctacgcaaaaaaaaaaaaaaaaaaaaaaaaaaaaaagcgaccgctctagaggatccaagcttacgtacgcgtgcatgcgacgtcat

SEQ ID NO: 96353 - DNA, 573 bp, Arabidopsis thaliana columbia
gaaaaatgatagtgaagttaagaaagtatatatgtgaaaattaaattcagttgagcgtaaatagaaaacccttacaaaaaaccaaatccctttcttatttttatttttgtgccattttctatatatattaaaaaaaaaacattcttataatctgaaatcggaaaaattcacttcactctcttcgttttgcgtttttttgtgtgtgtgttttaaatatcaaagccatgttttgggtaaggaattaaagagcaaaaacctcgattccgatttcaaatattcgaaggtgaaatttcttcattttctgcgaatttggtagctatcacgttctcaatctggtgaattagggcttttgttgagctgtggaagctaatgatgggtgtacccaccgctgaggaaggtggggtttctctttgttgctatgtcttgaaaccttagtttgcttttgtcaatgggtaaaaccgaggatgatgtgagtctccgtgtcgccggcggcgaagctaccggcgattcgacggtgaggaatgctcggtgtgggtgttgcaaatggatctcaagcttcgttgggttcaaatg

SEQ ID NO: 96354 - DNA, 806 bp, Arabidopsis thaliana columbia
gcagtaccgcgtccggaattcccgggtgcgacccacgcgtccgcgtgactactttcaagcgaccttcctcttctccaagtcccatcttcgtctccgtcatcttcacggcgcatcctccaaaaacgcttagcttctctctctgttacgtttactcaagtcttttttagtctcctccttaactctcaagccttttccaagtttcaagcggctccaacggttcaattgcgcactttccgatttcgtggcttcactttccgatctgttctagagaacttcaatatatatccatatatggtttcattggtctgtgagccatatcctaaggacctaaaactagctagctctcttactatggagggagaggaaacttgaaccttcagcgtaccccttccttttcaacaaaggacggttgcaagaaggcaagcagggggctctgtgcgtagaaacaagagttataacttcactgattatgactctaaggcacgtcaatggccttctggtccagttcttgttccatatatgacgggtctagatgatgaggttactgaacctgcctctgttcctttcacttgggaacaagctcctggaagattaaagggcactgatttcaaaccccaaagtttgtgttttgatgaaagaagaacaaccagtttttacaccatgtcttccaccgggtaaagccgcggatgcaaaccatgacaagattgcagagttcaaagggtaaacaagctgaaaaatcacatgatgatgaacattatgggttttttgaaggctcttgacactctctttttcaaaggactcgtttc

SEQ ID NO: 96355 - DNA, 501 bp, Arabidopsis thaliana columbia
ctctcatggctgttgtcgttgcagagacgtcgttgattttcgatttggatttcaagcttttcacgtactcattggaacgatccaatctcaaaagtctctgattttgggagagagcttcgttaaactcagcgcgaattgtaatttcccttttgccgcgattttggattacaaggtgaaataatttgacagctgaggatttaagcatttatgtgctgcaactctgcaagcttgtcatgtaccactgtttgtatattgtttataaataaaacagtggacttaaagttaagggaatgtcagcacctgcgaagtttgattattcttctggtgggccagagaggcctttatacaggtccaacttacctgcacaaatggaaagatctagtacctttcgtgagacgatggaacatcctgtctcgtcatctcacccgagcatgttgaggagcacttcaccaatagcacaaaccgatgtaacaaacttttttcagtgtttgcgttttgatc

SEQ ID NO: 96356 - DNA, 459 bp, Arabidopsis thaliana columbia
  unsure (1)..(459): unsure at all n locations
cggnccggaaatcccggggcggccccacccttccgttcttaaatcctttcctttcaatggtggttaaccaaggattccgattttggccacttaagttttccaccattcttctttggcgggccaaccggttttaaggccctccagggccctattccaaaggggggccgtttgggccgggggccgggtgaccttccttcgtcccgccaggtttactccccaaggcttttggtttggcccagcccgtcccaggtcctggggccctttttgggggaccacacgcgtcttaccttaactggggattcccccggggcctccggttgggccaccgttggcttttgggttgccccggagccattcgttaggacccgggggctggaagtattccacagcagatggcttatgtggggggctttcggatgcccattccttgaaatcttttccaggaccggtgttaaattc

SEQ ID NO: 96357 - DNA, 479 bp, Arabidopsis thaliana columbia
aaaaaaacgaattttgataatttagggttttgcccttttcttctctcttgcgttatcatcggtgttttgattctccggccaagtcccggagacttgtgatctgggggaatttggtgttcaatttcattaagacgcgatgatctcgtccaaaaacggagctgccatgatctcccgacctgtctttctttccgatcgagttgatgaagtcttctctagaaagcttgatttgtctgtctcttcttcgtcttcttcgagcctcctccagcagttcaataagactcatgaaggtgatgatgacgcacgcctggctcttgctcatcagctatacaaaggaggcgatttcaaacaagccctggagcacagcaacatggtttaccagagaaacccattacgcactgataatcttcttctaattggtgctatttattaccagcttcaagagtatgatatgtgcatagctcgaaatgaagaagctcttc

SEQ ID NO: 96358 - DNA, 768 bp, Arabidopsis thaliana columbia
tgcaattttcctctcctcccaaccaaaacacaagagccaagaacaaagaaaccatggatcatgatcacatgcatggaatgcctcgaccatcatcatcatcatcatcatcaccatcatccatgatgaacaatggatccatgaacgaaggaggaggacatcaccacatgaagatgatgatgcacatgaccttcttttggggcaagaacacggaggttctcttctccggttggcccggaacaagctccggcatgtatgctctttgtcttatctttgtcttctttctcgccgtcctcaccgaatggcttgctcattcctctctcctccgtggctccaccggagattcggctaatcgtgccgccgggttaatccaaaccgccgtgtataccctccgtatcggcctcgcctatctagtcatgctcgccgtcatgtcgtttaacgccggtgtgtttctcgtcgctctggccgggtcatgccgttggtttcatgttgttcggaagccaaaactttcccggaatacctccgatgacccggaaaactaactatgttcctccctcaggttgtgcttgttgatgataatatcaatgctttatatatatgtatggattgatccatgcttgtgattcaaattaaagatctagggtttgtagttttcttggttattttatggattgttcttgaggttcatgtgtgtgtgaatgtgaggaggaggaatatttgatattttctatcgtttgcttaattttttttgcttttgttttaaaaaaaaaa

SEQ ID NO: 96359 - DNA, 928 bp, Arabidopsis thaliana columbia
agaataaactcggtaggtttgcgaaaacctcgccgccgggaaaaaaaaaaatcaatggaaggaggaggaagaggaccaaatcaaacgattctcagtgaaatagaacatatgcctgaagctccacgtcaacgtatctctcatcaccgtcgagctcgctctgaaaccttcttctccggcgaatcaatcgacgatctcctcttattcgatccttccgatatcgatttctcttctctagacttcctcaacgctccaccaccaccacaacaatcacaacaacaaccgcaagcttctcccatgtccgttgattcggaagaaacctcatcgaacggtgttgttcctcctaattctcttcctccaaaacccgaagctagattcggtcgccatgttcgtagcttctcggttgattccgatttcttcgatgatttgggtgttactgaggagatgtttatagctacaggttcaggagagaagaagaaagggaatcatcaacatagcaggagtaattctatggatggagagatgagttcggcgtcgtttaatatcgaatcgattttagcttctgtgagtggtaaagatagtgggaagaagaatatgggtatgggtggtgatagacttgctgagcttgctttgcttgatcctaaaagagctaaaaggattttagcgaatagacaatctgcggcgaggtcgaaagagaggaagattaggtatactggtgagttagagaggaaggttcagacacttcagaatgaagctactacattgtctgctcaagtcactatgttacagagaggaacatcagagctgaacactgaaaataaacacctcaaaatgcggcttcaagctttagagcaacaagctgaacttagggatgctttgaatgaagcgctgcgggatgaactgaaccgacttaaggtggtagctggagaaa

SEQ ID NO: 96360 - DNA, 435 bp, Arabidopsis thaliana columbia
  unsure (1)..(435): unsure at all n locations
ccggncgggatttccgggtcggccccacccgtccggggggtcctcggagtaaagcggtgggggccttgaccttcctcctaactagttctacaactatggcttcggtaatctttccaccttggcttaggggccttttaatgggaccagtagttccggtggttgcagtggccatgtcaaagcctttacttaagggggtcctggttccaataactctgggcctggggttaaatccttttgcaaagcctggggccactctttttaaaccggggatgccgttggtggctttggtttgcacttcgtggggcatgggaggcccactttcgattaatcgcagccagatcctgccagctgaaggtctgggttggatggttccaatggttccattccatgccgtaccattggccttaggatttgggtcctttaagatcccaggct

SEQ ID NO: 96361 - DNA, 570 bp, Arabidopsis thaliana columbia
caacaacaaaatttaccaacactctctctttctctttctctctgaaaacttaaaacgatggctataaccgccactcaaaacgacggcgtttcactaaacgccaataagatttcgtatgatcgtgtggaaactgatgttgagatcatcacctccggtcgtcgtagtattccggcacactccggcatcctcgcttcggtctcaccggtactgacgaacatcatcgagaagccgaggaagattcacggcggatcatcgaagaaagttattaagattctcggtgttccatgcgacgccgtttcagtcttcgtcagattcctctattctccgagtgtcacggagaatgagatggaaaaatacggaatccatctactggctttatcacacgtgtatatggtgactcagttaaagcaacggtgcactaaaggcgtcggtgagagagtaaccgccgaaaacgttgtcgatattctccagctggctcgtctctgcgacgcacctgacctctgtctcaagtgtatgcgattcattcactacaagttcaagaccgttgaacagacagaaggatggaagttt

SEQ ID NO: 96362 - DNA, 588 bp, Arabidopsis thaliana columbia
  unsure (1)..(588): unsure at all n locations
caaaaatacaaatcatactaaaaagaatgcttgattaaatacatcatcttaaagatctttaccaaactcgactttnccaacgttttaatcatacattaaaatcactacaaccagattgcnattgatttagacttgtttcatattcaaaaacgtgtgaaacaanncacaaggaacacgaaactngtaccaacatcaaatttgaataantcaacggcaaattttacccttagtatgcaaaatgactagaatacccctatatgtatctttggtttagtgtcacggagaatgagatggaaaaatacggaatccatctactggctttatcacacgtgtatatggtgactcaggttaaagcaacgggtgcactaaaggcgtcggtgaggggggtaacccccgaaaacgttgtcgatattctccagctggttcgtctctgcgaagnacctgacctctgtntcaagtgtntgcgattcattcactacaagttcaagaccgttgaacaggcagaaggatgggaagtttcttcaaagaacaagantccttttcttngacctggacaatcntncnanttnattcgacggntggagaatt

SEQ ID NO: 96363 - DNA, 430 bp, Arabidopsis thaliana columbia
cctccctctaaaattccccggcgactcagttctccggaaatcgtagaataaatcagattcttgctctttagtatgaaacaatgaatttgatctcaagaacattgacaagagcagtgtcttcgtcactataccactcaaaagcagcgaagctccccactcaaaaatggataatctcgcagcaaatccgtgttttctccgccacagtcatcagcggtggaggaaagaaacctctggcaaaagtatctgtgaaaccaccgctaaatgtagcgacggagaaagaatcgactccgccaaagaaaattgagtacaaaccggaaatttcaaactggttcaacctaatcggattcgttgaacaaccagttcaattcggtccttgttccgatggaaaattctgggctggaacagttatttctcagcggtctggttcaaa

SEQ ID NO: 96364 - DNA, 832 bp, Arabidopsis thaliana columbia
  unsure (1)..(832): unsure at all n locations
cggtccgacccaggcgtccgagtcagactactgtccctgagtttggcaccttttcaaaaagtcagcatcaaggacagactggttctaaaagcaaaagagtgggggttgaaagatatgtaccgaagcctatagtaaaggaaatggctgagcaaatcgtcagtaaaaatctagtaacctctgctccagatatgtcggagaatgtaaaccagaaagaaaatcgtggaggtgagggtacaggaattctccaaccttctggttcaactgcagggaaatctgggtctccttcaaagtcaagacatgggaatggtaggcagggaaagcatggtagagaacatgcatcatggcaccagagaggttctggagcacctactaaagctttggaggatggacaatttgtaacctcaaatcagcccatccgaggaacagtgaactatcactctagtaagcaaaccgaacaaattgctgccaaggntcaaaccacatgtaataaggatggatggaacgatggctggtatatgactcctgaaacgcattactctgctgccgaagaaatggaatccagtgctgttggaaaagatcaaggaatgagcatgcacgggcaggcagcatgctttcaaggaggcaacaaggatgggaggaagcaacttttggtgaccctaaaaaaggcatnagnggggttttcaataaaggctcatncggggcactnttggccatgggnttngccaaccnggtttnccttgtggttnaaaagaaggtngttncctggggtcantttttgnantcanttntggccagtagtttgtggcngtgaantcaagggcaacctttnttc

SEQ ID NO: 96365 - DNA, 538 bp, Arabidopsis thaliana columbia
  unsure (1)..(538): unsure at all n locations
nnnnnnnnnnnnnnnnnnnnnnnnnnnnnnnnnnnnnnnnnnnnnnnnnnnnngaaaaacagaacacaaccacgcgcccgttgtaacattagtttaagcattaagcttctttatgtcgaataataataattctccgaccaccgtgaatcaagaaacgacgacgtctcgtgaagtctcaatcacattgcctactgatcaatctcctcaaacctcaccaggatcatcttcttctccttcaccgagaccttccggtggatcaccggcgagaagaacggcgactggattatccggcaagcactctattttcagggggattcgactacgtaacggaaaatgggtatcggagattagagagccacgtaaaacgacaagaatttggctcgggacttatccggtaccggagatggctgccgccgcttacgacgtggctgcgttagctttaaaaggacccgacgccgttttgaattttcctgggttagctttgacttacgtggctccggtttcaaactctgctgcggatataaaaacgctgctatta

SEQ ID NO: 96366 - DNA, 506 bp, Arabidopsis thaliana columbia
ataccgcgataaccgacggagaagcatcgaggataacgacgacgatgacgatgataacgaagacggtggcgattggttaccgccgcatgagtttctggcgaagacgagaatggcttcgttctcggttcatgaaggagtagggaggacattgaaaggaagagatctgagtagggttcgaaatgcaatttttgaaaaatttgggttccaagattaaatatttggaaacttttggagttttcctttaatttttggcttacttcaatcattttctcaagtaactgtcagagaagagagagagcatgtaatatttctagaaatgccctccatttatcgttatattccgaaaatcttaccctatgtaattgtttttttaacttttgagatttttatcacattttgcgtaatgagtaatagataatgttttctttaaaaaaaaaaaaaaaaagggcggccgctctagaggatccaagcttacgtacgcgtgcgttcgacgtcatagtcttcta

SEQ ID NO: 96367 - DNA, 679 bp, Arabidopsis thaliana columbia
cataactctcccgagccaacccaacttgcctttccttgactctgcaaccgctggaagctctgcttcctttttcagggaggcgagggattcatctctgtttaggaattggctaaggaatttggaatcagagagtggaattttagctgatggttcaatgacattaaaccaagttcttatccagggagttgatatgtttggcaaaagaattggatttctcaaatccaaagcggatattttcgacaaggaaactggtcaaaaggttgttccaggtattgtatttgcacgaggaccagctgtagctgtgcttattctcttggagccagatggtgagacttatgcggttctcactgaacaggtatctctatttatgttcgtgttgttctattttttaacaaagatcaacattatacgggttgttttggaaggttcgggttcctactgggaagattgttctggaattacctgctggaatgttggatgatgataaaggtgactttgttgttactgcagttcgcgaggtcgaagaggagattggtataaacactgaaaaaagaagatatggttgatctcactgctatccttgacccatctactggttaccggatcttcccttttcctggaggctgtgcttgaaacgatatccgtgtttttttaccgaggtctagttaagaaaggaaac

SEQ ID NO: 96368 - DNA, 434 bp, Arabidopsis thaliana columbia
  unsure (1)..(434): unsure at all n locations
gggccgacccacgcttccggaatggagattactttggatcagttttcttttttggtggaaacacancaagagcggatgcggcaagttcaagaagcgggggggcccaaacaaagagccaatttgcatttgatgattcagtccccagcactccactctcaagatccgggaactctccacctcggttcagcgatgcatcagcttgagataataactttgatagcttctccaggttcgactccttcaacaccagttgaagcaggcgccgggttttcttcgcagcccgagagactgtctcggtttgattccatcaacagctccaaagactttggtggagctgccttctctaggttcgatccaattaacagttccagagacgccactgggagcttgagaaatttttcggaggttttgattccatcaacagtaggcaaaga

SEQ ID NO: 96369 - DNA, 2709 bp, Arabidopsis thaliana columbia
atggcgtcagaagcttcgccttcttcttcggccaccagatcggagccacccaaagactctccggcggaggagagaggtccagcttctaaggaagtatcagaagtaatagaatcgctaaagaagaagcttgcagctgataggtgtatatcaataaagaaaaggattgatgaaaacaagaagaatttgtttgctattactcaaagttttatgaggtcttctatggaaagaggaggtagctgtaaagatggcagtgatcttttagttaagaggcaaagagattcgccaggtatgaaaagcggaatcgatgaaagtaataacaacagatatgtagaagatggacctgccagttcaggaatggttcaaggatctagtgtccctgtcaaaatttccttacgtcctatcaaaatgcctgatatcaaacgtttgtcaccttataccacatgggtttttctggacagaaatcaaagaatgactgaagaccagtctgtagtgggtcgaaggagaatttattatgatcaaactggcggggaagcgcttatctgcagtgatagtgaagaggaggccattgacgacgaagaagaaaaaagagattttttggagcctgaagattatattattcgcatgacccttgagcaactaggtctttcagactcagtcctggcggaactagcaaatttcttgtctagaagtactagtgaaatcaaggcaagacatggagtgcttatgaaggaaaaagaagtatccgagagtggcgataatcaagcagagagctcccttctcaacaaagatatggaaggagcattagattctttcgataacctgttctgccgtagatgccttgtatttgattgccggcttcatgggtgttcacaggatctcatttttccggctgagaaaccagctccatggtgtcctcctgtagatgaaaatttaacctgtggtgcaaactgctataaaacgcttctcaagtctggaagatttccgggatatggccccattgaaggtaaaactggcacttcatcagatggtgcaggtactaaaaccacacccacgaagttctccagcaaacttaatgggagaaaaccaaagaccttcccaagtgaaagtgcatcgtctaatgaaaagtgcgcactagaaacaagtgactcagagaatggactacagcaggataccaattccgataaagtttcatcatcgccaaaggtgaaaggtagtgggagacgagtaggtcgtaagaggaacaacaaccgagttgctgagcgagttcctcgtaagactcagaagaggcagaagaagacagaagcctcggatagtgattccatcgccagtggaagttgttcacccagcgatgcaaaacataaagataatgaagatgctacttcctcttctcagaagcatgtaaaatctgggaactccgggaagtcaaggaagaatggcactcctgccgaagtctccaataattctgtgaaggatgacgttcctgtttgccagtcaaatgaggttgcgtcagagcttgatgcgccgggtagtgatgaaagtctaaggaaagaagagtttatgggtgaaactgtatctcgaggaagattggctacaaataagttgtggagaccacttgagaaaagcctttttgataaaggtgttgagatttttggaatgaatagctgcttgattgctagaaatcttttgagtggtttcaaatcatgttgggaggtcttccaatacatgacgtgctcggaaaataaagcttccttctttggaggtgatggattgaatcctgatggctcttccaagttcgatatcaatggaaatatggttaataaccaagtgaggagaaggtcaagatttctacgtaggagaggcaaagtgcggcgcttgaagtatacctggaagtctgctgcatatcattcaattaggaaaagaattactgagaagaaagaccagccctgccgtcagtttaatccatgtaactgccaaattgcttgtgggaaggaatgtccttgtttgctaaacgggacttgctacgagaagtactgcggttgcccaaagagctgcaagaataggtttagaggttgtcattgtgccaaaagtcagtgtcgaagccgccagtgtccatgctttgctgcagatcgggaatgtgacccagatgtttgtagaaactgctgggtcattggtggggatggttcgcttggggtcccaagccaaagaggcgataattatgagtgcaggaatatgaaattgctcctgaaacaacaacaaagggttttacttggaatatctgatatttctggttggggagctttcttaaagaacagtgtaagtaagcatgaataccttggggaatacacaggagagctgatctcacataaagaggcagataaacgcgggaagatatacgatcgcgagaactgctcttttctcttcaatctaaacgatcagtttgtgctagatgcttacaggaaaggagataaactgaaattcgccaaccattctcctgaacctaactgttacgcaaaggtcatcatggttgctggagatcacagggtggggatcttcgcaaaagagaggatactggctggagaagaactattttacgattaccggtatgagccagatcgagctccagcttgggccaaaaaacctgaagctcctggttctaagaaagacgaaaatgttacaccttctgttggtagacccaagaagcttgcttag

SEQ ID NO: 96370 - DNA, 518 bp, Arabidopsis thaliana columbia
  unsure (1)..(518): unsure at all n locations
cagctcnnnnnnnnnnnnnnnnnnnnnnnnnnnnnnnnnnnnnnnnnnnnnnnnnnnnnnnnnnnnnnnnnnnccacgcgtccggacgcttttagctctctcttcttctctgtcttctccttccttcttctgccgcaattctcgtattcgtttctctcctgtgtcgcgtatttcttctcttaatggtgataataagcttacaaattctccgccacagtttttaaatgccggcgcgagtctccgtcgttttgtggctccggggaagtttccaagtgtgagacttagggttttgacgaggtgcgagaaagaaaatgcacccaaaggtgggattgaagatgacgcggagcgatttgcgagacgagagagcacgatgcctgatagattcagatatttgaccaaagaagctccagatagtccaattatatggccatggtttgttgcgctggggtttctcgtttatgcgtggagagctgttttgtttgagctatccaactggagaaaagcggttttcgctatcc

SEQ ID NO: 96371 - DNA, 349 bp, Arabidopsis thaliana columbia
gaacctttaaaccgggggggggggaaggaatgggcgccttcgggaccgtccgggccggaggttccgttgaagggttcggcggggaaccattccaggggctggaggggcgggacccatgttttcgttgcccccattggccaccacatccaaaaggccgtggttaacgaaggcgaccttgattttaacgggtttttcaggggtggggcctccccttttgttggaaggagggggtggttcaaggggaagggggggttggttgttgggattaaacctttgccgaaaggaggactggttggtaacgtgatggagcttttaaaagttttggatttcatttacgaatttattccca

SEQ ID NO: 96372 - DNA, 553 bp, Arabidopsis thaliana columbia
gttattgcactaagtcttggcctttttccctttcttcgtatatgtttcaatttgttttagaaccaaacatttcatatagatagaggatttcttaattatttaataaagatgattcaaatgtatataattgttcaactagttcagttcgcttccaaaaaacagcgacgtcttctctctcacggcgataaaaacagagaaccttccatttgtttctttgagcgcgtgaccggcgcgtggcggcttagttagcgccggcgtcggtcctccagtctggttttctttagggtttcattctctacttagtctggttcgtttttagatcctgatttgatgttggcaaggtgaagaatttttggatcttagatctgtaagagccatcgttgtgggctttgattcgtcgaaggttttgtgcgatcggaactcccttttctctgttttgagaaaattatgggtttctcctttgttcttgcagatcttgtttccgacgaaggttgcaaacgaaagttatgacggcggctaatgttattggtggtctggctccttctttgggata

SEQ ID NO: 96373 - DNA, 630 bp, Arabidopsis thaliana columbia
  unsure (1)..(630): unsure at all n locations
ttatatgatatgatctacttgtatgcngatgatgtagcaagcaagcagcttagtaaatctttgaacattagagtgagtcagtccgatataaaatacgatcgctcttccggatttattctacggatatgaccactcctcagtttaaagaaatgtatggttcagatttcatactttcggaatcagtgagtcgatgcgcaaaagcgatcttcagaggtattggtagaggagaggcatacgtcatagagccatcttggataaaatggatctttttgataaaaaatgtttgtcctgagatcgttgactacttactcgactatatatttgttagttatctaaaaccttatttcaagcgtgattgatcatatcgatctatccaagttctctctggttttcaactgtggttgtgttgtcattatggccatgaaacttatactttatgttgtattagttattgcactaagtcttggcctttttccctttcttcgtatatgtttcaatttgttttagaaccaaacatttcatatagatagaggatttcttaattatttaaaaaaaaaaaaaaaaggacggccgctctagaggatccaagcttacgtacgcgtgcatgcgacgtcaaagctcttctatagg

SEQ ID NO: 96374 - DNA, 956 bp, Arabidopsis thaliana columbia
  unsure (1)..(956): unsure at all n locations
ntgatatnnnnnnnnnnnnnnnnnnnnnnnnnnnnnnnnnnnnnnnnncggacgcgtgggttcgcttccaaaaaaaccgcccgcccctctctctcacggcgataaaaacagagaaccttccatttgtttctttgagcgcgtgaccggcgcgtggcggcttagttagcgccggcgtcggtcctccagtctggttttctttagggtttcattctctacttagtctggttcgtttttagatcctgatttgatgttggcaaggtgaagaatttttggatcttagatctgtaagagccatcgttgtgggctttgattcgtcgaaggttttgtgcgatcggaactcccttttctctgttttgagaaaattatgggtttctcctttgttcttgcagatcttgtttccgacgaaggttgcaaacgaaagttatgacggcggctaatgttattggtggtctggctccttctttgggatagggtggcaacggtacaccggtattttagtgttagttgtctcataattgggttttgcgctttcgttaaccttgttctcttcatttctcttttgggttcctatcctttagtcttcattgttggcttgttggtagcgtttatggaatcaactttattctcagtcttttgtggtctagtatcttgaactcttgcctattctatgtcctgccgagtttgcttgtttctcgatccgattcgttctcttgccgtctccagtctttcggttggtcgccaattgtatgggcttcggtccttgtctctacggtttagacttgatcgagggtctctcttttgcantgggtgtcttaactaggcgtgaaccaatnttgggttttnnttncttccgatttcggccggttncagaaagttgtgtgggnattccnaggcggctcccatncttngctggaatgnatcctttggtccnnttnaatttgnaaggaggctcaatt

SEQ ID NO: 96375 - DNA, 872 bp, Arabidopsis thaliana columbia
aggtggagcactatgatttttattaaaatacaaaaacgtgtaatacagaactagagatcatataagatcctgcagaggcaatcaaagatgaccagaaaaaaaaaaaccatgcaacaaaaggaaacatccacacccataggccacaacacatgcaaatatactagaaacaccaaagataaaggtttctaagtgaacttattattttgacttcacttgatcgatatggacttgtatttttgaacagtgtttgttattgcttgttctacaggtagcctttccatgcttgatgctccgtagaagccatggacacaaccctgtgttctcttcaacacaaactctgcctcttctggacccgatatcggacctccgtggcagaggacgataatgtctgggttgaatctacgagcagcatctgcaatagcttgtacacgaacaacgctttcttccactgaaactgcggttttcgccccaatatttccggatgtcgttagacccatgtgggctactatgatatcagctcccgcttttgccatttcttctccttcttttgggttgaaagcatatggagtggtcaacagccccattttgtgcgcttctgagatcattttaacttcaagaccatatcccattcctgtctcctcaagattttgtctaaaattaccatcaaagagaccaacagttggaaagttctggacaccaacgaacccaatggactccaactgcttcaggaaatagtccatacgacgaaatggatctgttgcgcacaccccagccagaacaggcaccgccttcactacaggtaaaacttcatttgccatttcaagcacgactgcattggcatcagcaaatggaagtgagcaagctaaggatcc

SEQ ID NO: 96376 - DNA, 974 bp, Arabidopsis thaliana columbia
  unsure (1)..(974): unsure at all n locations
gagagagagagagaaacgatgagttctcagatttcggagattgaacaagagcagctgatcgagaagcttgagatcttcaagatccatggcagagacaaacgtggccgtaagatccttcgtattatcggaaaattcttcccagctcgatttctgtcactggatgtgttgaagaagtatctagaggagaagatatttcctcgattaggtagaaaaccattcgccgtactctacgtccacaccggcgtacagagaagcgagaacttcccaggtatctcagctctacgagcgatctacgacgcaattccggtaaacgtcagagacaatcttcaggagggttacttcctccatccaggtcttcaatcacggctcttcctcggcaactgcggccgattttctattttccggcggggttgtacgggaagctgagggacataagcgggggttgattatctgtggggaacatgtgaggggggaatgagttgaaaaaatcccggagtttttanccgcccccgctgttgaccttgagtatcgccccatgatgggtttcggcaagaaaccgaccccccgagggttttccgccggaacccgccgtggattcatcagcctcaaagtttccccatgaggtgtacctcataccgtaaaaggctaaaactccacccactagatatcggaccgtatcttataaaccatataatatacgaatacgattaataatatatcaaaaagattggaaataggtgtgctttttgaaattagtgagcgttttttatggaaaagaaaagaaaagaaagcagttggcgtctggataaagggaaggaggagaatctttagattttttctttaatctgtttttcttttgtcttgattagttttttctttagtggtggtggttgtgagttagtgtgtaaaatgtatatcgtcatatgtgaatttaataataagtccttttgtaagaaaaaaaaaaaaaaaaaaag

SEQ ID NO: 96377 - DNA, 889 bp, Arabidopsis thaliana columbia
ccctttttaaaatgatcatcatcttcttcttcactcgcctcaatttttgttcccttcttcttctataattcaactgtgaatttcaccgacgaaacaaaaaagagagagagagagagagaaacgatgagttctcagatttcggagattgaacaagagcagctgatcgagaagcttgagatcttcaagatccatggcagagacaaacgtggccgtaagatccttcgtattatcggaaaattcttcccagctcgatttctgtcactggatgtgttgaagaagtatctagaggagaagatatttcctcgattaggtagaaaaccattcgccgtactctacgtccacaccggcgtacagagaagcgagaacttcccaggtatctcagctctacgagcgatctacgacgcaattccggtaaacgtcagagacaatcttcaggaggtttacttcctccatccaggtcttcaatcacgtctcttcctcgccacctgcggccgatttctattttccggcgggttgtacgggaagctgaggtacataagcagagttgattatctgtgggaacatgtgaggaggaatgagatagagatgccggagtttgtatacgatcacgatgatgatctggagtatcgtccgatgatggattacggtcaagaaagcgatcacgcgagggttttcgccggagccgccgtggattcatcagtctcaagtttctccatgaggtgtatctcatagcgtaaaaggctaaaactccacccactagatatcggatcgtatcttataaaccatataatatacgaatacgattaatgatatatcaaaaaaaaaaaaaaaaagggcggccgctctagaggatccaagcttacgtacgcgtgcatgcgacgtcatagct

SEQ ID NO: 96378 - DNA, 381 bp, Arabidopsis thaliana columbia
ccggatggaaggaccgagccgagcgacgcgttcggaaaagaaagaagtaaagaagaattagaatctccacacaaatggtgctccaacaacaaacgcattttctcacaaagaagatagatcaagaagacgaagaagaagaaccttctcatgatttcattttccgatctaagcttcctgatatcttcatccctaaccacctccctctcaccgattacgtcttccaaaggttctccggcgatggcgacggagattcctcaacaacctgtatcatcgacggtgccactggccgtattttgacctacgccgatgtacaaaccaacatgcggaggatagctgccggaatccaccggctcgggatccgccacggagacgtcgtaatgc

SEQ ID NO: 96379 - DNA, 558 bp, Arabidopsis thaliana columbia
  unsure (1)..(558): unsure at all n locations
nnnnnnnnnnnnnnnnnnnnnnnnnnnnnnnnnnnnnnnnnnnnnnnnnnnnnnnnnnnnnnnnnnnnnnnnnnnnnnnnnnccacgcgtccgcccacgcgtccggtcagatggctgtcccgtgtttctacttttctctgtaaacactagtggacaatttgttggtttagccgagatggtaggccctgttgatttcaataagactgttgaatactggcaacaggacaaatggattggttgcttccctgttaagtggcatttcgttaaagatatccctaatagctcctggttctttcacgaacaggaatgttgggaagactcttgtttccaggactcagggtaccaagattgcctctgagggactgaaacacagggtgtttgaggtttctcttgctgatctacaaaatgatgaggataatgcctacaggaagatccgtcttagagctgaagatgttcagggaaggaatgtgttgacccagttctggggtatggatttcacaaccgacaagctaaggtcattggtgaagaagtggcagactttgattgaagcccatgtcg

SEQ ID NO: 96380 - DNA, 966 bp, Arabidopsis thaliana columbia
  unsure (1)..(966): unsure at all n locations
cagcgtctccnnnnnnnnnnnnnnnnnnnnnnnnnnnnnnnnnnnnnnnnnnnnnnnnnnnnnnnnnnnnnnnccacgcgtgcgggcaacaggacaaatggattggttgcttccctgttaagtggcatttcgttaaagatatccctaatagctccttgaggcatataactctggagaacaatgagaacaagccggttactaatagcagagacacacaggaagtaaagctcgagcaaggcattaaagtcatcaagattttcaaggaccacgcaagcaagacatgcatcctcgatgattttgagttctatgagaatcgtcaaaagattatccaagaaaggaaaagcaaacacctgcagatcaaaaaacagacattggtggccaatgcagacaaaggtgtaatgtcaaaaattaatcttgtgaaacctcaagagtctactacagcctcagaagatgcagcagcactaggagttgcggctgaagtgactaaagaatcgaaagtggtgaaagagaccgagttacctgtggagaaaaatgctgttgctactgcctgctgaaccaacctttggttttaagtggggactgggtgggctgttttaggctatttagagcggttctctagttttgtttccattcctgaatttgcagactttttttttttttttttttttgggacccacttgaggggggagtggcttagtaaatgaagttttggcatgagcattcatcatcttgcagttattctctatccctttagtaatggtccaacatatgaggatatgggtaaaagattggtattgaatcagcttattcagttttatataacttttcaggcaagccaagtnnnnnnnnnnnnnnnnnnnnnnnnnnnnnnnnnnnnnnnnnnnnnnnnnnnnnnnnnnnnnnnnnnnnnnnnnnnnnnnnnnnnnnnnnnnnnnnnnnnnnnnnnnnnnnnnnnnnnnnnnnnnn

SEQ ID NO: 96381 - DNA, 1105 bp, Arabidopsis thaliana columbia
  unsure (1)..(1105): unsure at all n locations
tgatacttccnnnnnnnnnnnnnnnnnnnnnnnnnnnnnnnnnnnnnnnnnnnnnnnnnnnnnnnnnnncccacgcgtccgccacgcgtccggccgcttcttcttcttcctcactgtagctcgtcgtcgctacaccatctagaagacccttaaccatggctgtcgggaagaacaagaggatttcaaagggtaggaaaggaggaaagaagaaggctgttgatcccttctccaagaaggattggtatgacgtgaaggctcctggttctttcacgaacaggaatgttgggaagactcttgtttccaggactcagggtaccaagattgcctctgagggactgaaacacagggtgtttgaggtttctcttgctgatctacaaaatgatgaggataatgcctacaggaagatccgtcttagagctgaagatgttcagggaaggaatgtgttgacccagttctggggtatggatttcacaaccgacaagctaaggtcattggtgaagaagtggcagactttgattgaagcccatgtcgatgtgaaaaccacagacggctacaccttgaggatgttctgcatcgccttcacaaagagacgtgctaaccaagtgaagcgtacctgttacgctcaatccagccaaatccgtcagatccgcagaaagatgagtgagattatggtgaaggaggcttcatcttgtgacctcaaggagctagtggccaagttcatcccagaggccattggaagagagattgagaaggcaacacagggcatctacccgttgcagaatgtgttcatccgtaaagtgaagatcctaaaggctcccaagtttgaccttggaaagctcatggaggtgcatggagattacacagcagaggatgttggtgtgaaggtagacaggccagctgatgagacaatggttgaggagccaacagaaatcatcggagcttaggggattatagatttgtttgttttttcgctggcaaaaaaaaaaaagaacctaatgttatgtcgccattggtgtgactggttttggactcgtttttgatggatgatctttattgtttatcattgttttaccctttttaaattatatngtgncttaggtctttc

SEQ ID NO: 96382 - DNA, 581 bp, Arabidopsis thaliana columbia
atcagttttatatgctatacgatgactttaatatcacaaagcttcctctgcttccggaagaggtgacaggggttgaagccttaaaggcgttttcacataagttcttgacgccgtaccatcctaccactagcaggagcaatgtagaggagctggagaggaaagtacacacattgcgtttgcagttaaaaacagctgaagaagaactcgaacgggtcaagagtggctaaagataaggctctgttcttccctttaattgtaagtttctttcctcgccatattcttggaactcacttgctttctacatgggggtcttctggatctgcgttgtcatttgggtttattgttgtttatgttttgaacaatttataggtggaaaattaaaactgaatctttttctctctagttcttcatctagcaacaactctttataggacaggaaagaagatcaagcagaatcttcttttgcgttgttttattgttatgcattggatttgtttttatatttgtaataatcatgactacatagactcatatctaccaagaaatcgttgttttacgacttaatcagctttttatatatt

SEQ ID NO: 96383 - DNA, 432 bp, Arabidopsis thaliana columbia
ccctcgcgtccgctctggtctatcggactacctcatggtgcggacaatacaatcccagagtgggtgtagttcttgagttcctctacatcatcatcgagtttagtgccgttttttagttagaaatttatagtcaagcaataatggatcacacggtgtgcaagcaagttcagccagtcgttaggaaagcgaagaagaagcatggtaaagatgaatttgatcgtatcaaacaagctgagaagaaaaagagacgtttggagaaagctcttgctacttctgcagccatccgggctgagcttgaaaagaagaagcagaagagattggaagaacaacaaaggttagatgaagaaggagctgcaattgcagaagctgttgctctgcacgtcctactgggcgaagattctgatgattcatctcgagtcaagtttggtgaag

SEQ ID NO: 96384 - DNA, 652 bp, Arabidopsis thaliana columbia
  unsure (1)..(652): unsure at all n locations
ttccnnnnnnnnnnnnnnnnnnnnnnnnnnnnnnnnnnnnnnnnnnnnnnnnnnnnnnnnnnnnnnnnnnnnnnnccacgggctgcgcttttttatctctcgaaattcctctctctttctctctgcatcaaaacagcaactttacttctgcgtttttgtttatctctctgtattatccgattaatttaaaggagttctttgaaggcagctgcttctatgccatattgccgagaaaatgggcgagtctaaggggtgcgggaatgttggacgaatgatttcgaagaataagtctgcgaattcttataacctctctcttcagttgtctcctgttgtttctttctgggattgtattgtccgcaccatgaggtattcctatataccagagtgggtgtagttcttgagttcctctacaacatcatcgagtttagtgcagttttttagttagaaatttatagtcaagcaataatggatcacacggtgtgcaagcaaagttcagccagtcgttagggaagcgaaggagggagcatggttaaagatgaattttgatcggatcaaacaagcttgggagggaaaaggggccggtttgggggaaagcccctttcttactttctgcagccattccggggcttagctttgaaaagnanggngcnag

SEQ ID NO: 96385 - DNA, 614 bp, Arabidopsis thaliana columbia
  unsure (1)..(614): unsure at all n locations
cggtcgcgtgggcggacgcgtggggcgaagaaacgggtttcggaatggatctgtttagagatgaaagaaccaactatgttcctcgccaaagttgtgctagctatgcggttcaagggattgggtttgtgtcaaatggttatggactaggagatagtaactggtcagtgtcatataagccattcatgaaggatgtctgggataacaacatggtaatatctgcagatttgattgctgctcaggctgtttcgtcactacagatatctgaggacgctgataggaacgcttatgtcttcgagacgatgttcgggggatgacaaaagccatcgtgccaaacttggctgcagaaacaagtgtttgctatgagtagagttgcagtttttttctttattctagaaccccctttggtgtgaaaattcctcctcgttgtttatctcttgatgttagactagctgaaaagatgttttctgaattctctttgtaacattcacaaatacgttctaagttttatacagattacagagtacctcttgaaaaaaaaaaaaaaaaaagnnnnnnnnnnnnnnnnnnnnnnnnnnnnnnnnnnnnnnnnnnnnnnnnnnnnnnnnnnnnnnnng

SEQ ID NO: 96386 - DNA, 1019 bp, Arabidopsis thaliana columbia
  unsure (1)..(1019): unsure at all n locations
aaaanaaaaatngggngnttntgaaccgaaaaaanttttggggggtttnccaanccgaaaggggtttaggggggaanngagnaatngagaaattggatttaancttttttcaggttcccggntttttgggngantcccccnggggaatcnaaaaccnggggggngttttggtcttnaaaantattgggtnaggcgtttttagtagaaaatatgtccagcaaaagaacacacgggggcaacaaattcacccntttttaggaagngaggagaagcnnngtaaagaggatttgattgtatcaaacaagctgagagaaaaagagangtttggagaagctnttgtaattttgcagccatccgggntgagnttgaaaagaagaagcagaagagattggaagaacaacaaaggttagatgnagaaggagctgcaattgcagaagctgttgcttctgcacgtcctactgggcgaagatttctgatgattcatctcgagtcaagtttggtgaagaaaagggtttcacaatggatctgtttagagatgaaagaactaactacgttcctcgccaaagctgtgctagctatgcggttcaagggattgggtttgtgtcaaatggctatggactaggagatagtaactggtcgccattcacgaggaggggtgcttgggataacaacatgggaatatcagctgatttgattgctgctcaggctgtctcggcgctacagatatctgaaaatgctgatgggaacgcctttgtgttcaatgggatgttccggggatgacagatgccacgactcgtcctcattcggtttttaaaataaacatttgccttctgcttgctttggtgtcaatgctctgtttttttctcttgacgttagaccttatactctgttttcgttcgctgtaatattaaagacgcattttgagttgtatctattatacatgttgaagtctcttcatactgcattgttgcttatcttaaaaaaaaaaaatttnnnnnnnnnnnnnnnnnnnnnnnnnn

SEQ ID NO: 96387 - DNA, 644 bp, Arabidopsis thaliana columbia
  unsure (1)..(644): unsure at all n locations
tcactatagggaaagctggcacgcctgcaggtaccggtccggaattcccgggtctgacccacgcgtgcgaaagtttttcaaatggcgattgctttcaaatccggcgtcttcttcctccaatccccaaaatctcaaattggattccgccattcttctcctcctgattcatcgctttctttcaagagattcactcccatggcttctctctccacctcttctcctactctcggtctcgctgatactttcacacagctcaaaaaacaaggcaaagtagcattcataccatatatcacagctggtgatccggatctctctactactgctgaagcattgaaagttcttgatgcttgtggttctgacataatcgaattgggtgttccttactctgaccctttagctgatggacctgttattcaggctgcggcaacaagggtccgttggagagggggacaaaccctcggtagccatccttgagattttggataagggttgttcccacaaatatgctcggcccgatttcgttgttcacgggattacaaacccggttntttaaacgnggggttggggaagtncatgnccagcatcnanggntntttggggaaaggggcttttgggtcccgnttgtcccttttaggaaactagng

SEQ ID NO: 96388 - DNA, 238 bp, Arabidopsis thaliana columbia
ttacaaaaaactctggaatttttcaggaccaaaggatttggccttctttaagggcggccatgacctcgggggttttaactggcagctccccaatggcgggttctggctcggtggagcttacccagaaggtgggttgggggaatccatcagtggggttgggccagaaaaaccagaggattttgccggggaccaaggctaaccgcgttgtgggggaggatgttgatggaccttcgggagg

SEQ ID NO: 96389 - DNA, 586 bp, Arabidopsis thaliana columbia
gccggcacgcctgcaggtaccggtccggttttcccggggggacccacgcgtccgtacggctgcgagaagacgccagaagagagatacagagagagcgatgatgattcgaacggcgttagtgttcgttgtcttcttcgtcggaacagtcgtacaagcgcagctgatacctccggcgaggcgtgatggatttttgtatccaccgggtcggaaaatcgaccgggatacgatacttatcgaggcgtatattgacccggtttgtccggattgtagagacgcttgggagccgctaaagctagcgattgatcactatggatctcgcgttgctcttgttcttcacctcattcctttacccttccatgacaatgcatttgtagcatctcgggctttacacatcgttgataccttaaacgccaatgccacgttcaatttgctggaagggatcttcaagcatcagacattgttctacaactcgcaaacacaactcatgtcaagacctgcagttgtggaagaattaatcaagcttggaacagttacgttaggaaactcatatcattctcctttgaaatctggcttcagcaactcaaaa

SEQ ID NO: 96390 - DNA, 1253 bp, Arabidopsis thaliana columbia
  unsure (1)..(1253): unsure at all n locations
nnnnnnnnnnnnnnnnnnnnnnnnnnnnnnnnnnnnnnnnnnnnnnnnnnnnnnnnnnnnnnnnnnnnacggacgcctgggaaccaaaaaaaatattcttgtttcaaacttcaatggcgttctcgagttccatcttctctgttactcagttttcttcttcgttagcttcgcgtccttcttctgcaatcagtaggcagactcgttttcccgctcaaattgcttctccagatctatcgcctgctttgttcgatgatcgccggaagttcgtcggaggtgtaatgtctctcttgacgaagagtattaaaaaccgtgtatatgcttcgattaacagcattgattcggccgctactccatcgtatccgaaatcggaagacgatgacgacgttgttccaatgccaatggttatgatagaccaggatgctgaccctgaagctactattgtacaactcagttttggaaatcgtcttggggctcttattgacacaatgcgggcgctgaaagatttgggattggatgtaataaaaggaactgtctcaactgaaggatccattaagcagaccaaattttctataacgaaacgagacactggccggaaagtggaagatcctgacttgttgggaacaaatccgatttaacaatcatcaaccaatcctcttgaaataccatccggaatgcagtgagcaacttgcaatgggtgagacttttggaataaaggctcccgaaaagaagattgatgtcgatatcgcaactcatatacatgtgaaagaagatggaccaaagaggagcctgcttgtcatagagacagcggacaggccaggtcttgtcgtagagatgatcaaagtgatggctgatgtcaacatagacgtggaatccgcagagatagatacagagggactggttgcgaaagacaagtttcacgtaagctaccaagggcaagctctaaacagatctttgtcacaggttttggtgaactgtctgcgttacttcctgagaaggcctgaaactgacattgacagctactaaatgagcttttgtttgctctaaaacaaaactgctctttatcctttaaagcaatcatatctgtgcttgcgaaactttcagacttctgtttggaagattatgtggaaattcgtgatactataattgaaccactgtggctaaaaaataaaaaaaaaaaggacnnnnnnnnnnnnnnnnnnnnnnnnnnnnnnnnnnnnnnnnnnnnnnnnnnnnnnnnnnnnnnnnnnnnnnnn

SEQ ID NO: 96391 - DNA, 433 bp, Arabidopsis thaliana columbia
cggacgcgtgggcacgaacgctacacgatccatctcccaaccgatatctgcgtcttcaccgggcttaaagcacaatgggatgattcccattcccaccaagttgcttcggtgaatcctctcaaaactctttgcaatcaccgctttaacaccctgtagcatgggtcccttggcagcccaatcacgtgagctaccacttccatactcagctccagccagaataagctgtctgttcctgagaataccctctactcatgggatcccaactcaacttacattcacgagcctccatacttcaaggacatgaccatggatcctcctggtccacacaatgtgaaggatgcttactgtctactcaattttggggacagtatcaccactgatcacatctcaccagctggaaacatccataaggacagtcctgctgcaaagttcc

SEQ ID NO: 96392 - DNA, 1810 bp, Arabidopsis thaliana columbia
  unsure (1)..(1810): unsure at all n locations
tgtnnnnnnnnnnnnnnnnnnnnnnnnnnnnnnnnnnnnnnnnnnnnnnnnnnnnnnnnnnnnnnnnnnnnnnnnnnctttgggtttgtttttttttgcaagaaggctctcttattccttttcaaaaacaataatattcaactcttgcaagttgcgaaacatgggagcctaagcgtgtaagaataacccactgaaactcatatattgcatgagatcactcaccttttaacctaatcctagacagacttatctgccttttaaaaaagacattttaaaacagaaacaaacactcttttattttgctccataacttgtgtattgcttccttcactattgcttgctcaagtttctgataacatatggaagtatgcctccatggttaaagtatgccaattccacctctgtgtcgaagcggactgtgcaagtgaaagattttccgttgtcggtagtgacggtaacatcttggccaggtcttatctctgagatatcggttgggagatggatcgtgtagcgttcgtgaccagtcaatccaagagtatctgcgtcttcaccggacttaaagcacaatgggatgattcccattcccaccaagttgcttcggtgaatcctctcaaaactctttgcaatcaccgctttaacaccctgtagcatgggtcccttggcagcccaatcacgtgagctaccacttccatactcagctccagccagaataattgtgtcttcaccagatgacttgtacctcatggcagcgtcaaagactgagagcttctctccagatggaatgtgaacagtcttagggccaacttcaccattcatgagcttgttaacgatacggatattagcaaaagtacctctggccattatttcatcattcccacggcgacttccatatgagttgaagtccttacggtcaaacgccacgctccatgagaaactttgcagcaggactgtccttttggatgtttccagctggtgagatgtgatcagtggtgatactgtccccaaaattgagtaaacagtaagcatccttcacattgtgtggaccaggaggatccatggtcatgtccttgaagtatggaggctcgtgaatgtaagttgagttgggatcccatgagtagagggtattctcaggaacagacagcttattccacatggggttacccttggtgattgactcgtacgttgctcggaacatgtcaggcaaaacactggattgaacaacctcagcaatttcttccgtggttggccagatatctcttaagaagacgtccttgccattctttcctttgccaataggctccgtttcaaagtcaatgttaaccgtgccagcaagagcataggcaaccaccaacggaggagatgcaaggtaattggctcttgttagtggatgaacacgcccctcaaagttcctgttaccggatagcacagcagccgccacaatgtcattttcggtaatagcagctcccactgattcattaatttccccagaattcccgatgcatgtagtgcacccgtagccgacaatattgaaaccctgttcattcagatattcttgcaatccactctttaataagtattttgtaacaactcctgagcctggagcaagacttgtctttatccaaggcttaacctgtagcccaaggtcacaagccttctttgcaacaaccccagcaccaagcatgacgctgggatttgatgtattagtacagcttgtgattgcagcaatcaccacacttccatgtttaagctctgctggttgtccatcgaacgaaaaatttaccactttttcttgtgcctctttaggtatagc

SEQ ID NO: 96393 - DNA, 1670 bp, Arabidopsis thaliana columbia
accacgcgtccgattctcttcgtttaatgctcttcttcttctactctctttgtgggtttctcttgtaataatcaggcacgagaaaaaaaaatggttaactcatgcgagaacaaaatcttcgttaaacccacttcaacgacgattcttcaagatgaaacaagaagtagaaaattcggacaagagatgaagagggagaagagaagagtgttgcgtgtgattaaccagaatctcgctggtgcaagagtttatccttgtgttgtcaacaagaaaggaagcttattgtctaataagcaagaagaagaagaaggatgtcaaaagaagaagtttgattctttgcgtccttcagttacaagatctggagttgaggaagagactaacaagaagctgaagccctcagttccaagtgctaacgacttcggtgattgtatatttattgatgaggaggaagctacattggaccttccaatgccaatgtcgcttgagaaaccatacattgaagctgatccaatggaagaagttgagatggaggatgtaacagtggaagaaccgatcgtggatatcgatgtcttagactcgaagaactcgcttgcggctgttgaatatgttcaagatctttacgcattttacagaacaatggagagatttagttgtgttccagtagactatatgatgcaacaaatcgacttaaacgagaagatgagagcaatactaatcgactggttaatcgaggtacatgacaagtttgatctgatgaacgagacactgtttctgacagtgaatctgatagatagattcttgtccaagcaaaatgttatgagaaagaagcttcagcttgtagggttagtagctttgctgttagcttgtaagtatgaggaggtttcggttcctgttgtcgaagatttagtactcatttcggacaaagcgtatacgaggaacgatgttctagagatggagaaaacaatgttgagtactttgcaattcaatatctcgttaccgacacaatacccgttcttgaaaagattcctcaaggcagctcaagcagacaagaagtgtgaggtcttggcgtcgttcttgatcgagcttgcccttgtggagtacgagatgcttcggtttccaccatcattactagctgccacatctgtgtacactgctcaatgtacacttgatggttccaggaaatggaacagtacatgtgaattccattgtcattactctgaagaccagctcatggaatgttcacggaagctggtgagtctgcatcagagggcggcgacaggaaacttaacaggagtatataggaagtacagcacaagcaaatttggttacatagcaaaatgtgaagctgcacactttctagtgtctgagtctcatcattcttaatccaaaaggacagtagtaagtagtttgtacagcttcctgacatagttccctcattcactctgtagcacaaataagaagaaacaaaaaaaaaagccaattaaatttgtcttatgattgattctgtttttttgttgttactctttgttcacttcacttgtcagtattaaactctacaatgaatgataaatgattgaatcatttcattctttgttcagaatgaaatgtattttgtatcttatttgagctaaaaaaaaaaaaaaaaaaaaaactcgaggggggccccggtaccc

SEQ ID NO: 96394 - DNA, 698 bp, Arabidopsis thaliana columbia
  unsure (1)..(698): unsure at all n locations
aggaagttgttctgaggctaatgtagagaagaagcctgcagaggaaaggactgagancaagggcagcgtgacaccgaaagctaacggagaacagaatgtaaccctgggtgagcctaaccttgatgcagatgctgaagcagataagggaaaagaatccaaagaatatgatgagaagacgacagaagctgaggcgaataaggaaaatgacactcaagaatctgatgagaagaagacagaagctgcagcaaataaggagaacgaaacccaagagtctgatgtcaagaagaccgaagctgcagtagcagaggagaagagtaacgacatgaaggcagaagacacaaacagaagcttggaggcgaatcaagttcaacagcagcagggagctgcagcttccgtgagctgttaaaacctatatcgttctgtacagagcacagagcgtgaagagtttgttgtgatttcaggtgtagcattaacattatgagtggttgttgtatgtgttggtagaactaatgtctctctatgttgtagttcagtccattatcatttgacgtttgtatctttgtacctttgtactttgttgtattattaatattaggcatttagactaaaaaaaaaaaaaaagnnnnnnnnnnnnnnnnnnnnnnnnnnnnnnnnnnnnnnnnnnnnnnnnnnnnnnnnnnnnnnnnnnnnnnnnnnnn

SEQ ID NO: 96395 - DNA, 577 bp, Arabidopsis thaliana columbia
gaccgtccgaccattctcctttgggtccacagccgagaccgaaggagcgaaaagaagatgaacgtagttcacggtttgaagaggattcctcgcatcaaattccctcagagacatattaatccttcagcttcagagggaaagagtcaggtggcaaatgaagctgatacattgttcttctccaatttgaacaacatccaaaagactactggcgggaaggcatcatcgcagccaaagcgcacgccagtttcaaacgaagaaatggaagccattttgttgggaggctgcatctgatcatttcaacatgatctgttgacaagaatggtggatcacttctcatctttaccatttacagaatatactcgatagtcaagaagaaactgatatggttgatgtttacaacacccaatgataacaataaaactactccattgcagtttttaacttctatactgattcatcattgattgagtgcatttgaatctctaaaaaaaaaaaaaaaaaaaacacctcctaaaaattaaaaaaaaaaaaaaatataaattaaaatataaataaattaaatataaattatataata

SEQ ID NO: 96396 - DNA, 681 bp, Arabidopsis thaliana columbia
  unsure (1)..(681): unsure at all n locations
nnnnnnnnnnnnnnnnnnnnnnnnnnnnnnnnnnnnnnnnnnnnnnnnnnnnnnnnnnnnnnnnnnnnnnnccacgcgtccgataatctctcaccattgtttttctctgcaaaactaaagaaacaaaaaaagaaaaatcggagaaaccaagaaaaaagaaatgggaagtgtagaagcaggagaaaagaaggctttaggatgggctgcaagagatccttctggtgttctctctccttactcctacactttaaggagcacaggagcagatgatgtgtatataaaggttatatgctgtggaatatgccatactgatattcaccaaattaaaaatgatcttggaatgtctaattatcctatggttcctgggcacgaggtagtaggtgaggtgttggaagtgggatcagatgtgagcaagttcaccgtaggagatgtagtcggagtcggcgtggtcgttggatgctgcggtagctgcaaaccatgcagctcagaacttgagcagtattgtaacaagagaatctggagttacaacgatgtctacaccgatggaaaacctactcaagggggcttcgccgacaccatgatcgtcaatcaaaagtttgtggtgaagattccagaaggaatggcggtggagcaggctgcaccgctactctgccgcggggagtaaccggtttatagtccgtt

SEQ ID NO: 96397 - DNA, 561 bp, Arabidopsis thaliana columbia
catatactagcactccctgcaccagatggaaccgttcagaaagtgaaccaagacccgttcgctgcttccctgaccattccgcctccttcctatgtgcaaatggctgagatggacaaaaagcaatatctattgactcaagagcagcaattatggcagcaatatcagcaagaaggaatgagaggtcaagctagtttggctaagatgaatacagcccaaaccgcaatgccttatggtatgccgccggttaacgggatgggaccgtcgccgatgggttattactacaacaacccttactgattttattcatttggttggcttttttcttacatatattttccggacccaatggagatagtggtataatgcgggttttcttggatttggtcctgatcctgcgtcccattattggacctgtgagacctttgccttttttgaagtattgaggaataaggagttaatccaaaaaaaaaaaaaaaggcggccggtttaaaagaatccaggctaacgtaggggtgcatgcgacgtcatagctttctataagtgtcaccataaaatcaaatc

SEQ ID NO: 96398 - DNA, 568 bp, Arabidopsis thaliana columbia
gttcgtgggattcacaaggttgagttgccattgtacctgaaagcaatattctttgtctttgttcgagactccgagagattgcgttccggttcgtgggattcacaaggttgagttgccattgtaccgagtagatcaaaatctttgggagaaacatcatttagcaagagttttaaagaattgttgtataccataccagaaagaaaggaagatagatgttctcatcaatcaattcttgaagatacttcaactgttttggtctcaaatcttaggcatgattcaaaatcaaattgcttcattctttccctccccattccagttttgcttctgtaattcgttctcagattaggccggggactgaaccgaggagagaatctgtggttttgaaaagatgctaaagggatggcccagattttgttgaagtgatgataactgtgaggtgatgaatgttttgtgttgtattcttgtgtcatgtctaaaacagatataataaatcctatatttagccaaataagtgttatagaaaattggcaatttgcaatcaaaaaaaaaaaaaaaaaagggcggccgc

SEQ ID NO: 96399 - DNA, 623 bp, Arabidopsis thaliana columbia
  unsure (1)..(623): unsure at all n locations
actacccgaattttccaaacnntatggcccnggttgggctttgcttggaatccggncctaaactggctngcctcgggncaggttccagggggnccagccaattccgttggnccgggancacccccattggnttttngaccngccctcaacccaagattgacccagatgagatcatagcccgtgcaaaacaggtttctccaggaccagcgtcgggtcaagatgaacaggaaacttcagcagctaaaaggaacaaagaagaagcggctacaagctacgaaagtgagcgttgaaggtcggggtatgatcaagtacctctagagaggttacaaccagaccataccatccatccacattgaaattggttccttctatcgtgttaatcttccaactttgcttggatcagtgtttaaaggtctttcaggtgaagtcgaagacttaaaggcattggggttatacgtatatgtactcttctatatatgctttgctttgagcctctaatgtaatgggaagtgaaaacactttgttcgtcacttctttcttcagagcataaaatattatgataatcaattttcagtgagttttcaataaacactttgccctttttttttttttttttgaaagag

SEQ ID NO: 96400 - DNA, 929 bp, Arabidopsis thaliana columbia
gatcttctccatgacgattccgtttcattgatcgatcaatcaaaatctcgccggagtttcttcccgccggcctgaatcatgcctctgcctatattcccgtcgcggttacagtgttcgtcttcatcgtcttcgtcgtcgtcgcgatcttcgttttttaggcctaagcttcgaatcgatccaagcttgaccttaattccaggcttatccaacgacgtcgggagactgattctctccttcgtcccttaccctcacatctctcgtatcaaatcaacctgtaaatcatggtacgctttcctctcttccaaaaccctaatttcactccgccatagcagagacaacagcaacaccaacaatctctcgcatctcctttgtatcttccctcaggatccttcgatttcgcctccttttctcttcgatcccgtgactctctcttggagatcgcttcctcttatgccttgtaaccctcacgtttacggtctctgcaatttcgtagctgtagctcttggtccttacgtttatgtcctcggtggctctgcttttgatactaggtcttatcctcttgatgttcctttgcctacttcttctgtgtttcgttacagcttcgtgaaatcggtttgggaacggttatctccgatgatgtctccgcgtggtaagctttgctttgcgctgcgatgccttggttcttgtcggtcggattaattgtggcgggaggaggatcaccggcacaactctgttttggtgctgccgggagtagagtgagttctgtggagatgtatgatgttgagaaagatgagtactataaagacgcggtagtgatggatttgagagtagatggtggtgagaaatggagggtagttggagatatgtggggagaagaagagagacctaagctagggaagattgttgctgttgattgtgggaagcctgtg

SEQ ID NO: 96401 - DNA, 527 bp, Arabidopsis thaliana columbia
  unsure (1)..(527): unsure at all n locations
ctctctaaaaatggctcaacaacactcttttctcctcttatgcttctccctctcaatctcttatttactatcttccgcccaaaccgaagccacctcaatcgagagattagtgccaagagacctctacaacaaaattttcatccacaaggacaataccgcttgtcccgcaaatggtttctacacttacgaatcatttgtccaagcgacgaggcggtttccgagattcgggagcgtaggaagccccgtgacacaacgactcgaagtggctgcatttttggctcagatttcacacgagacgaccggaggatgggcaacggcaccagacggaccgtacgcttgggggattatggctttaaagaagaagtgagtccacaaagcacttattgtgattcttcttgatacacagtggccttgtttccctaacaaggcttttttatggaaggggggccaatttaacctttcgncggncttcaattanggcccggccggttgaggccttagggttgacgggntaaggnatccngaaa

SEQ ID NO: 96402 - DNA, 554 bp, Arabidopsis thaliana columbia
  unsure (1)..(554): unsure at all n locations
cngnccaaangccttttttacccgnggaggttaataagaagccccctactttggagggggatgcagtactcttaacgcatcctgccgttctcagggtgttgcattcggtgtccctgatgagaaatatggggaagagattaactgtgcggtgattccaagagaaggaactactgtaaccgaagaggacattaaagcgttttgtaagaagaatttggcagctttcaaggtgccaaagagagtgttcatcactgataacctccccaaaactgcctctggtaagattcagcgccgtatcgtcgcacaacatttccttgagaagccctgaaacacacagaaaacaccatcttgctcgaaaatcatcggtgatgagtcctagttttcacttttcacgcaaatggatatgcgttctctattattggttcttggtttaaaagttactttttatatgtttcatggtggtaaaggttatagattaaatcacaaaagtggaaataaaagtcgataagtgattattaaaaaaactttgttttctttttatcttttttttcttttta

SEQ ID NO: 96403 - DNA, 429 bp, Arabidopsis thaliana columbia
tcgaaatcttaaaactttgctgattgattgattttcgattccgggagaagaaaaatggtatctgggttgattaatgagaaccctatcatttacccaaagaaagagaggcgtcttcgtactgatacaagcattactgatgagcttacaccagaaccaattgatcaacttgagatttttgatcatataagagatatcaaagatccagagcatcctaatactctggaagatctcagagtagttacagaagactcagttgaagtggatgatgagaacagttatgttagggttacgttcactccaactgtcgaacattgtagcatggcaaccgttatcggtctttgtgtccgtgtgaaacttctacgaagcctttcttctcgatacaagattgatataagggtagcacctggttctcatgcaacagaagatgca

SEQ ID NO: 96404 - DNA, 738 bp, Arabidopsis thaliana columbia
actcactatagggaaagctggtacgcctgcaggtaccggtccggaattcccgtgtcgacccacgcgtccggaaaaagtatttctccagttttggaattcgccatggctgttgatagcagaatggatctgctaagcgaaagagctgtgttgatgagagcatctcttcaaaagagtcaaaccatcaccgataatgttgtttctatcctcggctccttcgatagtcgtctgtctgctcttgaaaccgccatgcgtcctactcagattaggactcatgctataaggaaagctcatgagaatattgataggactcttaaggctgctgaagttattttgtctcaattcgatctcctccgtcaggcagagactaaagtactcaaggggccacatgaggacctggaaagttatctggatgcaattgctcaactcagaaagattattcgttattttatgagcaacaaaagctttaagagtagtgatggagttctcaaccacgcaaatagtttgcttgctaaagcacagtcaaagctggaggaagagtttaagcagttgctagcttcttacagtaaagcggtggagcctgatcgcctatttgatggccttcccaactcactgagaccatcctcagacggggatggaggtggaaaaccccacggaggacatcacaatgatgacgcggaaactgctgcttatacacttccaatcctcattccgtcacgggtgttgccacttttgcatgac

SEQ ID NO: 96405 - DNA, 674 bp, Arabidopsis thaliana columbia
  unsure (1)..(674): unsure at all n locations
tgaaattgtntttcagaacaatgagaagtcattgcagtcttggcatcttgatggatatgacttctgggtcgttggatttggttctggacaatggacacctgcaaaaagatcacttcacaatcttgttgatgctctgaccagacacacaactcaggtctacccagagtcttggacaacnnncttagtgtctttagacaatcaagggatgtggaatatgagatcagcgatatgggaaagacaatattcaggacaacagttttatctcaaagtatggaattcagtccagagtcttgccaatgaatacaatcctcctgacaatcttcaactctgtggcaaagctgttggacgacatgtttagagaaaatcctcttacagtttcctctgttctttcttaaaagtgatttactttaaggctttttcgattcaattcggttgaggttttgcgtttgttcgttatggtcatgaagagtatggctgatggcttccttgtagtaaacaaagggaagaggaaagttatatgtgtcattggtggtaggctagcttggagttttataataatcttcctatatccaattaaaaaaaaaaaaaaaaaaaaagggcggccgctctagaggatccaagcttacgtacgcgtnnnnnnnnnnnnnnnnnnnnnnnnnnnnnnnnnnnnnnnn

SEQ ID NO: 96406 - DNA, 667 bp, Arabidopsis thaliana columbia
tgcggtaccggtccggaattcccgggtcgacccacgcgtccgcttttctatttccgtcggactcagtggagaagaagaagaagatccaaatcgatccgttgaaaaggaatttcgaatttgctgtgcgatgtcgagtgcggtggacgctacgggaaacccgatccctacttcggcggttttaacggcgtcagcgaagcatataggtatgaggtgtatgccggagaatgttgcgttcctcaaatgcaagaagaatgatccaaacccagagaagtgtctcgacaaaggtcgtgacgtcactcgctgcgtgcttggcttgctgaaggatcttcaccagaagtgccaaaaggagatggatgattatgttgggtgtatgtattactacacaaacgagtttgatctgtgtaggaaagagcaagaagccttcgagaaagtgtgtcccttgaaatgagaatcacaagttcttgtcatgttttgatttgtacctcataataaagcaaaatgttcatttttgaatgagctttactctctccatctcttgttttgttgtcatcccatttatttcctctcagatgctttcgtagtgagttccaaagacaactaaatgactcagttttattgttcgatggttcactaatcagcacagaatggtacaattgtttttaaaaaa

SEQ ID NO: 96407 - DNA, 527 bp, Arabidopsis thaliana columbia
  unsure (1)..(527): unsure at all n locations
ggggtactgtcnggttaaccagtcatttcatataaccgttgaggcttttaaatggatcgtcggagtttgtacttacttatgaggataaggaaggagattggatgcttgttggtgatgttccatggagaatgttcatcaactcggtgaaaaggctacgtgtgatgaaaacctctgaagctaatggactcgctgcacgaaatcaagaaccaaacgagagacagcgaaagcagccggtttagatctcttttcgacgttacggtgttacaggttttatattttggggttttgcaagtctgagatacttctgaagcaagcataagctagattgatcttatatccagtttgtgtattttcttggttcttataatggtttttactggttttctttagtttttttttttgctgtcttttaattttcggttgcgatttcactatatactatggatggaagagaatgctctttatatcttttactacactgtaaatatttgaagcttatctaatatcgtttttaagggtttttgttg

SEQ ID NO: 96408 - DNA, 1753 bp, Arabidopsis thaliana columbia
ggcacgagtctctctctctctggagcgttctcttctctccttgagcttctcttaccgccattagagctccttcacaaactcataaacctatttgttgagccaggcttggcttaaccactggcctttttccagactaaattatgtattgctcttcttcgatgcatccaaatgcaaacaaagaaaatatctctacttcagatgtacaggagagttttgtacgaataacgagatcacgagctaaaaaagccatgggaagaggagtatcaatacctccaacaaaaccttcttttaaacagcaaaagagacgtgcagtacttaaggatgtgagtaatacctctgcagatattatttattcagaacttcgaaagggaggcaacatcaaggcaaacagaaaatgtctaaaagagcctaaaaaagcagcaaaggaaggtgctaacagtgccatggatattctggtagatatgcatacagaaaaatcaaaattagcagaagatttgtccaagatcaggatggctgaagcccaagatgtctctctttcaaactttaaagatgaagaaattactgagcaacaagaagatggatcaggtgtcatggagttacttcaagttgtagatattgattccaacgtcgaagatccacagtgttgcagcttgtatgctgctgatatatatgacaacatacatgttgcagagcttcaacaacgacccttggctaattatatggagcttgtgcagcgagatatcgacccagacatgagaaagattctgattgactggcttgtagaagtttctgacgactacaagctggttccagatacgctttaccttacagtgaatcttatcgaccggtttctgtccaacagttacattgaaaggcaaagactccagctccttggtgtctcttgcatgcttatagcttcaaaatatgaagagctttccgcaccaggggtggaggagttttgcttcattacggccaacacatacacaagacgagaagtgctgagcatggagattcaaattctaaattttgtgcactttagattatcggttcctaccaccaaaacatttctgaggcggttcattaaagcagctcaagcttcgtacaaggtgcctttcattgaactggagtatttagcaaactatctcgccgaattgacactggtggaatatagtttcctaaggttcctgccatcactaattgctgcttcagctgttttcctagcccgatggacactcgaccaaactgaccatccttggaaccctactctgcaacactacaccagatatgaggtagctgagctgaagaacacagttctcgccatggaggacttgcagctcaacaccagtggctgtactctcgctgccacccgtgagaaatacaaccaaccaaagtttaagagcgtggcaaagctgacatctcccaaacgagtcacattactattctcaagatgacaccaagcaacatcgaaaacagagcccaagtcaggtgatcaaaatacctattttcagacattggatgttatgtcgtctctttgccagttttgtctgtctgtaattctgtagctattgtgtggcgccttaattgtaggccattacttgtcacaccacttagctttaaataaatgttatggaatttttctaatcgcattgctacaactatttactatcctgcgggattttgtacctaggagcacttggaaaacgaatacaaaagtgttaattaatataaatttcactgttcatggcaaaaaaaa

SEQ ID NO: 96409 - DNA, 517 bp, Arabidopsis thaliana columbia
  unsure (1)..(517): unsure at all n locations
atgannnnnnnnnnnnnnnnnnnnnnnnnnnnnnnnnnnnnnnnnnnnnnnnnnnnnnnnnnnnnnnnnnnnnnnnnnnnnccacgcgtccggtttcatactatttatgtaaaaggaagcaacgggtgagaagaattaaaaagccgcaattttgggatcataagagttctcttcttcatctgtgattcattccgttgttacccgccaggcaccagccaccgtactttttctctctccggcaaaatccgagtctaaaaatgacgagtaaaagcaaaatcctgttcatcggaggaacgggttatatcgggaaatatatagtggaagcgagcgcaagatctggccacccaaccttagttctcgttcgaaattcgacgctcacaagcccttcacgatcctccaccatcgagaatttcaagaacctcggcgttcagtttctcctcggagaccttgacgaccatacgagtctcgtgaattcgataaagcaagcggatgtggtcatctctactgttgggcactc

SEQ ID NO: 96410 - DNA, 622 bp, Arabidopsis thaliana columbia
  unsure (1)..(622): unsure at all n locations
agctannnnnnnnnnnnnnnnnnnnnnnnnnnnnnnnnnnnnnnnnnnnnnnnnnnnnnnnnnnnnnnnnnnccacgcgtccggggagagaccaccgccgccgaagaaaagggggcggcggaaggaggaggaaggtgaggctgaggaaattagttggtctgcggcggcgccttcgttggctgtggcggaggaggaatttgaggaggagaattgggcttcggtggtggataatgaagctggagagaggttgagaaaaagagaagcagaggaagaagaagataggaggatgaagagaaaggagaagaaagttagctactttagtgatgagagtgatgatgaagattagcttcttagattcattttatggtttgtgaatactgaaagagagagattgatcaaagttcaggagcaattacaatcttctggtttcgtcttcgtatgtgatcatgtttgatgactctggctgttctgtcgtgagtgatatagttcttggtttgaagattacattgttgttcatcaatgcattttagctcttgattttaaaaaaaaaacccaaagggcgaccgctctagaggatccaagcttacgtacgcgtgcgtgccacgtcataatcttctagagt

SEQ ID NO: 96411 - DNA, 379 bp, Arabidopsis thaliana columbia
gggccgccccacccgtccgttccatttcgaacctccaccgaatccttgggggattttcccaagggcgttggcaccatcgaggggttggaatctaatggggccttccaagggctggccttttttttcgccttcgcctttccttagaggcgattggggtttttcccccaaaccctttttaacggggccttttcctttggaaaatctcaaagctccgattccgttgccaatggattcggcccttaggaaaggagctggggcccccaataccggccgggattttcctgggcaccgactcggcgtaaagatctacggtgcccaagtggctaaacctggggctatcattgttcgtcaccgtggccctaagttccatgctgggaaa

SEQ ID NO: 96412 - DNA, 507 bp, Arabidopsis thaliana columbia
tacgactcactttagggaaagctcgtacgcctgcaggtaccggtccggaattcccgggtcgacccacgcgtccggaaataagagacactctcttactcttactcttcctcttgctcattttcgtaagagacgatggcggaagtatcagcaaaatcggtgacggttgaggaaatggcggaagaggacgacgctgcgattgaggagcggtggagtctttacgaagcttacaacgagttacacgctttggcgcaggaattggagacgccgttcgaagcaccggcggttcttgtggtgggacagcagaccgacggtaaaagtgcgcttgtggaagctcttatggggtttcaatttaaccatgtcggcggcggaaccaagactcgtcggccgattactctccatatgaagtacgatcctcagtgtcaattcccgctttgtcatctcggatctgatgatgatccttccgtttctcttcccaaatctctctcacaaattcaggcatatattgag

SEQ ID NO: 96413 - DNA, 525 bp, Arabidopsis thaliana columbia
  unsure (1)..(525): unsure at all n locations
acgattttccagctannnnnnnnnnnnnnnnnnnnnnnnnnnnnnnnnnnnnnnnnnnnnnnnnnnnnnnnnnnnnnnnnnnccacgcgtccgaaaagctttaagacatttgcaccaaaaagatctcaaattcacgttcacatagaaaaattaacaagaggcagaaggaaaaaaaatgtggaggtcattcgcaagaagcttcaaactcattaatgtaccaaatggtttgatatccaagccaattcgctctactctcctctattcaacttcttcaagaaagttagaaggaaaagtagcggtcataaccggcggggcaagcggaatagggaaggccacagcggaggaatttgtgagccaaggtgcgcaagtgattatcgtagatatagatgaagaggctggtcatatggtcgcgaccgaacttggctcagccgcacatttcttaagatgtgatgtcactgaggaggaacaaatcgctaaggccgtggagaccgccgtgactcgtcatgggaagctcgacctaatgct

SEQ ID NO: 96414 - DNA, 556 bp, Arabidopsis thaliana columbia
  unsure (1)..(556): unsure at all n locations
aacacactaagaatacagcaaatcgtctcttcgccattaaaacaccttcctttgcaaacaaagcttcaaactttctcttaaaacacccccaaatcagcagagatagggttaatcgaagaacctcaccgtaagtccactgaggattcaagttcttgctttggtttaaggaagaagaacagcagaaacctcaaggagaagaagaagtcaaagatgactcagagtcaaaccaacgacggagctggagctggagctgttacgacggtagaatctgttcctcctcagcctcaatctcagcctcagcctcagccgcagcagcagagcaacgagatggttctgcatacgggaagcttgagttttagtagtcatatgtcgagagaagacgaagagatgactccgttcttgctcttttcgggcgtttagagctaaagaaaggttgagatttgagaagaggcaggatggaaagtcccgttaanngttccccaagctcaatttgggncggggntgancaagaaacccaacgtttttntanttttncgttnggngntttggctnttnc

SEQ ID NO: 96415 - DNA, 674 bp, Arabidopsis thaliana columbia
tcatcagaggtttgtgaaaacatatggccgagctattcattcagctcaagcttattccatgaatgatgaattttcaagagttctgagtcaacagatggagttttattccaatgatcctaatgcagacaggatgagcagaatcaaaggtgaaatgagtcaggttcgaaatgtgatgattgagaatattgataaagttttggatagaggggagcgtttggagttgctagttgataaaaccgaaaatatgcaaggcaacacttttcgtttcagaaagcaagctcgtcgttacagaaccattatgtggtggagaaatgtcaagcttacaattgctctgatacttgtactagctttggttgtgtacatcgcgatggcctttgtttgccatgggccaagtcttccttcttgtttcaagtaagaagacattctcttatcttcttcacctttcccttcttgggaattatcagactctgcttcgattttggaatgtgagattatatgcgtttgtctaaaatgtgtgtttatgtgatctttcaatttcagcttctgcttattgctttgaattacagagtcgattatttatttgtaagtgtgatatttcactgttaatgatcatcccctgtctgtttgcaatttatgctgcggcgttaaaagttgtataaaatgatgacgttttt

SEQ ID NO: 96416 - DNA, 1780 bp, Arabidopsis thaliana columbia
  unsure (1)..(1780): unsure at all n locations
atgatctnnnnnnnnnnnnnnnnnnnnnnnnnnnnnnnnnnnnnnnnnnnnnnnnnnnnnnnnnnnnnnnnnnnnnnncatagaagacgagacgcccccactacttagactttttctactacaaacctgagattttagtctgagagaaagagaagagaacactaagatgatgacttctcgttcgattgttcctcaacaatccacggatgatgttgttgtggtagatggcaaaaacgtagcgaaaggaagaaaccgtcaagttcttggtgatataggtaatgttgttcgaggaaattacccaaagaacaacgaaccggaaaagatcaatcatcgtcctcgtacacgatctcaaaatcccacgcttcttgtggaggataatctcaaaaaacctgtagtcaagagaaacgcagtaccaaagccgaagaaagtggctgggaatccaaaggtagtagacgtgattgagataagttcagacagtgatgaagaacttggtttagttgctgctcgagagaagaaggctactaagaagaaagcgaccacttacacatctgttcttactgctagaagcaaggctgcttgtggtttagagaagaaacagaaagaaaagattgttgatatcgattctgctgatgttgagaatgacctcgcagctgtggaatatgtggaagatatttacagtttttacaagtctgttgagagtgaatggaggccacgagattacatggcatctcagcctgatattaatgaaaagatgagactgatcctggtggagtggttgattgatgtgcatgtccgattcgagctaaacccggaaacattttacctcactgttaacattctggatcggttcttgtcggttaagccagtgcctcgaaaagaactgcagcttgttggtctcagtgctcttctcatgtcggccaagtatgaagaaatttggccaccacaggtggaggatctagttgatattgcagaccatgcatacagtcacaaacagattctggtgatggagaagacaatactgtctacacttgagtggtacttgacagttccgactcattatgtcttcctagctcgtttcatcaaagcttccattgcagacgaaaagatggagaatatggtgcactatttggctgagttaggcgtaatgcattacgatacgatgataatgttcagtccatcaatggtagctgcttctgcaatctacgcagcaagatcttctctccgccaagttcccatatggaccagcactctcaagcatcacactggctattctgagactcagctcatggactgtgcaaagctgttggcgtatcagcaatggaagcaacaagaagaagggagtgagagcagtactaagggagctttacgaaagaaatactccaaggacgaacgcttcgctgtggctttgatccctccggccaaagctttgttgaccggaactgaatctgcttaggagttaggaccctttaagaagacgaagaagctgaagaaccaagcctagtttcattttccttctgaaaatcaagtctagtttcattagataatggtattttgaacaagtctaatgagtcgctttgaaacctagtcctttagcatgattcattcccaaacactgcatatcttgtaagaagtcagtttcttccgagaagtttaatttccttagatataatattctgtggtttaaaaaaaaaaaaaannnnnnnnnnnnnnnnnnnnnnnnnnnnnnnnnnnnnnnnnnnnnnnnnnnnnnnnnnnnnnnnnnnnnnnnnnnnnnnnnnnn

SEQ ID NO: 96417 - DNA, 456 bp, Arabidopsis thaliana columbia
atttgattccatatttgtcacaattcaggctatttctaatgggtttgaagaaatatgggaaaggagattggagaaacatatctcggaactttgtgataacgcgaacgccaacacaagtagctagccacgcccaaaagtacttcatccggcaactttccggcggcaaggacaagagacgagcaagcattcacgacataaccaccgtaaatctcgaagaggaggcttctttggagaccaataagagctccattgttgttggagatcagcgttcaaggctaaccgcgtttccttggaaccaaacggacaacaatggaacacaggcagacgctttcaatataacgattggaaacgctattagtggcgttcattcatacggccaggttatgattggagggtataacaatgcagattcttgctatgacgcccaaaacacaatgtttcaactatagctaatga

SEQ ID NO: 96418 - DNA, 417 bp, Arabidopsis thaliana columbia
caaatcaaaacaagaataacaaaatctttctcttataaattcttatttcaagacatcaaaggagaattaatggaggcaatgaagatgaagatgatggtgtttattatggttgttgcggtggctttctcagctgccacggctgctaccgttgaagctccagctccaagcccaacttctgatgctgccatgtttgtaccagcactgtttgcatctgttgttgctttggcatctggtttcatcttttgatcattctttttttcttcattatttaattgcatttgttaatgagtttgcgtgatttgattctctattgttagaatgttgcattcttatttcttaatgtaaccatctgtttctctatgtatctatgtgtattatcaattcatcactgtttatgaaaaaataaaaaccaactaa

SEQ ID NO: 96419 - DNA, 636 bp, Arabidopsis thaliana columbia
  unsure (1)..(636): unsure at all n locations
caaaggtcttacctcattgctacatgttgatgtctccaacaatcagttcacaggtccaataccagataacttggagggtcagttgttatctgagccgtcgtcgttttcaggaaatccaaacctctgcattccacattccttctctgctagcaacaatagccgcagcgcgttaaagtactgtaaagatcaatctaaaagcaggaagagtggccttagcacctggcaaatcgtgctaatagcggtcttatcgtctttattagtcttggttgtggtccttgctcttgttttcatttgcctacgtcgtcgcaaaggaagaccagagaaagatgcttatgtcttcactcaggaggaaggcccatctttgttgttgaacaaagttcttgcagcaactgacaatctaaatgaaaagtacaccattggaagaggagctcatggaattgtgtacagagcttctttaggctccggaaaggtctacgctgtgaagagacttgtattcgcgtctcacatccgcggtaaccagagtatgatgagggagattnatacaatcggtnaagtcaggcacaggnatctnnttaanttagaagggttttttgctttaggaaaanncgncgggttttaatnctgtntngntacnat

SEQ ID NO: 96420 - DNA, 465 bp, Arabidopsis thaliana columbia
gcgtccggatttaataggcaagaggatccaatatgattgtcctggtgtcttaccaaacaaacgccagcaccgtatggcaggattagctgtgatagagattgctcaaaaagtttccaaagcttggcgcatagagtggaggaattcaaccaaaggcactacaaaaaatggaaagaaaaaccggaggagagagagaaccaacattcttagccagaatagaggtggtgctgggtgtagtagtagcagtttcagtgaaacttcaactggatatgcctcactagaagatagatcatcaggccgctctatcttgtcttggcaagacgtttattcccctgctgtcagatggagacaaatttcagagccttgtgacccagtggtgtgggttaacaaactaagtgaagagtttaattctgggtttggttctcatacaccaatggtactcggtcaagctaaagtagtacgctattt

SEQ ID NO: 96421 - DNA, 461 bp, Arabidopsis thaliana columbia
gggggatctgagggacgtgtggaccgttatgttgaccgggaccgttatgtggaccgcgaacgatacatagatgatcgatacgacggtgctgcacgctatggtgctagagacaggtttgacagcagagaagcctacataccccgtgatcgatacgccagtgacaggtatgcagccccggctgatcggtttgcaggtggtgatagatacagccgtggatcagaccgttatcctccagggagctatgacaaagctcggtcctttgagagagacatagccccgagtgcaggcagtgacaggtacggtggtggtagagctggtggtcccatccgtggaggaggagaggagggaagagggtttagaagcagagccggtgctccttatgagagaccgagcagaagtggtggtgggggagcttactccggcgtcgtccacttttgaccgttattaagacacattaatga

SEQ ID NO: 96422 - DNA, 906 bp, Arabidopsis thaliana columbia
  unsure (1)..(906): unsure at all n locations
agaaatattaccagctgctccggtcaccacagagaccanggtggaagagaaagtcgttccagtagaaaccacaccggctgctccagtcaccacagagaccaaggaagaagagaaagccgctccggtcaccacagagcccaagggggaagagaaagcagctccgggggagaccaagaaagaagagaaggcaaccgcctctactcaggtcaagagggcctcaaaatttattaaagatatatttgtctcagtcaccactagcgagaagaagaaggaagaagagaaaccagcagtagtaacaatcgagaaggctttcgcagctgatcaagaaggaaggaacaaaaaccgtttgaagcagtcgaaggattcaatcgtctccatcactcttccagagacagctgcatacgtagagccagaagaagtctcaatctggggaatcccacttctagaggacgaaagatccgacgtgatcctcctcaaattcctccgtgcacgtgacttcaaggtcaaagaagccttcacgatgctgaaaaacaccgtccaatggcgcaaagagaacaagatcgacgacctagtctcagaagatcttgaaggaagcgagtttgagaagttggtgttcactcacggtgtcgacaaacaaggacatgtcgtgatctatagctcgtacggtgagtttcagaacaaggagattttctcagataaagagaagcttagcaagtttctcaaatggagggtttcagttccaagagaagttgtgtgaggtctctttgacctttagccctcaggctaagtcaatcgttcgtgttcgttaagtgaccttcaggaacgctcctggcctttggtcagagggcattgtggcagttcattaaacgcgccgttaagcaattcgaagataactatccagagttt

SEQ ID NO: 96423 - DNA, 500 bp, Arabidopsis thaliana columbia
aatacgactcatttagggaaagctcgtacgcctgcaggtaccggtccggaattcccgggtcgacccacgcgtccgcggacgcgtgggtgcgtgcggggtttaaaaagcttgttgtctcactgtttagaaaggaaatgatggatgtttccagcagatttgatgagctgctcgaaaggatccttgtggaacatgaagataaactggacatgcatcatcaaggtacagacttagtggacgcgttgttggcagcttgtcgggacaaaaatgcagagtataagatctctaggaaccatatcaagtcgtttttcgcggatctcttatttgcaagcactgacacctttgtgcaaacaacacagtggacagtggcggagatcattaataaccctaatgttcttgagagattgagaggagaaatcgattccgtggtcgggaaagcaaggttgattcaagaaactgatttgccaaacctcccttatttgcaagcgggggccaaggaaggg

SEQ ID NO: 96424 - DNA, 413 bp, Arabidopsis thaliana columbia
ctaaaaaatcaccgtgtctctcgtccctggttcggtccttcgagaagtgtgaacaaaaatgggttttctctttggtgttgctcataggaatcgcggtttctttcggctcggtcgtcgcatttgctcgctactctagtgtcagatccactcgtccagctgatttggcaaagaccattgctgcatttgcaagaatgacagttcaagattcgagaaaacttctcccgggagatttttatccttcttgggttgtgttttctcagagacaaaagttaaattggcttaatcttgaacttgaaaagatctggccttatgtaaatgaggcagcttctgagctgattaaaagcagtgtggaaccagtacttgaacagtatacaccagctatgttagcatctctcaagttctctaaattcaca

SEQ ID NO: 96425 - DNA, 773 bp, Arabidopsis thaliana columbia
cccacgcgtccgaggaagcaagggacttggaatttacaggaacacagctaaagctgtcatgtgtggacttctaccaaagtctccaacatttacagctagtagaacaaacggtggtcttatatgggttagtgaatggaactcgatgcaacaatccgtttcgtcagcgtttttagcctcgcttttcagggattacatgctcacttcccgtatccataaaatatcttgcgacgggaaaatcttcaaagcaacagagcttagagatttcgccaaatcgcaggctgattacatgctggggaagaatccgttgggaacgagcttcgtggtgggttatggagacaaatacccacaatttgtgcatcatagaggagcttcgatcccggcagatgcaacaacgggttgcttagatggattcaaatggtttaactcgacgaaaccaaacccaaacatagcatatggtgcactcgtaggtggacctttcttcaatgagacgttcactgactcacgagagaacccaatgcagaacgagccaaccacttacaacaatgcactcctcgttggtctcttgtctagtcttgtcactacatcttctactttacagtcgttgaagtgagctttgcgtgttttagccttcttattgaaaatcacattgcttcatttttaatttgtaattttttaaaaaaaatcgtgggtgtgtgtgtattcacgttgtgtattgcttgaaatggtggtgcgggggtccaaacaattagtgctctacggatccaaaattgagg

SEQ ID NO: 96426 - DNA, 725 bp, Arabidopsis thaliana columbia
  unsure (1)..(725): unsure at all n locations
aggcgaaaccactgtccctcgaatctcagacgatcgaatttgtaaaaggaaagccgcttctcctcctcaaatgggttggctccgacccaaccctacctgcctttctcctcaactcccacaccgatgtcgttcccttcgaggactccaagtggactcaccatccgctccaagctcacatggaccaccatggcgacatctatgccaggggttcccaggacatgaagtgcgtcgggatgcagtacctcgaggccatacgcaagctccaggcttctggcttcaagccactccgatccgtctatctctccttcgtccccgatgaagagattggcggccacgatggcgcagagaagtttgctgaatcccaattattcaagagcttgaacatcgcaatcgtgctcgacgaaggcctgccatcgcctactgagagttacagagtattctatggagagaggagtccctggtggctggtgattaaggctaaaggtccacctggccacggtgccaagctctatgacaactctgccatggagaatctgctcaaaagcatttgagagtattccgcagattcagagcttctcagttcgatcttctcaaagcttggtgggntnagctnaaggcgatgtttctcttntaacatggncttctnaaagnntggacaccttntcaactggnttcgtatgatnttcaaccatntaaggaaaagntggnttcnnattgngttcncc

SEQ ID NO: 96427 - DNA, 626 bp, Arabidopsis thaliana columbia
  unsure (1)..(626): unsure at all n locations
nnnnnnnnnnnnnnnnnnnnnnnnnnnnnnnnnnnnnnnnnnnnnnnnnnnnnnnnnnnnnnnnnnccacgcgtccggaagaatccgaatccaattcaatgagtcttcttcgtcttctcctcgttgttgttgttcttcatctttctgcggtggccggcgacgacgccatcgtctccagattccaggagtacctccgaatcaacacggttcagcccaacccggaatactacaaagccgttgactttataatatctcaggcgaaaccactgtccctcgaatctcagacgatcgaatttgtaaaaggaaagccgcttctcctcctcaaatgggttggctccgacccaaccctacctgcctttttcctcaactcccacaccgatgtcgttcccttcgaggactccaagtggactcaccatccggtccaagctcacatggaccaccatggggacatctatgccaggggtttccagggcatgaagtgcgttggggatgaagtaccttgggggccataaggaaagttccgggtttttggtttaagcaatttcgggtccggttattttttcttggcccccttaaanatttgggccaaatttggaaaaaattttttaatccanttttaagggtgt

SEQ ID NO: 96428 - DNA, 524 bp, Arabidopsis thaliana columbia
  unsure (1)..(524): unsure at all n locations
cccacgcgtcgagagagagaagagaactactcagatataaaaaccctagatttcttctcttaaaacccacatcgaatctcaactcagaaccaacaatgctccaacctttctcttcctcctctgttttctcgagaatcctctggactttcttggtttaagaagattcgttgttgaatcagagagaaagaaagcatccatttttctatcattgcttgcttgctatggaattgggtaaatctcgattctacttatgttgcaattgcttttctcctgttagattttccgattattctttagctggaagtgattatccagacgccatctccatcactttcaattgtattcctataccttcttctgaagattcttcgtatttctcgattcgatgtttataaacttcaaattctcttccaaatcttgaaacgaatttctcccaaaaatctctgtttcttcacaaaaaagacccaaaaaaaaagggggngggccggtncttggnngggtccaaaggtttnccggncgggggt

SEQ ID NO: 96429 - DNA, 435 bp, Arabidopsis thaliana columbia
  unsure (1)..(435): unsure at all n locations
aactcgtaccttgtttatgcggcggacattgtcagttattccacgatctctttcagcttctggttcatttcgtaatgacagtactccaaaagcagcacagagaaattctgaagattctggtgttacggttgatggatccccatctgcaaaggaattgacgttcgttgttcctgtattcctcgtttttctattcggcttttggagaggctgagtcaaagtctgtggagacactctcaccgtttcagcagaaagatggtcaaaagggactctttgttgatcgtggtgttggctcccctaggctantgaagtctcttagtgcaagctcttttttgattgataccaagcaaatcaagaattcaatgccagccgctgcaggagctgttgccgcagcagcggtagctgatcaaatgcttggaccgaaagaagatagacatc

SEQ ID NO: 96430 - DNA, 441 bp, Arabidopsis thaliana columbia
  unsure (1)..(441): unsure at all n locations
gttcgagttcgaaacctngtttcccatcncccccggtcttgaancctctgttgtggcccagcccaacgancggtggcaaggatctccgtgtgcgtttgtgaccacttaagngcgattccgagaagcatgacccagaataagttggctcaggatatattgattttctgccgggagaagcttccggcgtatggggtcccaaagtcaggggtgttggggccgttaccaaagacagcaactggaaaaattcagaagcatattctgaggaccaaggccaaagagatgggaccagtaccaagaagcaggttttaggaagtgataaagctttaagaacaacattttgaaaataatgtgttgtatgtttttgcggaactttgcctggtgtgtaaactttcaaatgataaccctatcgttgttttctccaaaacctggggctcatactcg

SEQ ID NO: 96431 - DNA, 466 bp, Arabidopsis thaliana columbia
gagtttttgggaactgagaagcatccactcgacaatggagactgcgatttgtgggagattagctctcgcaccatcctctctcttcaattctaaatcaggggacaaacatttagtctcaaaaggaccatgtgtgaatcgtagcattctcatgaccttgtctacatctgctgcattgggtaaaggaggtggtgtcttagacaaaccaattatagagaaaaccactcctggtcgtgaatccgagtttgatttaaggaaatcaaagaagatagctccaccttacagggtgatactacacaatgacaacttcaacaagagggaatatgtggttcaggtgttgatgaaggtattacccggcatgactgttgacaacgcggtttacattatgcaagaagctcatatcaacggttgggcagttgtgattgtttgtgctcaggctgatgcagagcaacactgtatgcagctgcgc

SEQ ID NO: 96432 - DNA, 479 bp, Arabidopsis thaliana columbia
  unsure (1)..(479): unsure at all n locations
cagncttgctcactctcatggtaaggngtgtncttgccaccnattttgggaacccnctcctggcgtganccgngttgatttagggaatcaaaggagatagctcccacttacagggtgatactacacaatgacaacttcaacaagagggaatatgtggttcaggtgttgatgaaggtaatacccggcatgactgtagacaacgcggttaacattatgcaagaagctcatatcaacggtttggcagttgtgattgtttgtgctcaggctgatgcagagcaacactgtatgcagctgcgcggtaacggccttctcagttctgttgaacctgatggtggaggctgctgaaactaattaaactcagtatagattttcccaccttccaggactctctatttagtcaaaaacatttgttgttttaatgtatataatatcagaaatttggtacaagactgttactatatgcaatgaaccttgcccct

SEQ ID NO: 96433 - DNA, 580 bp, Arabidopsis thaliana columbia
  unsure (1)..(580): unsure at all n locations
nnnnnnnnnnnnnnnnnnnnnnnnnnnnnnnnnnnnnnnnnnnnnnnnnnnnnnnnnnnnnnnnccacgcgtccgctttttgtctatgagagcatccgaccggattttggaatcttcagtcactctaactaagaacttacggagccgagaagaagaagataaggtgtcaagctgtgcactgatccaggctatggccaaggcatgccaagtttctgggacacttgactctggcttgaccgagtctgaggtgccttatgagtctgaaacccactttactgaagaacaagaactagagcagcttataaatgggcacttgtgctgtaagatttatccattttctggggaagcacacgggtctgatgaagacagaaagattatactacctggctcttttaacccattacatgaaggtcatctcaagctgttagaagttgctatgagtgtttgtgggggcggctacccatgttttgaaatatccgcaataaatgccgacaaaccaccgcttacaattgcacagattaaagatcgtgtcaagcaatttgaagtagttgtatccggttggcaggaaagacgataatag

SEQ ID NO: 96434 - DNA, 1325 bp, Arabidopsis thaliana columbia
  unsure (1)..(1325): unsure at all n locations
cacaacacgtctaagcttgctgtgcttttggagatttttattaagaagtttgttcagtgttatggatgtggtaacccggagactgagattattattacgaagacgcagatggtgaatctcaagtgtgctgcttgtgggtttatctctgaggtcgacatgagggataagttgactaatttcattctcaagaacccacctgagcagaagaaggtgtcaaaggataagaaagcaatgaggaaagctgagaaggagaggcttaaagaaggcgagctagctgatgaggagcagagaaagctgaaagctaagaagaaagcattgtctaacggcaaggattctaagacgtctaagaaccattcttctgatgaggatataagcccgaagcatgatgagaatgctctagaggtggatgaggatgaagatgatgatgatggtgtcgagtggcaaactgatacttcccgagaagctgctgagaaaagaatgatggaacagttgagtgctaaaactgccgaaatggtgatgctctctgcaatggaagtagaagagaaaaaggcgcccaaaagcaaatctaacgggaacgttgtgaaaactgagaatcctcctccgcaagagaagaatctcgtgcaggatatgaaagagtatctgaagaaagggtcaccaataagcgcgctcaaaagtttcatctcgtctctctctgaacctcctcaagacatcatggacgcactcttcaatgctctctttgatggtgtgggaaagggattcgccaaagaagtgactaagaagaagaattacttagcggctgctgcaacaatgcaagaggatggatcacagatgcatctgctcaattcgattgggacattctgtggaaagaatggaaacgaagaagctttgaaagaggtggctctggttcttaaagcattgtacgaccaagacatcattgaggaagaggtagtgttggattggtacgaaaagggtctcaccggagctgacaaaagctcgccggtttggaagaatgttaagccttttgtggagtggcttcagagcgctgagtctgagtccgaagaggaggattgagtcacttttttcttccctcctaacttttctttgcggcatttcttataatacttcgtcagttttcagaattcttaaatctttttgctgtgttcttataaagaaacatcatctattaaagttgtcttcgtttggatttggttttgacgactttgggaaatatttatgtttaagaaggtttcattggtcnnnnnnnnnnnnnnnnnnnnnnnnnnnnnnnnnnnnnnnnnnnnnnnnnnnnnnnnnnnnnnnnnnnn

SEQ ID NO: 96435 - DNA, 384 bp, Arabidopsis thaliana columbia
cgaaccttatccgtcacagtggcaatggaggacaaatcaccgacgttactgatttctgaagatttatcccggaaaataatctctcttgccgccggtgaagctcatacaatcgctctgaccggcgatggatgtgtttactcatggggaagaggaatgtttggccgtctcggtacgggtaaggagtcggacgagcttgttccagttctagtcgagttcccaaatcaagcggaaggagatcggattcgaatcgttggtgttgctgctggtgcttatcacagtctcgctgtctcagatgatggctcggtttggtgttggggttacaacatttatggccaacttggttttgatggggaaaactccttggcaccatgcttgatcaaaaat

SEQ ID NO: 96436 - DNA, 540 bp, Arabidopsis thaliana columbia
  unsure (1)..(540): unsure at all n locations
gaggtggtttacgactcactctatggaaagctggtacgcctgcaggtaccggtccggaattcccgggtcgacccacgcgtgcggatattttaactttgttaagcacagagtgctgatgatcggtgaagccttattttagaaagcaactgaggacgaaccttatccgtcacagtggcaatggaggacaaatcaccgacgttactgatttctgaagatttatcccggaaaataatctctcttgccgccggtgaaagctcatacaatcgtctctgaccgggcgatggaatgtgtttactcatcgggaagtaggcatgcttggcccgtctctggtacgcgtataggagtcggacagagctttgtcccagttcttggtcgagtgcccaaatccagcggaaggggaatcggtgtcgattcggtgcggtcgctgctggtccttacctaaatcgttgtatattaggtagtcnctttttataattagtgaaacgtcatttacgatataacttaggttagttaatagatcatagtgaagcttttagtaat

SEQ ID NO: 96437 - DNA, 536 bp, Arabidopsis thaliana columbia
  unsure (1)..(536): unsure at all n locations
cttttgcttacctttctctcgacttggtctacttttgttactctttgagttgggtgattatggcagcagcaccacaggaggaacgatctccgtcgcttgacgattgccttaagctattgaaaggggagagagacgagcagaggctcgccggtctacttctcgtcaccaaattctgtaagaacgatgacatcgtttctctcaacaaggtctacgaagccgttggtactcactttctcgaccgtcttttccgtactggtagtggcagtggcgatggggttgataatcgtgatgtgtatctgcagatatctatcactgttcttgctgcattctgccgtgttccggcagataagcttcttcagaagagatggtctccagaattnccccttatttctcgaagtaattgtccaaagnattactacaaaacattntccnagattgctnttganttctgantttggngccacggctttttnaagntggccnaatnctttagttaacnttggnggctttanngnanagctcccanatncttagtt

SEQ ID NO: 96438 - DNA, 914 bp, Arabidopsis thaliana columbia
cgcgtccgatacaacaccttcacttagaaaatttactactgaccaaaaccaagagcattttggtcgtattttaatatccttagtcggtgtctatgaataattaatatgacttacagctcgttggtcgtattttcatatctttattcgttgtctattaataattactatgacttattaacgtattccctgattagtacaactaatataaaatgttaatcttcttctcataatattcttgaagcaaattagcactgaccgatcgatccatggaagaggtgaagaaggatgtatactcggtttgggcattaccagatgaggaatcggagccccgattcaaaaagctaatggaagctttgagatccgaattcactggcccaagattcgttcctcacgtcaccgtcgccgtatctgcttatctgacggcagacgaagccaagaagatgttcgaatcagcttgcgacggtcttaaagcttacaccgccaccgttgatcgcgtctccaccggaactttcttctttcaatgcgttttcttgcttctccaaaccacccctgaggtaatggaagctggtgaacactgtaagaaccatttcaattgttccactaccacaccttacatgccgcatttgagcctgctttacgctgagttgacagaggaagagaagaagaatgcgcaggagaaagcttacacgctcgatagcagcctcgatggactcagtttccggttaaaccgacttgctctatgcaaaaccgataccgaggacaagactctagagacatgggagacagtggctgtatgcaatctcaatccttaagaaagtcaaaactttggttctgaatctgtaacaaaagatcataatgaacttgcttttgaataatgtatcgttttctctaaaactgaataataatgttacaat

SEQ ID NO: 96439 - DNA, 767 bp, Arabidopsis thaliana columbia
  unsure (1)..(767): unsure at all n locations
nnnnnnnnnnnnnnnnnnnnnnnnnnnnnnnnnnnnnnnnnnnnnnnnnnnnnnnnnnnnnnnnnnnnnnnnnnnnnnnccacgcgtccgcccacgcgtccgtacggctgcgagaagacgacagaaggggatccaaaaagacgaagaaaaggaaaaaagacaaatcaaagagagacgattcgatcgcatcaatggcagaagaaaagagcttcaagtatgtgatcgtcggaggtggtgtcgccgccggatacgcggcgagagagttcttcaaccaaggtgtcaagcctggtgaacttgctatcatttccagggaacaagttcctccatatgagcgtcctgcacttagcaagggatatatccacctcgaaaataaagctacacttccgaatttctatgttgctgctggaattgggggagagagacagttccctcaatggtacaaagagaaaggtattgagctgattttgggcacagagattgtcaaagcagatcttgctgcgaagacacttgtcagtgggactggacaagtcttcaagtaccaaactttgctagctgcaactggttcttctgtcataaggttgtcaagattttggcgtcccaggtgcagatgctaagaatatattctacctgagagaactcgaagatgctgattaccttgcttatgcaatgggaccaaagggaaaagggaaggctttggttgttggtggcggttaaactgggtcttnnacnnnggtgntgctcttgaagggtaacaaaccttcnaggtt

SEQ ID NO: 96440 - DNA, 405 bp, Arabidopsis thaliana columbia
cccacgcgtccgcccacgcgtccggatttcgatattctttgtacacatccaatgtttggtcctcagagtgtgagttcaaatcatggctggagaggattaagatttgtgtatgataaagttaggattggggaagagagattagagagtctcaaggtgtgagagttttcttgagatttttgttagagaaggatgtgagatggtggagatgagtgttactgatcatgataagtttgctgctgaatcacagtttataactcatactcttggtaggcttttggggatgttgaagttgatatcgacgccgattaatacgaaagggtacgaggcgttgcttgatttagctgagaatatttgtggggatagttttgatttgtattatgggttgtttgtgtataataacaactc

SEQ ID NO: 96441 - DNA, 424 bp, Arabidopsis thaliana columbia
  unsure (1)..(424): unsure at all n locations
tggaaaacccgggccggcccacgcaaccaaaagccgcctttgaaggctatccatttatatctaacgatgaagagtctcaaaaagagaccgtctttcaagaaagttccgtctctatcatccctatcttcaaggagacaccaacctctacattcactttcttctcaagaaggtcttacctctccaattaattaaagattatatctatttgtgtatacactttgtttcttaatttgttttgcacatacgatagtttcaacatttataaatatgtatcattatcagcatctaatgattctatgattcaccattgttattttttgagaataaacatgatactctgtttctttccgttatattgttgccnnnnnnnnnnnnnnnnnnnnnnnnnnnnnnnnnnnnnnnnnnnnnnnnnnnnnnnnnnnnn

SEQ ID NO: 96442 - DNA, 605 bp, Arabidopsis thaliana columbia
  unsure (1)..(605): unsure at all n locations
nnnnnnnnnnnnnnnnnnnnnnnnnnnnnnnnnnnnnnnnnnnnnnnnnnnnnnnnnnnnnnnnnnnnccacgcgtccgaccacatctacagagtcagaaaataaaaagtagaagaagcagaagcgagagtgcaaaaaggaaattaggttttgagtggtcatgtctgctcctatctattctccgatagatatgcaagagattgttcaaaatcctcctgggtttgatacggaaccagtcccaatcagtacttaccgagacaatgaacctgtcccgctttcaacttaccgagaaaatgattcagatcatctcgacgccactcagcaagagaacgatgacttttgggaaaacggtttcagtagggaagaggccattgaagatccagagccttctcaggcaaaggaaaatggaaagagaagtgtagacaacagcgctttcactcatggggaaactgatctcaatcaacttcctgcgattcctccggtttcaactggtcaaggtttgccgtatgcccctgttgattggccaagccctggtgatgtatggacttggagagttgggaggagagtgactgctatggggtatcatcaggataggtttcttattc

SEQ ID NO: 96443 - DNA, 348 bp, Arabidopsis thaliana columbia
ctgatattatcaaaaacttactatctattttataaatcactaatatattaaaagtcaagggtaatcctatatgagggtggagctagataatatttttggaactcagttaaagtttaggtaataattaacatcaaagagttaatgtgcactcatttaatcaaaattaatcaacattaacaaatttaaatataatatatatatatataacttacatatatatttctaccggatttaaattcgagttttaataaaccggtgataatagtgaaaattactaggctacatggtccggtaaaatattaagttaaatacatatttctaatgtcgtatttcaaaaaagatcggttt

SEQ ID NO: 96444 - DNA, 415 bp, Arabidopsis thaliana columbia
tataatattggaaatttctgaagcttttctatagttgatctcgagccatgcctccaatgaaagctgtgttgcaattgagcattcacgaggaaagaatcaggaagaaagcgtttgtcaccgtttctcgatgtccaggtgttacttcgataacaatggatgacaaaaccgggaaaatgacagtagttggtgaagttgatgtaccggttatcgtgatgaagctaaggaagctatgtaacacagagcttgtttcgggtgaaagttgttaaaccacctgagaaaaagcctgaaccagagaaaccggctccacctaaaccagctccagctccagctaaaccggctgaaattgttgcctggccggttcagatgaacaacccttaccaatacaatcctgcctatgcaaattcttactatcaac

SEQ ID NO: 96445 - DNA, 364 bp, Arabidopsis thaliana columbia
  unsure (1)..(364): unsure at all n locations
gttcagttagtctttggtttcttcacacagcatggatattcacaacaccaaacgtgacacgccgcacgggtcaattcaggaggagcgccggggaaaatggcttctccagacgtttcggagctcacaatattcaggtcaatggctccctcgctaagctcactctcgacaaatcctccggagctgggttggtgtcaaagaacaagtatcactatggtttcttcagggcaagactcaagcttcccgctggatttgcctctggggttgnggttgctttctatttatcaaacgcagagacttatccgaaaagccacgacgagatagacatataattgttgggtagaagtaggagagatgattggacgat

SEQ ID NO: 96446 - DNA, 594 bp, Arabidopsis thaliana columbia
ctcacatggagatgataaaagggattcaaggtcacggatactatgatgaacttgttgtcccaatcatagagaacacagtatatgagaatgaactaacagattcacttaccaatgttatagaagcctatccaaaagcaacagcagtgttggtacgcaatcacggagtttacatggggggtgattcttggctccatgctaagacacaggctgaatgttaccattatctgttcgatgctgccattaagcttcatcaactgggtctggatgctgctaccccagaccacgggcctatccggagaaccatacattcacagatcaaggcttcaccatttctctcgtctcgtcgtctctcagaaatctttttagttgagagagctataatggggagaaaggctggaaatttgtacataaacccgaaaaagctcgggaatttggcgaaaccgtgtatgaaggaaatggtatcgttcttgaactgtatggctcttaacaatatcaaagatgataaatgtgagaaacagaagcaactcctgagtgtttgtatgcaaggccagtcggatcataagaacaagtcttggggtaacattaactaccatt

SEQ ID NO: 96447 - DNA, 255 bp, Arabidopsis thaliana columbia
gaattttgatcgcccggcacatattcaggctatggctttttcaccagttattgatggaaagaggtgtatcatagctgaccagaggggatcaggcaagacactggcatatcttgtccctgttattcagcgtctcagggaagaagagcttcaaggacacagcaaatcgtctcctgggtgtcctcgtgtcattggtctggtaccaactgcagagttgtcttctcattttcttgctatcctgtattgcaacatttttag

SEQ ID NO: 96448 - DNA, 787 bp, Arabidopsis thaliana columbia
cgacccacgcgtccgtcttctcgaattcagaaaaaagcccttgtccaatatctctctactcgtacaacaatggcgtcgatggctgcaaccaccaatttcaccaaatctatgctctttcctttctctcatgtttcaggaaatgcgagcttgaattcgcagagaagaacatggccaaagcagtacaagtctaaaaatggttacagggctcttcgagtgaatggattatttggaggtggaaacaaagataataacagtgaagatggacaatcaaaggcaggaatatttggtaatatgcagaatatgtatgagactgtgaagaaagctcaaatggttgttcaagtggaagctgtacgtgttcaaaaagagttagctgccgcagaatttgatggttattgtgcaggcgagcttgtcaaggttacgttatcaggtaaccagcaaccaatccgtaccgatattaccgaggcagcaatggaactaggttccgaaaaactatcacaacttgtcacagaagcatacaaggacgcacacgccaagagtgtggtggctatgaaagagagaatgagtgaccttgcgcagagcttaggcatgccaccgggtctcagcgaaggaatgaagtaagaagctgtttttgttgtttcatttcaactttcaggtatgagaggtcggctttttttgtttgtttgtatatcagtcaggcagaagcaaagagctttgtactcttactcttatggaatcatatataaaagatttgaaacttttggttttctgcaattttattcccaatgtt

SEQ ID NO: 96449 - DNA, 526 bp, Arabidopsis thaliana columbia
  unsure (1)..(526): unsure at all n locations
tgannnnnnnnnnnnnnnnnnnnnnnnnnnnnnnnnnnnnnnnnnnnnnnnnnnnnnnnnnnnnnnnnnnnnnnnnnnnnnccacgcgtccgatctatgagtgagtgactgagaaacagagaaggattccaagctgctaaagattttttgtcaagatttttaatttaagtttcctggaggaggagatcacagatcttcttttcatatgaagagatctttccttctcttgtatgtgctcctggtacaggccttctatggggcttggtgtagtgttggagaaagcctgcattgtgaatattccaatttagcgagtcttcaccggcctcacagcgtatcgattacagagtttggagcggttggagatggtgtgactctaaacactaaagcctttcagaatgctctgttctacctcaattctttctctgataaaggcggggccaagctttttgttcccgctggtcagtggcttaccgggagtttcgaccttatcagtcacctcaccttatggctagataaaggtgcaacg

SEQ ID NO: 96450 - DNA, 845 bp, Arabidopsis thaliana columbia
  unsure (1)..(845): unsure at all n locations
taggtgacactatagaagatcttgacgtcgcatgcacgcgtacgtaagctcggaattcggctcgagggggaatggagtgagagtttaaggaaagagtatcttcttgtcatcgaaggcttcttctctcttcctctccctctcttctccaccacttaccgcaaagccatccaagcgcggaggaaggtggcggaggcgttgacggtggtggtgatgaaaaggagggaggaggaggaagaaggagcggagagaaagaaagatatgcttgcggcgttgcttgcggcggatgatggatttttcgatgaagagattgttgacttcttggtggctttacttgtcgccggttatgaaacaacctccacgatcatgactctcgccgtcaaatttctcaccgagactcctttagctcttgctcaactcaaggaagagcatgaaaagattagggcaatgaagagtgattcggatagtcttgaatggagtgattacaagtcaatgccattcacacaatgtgtggttaatgagacgctacgagtggctaacatcatcggcggtgttttcagacgtgcaatgacggatgttgaggtcaaaggttataaaattccaaaagggtgggaagtattctcatcgtttagagggggttcatttagnccccaaaccactttcaaagnatgntnggactttnaaaccctttgggggattgcaagagcaactncggtaaccggcaaggccctttcttaattgttttcacaaccntttttngtnggaggggcccaaggcttttttnccccggtnacngggcttggntnaggggttnacccnccttgnttttccttaaccccnccngtggc

SEQ ID NO: 96451 - DNA, 560 bp, Arabidopsis thaliana columbia
  unsure (1)..(560): unsure at all n locations
gcgtccgtcgcacagagcaacaagaagagcaacggatcattcaaggtgtcctcctctcttccatcgccgccggcttcctcctcctactccgccgtacacgttaccgtcggatgggtcttcctccgggaagccttggtctccctctgataggagagacttttcagctgatcggagcttacaaaacagagaaccctgagcctttcatcgacgagagagtagcccggtacggttcggttttcatgacgcatcttgttggtgaaccgacgattttctcagctgacccggaaacgaaccggtttgttcttcagaacgaagggaagccttttgagtgttcttatcctgcttccatttgtaaccttttggggaaacactctctgcttcttatgaaaggttcttttgcataaacgtatgcactctctcaccatgagctttgccaattcttcaatcattaaagaccatctcaaggttgaaattgaccggtaaggccggttaaanttnatcttnggccntnggggtttccccttgaggnggcaaaagaaacgttngtaacgggaagattt

SEQ ID NO: 96452 - DNA, 1726 bp, Arabidopsis thaliana columbia
  unsure (1)..(1726): unsure at all n locations
ctctctccctcatcctctcttcttctctcatcatcatcttcttcttcaatggccttcaccgcttttctcctcctcctctcttccatcgccgccggcttcctcctcctactccgccgtacacgttaccgtcggatgggtctgcctccgggaagccttggtctccctctgataggagagacttttcagctgatcggagcttacaaaacagagaaccctgagcctttcatcgacgagagagtagcccggtacggttcggttttcatgacgcatctttttggtgaaccgacgattttctcagctgacccggaaacgaaccggtttgttcttcagaacgaagggaagctttttgagtgttcttatcctgcttccatttgtaaccttttggggaaacactctctgcttcttatgaaaggttctttgcataaacgtatgcactctctcaccatgagctttgctaattcttcaatcattaaagaccatctcatgcttgatattgaccggttagtccggtttaatcttgattcttggtcttctcgtgttctcctcatggaagaagccaaaaagataacgtttgagctaacggtgaagcagttgatgagctttgatccaggggaatggagtgagagtttaaggaaagagtatcttcttgtcatcgaaggcttcttctctcttcctctccctctcttctccaccacttaccgcaaagccatccaagcgcggaggaaggtggcggaggcgttgacggtggtggtgatgaaaaggagggaggaggaggaagaaggagcggagagaaagaaagatatgcttgcggcgttgcttgcggcggatgatggattttccgatgaagagattgttgacttcttggtggctttacttgtcgccggttatgaaacaacctccacgatcatgactctcgccgtcaaatttctcaccgagactcctttagctcttgctcaactcaaggaagagcatgaaaagattagggcaatgaagagtgattcgtatagtcttgaatggagtgattacaagtcaatgccattcacacaatgtgtggttaatgagacgctacgagtggctaacatcatcggcggtgttttcagacgtgcaatgacggatgttgagatcaaaggttataaaattccaaaagggtggaaagtattctcatcgtttagagcggttcatttagacccaaaccacttcaaagatgctcgcactttcaacccttggagatggcagagcaactcggtaacgacaggcccttctaatgtgttcacaccgtttggtggagggccaaggctatgtcccggttacgagctggctagggttgcactctctgttttccttcaccgcctagtgacaggcttcagttgggttcctgcagagcaagacaagctggttttctttccaactacaagaacgcagaaacggtacccgatcttcgtgaagcgccgtgattttgctacttgaagaagaagagacccatctgattttatttatagaacaacagtatttttcaggattaatttcttcttctttttttgcctccttgtgggtctagtgtttgacaataaaagttatcattactctataaagccttagcttctgtgtacataaaaaaaaaaaaaaataaaaaacttagggcggcagctctagaggatccaagcttacgtacgcgtgcatgcgacgtcatagatcttctatagtgtnnnnnnnnnnnnnnnnnnnn

SEQ ID NO: 96453 - DNA, 678 bp, Arabidopsis thaliana columbia
  unsure (1)..(678): unsure at all n locations
gnnactnaanacccgggattgagtaaaggcccaaaanncccnaactntnaaaggaaaatgccaatgntttccaaaactgnccccggntgtaaccgctgncgtgtggtctccactacnctctcnccctcctgatnccctcgcgnaaaaacctctgcttccgatagcgggaaagcagaagagaaggaagagaagagaataaaaaaccagtttcatactcatacgcattctnccacatcatcttcncccttgcgagcatgtactctgcaatgctcctaaccggctggtcaacttcagttggtgaaagtggtaagctggtggatgtcgggtggccttcagtgtgggtccgtgttgtgaccagctgggccactgctggtctcttcatctggtcccttgttgctcccattctcttccccgaccgtgagttctgagctaatgcatctacttgagattctgaataacttttcatgaatcttcaatttgtaaaaaaatattcgatctttctactataatagaacatcgtgtgcttaatcacgaatggcctttgttggcccttctgtaatatgaagatgatataaataaattcctttctcgtaattttcatctgtctcgacttctccacaattgcgttttgcccgattcgcgtttgtgttttgtttggtcaaaaaaaaaaaaaaaaaa

SEQ ID NO: 96454 - DNA, 1068 bp, Arabidopsis thaliana columbia
  unsure (1)..(1068): unsure at all n locations
cnnnnnnnnnnnnnnnnnnnnnnnnnnnnnnnnnnnnnncttttggattttgttcatggatggaatgacacatgggttggctacgacgagcagttctggtatgctgctttgctcgttgtttctcttgtatgttacttggcaacattcgtcttctctgggtttctcttccactggtttactccatctggacatgattgtggactcaacaccttcttcattatcatgactttgatatttgtattcgtctttgccattgtagttttgcatcctactgtcggtggaagcattttaccagcatcggttatatctctgtactgcatgtacctctgttacagtggacttgcaagtgaaccccgggattacgagtgcaatggtctccacaatcactctaaagctgtttcaacaggcacaatgaccattggcttactcacaactgttctctcggttgtttattctgctgttcgtgctggttcttccactactcttctctcccctcctgattctcctcgcgcagagaagcctctgcttccgatagacgggaaagcagaagagaaggaagagaaagagaataaaaaaccagtttcatactcatacgcattcttccacatcatcttctcccttgcgagcatgtactctgcaatgctcctaaccggctggtcaacttcagttggtgaaagtggtaagctggtggatgtcgggtggccttcagtgtgggtccgtgttgtgaccagctgggccactgctggtctcttcatctggtcccttgttgctcccattctcttccccgaccgtgagttctgagctaatgcatctacttgagattctgaataacttttcatgaatcttcaatttgtaaaaaaatattcgatctttctactataatagaacatcgtgtgcttaatcacgaatggcctttgttggcccttctggaatatgaagatgatataaataaattccttttttggaaaaaaaaaaaaaaaaaagggcggccgctttaaaggattccaggcttaggtaggggtgcatgcaacgtcaagctcttctatagtgtcacgtaatacaacgcgc

SEQ ID NO: 96455 - DNA, 531 bp, Arabidopsis thaliana columbia
  unsure (1)..(531): unsure at all n locations
nnnnnnnnncnnnnnnnnnnnnnnnnnnnnnnnnnnnnnnnnnnnnnnnnnnnnnnnnnnnnnnnnnnnnnnnnnnnnaccccacgcgtccggttccctgagagagagagagagacaacaccttcgcattcgctaactttctctgtaaccgccatgggtattaagggtttaacgaagcttttagccgacaatgcgcctagttgtatgaaagaacagaaattcgagagctattttggtcggaaaatcgctgttgatgctagcatgagcatttaccaattcctcattgttgttggaagaactgggactgaaatgctcactaatgaagctggtgaagtcactagtcatttacaagggatgtttaatcgaacgattcgtcttcttgaagctggaattaagcctgtctatgttttcgatgggaagcccccggagttaaagagacaggaactggctaaacgttactccaagagagctgatgcaactgcagatttgactggtgcaatgaagcaggaaacaaggaaaacattgagaaga

SEQ ID NO: 96456 - DNA, 1132 bp, Arabidopsis thaliana columbia
  unsure (1)..(1132): unsure at all n locations
cgaatcccggccgaccacgcgtccggacttttacaacgctttccaagaaagtaaattgttgcttgccttcgtgttcaagacttcgagcaccaatccagacctcatcgtcgttagcttcagaggaaccgaacctttcgaggctgccgattggtgcactgatctcgacctctcttggtacgagatgaagaacgttggcaaagtccacgccgggttctcaagagctttaggtctccaaaaagatggatggcccaaggaaaatattagtctactacaccaatatgcttactacaccatcagacagatgcttagagacaagcttggcagaaacaagaaccttaaatatattctaacaggtcacagccttggcggagcactagctgctcttttcccggcgattctggccattcacggtgaggatgagctgctagataagctagagggaatctatacgtttggacagccacgtgtaggagatgaggactttggtgagtttatgaagggtgtggtgaaaaagcatggaatagagtatgagagattcttctataacaatgatgttgtgcctagagggccctttgatgacaggtacgtgattctcatacaagcactatggaccttgcaattccttcaacagtctctacaaaggaaaggtaagagaagatgcaccaaatgcgaactacttcaacttgttgtggttaataccgcacctgttgactggtttgtgggagtttataaggagtttcatattacagttttggaaaggcgacgagtacaaagagaattggttaatgagatttgttagggttgtgggaatagtgttccctggtggctctaaccatttcccatttgattacgtcaactctactcgcctaggaggcttggttcgacctcctcctactactactcctgaggataaacttgccctcactgcttgaactctcattatttaataatcatatccactttatctgccctaatgacggttaaataattgcacttgagctttaatgtattctctgtgttatgtgtttttgtaaaaaaaaaaaaaaaaaggannnnnnnnnnnnnnnnnnnnnnnnnnnnnnnnnnnnnnnnnnnnnnnnnnnnnnnnnnnnnnnnnnnnnnnnnnnnnnnn

SEQ ID NO: 96457 - DNA, 461 bp, Arabidopsis thaliana columbia
attcagtctttaaagtcttaaaggatcttcattgtactttgaagtatagtttctgtaacaacaatggccaaaaccagagggtcttgttgtctcgtcaacgctctaatcgctatagcttttttggcgacagcccatttgtgtgaagctggcttgtctcagaaagaacaggacaaggtctcgaaattgcctggtcagaattttaatgttagttttgctcactactctgggtttgttgctactaatgagcaattgggaagagctctcttttactggttatttgaagccgttgaagatgctaagtctaagcctcttgttctctggctcaatggaggaccaggatgttcatctgttgcatatggtgaagcagaagagataggaccatttcacattaaggcagatgggaaaactccttgtccctaaaccaatattcttggggcccaaggggcaaaaatttttttccc

SEQ ID NO: 96458 - DNA, 674 bp, Arabidopsis thaliana columbia
  unsure (1)..(674): unsure at all n locations
gccggccccttagacgttcgatggccgttcggggccggaattccgggtcgacccacgcgtccgatgatgagggcgaagtaatgaagtgcttacacattgggttactttgcgtgcaagaaaactcttcagacagaccagacatgtcctctgttgtcttcatgttaggtcataacgccattgatcttccatctccgaagcatcctgcatttacggcgggaaggaggagaaacaccaaaactggcggcagctcagataattggcccagcggagaaaccagcagtactattaacgacgttactctcaccgatgttcaaggtcgttaagaagtgtattcctcttctttataatctaagaagactataggtatcaatttatagtaatacttgttatatagaaaattatgtgtttaaagcgtatgcaaacttatttgtataaagtttacaaatacctaatgaaaagaaaagttagcctcnnaaaanaaaaaaaaaaaaaaaaaaaaaaaaaaaaaaaaaaaaaaaaaaaaaaaaaaaaaaaaaaaaaaaaaaaaaaaaaaaaaaaaaaaaaaaaaaaaaaaaaaaaaaaaaaaaaagggggggggccctttaaaagaacccaattttacttccgggggcggggaaggtaaaattttttttttggggcccccaaaataaaat

SEQ ID NO: 96459 - DNA, 361 bp, Arabidopsis thaliana columbia
cacaaacacagagagattcatcatcgaatcataaagctctgttttcaagaagaaaatatgcatctgattaatgcggtggcggcggcgaggattttatccggaatcggacaatctaacggtaataacggaggagaagcgattccgtttggatcgtttgagtggatcacttacgccggaatatcttgtttcctcgtactcttcgccgggattatgtctggtcttactttgggacttatgtctcttggtcttgtcgagcttgagattcttcaacgtagtggtactcctaatgagaagaaacaagccgctgcgatttttccggttgttcagaaacagcatcagcttttagtgacactgcttctgt

SEQ ID NO: 96460 - DNA, 408 bp, Arabidopsis thaliana columbia
  unsure (1)..(408): unsure at all n locations
gggaaagctgctacgcctgcaggtaccggtccggaattcccgggtcnacccaggctgcggggtaagcgaaaaaacttgttggcaagagtgtccttttgtccaagtcccaaagattttgcttcagattgggcagtgaagatgcaacactttcccaatggtaagagtactctttacaatttttagatttgtgttggcacacatattgaaatatagggggtggaatattttggacgaaaaaaaaaaaaaaaggnnnnnnnnnnnnnnnnnnnnnnnnnnnnnnnnnnnnnnnnnnnnnnnnnnnnnnnnnnnnnnnnnnnnnnnnnnnnnnnnnnnnnnnnnnnnnnnnnnnnnnnnnnnnnnnnnnnnnnnnnnnnnnnnnnnnnnnnnnnnnnnnnnnnnnnnnnnnnn

SEQ ID NO: 96461 - DNA, 489 bp, Arabidopsis thaliana columbia
atcgttaactttcaaaacatcaaaaggaagagctccctagcgattggaaatgtgactggtagcaaattcaagctggagagacaaggtgatgctattgttgggttccatggacgggtaggctcttgtattgatggtatcggggtgtattacgctccacttccaccttctcctcctcctccagagaaactccaaggccaaggtggtgacggtggagattcttgggacgatggtgctttcaaaaatgtgaagaagatatatgtaggacaaggcgatgttgggattgctgcagtcaaatttgagtacgagacttacactagtgaggtgattctggcagaaagacatggaaaggaaacattgctcggatacgaagagtttgaactggactatccgagtgagtacattacagctgtggaaggttgtcacgataaagtaattggatctgaaactggagttataaccatgcttaagttcaagaccaacaaacgtaac

SEQ ID NO: 96462 - DNA, 599 bp, Arabidopsis thaliana columbia
  unsure (1)..(599): unsure at all n locations
tccccaagcngttncttngnntcacccccttttttcgngtccgganccaccccttttcagcgggtccgaaccctttccatnccctcccctttgcattttgcccccccattccccccggggttgggtccaaaaccgggtcncttttggagagggagttcttgtgagagccccgatgagcgtgatttccngcgaggntncagaccggtttgcgaggcctgaacccttccaagcaatggcgagttaggattttgagagccgggtttaagcccagcaactatttagcaaaccagatccatgaaggaggctaaggaaattgtgaggaaacgttaccatagagattttgtgatcgatagcgataacaattggatgcttcaaggatggaaaggaagagtcatctatgctttttcttgctggaaacctgctgagaagttcacaaacaataatttaaacatctgaaaaatgttacttctcaattacatcattttttgtttcccaatggttttgtagaatatgtttgatcccgtgagtggatgcaactcttttttcctgcaagtacatattgtattcaaatccttgtggaaatgataaattgtttaatc

SEQ ID NO: 96463 - DNA, 871 bp, Arabidopsis thaliana columbia
gtttaatgttccttttgagttcaacttcatagccaaaaaatgggaaaccatcactcttgatgaacttatgatcaatccaggagagacaacggtcgtcaactgcattcatcggttacaatacactcctgatgaaactgtgtcattagactctccaagagacacggttctgaagctattcagagatatcaatcctgacctctttgtgtttgcagagattaacggaatgtacaactctcctttcttcatgacgaggttccgagaagcgctttttcattactcttcactctttgacatgtttgacaccacaatacacgcagaggatgagtacaaaaacaggtcactgttggagagagagttacttgtgagagacgcgatgagcgtgatttcctgcgagggtgcagagcggtttgcgaggcctgaaacctacaagcaatggcgagttaggattttgagagccgggtttaagccagcaactattagcaaacagatcatgaaggaggctaaggaaattgtgaggaaacgttaccatagagattttgtgatcgatagcgataacaattggatgcttcaaggatggaaaggaagagtcatctatgctttttcttgctggaaacctgctgagaagttcacaaacaataatttaaacatctgaaaaatgttacttctcaattacatcatttttgtttcccaatggttttgtagaatatgtttgatcccgtgagtggatgcaactcttttttcctgcaagtacatattgtattcaaatccttgtggaaatgataaattgtttaatcaaaaaaacaaaaaagggcaggccgctctagaggatccaagcttacgtacgcgtggatgcgacgtcaaagtcttctat

SEQ ID NO: 96464 - DNA, 411 bp, Arabidopsis thaliana columbia
acgagattggtttgcaacagatctaaagcatctgatatagtcttccttgtctaaatgtttctcaacatgttagattttcagtttctacagacaaatctgtgcgctattttttcattcttggttttctctgttttggcaaattttggaggaaaggaatctgaagaggaaacaagaatggtcgtggtcgattggcttggtttgggattaggctctgttgctggagctttggtctcggaaggcctgaaagctttgatttcagaggcaatgaacgtgttagctttcaaatctgtgtctaacgagctcgcatcgacgatggagtcattgcttccggtgatcaaagagatcgtatcgatgcaagatggtctggtacttcaagatcttaaagacacgatcgataaagctcttttactg

SEQ ID NO: 96465 - DNA, 627 bp, Arabidopsis thaliana columbia
  unsure (1)..(627): unsure at all n locations
caaatattcaccacctaaaaagttcttncaaaatctcccttcttactcatttggattagtcctcaaagatgggtatccaattgatcggactctctcaggcaaagcaaaagcttcaaagaagcttatccgcgagaatcgcaagcctcttgcctacctcgggtcctaataagggcccaaagggtcatgtggccgtctatgtgggagagacttatcacaggaagagatttgtgatacctatatcgtatttaaaccacccattgttccaaggtttgttgaacctcgcggaagaagagttcgggttcgaccatcccatgggaggtctcaccatcccttgcactgaagattacttcaccgctctagcttctattctaagtggttcatgataagggagctcattgatcatcacaacattcattaagtttctttatacaaatctttgtgtttctcttaaaatgtatttaaggggggagagaaaataactcgagactgagaaactaagtgagtctctttcaatttttgatctaaaatgatcttgtgagttcttttaaccattccatttgtaaagaattcactatctgaaaaattaatctatgattctttttgtccattaaaaaaaaaaaaaaaaaa

SEQ ID NO: 96466 - DNA, 981 bp, Arabidopsis thaliana columbia
  unsure (1)..(981): unsure at all n locations
gacactttctttcagaatattcttgatgatcatctcaagcctggaagagagagctctgatatcatcgatgtgatgattgatatgatgaagaagcaagagaaagagggagactctttcaagttcaccactgatcatctcaaagggatgatctcggacatatttctagcaggagttggaacaagctccactacattgatatgggcgatgaccgagctgatcagaaacccgagagtgatgaagaaagttcaagacgagattcggacaacacttggggacaagaaggagagaatcacagaagaagatttaaaccagcttcactacttcaagctcatggtcaaagagatattcaggttacatccagcagctccacttttgctcccaagagagacattgtctcatgtcaagatccaaggctacgatattcctgctaaaacacagatcatgatcaacgcttacgcgattgcacgtgatccaaaactatggacaaaccctgatgagtttaaccctgataggttccttgacagctccatagattacagaggactgaactttgagctattaccgtttggatctggtaggaggatatgtccagggatgacaatggggatcgccattgttgaattgggactattgaatttgctttacttcttcgactgggggctaccagagaaggaagaagccaaggagatcatcaccgggaatgaagttgctcttgaccttgttcaagtttttctccactgaatgtgttttggttatggaatgtttgtactacactaagcttgattctaaattaataacatcttacaagtactgaaaatagtagacagtggacactatggtttatcttccattagaaacaattaaattataaaatcatttttgttaaaacaaaaaaaaaaaaaaaaaagnnnnnnnnnnnnnnnnnnnnnnnnnnnnnnnnnnnnnnnnnnnnnnnnnnnnnnnnnnnnnnnnnnnnnnnnn

SEQ ID NO: 96467 - DNA, 823 bp, Arabidopsis thaliana columbia
  unsure (1)..(823): unsure at all n locations
cnnnnnnnnnnnnnnnnnnnnnnnnnnnnnnnnnnnnnnnnnnnnnnnnnnnnnnnnnnnnnnnnnnnnnnnccacgcgtccgcttgcatgcaacacagtttgtgacttttgttttgttttacgtcaggacatatttctagcaggagttggaacaagctccactacattgatatgggcgatgaccgagctgatcagaaacccgagagtgatgaagaaagttcaagacgagattcggacaacacttggggacaagaaggagagaatcacagaagaagatttaaaccagcttcactacttcaagctcatggtcaaagagatattcaggttacatccagcagctccacttttgctcccaagagagacattgtctcatgtcaagatccaaggctacgatattcctgctaaaacacagatcatgatcaacgcttacgcgattgcacgtgatccaaaactatggacaaaccctgatgagtttaaccctgataggttccttgacagctccatagattacagaggactgaactttgagctattaccgtttggatctggtaggagggatatgtccaggggattgacaatggggactcgccattgttgaattgggactattgaatttgctttacttcttcgactgggggctaccagacgaaggaagaagccaaggagatcatcaccgggaatgaagttgctcttgaccttgttcaagtttttctccactgaatatgtgttttggttatggaatgtttgtactacactaagcttgattctcaattaatatctttctaccagtaaaaaaaaaaaaaaaaaagggcgcgccgctct

SEQ ID NO: 96468 - DNA, 1838 bp, Arabidopsis thaliana columbia
gctggtacgcctgcaggtaccggtccgtatattcccggggcgacccacgcgtccgtacggcccacgcgtccgactaacacaaaagaaaagaaaaaaaaaacagagtatcaaacatgtcaatcttgctctgtttcctctgtcttttacctgttttcttagtttctttatcaatcttgtcaaaaaggctaaaaccctcaaaatggaagcttcctccgggaccaaagacgctcccgatcatcggaaacttacacaacctcacaggtttgcctcacacatgttttcgaaatctctcacaaaagttcggaccagtgatgcttctccacttcggattcgtccccgtagtcgtgatctcatcgaaagaaggagcagaagaagctctcaagacccaagatcttgaatgttgcagccgaccagagactgtagcgacaagaatgatctcttacaacttcaaagacattggattcgctccttacggtgaggaatggaaagcgttgaggaagctcgtggttatggagctcttgaacacgaaaaagtttcagtctttcaggtatataagagaggaagagaatgacttgttgatcaagaaactaaccgaatccgctctgaaaaaatcaccggtgaatctgaagaagacccttttcacgctagtcgcgagtatcgtgtgtaggctcgcgttcggggtgaatatccacaagtgcgagttcgtagacgaggacaacgttgctgatctagttaacaagtttgagatgctagtcgctggtgttgccttcaccgatttcttccctggagtgggttggcttgtagaccgaatctcaggtcagaacaagacactaaacaatgttttctcagaacttgacactttcttccaaaacgtgctcgatgatcatattaagcctggaagacaagtatctgagaaccctgacgtcgtagatgtgatgcttgatctaatgaagaagcaagagaaagatggagaatctttcaaactcacaacagatcatctcaaaggaatcatctcggacatatttcttgcaggagtaaacacaagcgccgtcactttgaactgggcgatggccgagctgatcagaaacccgagagtgatgaagaaagtgcaagacgagattaggacaacacttggggacaagaaacagagaatcacagagcaagatctaagccaagttcactacttcaagcttgtggtcaaggagatatttagattacatccagcagctccacttttgcttccaagagagacaatgtctcatgtcaagatccaaggctacgatattcctgtgaaaacacagatgatgatcaacatctactcgatcgcacgtgatccaaaactatggacaaaccctgatgagtttaaccctgacaggtttcttgacagctccatagattacagaggactaaactttgagctgttaccatttggttctggccggagaatctgtcccgggatgacgctgggaatcaccaccgtggaattgggactgttgaatttgctttacttcttcgattgggtagtgcctgtagggaagaatgtgaaggacatcaacttggaagaaacaggatcaatcattattagcaagaagacaacccttgagcttgttccacttgttcatcattgaaatgacgatcatgaaacaattagtccataagattatgtatttgtatccagcttctttatcttgatatggttgtaatcataatctgaatagtgatatcaacaaaaaaaaaaaaaaaggaacccaaaaaaaaaaaaaaaaaaacccaagggcggccgctctagaggatccaagcttacgtacgcgtgcatgtgacgtcatagatcttctata

SEQ ID NO: 96469 - DNA, 240 bp, Arabidopsis thaliana columbia
cccacgcgtccgcggacgcgtgggctttttatcaaaattctctctttttcccatcaaagattcacagatttgttgtagtctcgccgttaagatggcgccggcgacggagcagcagagctcgttcttgagtcgactgagccgtcgcaatcaagtggtttccatggaggttaaccacgagctagagcaagaagaactcgatgattttcaagaactcgtacctgaacgtgtcgcggagctctt

SEQ ID NO: 96470 - DNA, 510 bp, Arabidopsis thaliana columbia
ctcctcgcctaaacatgatgctttacaggatgacttaacaacgacacttgtacaacaatgtggtcaatctcaaaccactgtccaaagaatcattgaaacagcaggtgaaaacgaagcccttcttttcgaagccttgaatgtgaacgacgagctagtgaaaacgctgtctaagtatgaggagatgaacaaaccctctgcaccgctaacctcacatgaaccagccatgattcccgttgctgaagagcccgatgactctccaattcatggaagagaagaatctctggttagaaaatcttctggtgttcgaggtggattccatggagggggtggtagtgggagatgacatgatggatgatcttgattgagatgatattcggtaagaaaaacggctgtgattcttcgactaatccagatcatgacccaaaaaaggagcagtcctcatccaaaaacgacgatctcattcgattctgagacggatactttcaggcgacataataaatcttttataat

SEQ ID NO: 96471 - DNA, 555 bp, Arabidopsis thaliana columbia
  unsure (1)..(555): unsure at all n locations
atcnagacntgacccngtaacgacccttttcgacctgattgacgcgnctgtgaacnctgctagttgngggatgaccaacccctntgcaccgctacctcacatgaccagccatgattcccgtgctgaagaccccgatgactctcccattcatggaagagaagaatctctggttagaaaatcttctggtgttcgaggtggattccatggagggggtggtagtggagatcacatgatggatgatcttgatgagatgatattcggtaagaaaaacggctgtgattcttcgactaatccagatcatgacccaaaaaaggagcagtcctcatccaaaaacgacgatctcattcgattctgagacggatactttcaggcgacataataaatcttttataatgtatttggtgtttaattggtagtatgaatgaacaggttcaatgtaagtaatctgtgtttggagatctctttgacttgtgtgatggtttataaaggagatttgttatgatggcacatgtgatttgaaaggccccccgctctagaggatccaagcttaggtag

SEQ ID NO: 96472 - DNA, 416 bp, Arabidopsis thaliana columbia
ctctgagatacaagaaggaggaaattgttataaccccaactcgttgagagcacatgcctcttttgccttcaatagttattaccagaagaatccaatccctagtagttgcaattttgatggaactgctatcactatcagtgctgacccaagtttaggttcatgccactttccatctacaagcacgagtgaatcgatattgaacgtaacaagtgaagatggattagggcttttcgggggaataccatctcatccaactcccaagcctgaagcttcaacctcccccccaagaactttggtctcatttctctacttcctttgcttttgtgttttaaaaccccttgttataaccttaacaaagtcatgtaataaaaaataggcaactttttttagggtaattcaagccgatagttttttcc

SEQ ID NO: 96473 - DNA, 539 bp, Arabidopsis thaliana columbia
tacgactcactttaggggaagcacgtacgcctgcaggtaccggtccggaattcccgggtcgacccacgcgtccgcccacgcgtccgattttcttagaattcagtctctctccttccttagcaatggcttgtagactatatttggctttgatcttctcttgcgtttatctgatttgcctgtcaagtcaacaagaaaccgggtttgtctacaatggcttcgagcaagcagatctttttattgatgggatcgccaaaatactacctgatgggcttttgcagttgacaaatactacagagttgcaaatgggtcatgctttcttcaagaagccgtttgattttgatccatcttcatcactatcgttctatacacattttgtgtgtgcgcttgtgcctcctaagttgggagctgatggtggccatgggattgtctttgttgtatctccttccattgatctctctcatgcatacgcaactcagtacttgggggtcttcagcaacttaacaaatgggacttcctcttcacatctgctagctattgag

SEQ ID NO: 96474 - DNA, 448 bp, Arabidopsis thaliana columbia
acccacgcgtccgaaacgacacaccattcctacactaacacttatatcaccaacacattgtgttctactatacataaaattcagttcctaagtatttttgttttgttttgtgagatcgatggagagttacttgaggaaatggtgtttagtttctgtgtgggttttgcttttaggtttagggtttaaggtaaaagcagagcctcaagttccatgttacttcatctttggtgattctttggttgacaatggaaacaacaatcgtcttagatctattgcaagagccgattatttcccttacggcatcgatttcggcggccccaccggccgttttttccaacggcaggaaccaccgtcgcacggttctcacttggggctaacttgggatttgataactacattccggcggaataggactttttgagtgggccaaggggtaacttaaaggggg

SEQ ID NO: 96475 - DNA, 452 bp, Arabidopsis thaliana columbia
  unsure (1)..(452): unsure at all n locations
cggaatnccggggccgccccagccgtccgaggaaaaagggaggcattacctaaaaaggggtggttctctcaacctctggttcatggggggccagaaggctggggctcgttcatcccagtccgctgccttaggttttctaagaatccgttccccaaaaggtgggtcgtacctggggctgggccgggctttaacagtgatcatgaagccgcaaatcgcccgttttttcagtttccaccttccctatgggaggaccgcttcctttccatttccgccaaccagccggaaattgttggcctggggggagatttcggggcccttaaggctaaagggggtgaaaggctggttttgtatggccgtaaaggaggggattcactggatccatctgctagtcagcctgggagccgcttaccatttcgggaaacagatcgaagaattcctgaaagttgatttcg

SEQ ID NO: 96476 - DNA, 570 bp, Arabidopsis thaliana columbia
  unsure (1)..(570): unsure at all n locations
atgatacttccnnnnnnnnnnnnnnnnnnnnnnnnnnnngctgggacgcctgcaggtaccggtcccctattccgggggcgaaccacgcgtccgacggctgcgagaagacgacagaagggtacgggctgctgctacctcgtctgcatctgcggtttcttcctgccgcatctgcagccgcagcctcgttcgccgccgccgcccctgtggctgccgcgccccccgtcgtgctgaaaagcgtcnatgaggaggttgtggtggccgaggaggggatcagggagaagataggtagcgtacagctgacggattccaaacattctttcttgagctccgatgggagcctccctgttcatgccggtgaaagattaggccgtggtatagtgacggatgctatcactactcctgtagtcaacacatctgcctacttcttcaagaaaactgctgagcttattgacttcaaggagaaaaggagtgtgagtttcgagtatggtcgttatgggaaccctacgactgtggtacttgaaagaaagataagtgcacttgaaggggctgaatcaacnttggttatggcat

SEQ ID NO: 96477 - DNA, 2150 bp, Arabidopsis thaliana columbia
  unsure (1)..(2150): unsure at all n locations
atacgactcacttagggaaagctggtacgcctgaaggtaccggtccggaattcccgggtcgacccacgcgtccgaagcaatttggcttcttaaaaacccgcccatggagaaagccctcacgcaccttcaacccacaaacaaaaagagagagaagagaacgagagaatcattgagaaacgaaacaacaatggccgtctcatcattccagtgccctaccatcttctcctcctcctcaatctccggctttcaatgccgttctgatccagatctcgtcggttctcccgtcggtggatcatctcgccgtcgtgtccatgcctccgccgggatttcttcctcattcaccggggacgctggattatcctccaggatcttaagatttcctcctaatttcgtccgtcagctgagcattaaagcccgtagaaactgtagcaacatcggtgttgcacagatcgtggcggctaagtggtccaacaacccatcctccgcgttaccttcggcggcggcggctgctgctacctcgtctgcatctgcggtttcttccgccgcatctgcagccgcagcctcgtccgccgccgccgcccctgtggctgccgcgcctcccgtcgtgctgaaaagcgtcgatgaggaggttgtggtggccgaggaggggatcagggagaagataggtagtgtacagctgacggattccaaacattctttcttgagctccgatgggagcctcactgttcatgccggtgaaagattaggccgtggtatagtgacggatgctatcactactcctgtagtcaacacatctgcctacttcttcaagaaaactgctgagcttattgacttcaaggagaaaaggagtgtgagtttcgagtatggtcgttatggtaaccctacgactgtggtacttgaagataagataagtgcacttgaaggggctgaatcaactttggttatggcatctgggatgtgtgcaagcactgttatgcttttggcattggttcctgctggtggacacattgtcactactactgattgctacaggaagactaggatcttcatggagaattttcttcccaagttggggatcactgtcactgtgattgatcctgctgatatcgcagggcttgaagctgcagtgaatgagttcaaggtatctctgttcttcactgagtccccgacaaacccattccttagatgtgtcgacattgagctagtttcaaaaatatgccacaagaggggaactctggtttgcattgatggcacctttgcaacacctctgaatcagaaagcccttgctcttggtgctgatcttgtcgtgcactctgctacaaagtacattggaggacacaatgatgttcttgctggatgcatctgtggttcactgaagttggtttcagaaattcgcaatctgcatcatgtgttgggaggaacacttaacccaaacgctgcgtacctaatcatccgaggcatgaagacattgcatcttcgtgtacagcaacagaattcgaccgcttttagaatggccgaaattttagaggcacatcctaaggtgagtcatgtgtactatccaggccttccaagtcatcccgaacatgaactcgccaagcgacaaatgactggttttggaggtgtggtcagtttcgagattgatggagacattgaaacgacaatcaagtttgtggattctctaaagattccttacattgcaccatccttcggtggctgcgaaagcattgttgaccaacctgctatcatgtcctactgggatctgccgcaagaggagagactaaagtatggaatcaaagataacttggttcgtttcagctttggagttgaagactttgaagatgtcaaagctgacattcttcaagctctcgaagccatctgaaaatgacacatcacacaaaaacgctgtcgtttctttgtcctttatttatctctctttgctgttttcagtcaccgtaataatgatgtctttgaactattgttccgcgacatttacgttccgaaataatcgtgtactattatgatgtttgttgtgctatataataaattctgtttagttcccctgacgtagaaaaaaagnnnnnnnnnnnnnnnnnnnnnnnnnnnnnnnnnnnnnnnnnnnnnnnnnnnnnnnnnnnnnnnngacacgaaat

SEQ ID NO: 96478 - DNA, 925 bp, Arabidopsis thaliana columbia
  unsure (1)..(925): unsure at all n locations
gggagacaaaccaaaaaaaagcctaaaaagccgaccttttttctttctttctctcctctacctctcagcttctgctggatctctccagcagacacgatcttgttcggagagattcgtaggggaccgatctatcaaggcttcaagggcaaacagaaatggaccacgacaagacaggatgccaaagcccacctgaaggtcccaagctatgtactaacaactgcggtttctttggaagcgctgccacaatgaacatgtgttctaagtgtcacaaggatatgttgttccaacaggagcagggcgctaagtttgcatctgcagtgtctggaacatcgtcatccagcaacatcataaaggaaacctttaccgctgcgttggtcgatattgaaaccaaatccgttgagccgatgactgtttctgtacagccatcctctgtccaagtcgttgcagaggtagtagcaccagaagaagctgcgaaaccaaagggaccaagccgatgtactacttgcaataagcgggttggcctgactggattcaaatgtcgctgtgggagcctcttctgcggaacacaccgctatgcagacgtacatgactgctccttcaattaccatgctgctgcgcaagaggcgatagctaaggcaaacccggttgtgaaagcagagaagcttgacaaaatctgaaaatctaagtaaacttctctggtttcatcaggtggcctggtgtttccttctcctgtctgtgtctggttcaagtattctcatgttaaaaaggttttatataaggtcgaatgaaagcgtgcttgatctttagcgtcttccatctctctgtggtgtggaactttctattatctgtgtttgcaagcagaggaacgtgctcttaaaaaaaatnctttttggtggttnncttnctacctattttngnngccctg

SEQ ID NO: 96479 - DNA, 581 bp, Arabidopsis thaliana columbia
  unsure (1)..(581): unsure at all n locations
ggggaaanctttcccccccggttccgtccggantcccgggggnccccccgntccnanattnccangccntccccaaagggcgntactnaggcaaccccngtnttaaacccggngaagcttgccaaaatctgaaaaactaagtaaacttctctggtttcatccaggtggcctggtgttcccttcccctgtctgtgtctggttcaagtattctcatgttaaaaaggttttatataaggtcgaatgaaagcgtgcttgatctttagcgtcttccatctctctgtggtgtggaactttctattatctgtgtttgcaagcagagaaacgtgctcttaaaaaaaatgctttgtgtgtttttatctttctactatttttgagcactgtgttattgtttcctgtttggtctgtatcatattgagattgtctctgtagctacatgaagcttatttaaaaaggcctgtgtttgtccttcaaaaaaaaaaaaaaaaaaaaaggnnnnnnnnnnnnnnnnnnnnnnnnnnnnnnnnnnnnnnnnnnnnnnnnnnnnnnnnnnnnnnnnnnnnnnnnnnnnnnnnnnnnnnnnn

SEQ ID NO: 96480 - DNA, 678 bp, Arabidopsis thaliana columbia
  unsure (1)..(678): unsure at all n locations
nnnnnnnnnnnnnnnnnnnnnnnnnnnnnnnnnnnncttcatgcttcgatcaatcaaaccatcatcaaacccctcgcgtccggaccaacagtgttcctgtaggaagcggcaaacttgcagctctgttctcttgaaatggagaaaacagtgagatgtgttcggtggggttatgaggttaatacctcttctgatgcttgcatcgacgcaattaactcctattttcaacaggttcttagttatgggaggaagaggaaagtgattctagaagcaccactctacgataaagattgtgttttgggcagcattttagctgctcatttcctttcttcatctgatccttctagagctaattcctatgttgaagctgcggcatctaatctcgaacaatctacaccttatgagaaagcggtttacgaggctgttacttacctaatctctgaggatagggatgacgacttggcttttgaaatgcacaccaagctacttaaaagattcccaaaggacttggcttctttgaaaagagcgcagcttttaagtttctacatgggtcaacctgatcccttcttgggtcttgttcagcaggttctacctgcgaatcaagaagaaagttatattcatggtttacttgcgttcccattgttagaacttggtcgaatggaagaagctgcggcagcttcc

SEQ ID NO: 96481 - DNA, 460 bp, Arabidopsis thaliana columbia
ccggggcggcccgaggcgtccgaactttaaaggttcaatatttcttcaactctatctgccctcttttgccactttattacatgtatgtatattagttcaatacttcgatctttttctcttacagattaactatttacatgtaaaaaaaatgatttgtctcttaacttttttgttgggatatactgtattcttgaattaagttgttgagataatgtttatctccgactccaaagtgggatctaattagttttcttcttcttcagttcttctacatatattagatggtggggaggatgagactaggaaagattgtggaaggcttgaagtccaagataaagactggtctaaggatgccgaagagatcatcattatcatcatcatcatattcatcttcatcatcatcgtcatcatcatcatcatcatcgtatgagaagatagagaagagtgagagtatgagaat

SEQ ID NO: 96482 - DNA, 443 bp, Arabidopsis thaliana columbia
accggaccggaagggccgacccgagcgacccgagcggtcaaaaatactcgttggagaagtagccttacgtaccagttcattaaatcggctttccgaacaagctgctcgcaaccctgaggattttcacatcagagatcaaatacagaaattagaagatgaaatcagcgaaaagaaggttcaaatacgtgttctcgagcaacaaattattgagattttcggaatgactccctatgcctcagattctcttggaatgccccaggttctgtcgaagctcacgatgcaactaaatgagaaaatatttgaccatgagataaagtctgcagacaataggatacttcaggagcagctgcagatcactaaatcagaaaacgctgagatgcaagagacaatcattctactaagacaacaactagattcgttagccgagagacattcaacacagc

SEQ ID NO: 96483 - DNA, 432 bp, Arabidopsis thaliana columbia
  unsure (1)..(432): unsure at all n locations
agaatntnaaccaacaaagcaaaacatgaaaggcacattcactaacttgcttgtgctccttctcattgcacttgtttgtgccaatgtcggtgctaggaaacttatctccgaagatacccaattcaaggatgaaaaatctttcctcggaggcggtggcagcggtgatggcttagggcttggccttggtggaggagctggtcttggtgggcttgggattggggctgggatcggcgcgggagccggactagggttaggtggaggcggtggtggactcggaggtggtggcggtggactcctcggtggaggcggctttgggggaagagccggtggcggactcggtggccttccttgaacgtattgacaagtgtgcgtgtgagagctgattctcagcttattactaattaatttaggtactttcattctcttaataaa

SEQ ID NO: 96484 - DNA, 516 bp, Arabidopsis thaliana columbia
  unsure (1)..(516): unsure at all n locations
ggaccagatgggatcgtgaacagagaacaaagagtcgtgtggctcaagctgtagctgatatgatttaccgtgatcatcaatctcggattgaacaggaacagagaactaggatttctgagactgttgatactgagataaggcgttgggcaactggaaaagaaggaaacatgcgtgcgctgttatcttccttgcacatcgtactctggcccggatgtggttgggaggctgtttccataacagatttgatcacattcgccagcagtcaagaaagtctatagataggcaacactgtatgtccatcccgataaagttccagcagaaagggagccaccccttgaaccaaaagtattatcgcccgaaaanggtttttgaccatttttgaaggnaagctttgggaccaagttcaaccaagggggngnnccncttttagncccnnatanctggngannaaaggtggnccccctggnnaancaataattcggcccggganttcccccgngnctttcctgggttaaa

SEQ ID NO: 96485 - DNA, 524 bp, Arabidopsis thaliana columbia
  unsure (1)..(524): unsure at all n locations
nnnnnnnnnnnnnnnnnnnnnnnnnnnnnnnnnnnnnnnnnnnnnnnnnnnnnnnnnnnnnnnnnnnnnnttcccgggaatgtttcctcgcaatcatcatcatcatcaccatcttcgtcttcttctttgaaacctccagcgacttcctcgtagttctctcacttatacacttactaatacagagtaacagagagagacagagtggactcttcttagagtaagatgggaggtgtgacttcttcaatggcggcgaagttggcgttttttcctccgaatccgccgtcgtacaagctggtcagagatgaaacaacggagctttttctaatgagcccttttccccatcgagaaaatgtcgacattttgcggctgcccacgcgccgaggcaccgaaatcgtggccatgtacatcagatacccaatggccgtcaccacccttctctactctcatggaaatgctgccgacatcgggcagatgtatgagctcttcatcgagctcagtattcacctccgcgtcaatttgatggg

SEQ ID NO: 96486 - DNA, 704 bp, Arabidopsis thaliana columbia
  unsure (1)..(704): unsure at all n locations
gcaaaacnccccgaaacttccgntnggcncggcnaacccccaatgggntttttaaacccccgnggaaacccttttttttgaannantnttaaatgtttcaaaaaattcccnaaagctnccctttctaacgggcgaattacgtnctttcaggccccagcttcaacaaaccccgattcgcttctacgttcgtacaaaacccggaccctaaagtgttttccggcgaaatcttatctcccgggaaaccgagaagttttaagctagctctcacgggactgcccgatgagttctacgatacagagtgggatctgctgatggtcgatgctcctaaaggttacttcgcagaagctccgggaagaatggcggcgattttctcggcggctgttatggctaggaaccggaagaaaccgggagttacgcacgtgttcttgcacgatgttaatcggagggtggagaagacttttgccgaggagtttttatgccggaagtatagagtcaacgccgccgggaggttatggcattttgctattcctccggcggctgcgaacgctacgattgactctggtgattataggttttgctaagattgcgacacgatttatcttcttatttcctcttttgcccttttattttactttgttgaggaattttatgacagcattgggttcacttattatctgttttagtgccggcagttttggataagc

SEQ ID NO: 96487 - DNA, 499 bp, Arabidopsis thaliana columbia
  unsure (1)..(499): unsure at all n locations
ctggggtttcggttttcccctggggttttggtttgctgggtttncaagtttgtcaaaaccggaggcaagaacagggctatcgaatatgacattttcattgagtgctgtctccctgttaaggggctgccagacaagttcaaggagaaggacacagcatactcaggctcagcttctttcatctacgaaagcttcatgctctccgtcctccccttcctcatcgcataagttttttttacggtaacccgtttgcacatcttctgtttttttgtatgttctttgttgtgtgaatgctattgtcaatggaagcttttccggtttagttgaactcaagagtttataaaaaaaatgtgaaatgtatagtgagagatcttgtgttataaaataatcaaccaactcattatggttggatattaaaaaaaaaaaaaaaagggcggccgctctagaggatccaagcttacgtacgcgtgcatgcgacgtcaagctcttgtatagtgcacct

SEQ ID NO: 96488 - DNA, 1418 bp, Arabidopsis thaliana columbia
  unsure (1)..(1418): unsure at all n locations
aggctacgccggacctatacgactctacttagggaaagctggtacgcctgcaggtaccggtccggaattcccgggtcgacccacgcgtccggcaaaagtcatttaactttcctaaaacaatggctttaaaacatatgcaaatctttctcttcgtcgctatattttcatcattctgtttctccatcactctttctcgtccactcgacaatgaactcatcatgcaaaagaggcacatcgagtggatgactaaacacggccgtgtctacgcggatgtgaaggaggaaaacaatcgctacgttgtgttcaaaaacaacgtcgaacgcattgaacatttaaatagcattcctgccggaagaactttcaaacttgcggtaaatcagtttgctgatttaaccaatgacgaatttcgttccatgtacactggtttcaaaggtgtctcggcattatctagccaaagccaaactaaaatgtcgccgtttaggtaccaaaacgtttcttctggtgctttgccggtttctgttgactggaggaagaaaggagctgtgacccctatcaagaatcaaggcagctgcggatgttgttgggcgttttcagcggttgcggctattgaaggagcaacacaaataaagaaagggaaacttatatctttgtcagaacaacagcttgttgattgcgacacaaacgattttggctgcgaaggcggtttaatggatactgcgtttgagcatataaaagcgactggcggcttgacaactgagtcagattatccttacaaaggcgaagacgctacttgcaattccaaaaagaccaatccaaaagcaacttctattacaggttatgaggatgtcccggttaatgatgagcaagcactgatgaaggcagtggcacaccaaccggttagcgttggaattgaaggaggtggttttgatttccaattctattcgtctggtgtgttcactggagagtgcactacgtatcttgatcatgcagtaactgcgattggatacggcgaatctactaacggatcaaagtattggatcatcaagaattcatggggaacaaaatggggagaaagtggatatatgaggattcaaaaagatgtcaaggataaacaaggactatgtggtcttgccatgaaagcttcttacccaactatatgaattcaaaaccgtgttaagcttttaattgtgtatgtttgtgtgggattgatgtctaaaaataatttgaattgttttatgtaaaaaaattgtatttagactgttgtatgcattttatgaaattgtaagcttatgtaatgcaaaggattgataattttcgnnnnnnnnnnnnnnnnnnnnnnnnnnnnnnnnnnnnnnnnnnnnnnnnnnnnnnnnnnnnnnnnnnnnnnnnnnnnnnnnnnnnnnnnnnnnnnnnnnnnn

SEQ ID NO: 96489 - DNA, 413 bp, Arabidopsis thaliana columbia
accattgggaaacgattcgccgaaatcattgttgagaacactgagtccaaccgccaagcttaccgtgagctcctcttcacttcccctggcagttacccttgcctctctggtgttatactcttcgaggaaaccctctaccagaaaacctctgatggcaaacccttcgtcgatctcctcatggtccgtctcggaaaaagcaaactccagctctagtcttagtcattgggtccaagagttgcagagttgaagctcttgacatgacccaaatggaacttactgtttcagtttggatctgatttttctttggatcaggagaacggtgttatccccggaatcccagtggacccgggtcttggttgatctagcagggaccaacgccgcccccactactcaaggtctagactcgcttggtg

SEQ ID NO: 96490 - DNA, 1091 bp, Arabidopsis thaliana columbia
  unsure (1)..(1091): unsure at all n locations
aacttactgtttcagtttggatctgatttttttttggatcaggagaacggtgttatccccggaatcaaagtggacaagggtttggttgatctagcagggaccaacggcgagaccactactcaaggtctagactcgcttggtgcacggtgtcagcagtattacgaggcaggagcccggtttgctaaatggcgtgcattcttcaagattggggccaccgagccaagcgttctctccatccaagaggacgccagggtgctagcccgctatgccatcatctgccaggagaatggacttgtcccgatcgtcgagccagaggtgctgacaggtgggagccacgacatcaagaaatgtgcggcggtgactgagacggttcttgctgccgtgttcaaggccttgaactaccaccatgtccttcttgaaggcactctgcttaaaccgacatggtcactcccggctctgacagcccaaaggtgcaccgaagtgaatagcggaatacacagtgactgctctgcgccgcacagtcccccctgcagttccaggaatcgtgttcctctcaggcggccagagtgaagaggaagcaacactaaatctgaacgcaatgaacaagctcgatgtgttgaagccatggactctcactttctcatttggccgagccctccaacaaagcactctcaaggcttgggcaggtaagacagagaatgtagccaaagctcaggccactttcctgaccaggtgcaagggtaactcggacgctaccctcgggaaatacaccggcggggcttctggtgactcggccgcctctgagagcttgtatgaggaaggatacaagtattaggagcgtttaaatacgggtgtcgccttttatacgatttgaatatatgtcaaatgtttcgtaggcgtttaactgtttaaatttttatcgatttggtttagcgtctgtgtaatgttcttaaactgtgttgtgttttttgtgatggtttctataatattttcgcgccnttgcaaaacggntngntcaaancnnnnnnnnnnnnnnnnnnnnnnnnnnnnnnnnnnnnnnnnnnnnnnnnnnnnnnnnnnnnnnnnnnnnn

SEQ ID NO: 96491 - DNA, 914 bp, Arabidopsis thaliana columbia
  unsure (1)..(914): unsure at all n locations
ctcactttagggaaagccggtacgcctgcaggtaccggtccggaattcccgggtcgacccacgcgtccggcatttggtagtgtcgaagcaatcattcctcgggctctcctttctaactgcattcctagaaaatattaccctaaaggcctttgtcttggcatcctcgtcctcttcagcaggaactcatctgtcttggaagaattattaccatgtctgcttttgtcagcaaatacgaagatgagctgatcaagacggccaagtacattgcaacgccgggaaggggcattttggcggcagatgagagcacagaaaccattgggaaacgattcgccggaatcaatgttgagaacactgagtccaaccgccaagcttaccgtgagctcctcttcacttcccctggcagttacccttgactctctggtgttatactcttcgaggaaaccctctaccagaaaacctctgatggcaaacccttcgtcgatctcctcatggagaacggtgttatccccggaatcaaagtggacaagggtttggttgatctagcagggaccaacggcgagaccactactcaaggtctagactcgcttggtgcacggtgtcagcagtattacgaggcangagcccggtttgtaaatggcgtgcttcttaagattgggccccgaccaacgtctctcatcaaagacccaggtgtacccgcttgcatatctgcagagatgacttgtccatcgcgagccaagtctgcagtggagcacacatcaaatggcgcgggactaacngtctgctgctgtcaagcttactacactgtctctgaagacttgttaactactgtactccgctcacagcaagtgccgactatggatccgtatgttggcgcagcacacatcggatggtcttagctcggcaagacactatta
